United States Patent Application Publication US 2022/0090207 A1 - sequence listing, part 19

SEQ ID NO: 241326 - DNA, 36 bp, Homo sapiens; identical to SEQ ID NO: 205892
  chr20:60639843-60639879
  hyper

SEQ ID NO: 241327 - DNA, 52 bp, Homo sapiens
  chr20:60697691-60697743
  hyper
caccgcggcccgacgcaccccggccgccgccatgagcggctcctcaggcacc

SEQ ID NO: 241328 - DNA, 180 bp, Homo sapiens; identical to SEQ ID NO: 205893
  chr20:60757905-60758085
  hyper

SEQ ID NO: 241329 - DNA, 315 bp, Homo sapiens
  chr20:60794655-60794970
  hyper
ggccgggtcccctggtggggcgtgtgcctgcgggagccacccaggtccgtgttccagtccccgctggcccggccacgctgggcgcccctgggtccccagcggccaggggctggggatttaccgacgaggaagtcggagatggcgaggttgagcaggaagaagttgttctgggtgcggaggctcgagtcggccacgaaggcgagcatgaccagcgcgttgcccagcaccgtggccacgatgagcagcgccatgagcgcggccagcaccgcggtccaggctgccgagaagccgcgcgccccgcccgccgccgccgcc

SEQ ID NO: 241330 - DNA, 93 bp, Homo sapiens
  chr20:60813107-60813200
  hyper
gtggaagcagctacgccccagctatcgcacggtccccagcatttgtaggaaaaagcccccagggctttgggtagcctcgcaggcccgcactgc

SEQ ID NO: 241331 - DNA, 96 bp, Homo sapiens
  chr20:60877567-60877663
  hyper
tgggtccccaaagcgctgaacccatggtcacttctatgcgtagccctggtgcccgccgcccacagccggaccgcactcctcggcctccgcctaacc

SEQ ID NO: 241332 - DNA, 724 bp, Homo sapiens
  chr20:60942652-60943376
  hyper
gcgctccccacgacgccctggcccccagagcgcccaccagctcctcccagcccaggggcccactctttgttcccctaacttgggtgcaccactcggctgcccccgctcctcccccaacagcgtccgtcctgctggctgcgggaaggtgccctctgcacccgcgaatgaccatctgcagaggaacggggcagcctaggtgggaaccccctgcttcctggggcagccaggtcaggttcaactcggcctggctcccgcctgccccagcagggcttaaaaatactctcagatagggaaataggggcaggagggactggcctgcagctgcagccccctttagaggacgggggcggtgctcatggccccacagccgccaaattggctcttaaggaggtcgggggctctggtcacagctgctgagcacctgctgggtgcctggaagcacctgtgctccggggcccggtggactccaccagctctctcggcctggcctccaacccgctgcacagccgcgcacgcgttcctgccacgatcggcggctcgaggacgcctggcaaacagcacaggacctagaggccgagatcaggtcttcgtctgcctttgggtggctgcggccctgggtctcctacttcccttgggctccggggccaaatctgcctccagggaagccccgagggggtggcggcggggtggggctgcagctgccgagctggcagcaaacccccat

SEQ ID NO: 241333 - DNA, 122 bp, Homo sapiens
  chr20:60961539-60961661
  hyper
atggcagagtggtcgggtgtttcagattccacggtgggccggggtcttttcctaccctcgggagccgtctgaatttctcctctgccgagttcctgcgggtgtccttcgcccaccggcccggg

SEQ ID NO: 241334 - DNA, 158 bp, Homo sapiens
  chr20:60981895-60982053
  hyper
tcctgggctgatccggcccccgtccccgtccctgtaccccgcgtcctgggctgacctggccgggcccccactcacctctggcgctgcccatccaggccgaggccggtgggcacctgcgtggggctgagcaggccctggggcgcgggggtcctggcggg

SEQ ID NO: 241335 - DNA, 61 bp, Homo sapiens
  chr20:61274240-61274301
  hyper
ctgtcggagtggccggggcaggtgacctgggcaggtggcccggagcgcgcgcaggcgcagg

SEQ ID NO: 241336 - DNA, 53 bp, Homo sapiens
  chr20:61274663-61274716
  hyper
caggcttagctgccctagaccggccctagaccgggaacctggaagcagatctg

SEQ ID NO: 241337 - DNA, 911 bp, Homo sapiens
  chr20:61339790-61340701
  hyper
ttcccttcctagccggtgcgagaaattgcggagaacagggaagagggtggcaggaagggtctggtgcacgatacccgccgcgcccgctcggaatcctggttccctggagcgctcaccccagcccgccctgccccggggagcgcgagggggcgacccgccaggctgcacccgggcggggcggggatggcggcgggggctgcctccctcctccgccgccaccccccactgctgggcgcgccgcgcggccgccggctccgtggagacgcgcagagccgggagggcgcgggcgcggcgggaggtgtgcggggctggggtgcgcggagagcgcgagggaggagattctgagcgagggaggggagcgcgcccgggcagcagtgcgtgcgctcctcccggcgccacaagctcgccccgcgcagcccgagccgggctgggcgctgtcctcgggggcctggggaaccgcgcggtttggagatcggaggcacctggaacccgtggcaagcgccgagccgggagacagcccgaggaaccacgggttctggagctaggagccggaagctgggagtccggaggagagcggagcccggagcccggagcccggggcggcgcgtctgggtctggcgcttcccgactggacggcgcgcccgctggtcttcgccacgcgccctcccctgggctcccgttcatcggtccccgcctgagacgcgcccactcctgcccggacttccagccccggaggcgccggacagagccgcggactccagcgcccaccatgcgcctcaacagctccgcgccgggaaccccgggcacgccggccgccgaccccttccagcgggcgcaggccggactggaggaggcgctgctggccccgggcttcggcaacgcttcgggcaacgcgtcggagcgcgtcctgg

SEQ ID NO: 241338 - DNA, 129 bp, Homo sapiens
  chr20:61447799-61447928
  hyper
tgacgtggcctgaccacccggcccgtccaggtccacgggtgaggggccgcggtgggggtgctcccagcccagcaggcagcgctggacagtgaccccggagcgggaaccagggctgcgctgggcactgac

SEQ ID NO: 241339 - DNA, 433 bp, Homo sapiens
  chr20:61492377-61492810
  hyper
gttgagcgccccgcccggctcggggggctcggggccgcgcggcgcgggcggcggctcggcggggatgctgttgaagcggtcctccaggcggacgcgcacggccggcttggcccgggcctcgggcgcgccgtcgggtccagccgcagccgcagccgcgcccgcgccctccttggcggcgccgtcggcccgggccctcgctccgtccccgccgcccgacgtcttctccgccgcgcccgcctcgcttagcagcatcatgcgcagctcctggaagtcgatgtggcccaggcagggcgcgtcggccgccagcgcggacgggcacagcacggggtacacgggcgccgcgcccccctgaccgcccgccgcgaagccgcccgcgcctgcgcccgggcccgccgccgccagcagcgccgagttgaggcgcgtctcgagctcg

SEQ ID NO: 241340 - DNA, 148 bp, Homo sapiens
  chr20:61557990-61558138
  hyper
cctgcactccggacgcgcccttcgggtctgcactgacaatgacttgcttgcatcctttgtggacaccttatttccccgactccaagagtgaaagctggggcagtgcccttgcggggatccctcggaacagcccgggcagggcgcaggc

SEQ ID NO: 241341 - DNA, 795 bp, Homo sapiens
  chr20:61560172-61560967
  hyper
catggagaaaaacacgatgggtgcatcacaaataggtgtaaacagtacacttttgtaatgtgtagacaccagtttctgcaacccccatgccacgcaaagtttcagggaaagtctttgaaagtacaatccggaaaactcagcaattcttaaaaaaaaatggctttccgctgttataagcctccttcctaagactcagggtccgcagcagaataccctgacccaaaataaaaatactatgacaaaaatactccaggaggcagccggctttacttcgtttaaagccggatttcgcttagtcccgtgaaagcgaaggagcaccagcgcttcctgattccgcacagttctctcggcagagacggcccgtcctctccaagaaccggaagccggacagcgtcaggacgttttattcttctcacctgggattcagagaggcagcggccaaggacagggcccccgccgaggccaccgggcagcgtccaggtctcggcctttgggaggggagcagcgggggaggggcacggggaggggcgagggcggggcgcgcctgggcctcggcgctgggctcctcctctgcccgctccgggggacacccacaggattcttgcagacctctgccgaggcaggatggaggcctgcagggatgcaccgcgggcccgcgacccgggcggccggaacatagttctttctggccggagatcggcccggtcgtgagtcgtgtctgtgccaggccccccacgctgtgctccagggcctcagtgcccggcgcgccgggggctgtatcgccagccacttggg

SEQ ID NO: 241342 - DNA, 158 bp, Homo sapiens
  chr20:61569192-61569350
  hyper
ttccgcgctccaacgcctccgcagcagccatcttgccagagggccgacgccttttgactctggcgccaacccgtagtgcgtggtcgccgcgaggggagttctgcgcaagtacggaagctgaggttccgcgcttccgggaggccgtccgccccgccccc

SEQ ID NO: 241343 - DNA, 839 bp, Homo sapiens
  chr20:61585209-61586048
  hyper
cagatcacagccctgtcaggcgccaattagaggggagggctgccctcagcgggccctgccccttgctctcttcctcttcccccacccacgttcatccaggcctgccgggcagggccagctccccagggattcagggcctcctcactggcggctggtttgagtggctccgccttcactacgtccctcccaggctcgatgtttaaaaaggagcccttgccgcagccttcactacgtccctcccaggctcgatgtttaaaaaggagcccttgccgcagccttcactacgtccctcccaggctcgatgtttaaaaaggagcccttgccacagctcttcaacttcctttgcaggcccttattgggtagcgccaaggattctggaggggcctgtgggtcaaggctgccacacgcacgccttttcctagcccgccctcctgcagccacatcacaaaggctgggccaggcgagaacagagctggagggcggcacccacactctccggtttgctgctcgcctggcccggccccgcacagttcccttttctgaatggaggggccatgtgaccacctgtttgctcagccgtggatgctgcttctgcacaggggccgtttgctctagaaagttcacaggaagcaggctgctgggctcagggagtgcagagtggtgggaggaagctgttcaagctgcccaaagctttccggttcttggcacaccccccgtcccccgcgcccccagcaggatggaggattcccagcctggggtcctagtcaggcctcaggtagccgactgtctgggccatcctctccagcctgacatccttgtctccccggcagctgtggagg

SEQ ID NO: 241344 - DNA, 437 bp, Homo sapiens
  chr20:61636876-61637313
  hyper
gtcctcaggaacagagcactgccctgcagtttagcacgaagggccggctggagcgggagcgcgaggcccactgcaagaggatcaggagccagtaagtccggcttttcttcgtctccacctttcgtgcgcccggggccaggaccgcctgtccggaatctgaccagtgcccgtcctcgccgtggccctgggaccccgcggtggtcttcttttggggacgaacggcagtgcccgaaggatgctctacccacccccgttcctagacttgctgggtcccgacaatacccagtgggtgccgcgagttcccgggcgcagagtccagcgtccggctctcgagctcaatcccgcgccccgacggccttggcgcttcccgctgcgctaaactgtccaccgcgcacaggctggaagcgaagtcgggccccctcctcctggtctgcagg

SEQ ID NO: 241345 - DNA, 145 bp, Homo sapiens
  chr20:61664530-61664675
  hyper
ccagcaggacgctgaggctgcgtggcgtttccaccgtgctgcaggaacaagatgcacatcgtgcaggagccgcagagcacgcgtgcagaggtttcggtggctttgccccgcagctaacgtgtgcgtgtgtgccttgacttatatt

SEQ ID NO: 241346 - DNA, 128 bp, Homo sapiens
  chr20:61733167-61733295
  hyper
gtatgaatgtgtgtggtaggcgacagctgtgtgtgtacgtccgggtgcgtgtgtgcgtgtgtacatgtgagcgtgtgtgcacgtgagttagagcctgagtgtcccctgcgtgggttagtgtgtgcgcc

SEQ ID NO: 241347 - DNA, 173 bp, Homo sapiens
  chr20:61806196-61806369
  hyper
agctgttcccagatgtgggccgcggcctttcctctttctggaggaatgacaggcctcccgcagaggaggagcgggtggtgacgagggagaaggagcggaaagggaggggttctccacgggttctgttgatttgtttaatcccacgctattcggaggctttcacggatggcgga

SEQ ID NO: 241348 - DNA, 44 bp, Homo sapiens
  chr20:61806909-61806953
  hyper
agcccgcctggctgggggccgctgcacaccgggggtggaagtgg

SEQ ID NO: 241349 - DNA, 359 bp, Homo sapiens
  chr20:61808112-61808471
  hyper
gggaggctccggacggtgaggcttggggaagccactgatccctggccctagagggccagatcgggggcgccccaaggaccctatcgagctggcagtgactgcagtcgggccgtggagtgtcgcctgtgattccgtggtccctacgggcaagagctcccatcccggtctgaaactgtgagaaccgcaagctccgatgggggcggggaaggacgacctttaattcccaccccactgtacggagcccagcagggccatccgcaggaggccggcgggacccttgcctttctcaggactgagaggcttggaggaccgcggtgtgagctgcgcggcagagtgcgttctgcaggcgccagacagga

SEQ ID NO: 241350 - DNA, 51 bp, Homo sapiens
  chr20:61808651-61808702
  hyper
tgtgtgggagacaggcgtttccttgggtctccgtgtggccgccgggcgcag

SEQ ID NO: 241351 - DNA, 55 bp, Homo sapiens
  chr20:61810862-61810917
  hyper
ccccggctgggctgtgatgccccggtaacagtcagaggacgaccccctccccaaa

SEQ ID NO: 241352 - DNA, 178 bp, Homo sapiens; identical to SEQ ID NO: 205904
  chr20:61847113-61847291
  hyper

SEQ ID NO: 241353 - DNA, 92 bp, Homo sapiens
  chr20:61847573-61847665
  hyper
cttcgcgcctgcgcgctcccgtcttacgggatggatttcgctctcaggtcccagtctcgtgcggcggggcggggaccgcagccggctgggcg

SEQ ID NO: 241354 - DNA, 180 bp, Homo sapiens
  chr20:61862298-61862478
  hyper
caaccatcccaaccaaactctgcatcgttccactagctgatcgcctgccggagtctcagtgtgctcttctgccggcgtgctccccctgatggcctctcgacgtccagccgcttgtgtgttctgccaatgggctcctctccgtgtccagggcttaggtgcctgcccgctaggtctcagggt

SEQ ID NO: 241355 - DNA, 66 bp, Homo sapiens
  chr20:61885940-61886006
  hyper
agccccagccccgggtaacagctgcgctgcgtctcccctcccacccccgcctgcggcccctggggg

SEQ ID NO: 241356 - DNA, 294 bp, Homo sapiens
  chr20:61903935-61904229
  hyper
cagcttggttccgcggatgaacggacgcttctcccgcccggcccccaaaagctgccgtcctccgcggccactacgaccagctgcggtccggggcccggggtgggagttggactgcgtggctgcgcgtccccatggcgaccgggcgggtgcgcgcgtcaggggctggggcctgaggcggaagtcccgcccttgccggctcccgtgagaccttgcaaagcgcaacgtagccggaagctggtggcggctggtgggcgaccgggcgcatcctcattgcagtgcggcggccctacctcg

SEQ ID NO: 241357 - DNA, 250 bp, Homo sapiens
  chr20:62102672-62102922
  hyper
caggtgcacacggacgcaggcttcggccgccccccgccagccctgccccaggaggcagccgttccctgagcctcgcccgggaagaggggacagccccttccaggcccagggctgggggtcccaggtctgccgcagcccctcccccgggcctcgctctgccaaggaggggtcctgagcccgggatgtgcacgggggcggccggcggctgcagagatgggacagcgcaggagctgagcgcaggagctgaggg

SEQ ID NO: 241358 - DNA, 252 bp, Homo sapiens
  chr20:62127503-62127755
  hyper
cccccttgctctccgtcggggtcctgggacgccggccccctccgtcgggaccccacacccagaccctgccccccagggccggcctccgcacctgctccgaaatgggcgcggctacgcaggtccaccagcaggtggcgcaagggcctgggagtcgctcgctctacgagcgaagccgccagatgggataaacccctcccgggcgagggctcccctttatctgaagctgcggacgcccccagatcccttcctcaa

SEQ ID NO: 241359 - DNA, 414 bp, Homo sapiens
  chr20:62185031-62185445
  hyper
tgggtggcatctgtaatgggcggggccttgctgggcagagcccgcggcgggggaagccgcccctctcctctgtccaggcgctgggtggtccatccgcctggtcaccggccactgcctctctcccaaattcctccgagggattcccgaggagtgcgctcggactggggggttgagcaggaactccctcccagtcacccgaggctcctgcgccccgcccgaagccgggggtgcgtggggagtggtgcgcccgcggaagggctccgggacgggaaccccccttggagcctggctcttggaccagccacccgccgtggcccctcagtcggggacgcgggcccccagaagtctggggctctccaggaagcgaagcggatggaagattactcggctcggggtcccgggtccccacccccg

SEQ ID NO: 241360 - DNA, 288 bp, Homo sapiens
  chr20:62273505-62273793
  hyper
gatctccttgctgagctccatcttgtagttgagcttctcctccgcctggcggctgaagttgttattctcctccagcgccttgtgcagcacctcgcgctcgtgctcgcgccgctccgccagctgcttcagcacctgcgcctcctgcgtctgtgcggggccggcgggcgcgcgtgagcggcaaccccgggccctgcccggccggactcctccctgctctccgcctcccgcccagcgcccgctcgcctcacctggcgcctccacctgcccaggcctcggtgggcgccggga

SEQ ID NO: 241361 - DNA, 241 bp, Homo sapiens
  chr20:62283519-62283760
  hyper
ggggcctgaggggcggggtcaggtcgggcacgcgtgggtgggcggagttctgcgccccgggccaaggcgcccgagttgaaccagtcagctcgggagagggaccgcggcgacctgtcccgggggcgtaagaaaaggtgggagggagtgcggctcgtgaacgggggcggcgatgggaaggaggtgcggcccttcgtcctgtcctcccaaacgtcgagtgaaaaacgaagcgggttctgcggcc

SEQ ID NO: 241362 - DNA, 209 bp, Homo sapiens
  chr20:62289788-62289997
  hyper
ctggaaggttcgccgcggagacaagtgagcagtgagtcgcagtgaccctacaagtggttcttttacccgagcggctcgtaggcgcgttgcggtttttcgaaactacagctcccggcaggccccaagccgccctcggggccgcgggtcggcggattggccgcgctgcattttgggacctgtagtttcctgcgctcgtggcgctggcgccg

SEQ ID NO: 241363 - DNA, 643 bp, Homo sapiens
  chr20:62368772-62369415
  hyper
gctggaacgggagacgcaggagccccgcagccgcgggaggtgcagatttggggctgccaggtggcgccaggtccccttggccagcccccagcgcccctttcttctgtccccagggcctcggcttcacaggatggggctgccagtgtcctgggcccctcctgccctctgggttctagggtgctgcgccctgctcctctcgctgtgggcgctgtgcacagcctgccgcaggtaggtccctcagccgcgttctgtctggggcctcgctgcggctgccattcacagcccagcgcgggaaggggctggaggcaggtccgcgcacccagctcggcacgcgcgcctgcaccgggccttggacccgaggctgacgaccccgccccccgccccccacctctacccccaaggcccgaggacgctgtagcccccaggaagagggcgcggaggcagcgggcgaggctgcagggcagtgcgacggcggcggaagcggtgagtgccaggctgtcccggggaccagggtggggtccgcagggcaccgaccagccttcctcgcccccagtccctactgaggcggacccacctctgctccctcagcaagtcggacaccagactgcacgagctgcaccggggcccgcgcagcagcaggggt

SEQ ID NO: 241364 - DNA, 40 bp, Homo sapiens
  chr20:62370782-62370822
  hyper
ctgccgggaagcccgccaagcaatcgcggccccttccccg

SEQ ID NO: 241365 - DNA, 154 bp, Homo sapiens
  chr20:62371936-62372090
  hyper
ggggtgcggagacaccggccccgacggaggccaggtcagggccccaggtttgtaattaccagccacccccaagctcttcagccctggaggagctgagcagaaatgatcgatgactgggagtccctacacctccctccaccgcagttcctcgggg

SEQ ID NO: 241366 - DNA, 216 bp, Homo sapiens
  chr20:62461228-62461444
  hyper
aatatgaaagattctacaatcgatacaattaaaatgcccgtgagttctcggcgcacaggtgtctgcgcccaggccgcgcgctaaacacgtttctaattagcatttctttaaacaatgctgatcacaatcttgccaccgtaatccactccaaatgcatcgttgagattgcagcacggaaagcgagagaggaaattcgctgcgaatctcaaactttct

SEQ ID NO: 241367 - DNA, 33 bp, Homo sapiens
  chr20:62463025-62463058
  hyper
cgggagcggcgaccccggcgagggcacccgctc

SEQ ID NO: 241368 - DNA, 412 bp, Homo sapiens
  chr20:62463387-62463799
  hyper
tgactaggggcaccggcggccgcgcgtgggtccctcccgtcgtgttgtctgcgggggacgaatggctccgggagggggcgggaaccagcggcccgggcctcgccccagcccgtgtgcagccccgatccgaacggcctgggacgcgtctccaccactcggcgcccggactctgcgcgtcgcttctcgcctccgccgtcctcagccctcgggcgggtagagtgggaagcgcggccccgcattcctggccggcctgcgcaggggtaaaggccacctcgcttcctctccccgggcgcggcgggaagggaggtgagcctgtggccggcagccgcgcgagggagtcgagcccggcccggccaaccaatggggaggcgcccgggccgtccagcctgcctccctgcgggcccagcgcagc

SEQ ID NO: 241369 - DNA, 419 bp, Homo sapiens
  chr20:62496242-62496661
  hyper
ccgccgaggcgcgcgagccccagcactcctaggcagctgcatccgccccggaagatcccctggggccctgcgctggctttccacagcgccatgttggacggtcctcccacttcccaccttcccagtcctcccgctactctgaccgttctacctgtgattctcgctggtggagtcaacctggaatggattcccgccgaaccacgcctccctttcctggttcgcccgcagtttcggcctatcaggttgagtcgggtaaaccaggacgggccaagcggcactctcattggatatcactggtgggggcgggaagaaggcggagcacgtgcccgggcggaagtagccgtcgcatcgcggattacgaaacgccgcggagctgaggcagttccgctggctagtgtgtacgcggcgagcttctcccg

SEQ ID NO: 241370 - DNA, 83 bp, Homo sapiens
  chr20:62661737-62661820
  hyper
agagacaacagccttcctagtgctggcttttgattctctccatcccttctccccagcactgggtggcagtggtgcttggtctc

SEQ ID NO: 241371 - DNA, 79 bp, Homo sapiens
  chr20:62669743-62669822
  hyper
gaccgtggctgtgcgcaccgaggcggtgatgcggcgccactgcaggacgctgcgccaggtgtgcgtccctgagtgcacc

SEQ ID NO: 241372 - DNA, 702 bp, Homo sapiens
  chr20:62680476-62681178
  hyper
ctctcccccttctctgccgccctcccgccgctcacccagcatcttgctgagcaccgcgttgtgcaggtccgggttctgctgagccagccgcttgcgctcgtcctttgcccacaccatgaaggcgttcatgggccgccggatgcgcgactcgtctgccgcctggcgttccccgcggccggccgggctgaggccatagcgccccggctcggggctgcgcgggggactgcgctgcgggctgggcggcgaggcgggcgcggcgggcgcggcgagggcggcggggccggcggcgaggccgcgcgtgtcagcggcggccccgtgtcccggggcccatgcacagtcgcggcgggcgggcgggtcgtcctgtgcgccgtagccgggcggcgatctctgcattccagctgggcgcggcctgggcggaacggagcgcgggagcgcggcgggcgggcggcgggcactggggagccgggcgcaagggcaggccaggccgggagggcggatggcggtggggacggcggtggcctcgggccgggcgggcgcccagatatagcggctcagggccaatcggcggcggggcgggcgggcgggggcgggtcggggccgcctcctccccgggggctccctttcttctcaggccgggcgggattccgctgaggcctcccccgcgcacagcccccccacctcccccgcgacctctcagaagga

SEQ ID NO: 241373 - DNA, 395 bp, Homo sapiens
  chr20:62694230-62694625
  hyper
gggacagcaaggcccgaagcaggaggagagaagggagcagattcctgggcctcctggggcccggtcgctccgggatgtctgagctctgggaggggcgtgcccggggcgcctccctcgcggggtattgtgggatcacgagtcactggcgacggtgggtcaggactacacttcccaggaggctgtgcgcgccgcgtggcgcctgggagttgtggtccagagcgcgggcgcggcgggcgcggcaggcgggcgcgtggactacgcatcctaggatgccgcgcgcggccgcggggccgagggtttgaaccgggggtctgtcgtccgcggcggggctgcgtcggctgcggcgggtgtgggaggtggcgacggccggggccggggtcctgcccggctgcgga

SEQ ID NO: 241374 - DNA, 88 bp, Homo sapiens
  chr20:62694925-62695013
  hyper
cgttcactcccgcaaccccggcagaggccgcgatcaggcctggaccttgtcccgggagagccacccgctctggactcagacccctccc

SEQ ID NO: 241375 - DNA, 54 bp, Homo sapiens
  chr20:62695193-62695247
  hyper
gccgagccccgccccccaactcagccctctcccacgctccgtctcttacagcgt

SEQ ID NO: 241376 - DNA, 53 bp, Homo sapiens
  chr20:62715743-62715796
  hyper
ccctctcccaagcgcacgtccccagcagctctgccatcggctgatcctgctca

SEQ ID NO: 241377 - DNA, 50 bp, Homo sapiens
  chr20:62733487-62733537
  hyper
tccgacctcaggaaggcggggcttcagcagcggcctcggaccctccctcc

SEQ ID NO: 241378 - DNA, 316 bp, Homo sapiens
  chr20:62733957-62734273
  hyper
tgcagcagagacgcccggctggggccggagggcaaactgggggcagggtgggagacctcggccctgagggctgtaggggctcttgcctgggcgctccttaagctcccccgccccctccgccccccaccccgcggtgctcactctcagtcctgccttgcgcacattcccacgcccgggcctctcctgcccgcccctcgttgttcacttgctcattacgcctcacacctggctctgccgcgggcttggagcgggtgtctgggaaacacagtctcacttgtctcctcaaggggctccggggcaccgtaacagcgtgcag

SEQ ID NO: 241379 - DNA, 115 bp, Homo sapiens
  chr21:15755438-15755553
  hyper
atcacagtcccgccgaacaggcttgtgatgactgtaccagacgtgaggcaccgcccccactcctcccggcagtcccgcagccccctgggaaatgtagtccgcttgctctgaggca

SEQ ID NO: 241380 - DNA, 220 bp, Homo sapiens
  chr21:15755917-15756137
  hyper
gtttgtgttctttcgttttaattccttttaaagcgcgttcgtttgcctgagatctagcttctagatggcgttcctatagcctcccggagccccagccatcctccgtagaagggtccctgccgcagtgcggggcctgagggaagtcggctctggcgtccgtgctccaacgctgggagcagccctgaaactccagtgaccctcagccgtctgcctttgtttt

SEQ ID NO: 241381 - DNA, 254 bp, Homo sapiens
  chr21:16436424-16436678
  hyper
cccggacttccaccgggctcaccctaaatgggggccggcccctggctcctggtaaaatgatggctgaggcctcgggtccgtgagcctcgccatcgggaggggaccgcgagtgcgggcagagcggcccggggtcgggtgggggccgggcgagctgtcccttttcctattcactttcccagccgggtatccagcgagcaaggagcagggaggcacccaggcgaaaggcgccgcccaggatccggctggacagcagg

SEQ ID NO: 241382 - DNA, 57 bp, Homo sapiens
  chr21:16437726-16437783
  hyper
ggaccggggaaagcgctcttgggacccaggccgaatgctcccgtttgggcacagcct

SEQ ID NO: 241383 - DNA, 117 bp, Homo sapiens
  chr21:17101957-17102074
  hyper
ggtaagctagggatccgacaagccctgggcgcagggaggaacgctgccctccggcctccagtcgcgctccccgaagcccagcgccagcgtcgcgcaacctgccgcaggggcggctcc

SEQ ID NO: 241384 - DNA, 486 bp, Homo sapiens
  chr21:18885047-18885533
  hyper
ccccacccccgcgcgcaaaaccctggtttagcttaagggatggaggcggggacccctgcgcaggcttgcggcgtgggaggcggccgcccgcgacctacgacgccgcgcgccgggaggctgagagttcggcgccgggagggtcccggggacagaagagcgcctcgcccggttgccaaggcaaccccacgcggctggagaagccggcgctcgcagcccggcccgggccgctgccggaagtgacgcgagttcacctgccgagcgggggctgggaggaggggcggagggtgcagaggtgccgccgccgccgcgagccagtcgggagcgcgcgaggcgcggggagcctgggaccaggagcgagagccgcctacctgcagccgccgcccacggcacggcagccaccatggcgctcctgctgtgcttcgtgctcctgtgcggagtagtgggtgagtaggggccatggggtcctcagcacccgcccagcccggg

SEQ ID NO: 241385 - DNA, 695 bp, Homo sapiens
  chr21:18885713-18886408
  hyper
ggacggagccctcggcggggggtggaggcggaggggctcgggcgcggcgtgtcgggtgcgcctcgcagctctcccatagcattctctgccccggtgcgggcttgcctttctttgctctcgccgtctcccttgtcagccttcgtgtcggttctctccagcgttacccgatttcaaaaaccttgggcggcgagttttcaggtgtcgagtcgcccaggcggggaggctgaattgcaaacgccattattcaatggacatggagctgcccggtgcctcggatcggccaggctacctctaggaaagaggcgctgagcgaacgccagcctggacggtgttagtctcctggaagcagctcgcccaggcaggagctgctaaccagacgcgcattgtgaaggagaccgtggaaaatcaaaagtgggttcctgcaaaaatgtagcattggtttctgcagtccttgggcgaagtgcaaaggagaattcagtgacctcgtttttgagtttgtaatgagtcgttcattttggagataagacgggctgagttgtacagggtaattgctagaggatttgccaagtgcgtttgtcgactgctcctttctctgggaggggaaaaaaggcatgtgaaaaatgcgtggaccattaggaggcgtaatcattttgacactttaaaaaacggattttccatgtcggtgttttaaccaa

SEQ ID NO: 241386 - DNA, 319 bp, Homo sapiens; identical to SEQ ID NO: 205928
  chr21:18983992-18984311
  hyper

SEQ ID NO: 241387 - DNA, 1137 bp, Homo sapiens
  chr21:22369894-22371031
  hyper
ccagtgtctctcccgtaaggtgccgctcccaacagcaatgggtcgagatgtagaggaaacactctgtacgttatttttccgcccaccctttagcgcctgaggagacagacagtgtagactttagggtacaattgcttcccctctgtcgcggcggggtggggagcgtgggaaggggacagccgcgcaaggggccagcctgctccaggtttgagcgagagagggagaaggaggtccacggagagacaagaatctccctcctcccacgcccaaaaggaataagctgcggggcacaccgcccgcctccagatcccccattcacgttgagccggggcgcgctcggggcggtcgcctgcagtatcagtatcagcatcagcatcagcatcagcatctgcatgagcatcagctcagctcagctcagctcagcatcagctcagctgtcctgaggcagccggcggctgtgaaggagctccaggctgcccccatccccacgcccttctcggctcagggcgtgcatgaacctgcggatggccggcgggcgagtggcgccttcgcgatcgcggccgcccctctaggcggaggcaccggggaccgaacccgtgacttcgagctccactgcggacgaatcccgggaccgcgcgcctcgcggaagagcggccgccgtgcagcgcggagggatacgcctcggccgcacctcccctcgccgcgcccccgcccccgccgccctccccgcccggctctgctgccgccgcggcggccgctgctgctgctgcttctgccgccgctgccgccgccgctgcctggatatagtgcggcaagagcggagcttgcagtcactttgcgaggaggagcgcgcgggctgcgggcggctggggcaccgcgggagcggcggcggcggctctagcagaggcggccggggcagcgaaaggttctctctccagggctggacttaataactttgaaactgtccaccggtgtcacgtcctgaacatgagcctcctcctctccttctacctgctggggttgcttgtcagtagcgggcaaggtaggagtgtggcgctttattgcatttactttccctcccccttccacccggccaagagaggcaaagagggaggcgcaggaagaatgaaatgaaag

SEQ ID NO: 241388 - DNA, 629 bp, Homo sapiens
  chr21:26934226-26934855
  hyper
cacgcaatgacccacgagaaagggaaaggggaaaacaccaactacccgggcgctgggctttttcgacttttcctttaaaaagaaaaaagtttttcaagctgtaggttccaagaacaggcaggaggggggagaagggggggggggttgcagaaaaggcgcctggtcggttatgagtcacaagtgagttataaaagggtcgcacgttcgcaggcgcgggcttcctgtgcgcggccgagcccgggcccagcgccgcctgcagcctcgggaagggagcggatagcggagccccgagccgcccgcagagcaagcgcggggaaccaaggagacgctcctggcactgcaggtacgccgacttcagtctcgcgctcccgcccgcctttcctctcttgaacgtggcagggacgccgggggacttcggtgcgagggtcaccgccgggttaactggcgaggcaaggcgggggcagcgcgcacgtggccgtggagcccggcctggtcccgcgcgcgcctgcgggtgccccctggggactcagtggtgtcgcctcgcccgggaccagagattgcgctggatggattcccgcgggcagaggcagggggaaggaggggtgttcgaaacctaatacttgagcttc

SEQ ID NO: 241389 - DNA, 157 bp, Homo sapiens
  chr21:27011415-27011572
  hyper
ctgagacctgacttccagcacgagtcttgattgcttttttttttctcgagttcgaggcggagcccgcgaaccccatctcctcagagcgccaccccctcagcttcgcccgttgggcagaattttccaaatatctccacccctaggctgaaaagccaga

SEQ ID NO: 241390 - DNA, 360 bp, Homo sapiens
  chr21:27012532-27012892
  hyper
ctcactacccactggtaagatgctaagaccccaagaaagatggcatcactgggaggcgggcgccggccacactttgagtccccggggagggggcagcgtccgcgtggtctgggctctgtagcgtcccagctgagccggcgatatgcagcgcacttgtggggcggaggtggagggaattcgtggctgctgagccagaattacttttatcctctccacctgcacatctacattcacttagagaagtctggtctggggactctagccagctgctctgtcctcaggggacatccaacgggacgattgttagaaagattcagaagccacatgatccagtagctggggagacgtcccaaagccaat

SEQ ID NO: 241391 - DNA, 2070 bp, Homo sapiens
  chr21:27541598-27543668
  hyper
aggcgccatcttctccgtcttaatcttcactcaattcgatccttttatctgcaccctaaaaaaaagacccttcggaccctccccagcatcctgtgcccccaggggaactaaaccagagtccccagagctgccagggaagaggccgcgccttaatcagacaaacgcctccttggatgcacaggacagagcccgtgcctccccaccatccgccactgccctttccagacgcacatcccactctccgccttatttcctccccgccaaggactttacagcccagcacagaattaagcctcggaggtgatccgagggtgggaagcagaggggccccgaggctccgccagaagccccggcagcgtctctgccccctcccaggcggacgcgcagccccgggaagggagccgggcgggagcctcggtggcgcactgagactaacgcggctcggcccacggcgagggcggggtgtcgcggcttttgttcccgcggaccttctgcctctcagacagagcttagggtgcgagcgaactcccgggacgtccagacttggggaaggcgcggggtggctatgggtctccgacccctcccatttctcgcaagttacacaaaagggagacgcggacatgcacaaagtttgcctgtggaaggcggtgcgcgaccccgacgccggctcgggctagggtcgcacccaggctgccgccgccagcagccgcgaaaagaggttggagcaaggaagggggatgggggtgagagaggaaggtgaaacgaggcggagaacgcagggaaaagcgaggggctcctagcttcctgggctgtcccgactcctcctcctcctccccagggcccaagagaaaggaaagggcaacgattcaagagcgaaggactggctttagggacgctgcgttttcggttttccccacgtgctccttcccccttcccccctgtctgaatgtctctcgcctcccccgacccccgcttccaaggcagggactaagtcggggtctgggctcagggtcgccccctacccttctcgccccgggctggcgcggaaccagggagaccagcgcctcgcccgctccctctcagcgggccggagcgcgactccctggggcagggctgggccgaaagcggggatgcgctggacgtccgcaagcgggggcggagaggagaggggtcccattgacggacccccggcttctctgcattaaagacttgggttaaggtcttggggggtatcgcgtccccaccgtgcagcctccccccgccttccgaggcgcggcacccacctccagcgcccgagccgtccaggcggccagcaggagcagtgccaaaccgggcagcatcgcgaccctgcgcggggcaccgagtgcgctgctgtgcgagtgggatccgccgcgtccttgctctgcccgcgccgccaccgccgccgtctcccggggcccccgcgcacgctcctccgcgtgctctcgcctaccgctgccgaggaaactgacggagcccgagcgcggcggcggggctcagagccaggcgagtcagctgatccggcccaccccgctcggcacccgagagagacccctagcggcgccgccggggaactgcgcccgctcgcgccgggaggggccctcgcgccccgcgcccacaggtgcacgcgcccttggcgccgcctgcaccccacgcgccccctccgctccccggccgacggcccacctgggcttcgtgaacagtgggagggagagtctggggccaggagagggacggtgcaggatcagggaaaggtgagtcctaggacgctgaggctctagaaaagtcgagagcgctcctgctcgtccccgtgagcttgaatcatccgaccccgcaggcctcccgggggtgtcgtataaaggactgctgctagggtgcgtttttatccgcatttcgttttttctctcggtttggagaggtggggcaggcgtttctggaagagaatgagaacgagtgaagcttaaaggaaataggattttctttgcttgttgagacagcaaaacctcattttttaacccccaacgtcaaaagcaggcacgagcaacctggaat

SEQ ID NO: 241392 - DNA, 696 bp, Homo sapiens
  chr21:27945027-27945723
  hyper
gcgcgggtttctgccgtcgcctcgcggaaaaggcagaagcgtctgcaaaggtccttctgcaaaggtcccggtccgtccagctcaacccacgttagcccggaccgtgacccaagggcagccccgagcctctgaccctctccgccgccctccgtcactgacctgcgtagacaaagagcaggaccaacttcggaagcaagacccctggacgcacgggtagcctcggagcgtccatccaagccggtggcctgaggcttggagcgaagggagagcccggaaccggagggaatggggaggatggagggcgatcagatggagagagcagcgctcctgagagccgggtggagcagagacccggccattgcctagggagccttccaagggagcccgggccgggcgcgtcccgggccagcgactgcgggactccgcggagctggggcgcccgtggcccgagacgggctgcgctgggggcccaggtctctttgtctcgccccactgcgctcaggcgcggggaaggcggccactccggcgtccttggccacccaggctcacatttcatctccgcgggtggcaacgactgcgggcagggggcgggggtggccccgactcctccccaagcccgggttcttccttctaaagagtgactaggggaccaagaaacttttcctaaccccttgctttggcgattgctatggagtt

SEQ ID NO: 241393 - DNA, 2250 bp, Homo sapiens
  chr21:28215838-28218088
  hyper
gtagcaggaaggaccggcagtgactttcaacagtgcttgagagcagaattatggccgcgagagggagtgcaaactgggaggcggggcaaacccgggaaagacctcccaagcaggttctgcgaaggggccccaccgccttcagcccgcctgggtcagccttataagggggaaaggggacagaagtctgcagaacagagatcctagcgtagccgctcagggtaccttcccaggtcaccattgctcctctgccctctccacatccgccctcccgtgagcgcaggatgcacgcacaggcagcggttacaaaactcagcgcaacgttgcaacccgcacaaaaggcgcacacaaaatcattaaaaagaaatacacagagtggaaagaactcgcacaagctccaactcgctaaaggtggaaggagtcaggttacaaactctccctccccggcctaaatgctttgctttagtttgcagaaaatcgtttgtcagtttttttcttggttattcattattcgggcaaatgcaagtatgttttctagctgagttcaccaatccaaacctcaaaccacattcctccactccaggcctccgttctgtccgcggacttatgatcctgcctgccagcaggagtctaccctgaagtcgcgtgggatagataaagtgaggagaggaggatgaatggacagacaaacgagagcaattcttctacctgtgggctgtcctacgccttgcagtgccgggtcctgcggcgaccactgagccccttcgtcctcgccctcagtcccttcgtcctcgtcttcggtctccgctttcccagtcggccggggctcgtcgtccacgaccccgcacgtgccgccgacgtcgccctgccgattccgccgcaggaggtggaactgtagtggtgccggcggcttctcccctggggcggcggtggcgaggcgctcgctggcggcgggcagcggctggatgaaatacgcctcccccagcaggtagaaggcgccgcgcacgccctcgcagaggctgagggcggcagccgagctgggatcgccattcacggtgccggagtagaagcagtgcgccaggtcggtttccggaagcggcgtctcggacccggatttgcgccccacgttctggagcgtgaagccgggcgccaaaaagctgctgtcgggccgcagctccagatccagctgctggtcaaaggcgtgcaggcggaggcgcgtggtcccgtgtcccggggcgcgctccagctccggcaccactagctcctcgtcctcctcggaggggcgcccgagtgcgtccgacacggccagtagcgccgcggcgagcagcagcagcgtgggtactggcccaaagctccgagaccccggagcccgctccgcgttccccatgtcgctgcccagcttgcgccttccgaacccctcgggcacagctcgctgcattggagccccaggagacaccgctcgtagcagcgcacggagcgagggacctttagttcgggtcgggagagcaaagcctcgttggcctgctctggattgttaaaattaacaatttctattattcgttggaagggcgcgcagagccggctacagccgaagctcccggagtcactaaaaggaggcgctgcagttctgccggcgcgcgggaagtttttcttccagcgcaaagttggagacactgagaggcaggcgcaggcagagtggctctgctgggacaagaagcgctctggggcgcctccggggctgaggcaacgcggagattggtgcctggcgcccctcttcggcctccgccttggctgcgatgttgctcactctgctcagggctctcccctctccgtccggtagcgcaccctggctttgcaatagcccctggctcggagccgctttccagcgagtgcaagaaccgggcagccgagcggtccttttatagtggaccagtgaaacccccacccccaccccactcctcccctttggcccttttccatcccaaagacgccgcccccggctccgttggtgctaaaccgcgctccgcgctgcgggctcgggagggggagggggcagcctccgcgctggctccacgccactgctcgtcaatctaggggcggaaggggcgctgtgaccagcactttgtactgctggggccgctccagggagaagactctcccttccaccgcttttctccctcgccggtttcctggaccacccttcctccccaccgcccggttgcggtaactcagttaccgcgctgggctgcggtt

SEQ ID NO: 241394 - DNA, 785 bp, Homo sapiens
  chr21:28218369-28219154
  hyper
ggtgacacttcctacgatctggattttaaaatatgtttgcttatgccttcaccctccaccaacccccaccccgcacgccacctcttcaccagagacgactttgtgagggcccggtttcacatttctggaatgggtgatctgggacgcggctcaattccctagagcataaggagggaattgcgctttttcttcttcattcgagaaatgatcggctcccgccagtctgcgtgctttcactcaacagcagctgcaagccctaggccagcgtcgcagaaacggccaggaaccccactttcctacccgggggccagcagcgatcgctggggctagcaagcgtgcagagggggaaagaaggaaatcggcttccttcccggacccctccttcctcttcctaccaggaagggaaaaggctatatccgcgttacgaaagcgaggagaggtccaccaacaggtccttaggaaaaaaaactgagtggctcttctctccaaaaagtgggaggggctcaaggacccagaggaaggacgtgtttcacaggcggaaagccgcggggacaatggcgagagcgaccgccctagccccgggcggacccgcaaccctcacactcgcgcgcccccgcgttagtgctcgaactggtctccgcctttccgccccactcccgtccggtctcttggttggctccaagtagatctgggtcctttcctcgctcctccccagatcttccccacttcagttggccccagccagaagcgtcccttctagttctcccacacgtccctcttacaag

SEQ ID NO: 241395 - DNA, 1774 bp, Homo sapiens
  chr21:28338409-28340183
  hyper
ccaagaggaacctccggccgcccgcgtagacgaggtagcccaccttgccgccgccggagtagagttggtcgatgttctgcaccagccccttgctcctgcgccgctgcgccagggggtgcgggtggccgggaggctcggctcgctcctgcacctcctccccctgccgccggcggggctgggcggctgctgcagcagtcggaggctgcccggctttatcctgggcaggtgtcgcggcggggccgaccgcggccaggggcaggcggaacgcgcacagcagcagggacgcccacccgagcagcatagtgcgctgcccgcggggaggggctgcgcgactgggactttatgggtatttgttatttgctatgaagttaacggggcgggggatggggacacacacacacttgcttgcaggattgagtcaagtgtcggagggaggggggcccggcagcagcgccagcctgtccgggctgcggtgccagcgtgcgaacttttctttgttgcttgggaaaatgtttggattcgtgctccagaaagaggtggggtggggggggggggaaagaaaagattaaaaaaaaaaagtcggatagtggagattcagcaaatacgggaaaaggaaaaaaacaaaaaccaaaaaaccaccaaatgcaggcacgatcgctgtttcaagaaaagtaaggaaaggtaccgcgcaccgggctggcaactggtgcgcgcagcctcccgcccccgcgctgcgctggacaagccggctgtggaggttccaagctccggggcccacttcctttcttattttgtgggtttccttggctctgctgggaccaggaggaagggaagaaagagaggggaaaaagccgtaaaaattaaaacaaaaatgcaggggggcagcctgaggcgagctggtgaagcggcgtgtctgtgtcccttcggctgcggtctcctcctgcccgccgtcatccccagtcggcagctgcgagcgccgagagcagcgcgagcgctgtgaagatgcgaggaggtggaacaatgaatttatagcggcatgccatcctgcaatggcaatttcaacagttcgtcactgcacgctgcctcttaaagggagagcttcccccaccactcccacccttcccagtccgcgcctaatcagatgggggagggcaaaagaggagggtgatcgaggaaagggagacgaagtaggaggaagggactgggacccggcgaggtggtaggaggggagaggggaaaataaaaagtaatggggcaagaaaaacagatttccttggccacttttaaagccacagcggctccgggtctgtctgatatttcacaaccaattggggttggctaaccttggcttacctcatctcctgaacgggtgttttggttaaagttattgagacgtttcaagtctctccctgcctccttcttgcctgcttttctcgccctcggtgggaagttcctgccgcaagtttttcccctttgcacacccgtgcgctctggcctcgcagaccgtgcaactccatccaccagccagagcttttcagcttcccgtgcgtcccctaaccaccgcgttcccttcgcttcctcccctccgtcccggcacccggtttcctccctccccattctccagcctcttgatgctttgacgctcgccggattcgggctccgggtgactaacttctcccggccaccagcagagcggctggacagccagagagcccagggcgcttcctggcgcgctgcggtaccccggggcgagaacgcccgccgcttgggaact

SEQ ID NO: 241396 - DNA, 38 bp, Homo sapiens
  chr21:30257747-30257785
  hyper
ggagtggggctggcgtcccgggcgaccagtgtgttgtt

SEQ ID NO: 241397 - DNA, 115 bp, Homo sapiens; identical to SEQ ID NO: 205946
  chr21:30365298-30365413
  hyper

SEQ ID NO: 241398 - DNA, 477 bp, Homo sapiens
  chr21:30374922-30375399
  hyper
aaaaagtccaactccgccccaaagcagcatctggctggcctgcgagatgcccactggggaggcgagtccgcagcttaggactcaagcccggggtcggaagctattgccgaaatccgaaacgcagcgctcgcagctgcagtgacgcgacctgctcataagtccccgtgctcacagcatcccggcaacttacgagctagtgcttccgggtcaccccggcccaggaaggcgcacgcgcgaagcatagcgagcttcactccgcactcttaggctgcgtgtgaggcctgcgagtgctcgggagctgccgcggtcacaagagaaagcctagctgtcaatgacagccccagagcatctgggcgccttgcgatacccgggtgtctgtaggcagccaggagacacttccaagctgatctggaatctttcctcgcccagctctgtccctcgcagggatggcaaaggacattacgacctacatccctt

SEQ ID NO: 241399 - DNA, 188 bp, Homo sapiens; identical to SEQ ID NO: 205947
  chr21:30396784-30396972
  hyper

SEQ ID NO: 241400 - DNA, 1060 bp, Homo sapiens
  chr21:31311377-31312437
  hyper
tggctgcagcggctcgcgatcccttgcccagagtaggggtgccggtccctgcgaacctggatccccgcactctagcccgcgttcctggagcccagattgaaaaacccgccaactgtacctcccggggaaggccggcaccctccaggagggaagcagtgacgcggctcccccttttttgtgtagcctcccatgagcactgacctccaccttccccagctccggctcctgcgccgccgcgcgctgcctcgcccgggacccgctacacccgcgttggtgcggcgaccgaccacgtctcccgagcaggcagcctggggctcactcaccgatcctgagtacttgcggggcggtctgagggaggatatagcagaggaaatagaggagtgcccagctggtgtccctggtccagagcccgggctgggcgaggagtgtgccgtgctccatcttcctagcttcttaattcatgccgagatacagccgctgccggacgcccgagagatgcacccaacttgggccgggtccccgcctcatcctctctggatgctccggttccaagcacgctgcgcgctccccacggagcgagctcgagggaacccgcgtgggaccgcggagctggctggcaaggctgagctctctcggggctcctcagtgctgtcgctagcccatcacggctcctcctcctcctcttccatgggccgcagaccgcggaggatcagcgctctctggctcccggagcccagagaccagctgaggaaagttgctgccccgatctgcaggaacgtctccctcattcgtcctttggtcagatgcaaaagtcgggggataggcacagacagaggagggaaaagggggaaagaagactaacgaagaaggagagagggtacagggtgagttggtgcaggggctctgagcaagcctgatgagctccagcaggttaactgggagcggagccacgttccggcttctctgaatctttgctttcctcctcccctcgctggccccaccctttatttactgcccgccccaaccccactgatcaagatactcgcgcgcgcgcgcgcac

SEQ ID NO: 241401 - DNA, 160 bp, Homo sapiens
  chr21:31312497-31312657
  hyper
ttctctccctcaactttgcgctctgctgctgggaagtcgatcgagtgttgcattctcaagacagatcaaatctaaactattggtccgagcagagaaagcctctgctgtccgctgtgagtggcaaggaagccttcttggtaatgtccgtgtgcacctgtta

SEQ ID NO: 241402 - DNA, 100 bp, Homo sapiens
  chr21:32716048-32716148
  hyper
cagcgggacagccccgggcaggacgcatcctgggtgggtgacgtgatcccgcagtctcctccccgaccccatatcccatacaatgatcctcgcttacaga

SEQ ID NO: 241403 - DNA, 49 bp, Homo sapiens
  chr21:32932431-32932480
  hyper
ttccccatttacaacaaaggctgggatgtatgttccttacaccttgatt

SEQ ID NO: 241404 - DNA, 111 bp, Homo sapiens
  chr21:33031744-33031855
  hyper
aaccggcgggccacgcccccgtgaaaagaaggttgttttctccacatttcggggttctggacgtttcccggctgcggggcggggggagtctccggcgcacgcggccccttg

SEQ ID NO: 241405 - DNA, 1814 bp, Homo sapiens; identical to SEQ ID NO: 57583
  chr21:33244727-33246541
  hyper

SEQ ID NO: 241406 - DNA, 49 bp, Homo sapiens
  chr21:33651478-33651527
  hyper
ggccttggccaagcgtgatagtcactgcgcctgcgtcaggttttccagc

SEQ ID NO: 241407 - DNA, 1433 bp, Homo sapiens
  chr21:33783941-33785374
  hyper
agtgcgtccggccccgccctgggcctcattatctacgtttccgcgtcacgcccgccgcgaacttggcaggccctcccgccgggttcgggaacactgtgtgcctagcgcccgccctcctcccttccgccggccccgcgcgatccatagggtttgggtcgctgggcgccaggtacccgcacccggcaagcagccacggagcccctcgcgcacttgtcctcgatacccttgagttggggctacgcaggccactcctaggccactggctgggcgtccgaacgtgggtcaccccgcgcacagtctagaggttcagaaagatgctgtggcccactttaaaacaaagcccaattattagcgctcggcggctgtttgcgccggtgcagtgtcagatcccccagcgctgcggacaaccagcacccaaaggaagccgagctggagctaaagatcccggctccggagccatctgaccggttttgagacctccagctcgtcgccgtcctggctgcgagagcttgggcacggcgccggggctcagtctcctcttctgtggaatggcgataactgtatgtgccgggtgactgcacgtggcgcgcggcgggtggcggggatggcagcggtgcgatcccacgcctccaggaccccaccttcctgcggcccccgatcggccccgccccgggggcgccccagctgcacgcgcggcgctggctccaaagtgcgtcacgggcaccggccgcgctccttctgccgccagggcgaggctggcacccggccagcgcgggcagggccacgggtgcccggctgtttcccgggtgtggaaggcgctcaaggtgcgcggcccggggcgcgctactgggggcgccctccgcggtgggcagcgcgccagggatcggcctgggcagccgcggggcgcgcgaaggctgcgctttccctacggcccccctcgcttcctccggcacggcggcaacggagatttcctctcggggaaactacgcggatccttttcggggatcctcgccccgccccagttctccgccccctcccctttgctggggcgcctgggctggcccgcgcaggggaggaggctctggcagcctgggcagggaggcggcggggggccgcggagccgctggccatcgattctccccgccatgtgacgccgtccttagccctgcgacccccagcgcgtcccgggcctgcgcctccgccccgccgcgcagcgcacgatgcttctgccgggacgcgcacgccaaccgccgacgccccagcccgtgcagcatcccggcctccgccggcaggtagagccgccggggcagctcctgcgcctcttctactgcactgtcctggtctgctccaaagagatctcagcgctcaccgacttctctggtaagagcgccctccctggctgtgtgcccccggcaccgcggagcgcccaggtg

SEQ ID NO: 241408 - DNA, 139 bp, Homo sapiens
  chr21:33942018-33942157
  hyper
gtccagggactgccgcgctagggacggcacagctgaactgtgcaggcagcgaaggggcctcacggggaccgctcagctccctgagggcgcagccccccctggtcgggggggaataaacttccgcggttttcagtgaccc

SEQ ID NO: 241409 - DNA, 110 bp, Homo sapiens
  chr21:33984700-33984810
  hyper
tgagcgggggaaacggcactcgctcccggaagtggatgttgccaagagcaacagtgaagcagagttaaagagccgccagctcaagctcagaacccgagtgggggaggctg

SEQ ID NO: 241410 - DNA, 51 bp, Homo sapiens; identical to SEQ ID NO: 205964
  chr21:34100892-34100943
  hyper

SEQ ID NO: 241411 - DNA, 412 bp, Homo sapiens
  chr21:34392662-34393074
  hyper
attggagagggggcgtctgttggggggacctggcgtcattactgatggctagcagggaggagggaacgggttgtcacctcggcctcataaggccgtgagtgagtagtccagggcctcttcaggcatttttgaaactggattaactaggggggaaattgtagcactgaagccaccgtgactgtcttttgcgctgtgtggaaactccggtaaaactctttgggcaacagtcttatcaccagctcttcaacgtgtgcagcccttctggtcctgtccctgttctgggccccaggaatgcaaagcaggtccaggcactgtgaagaccctggcggtggaggaagaggcttcccggctgtggaggaagccagacccttacaacacaagacgagaaccagacctgcgtgggggagctctg

SEQ ID NO: 241412 - DNA, 1395 bp, Homo sapiens
  chr21:34395050-34396445
  hyper
gcacatgtttggtagccaaacgctgtcattcacgaccaggagcgatggctgcaatgcctttttctttgctttgctttccggtgccgggagccttgcctcccgccgccacccctggtcagctctgcgcaagaacgtcgttctgtttggcagccaggccgagacgcagcctgaatgtgagcaggaactcggagaagggaagggagagaatcagaaagaaggcccgggagggacccgggaagcagtgggaggtctgcgccctggagccccgcgagagcccgccggtttggcacgggctcctcccgggccgcccggcggtccaacaaaggccggccccgacacgcacccggtcttttgtgggagagaaacacaaagaagagggaaaaacacggaggaggccaacagcaccaggacgcgggggccaaccaggaactcccggagccggggcccattagcctctgcaaatgagcactccattccccaggaaggggccccagctgcgcgcgctggtgggaaccgcagtgcctgggacccgcccaggtcgcccaccccgggcgccgggcgcaggacccggacaagtcctggggacgcctccaggacgcaccagggcaagcttgggcaccgggatctaatttctagttattcctgggacggggtggggaggcataggagacacaccgagaggtactcagcatccgattggcaccagggccaagggagcccaggggcgacacagacctccccgacctcccaagctactccggcgacgggaggatgttgagggaagcctgccaggtgaagaaggggccagcagcagcacagagcttccgactttgccttccaggctctagactcgcgccatgccaagacgggcccctcgactttcacccctgactcccaactccagccactggaccgagcgcgcaaagaacctgagaccgcttgctctcaccgccgcaagtcggtcgcaggacagacaccagtgggcagcaacaaaaaaagaaaccgggttccgggacacgtgccggcggctggactaacctcagcggctgcaaccaaggagcgcgcacgttgcgcctgctggtgtttattagctacactggcaggcgcacaactccgcgccccgactggtggccccacagcgcgcaccacacatggcctcgctgctgttggcggggtaggcccgaaggaggcatctacaaatgcccgagccctttctgatccccacccccccgctccctgcgtcgtccgagtgacagattctactaattgaacggttatgggtcatccttgtaaccgttggacgacataacaccacgcttcagttcttcatgttttaaatacatatttaacggatggctgcagagccagctgggaaacacgcggattgaaaaataa

SEQ ID NO: 241413 - DNA, 39 bp, Homo sapiens
  chr21:34396694-34396733
  hyper
taggagactgtgtgcgtgtgtgcccgcgcgtgcgctcac

SEQ ID NO: 241414 - DNA, 231 bp, Homo sapiens
  chr21:34397567-34397798
  hyper
ccatctcctagacgcgcgagtagagcaccaagatagtggggactttgtgcctgggcatcgtttacatttggggcgccaaatgcccacgtgttgatgaaaccagtgagatgggaacaggcggcgggaaaccagacagaggaagagctagggaggagaccccagccccggatcctgggtcgccagggttttccgcgcgcatcccaaaaggtgcggctgcgtggggcatcaggt

SEQ ID NO: 241415 - DNA, 2715 bp, Homo sapiens
  chr21:34398016-34400731
  hyper
gcccattggttgtgcgcagggaggaggcgtgtgcccggcctggcgagtttcattgagcggaattagcccggatgacatcagcttcccagccccccggcgggcccagctcattggcgaggcagcccctccaggacacgcacattgttccccgcccccgcccccgccaccgctgccgccgtcgccgctgccaccgggctataaaaaccggccgagcccctaaaggtgcggatgcttattatagatcgacgcgacaccagcgcccggtgccaggttctcccctgaggcttttcggagcgagctcctcaaatcgcatccagagtaagtgtccccgccccacagcagccgcagcctagatcccagggacagactctcctcaactcggctgtgacccagaatgctccgatacagggggtctggatccctactctgcgggccatttctccagagcgactttgctcttctgtcctccccacactcaccgctgcatctccctcaccaaaagcgagaagtcggagcgacaacagctctttctgcccaagccccagtcagctggtgagctccccgtggtctccagatgcagcacatggactctgggccccgcgccggctctgggtgcatgtgcgtgtgcgtgtgtttgctgcgtggtgtcgatggagataaggtggatccgtttgaggaaccaaatcattagttctctatctagatctccattctccccaaagaaaggccctcacttcccactcgtttattccagcccgggggctcagttttcccacacctaactgaaagcccgaagcctctagaatgccacccgcaccccgagggtcaccaacgctccctgaaataacctgttgcatgagagcagaggggagatagagagagcttaattataggtacccgcgtgcagctaaaaggagggccagagatagtagcgagggggacgaggagccacgggccacctgtgccgggaccccgcgctgtggtactgcggtgcaggcgggagcagcttttctgtctctcactgactcactctctctctctctccctctctctctctctcattctctctcttttctcctcctctcctggaagttttcgggtccgagggaaggaggaccctgcgaaagctgcgacgactatcttcccctggggccatggactcggacgccagcctggtgtccagccgcccgtcgtcgccagagcccgatgacctttttctgccggcccggagtaagggcagcagcggcagcgccttcactgggggcaccgtgtcctcgtccaccccgagtgactgcccgccggagctgagcgccgagctgcgcggcgctatgggctctgcgggcgcgcatcctggggacaagctaggaggcagtggcttcaagtcatcctcgtccagcacctcgtcgtctacgtcgtcggcggctgcgtcgtccaccaagaaggacaagaagcaaatgacagagccggagctgcagcagctgcgtctcaagatcaacagccgcgagcgcaagcgcatgcacgacctcaacatcgccatggatggcctccgcgaggtcatgccgtacgcacacggcccttcggtgcgcaagctttccaagatcgccacgctgctgctggcgcgcaactacatcctcatgctcaccaactcgctggaggagatgaagcgactggtgagcgagatctacgggggccaccacgctggcttccacccgtcggcctgcggcggcctggcgcactccgcgcccctgcccgccgccaccgcgcacccggcagcagcagcgcacgccgcacatcaccccgcggtgcaccaccccatcctgccgcccgccgccgcagcggctgctgccgccgctgcagccgcggctgtgtccagcgcctctctgcccggatccgggctgccgtcggtcggctccatccgtccaccgcacggcctactcaagtctccgtctgctgccgcggccgccccgctggggggcgggggcggcggcagtggggcgagcgggggcttccagcactggggcggcatgccctgcccctgcagcatgtgccaggtgccgccgccgcaccaccacgtgtcggctatgggcgccggcagcctgccgcgcctcacctccgacgccaagtgagccgactggcgccggcgcgttctggcgacaggggagccaggggccgcggggaagcgaggactggcctgcgctgggctcgggagctctgtcgcgaggaggggcgcaggaccatggactgggggtggggcatggtggggattccagcatctgcgaacccaagcaatgggggcgcccacagagcagtggggagtgaggggatgttctctccgggacctgatcgagcgctgtctggctttaacctgagctggtccagtagacatcgttttatgaaaaggtaccgctgtgtgcattcctcactagaactcatccgacccccgacccccacctccgggaaaagattctaaaaacttctttccctgagagcgtggcctgacttgcagactcggcttgggcagcacttcggggggggagggggtgttatgggagggggacacattggggccttgctcctcttcctcctttcttggcgggtgggagactccgggtagccgcactgcagaagcaacagcccgaccgcgccctccagggtcgtccctggcccaaggccaggggccacaagttagttggaagccggcgttcggtatcagaa

SEQ ID NO: 241416 - DNA, 383 bp, Homo sapiens
  chr21:34401198-34401581
  hyper
atcggagtctaagccggctttcctctattttggtttatttttgccacgtttaacacaaatggtaaactcctccacgtgcttcctgcgttccgtgcaagccgcctcggcgctgcctgcgttgcaaactgggctttgtagcgtctgccgtgtaacacccttcctctgatcgcaccgcccctcgcagagagtgtatcatctgttttatttttgtaaaaacaaagtgctaaataatatttattacttgtttggttgcaaaaacggaataaatgactgagtgttgagattttaaataaaatttaaagtaaagtcgggggatttccatccgtgtgccaccccgaaaaggggttcaggacgcgataccttgggaccggatttggggatcg

SEQ ID NO: 241417 - DNA, 133 bp, Homo sapiens
  chr21:34442689-34442822
  hyper
ctcctccacctcctccacctcctccacttcctcctcctccacgacggcccccctcctccccaaggctgcgcgcgagaagccggaggcgccggccgagcctccaggccccgggcccgggtcaggcgcgcacccg

SEQ ID NO: 241418 - DNA, 416 bp, Homo sapiens
  chr21:34443782-34444198
  hyper
gctcccagtactaggggctgcgctcgagcagtggcgggggcggaggggtggttcttttccttctcctccgccagaggccacgggcgcccttgttcccgccggccaggtcctatcaaaggaggctgccggaactcaagaggcagaaaaagaccagttaggcggtgcagacggtctgggacgtggcagacggacggaccctcggcggacaggtggtcggcgtcggggtgcggtgggtaggggcgaggacaacgcagggtgcgctgggttgggacgtgggtccacttttgtagaccagctgtttggagagctgtatttaagactcgcgtatccagtgttttgtcgcagagagttttcgctcttaaatcctgggggtttcttagaaagcaacttagaactcgagattcacctttcgtttc

SEQ ID NO: 241419 - DNA, 313 bp, Homo sapiens
  chr21:34481909-34482222
  hyper
attctttccttcctcggagggcgtttctgataggacaagctgggcccgggcggattctcaccccaccaccccaactccaggcttgggtccatctgccgccagtggtgacttgggtggcgccctccgcagcagacagccgtgcgccctcggcgacccggtccctgcgctccggcgcccgcaggtcctcgctcccggcttctgcacctcccgctccgggacatctggctgagccgcgcctccctctccccgcagcctccgccggccccgcctcccctcaccacccttcccttgtttggggcggtaaggtcagaag

SEQ ID NO: 241420 - DNA, 950 bp, Homo sapiens
  chr21:34602440-34603390
  hyper
cgagcgtcgggtcccagagccgggcgcggctggggcccgaggctagcatctctcgggagccgcaaggcgagagctgcaaaggtaacgcagcgtggcggggtcgcgggagcggagcgcgtggccagctgactggagggaaaacgccgcctccctgcagcggttcccggaatcccctccggttccctctcgctctccccgactcctcctcctcctcctgccctccctctgcgtcttgagtatgcggctagtgcgcccttcctctctcccggggccgcacctgcgaccccaggacccctcccgggccctgtcctgcgccctccacgcgtcgcccctgctgggagtccgctttcgttgcacccctccgcgtcccaccccaccccaccaaggatgcccaggataccgggcatttgccactgcaagatgtgagtcgttgctaagtttgagggtcacattcctccaggtccaccccgccttgcaaaaccggctcaccagctgggtgctcaggttcgggatctccagcccgcccccttgaggtcccctgggattagcccccctcgacctgcgtcagggtcacagactgcagccggggctggagcggcctacacccctccggatccgctgcgtggaggcaggagggggaaggggcgaggggacgtggccgcggagacagaagggtgcaccctcccagggtcggagaggggagatactgggaagatactccgcgaatatggagaggcgatcggcacttgcatttcaaccctgagcaaatcaatccgttacacgcagtagcgagttgactccatcagcccgtttatttggttagcgatggttatattgactctgagtattcccacctcctttcttttaacatttttttttttatttccttgttttgtttagcaagaagtcttagaaacgaatatagcatgcttgggcgttgattcagtggt

SEQ ID NO: 241421 - DNA, 131 bp, Homo sapiens
  chr21:34776086-34776217
  hyper
aggtgggaacctgcgggtgccccaggtgggggtcttgcggggtgcccagggctagaggggcccgctgggagcccgcagcggggctgggatgggcggccaggagttccagacaggagctgggcagcagcagg

SEQ ID NO: 241422 - DNA, 317 bp, Homo sapiens
  chr21:34915084-34915401
  hyper
ctgacaacttatgcggacacggtcgcctcaagagagacggctcctgtaatggcgcctgcgtcagacactaacatggcggacatagtcgtgcgcggcgcaaacgtcagcacctctaccccagccgctcagaaacagcagaggagagcagggccgtgctcactgattggtccctcggtggagcgggccggaccgggcattccctttggagccaatcaggaaggcgagagaccgaattggcccgtgcgcctcctcccgaggcatgctgggagcctggaggactagcgaggaggagttgagagaacggagcggacgccatg

SEQ ID NO: 241423 - DNA, 318 bp, Homo sapiens
  chr21:34960938-34961256
  hyper
aagggccatgacgcgcggcggctgagggtagccggccgccctacagagacttcccgcgcgcgccgggcccgcccctgacgtggcgcctcgccgagctcccgcccccgacgcggccccgcctccgcccccgccggttccgagcggagcatgcgcagtgggcagcccgcgagacgcagcccgcagcggcgatcccgggtggccgtcaacgcccactgtcccagcggtgaccctgccctggcgcttctgccaggtcctcggccagagtccagtcgccaggttcagcgacgcttctggaaagtatgcgatccagggcgctga

SEQ ID NO: 241424 - DNA, 57 bp, Homo sapiens; identical to SEQ ID NO: 205969
  chr21:35013432-35013489
  hyper

SEQ ID NO: 241425 - DNA, 412 bp, Homo sapiens
  chr21:35014227-35014639
  hyper
gcgaagttggaatcgcccggatgggttccgttttatgcaaattttagccgaagaccacacccttcctcattccaaccataggcccggccaacccctttgggttgtgcttcgcctttttcctttccacattattctctccttgaaaacctccaataattaagtcaattaagtgcatcctatctagtgtctctcacggcaacgagcagatgcaccgaaatcgtgcaacaaaatctccataaaccacgataggcaacctcagaccataaatctcctgttacgcctacatggggaggagggggagagtgctaatcctgcccccacacagcccctgctgattggctcattcggcttgtcactctgttgtcttacatttctttggctcaccctctttgggttcgcacggtgggcgggg

SEQ ID NO: 241426 - DNA, 50 bp, Homo sapiens; identical to SEQ ID NO: 205970
  chr21:35747796-35747846
  hyper

SEQ ID NO: 241427 - DNA, 87 bp, Homo sapiens
  chr21:35986732-35986819
  hyper
agagcgcagggggcggcggcgctgccccaccttggggagcgaattcacccccctagtcgcaccagcctgggcgcacacgggggccgg

SEQ ID NO: 241428 - DNA, 117 bp, Homo sapiens
  chr21:35987695-35987812
  hyper
cgaagcctcagggcggccatgttggttaggggcaaagtcctcgtccccagttccgcttttctgacagctggtgccagctgaaggacgccgggcagagtcctcggctcttgggccctt

SEQ ID NO: 241429 - DNA, 131 bp, Homo sapiens
  chr21:36041404-36041535
  hyper
gtgggaagcagacgcgcaatcggggagaagctccagcagtggaggaagagtccagggagtttcagctgggcagaaggggcgcagaggcttggggccaagcggagtttgccctgcgggtcctgcgcaaggcc

SEQ ID NO: 241430 - DNA, 76 bp, Homo sapiens
  chr21:36042435-36042511
  hyper
tagaggcgggggacccggcgggggacggcgtagaagcgggggtcccggcgggggacagcgtagaagccgaaggccc

SEQ ID NO: 241431 - DNA, 619 bp, Homo sapiens
  chr21:36042691-36043310
  hyper
ggtcccgggggtaaaggggtccgaagaagcggcccccggggacgcaagggcagacgctggcgaggacagggtaggggatgggccacagcaggagccgggggaggacgaagagagacgagagcggagcccggaggggccaagggaggaggaagcagcggggggcgaagaggaatcccccgacagcagcccacatggggaggcctccaggggcgccgcggagcctgaggcccagctcagcaaccacctggccgaggagggccccgccgagggtagcggcgaggccgcgcgcgtgaacggccgccgggaggacggagaggcgtccgagccccgggccctggggcaggagcacgacatcaccctcttcgtcaaggtaaagctcgcttccctcaattcttaggacgacccccttccattcgaggtcttggtcatctcagatcccagagggacgcgcagggaggaacccttggtggtatcctgattgtcatcaggcgcttccatgcgcgggcggtaggcgggacagccgggatttcccggagaagagtttccagggcatttgcgggaggactcaatggtttggaagcaaagactttgggggtgggggcgacggggagtgcgatgg

SEQ ID NO: 241432 - DNA, 169 bp, Homo sapiens; identical to SEQ ID NO: 205979
  chr21:36260355-36260524
  hyper

SEQ ID NO: 241433 - DNA, 395 bp, Homo sapiens
  chr21:36261485-36261880
  hyper
gccgcccagggccaggcctccgcttccagggcgggggtgcgatttggccgcggggcccgggggagccactccgcgctcctgcaccgtccggctggcagctgcggcgaagcggcgctgattccttgcatgaggccggacggcgtccgcgcgtgccgtttgctctcagcgtcttcccttgggtcggtttctgtaatgggtgttttttaccgctgcgcccgggccgcggctcgatccctccgcgcgtctcacttgctgcgtgcgtcagcggccagcgaagagtttcctagtcaggaaagaccccaagaacgcgcggctggaaggaaagttgaaagcagccacgcggcttgctcccgggccttgtagcgccggcacccgcagcagccggacagcctgcc

SEQ ID NO: 241434 - DNA, 186 bp, Homo sapiens
  chr21:37432611-37432797
  hyper
tggaggcccgacccggaagtcctactagctcacctaggcgccggcggccgcttccaagatggaggctgcagtgggcgggcccaaggcacgtggaaataccaaacagccccagatgaaggcaagttaaaggaaccggccaaaactgcagagggagaggctgaaggctgtcgcgcctgcctggtgtcc

SEQ ID NO: 241435 - DNA, 139 bp, Homo sapiens; identical to SEQ ID NO: 205984
  chr21:37692217-37692356
  hyper

SEQ ID NO: 241436 - DNA, 241 bp, Homo sapiens; identical to SEQ ID NO: 205985
  chr21:37757666-37757907
  hyper

SEQ ID NO: 241437 - DNA, 1619 bp, Homo sapiens
  chr21:38064290-38065909
  hyper
gtgtcactgaacggcgctcctcccacggcgacacctccgtgctctttttgcttgtatttattcaaaaattagatttgtcaataacgcagggcctggcaaataggaggacctctccaaaattaaatgcaagattgaacataggtctctcacatcataataaagcggtttaatttggcttccaccgggggagcggaatagcacttgcccagcccctttgagccctgcgcacactcgcaccaccgccgcctctcccacaaagagaaaagccacgagaagggtcccgactgtgcaaatctgtgtgccctcccgaggaaggcgcccgagggctcactctgcctggttcaaaagcttgtgggagagaagcacccaaaagaattccgttgtcaggttaaagtctttgtctatactcgcaggatgggaaggacgatggtgcaatcaccgagattattttgttttcgtcctctaaaaaatgaagaggggactggagtcgggaccaaaattattggcagaccgcacggtttgcagtcaccctgaagttaccagcagccgatgctgtgtccagggaaaatattcttgagctggaaaacgtgctaatttaaagtctttcgtttcacacgaaaatgtgctgcactctttgactgctcaggaatttgctctagcacctagaaggaattctggcttagggcaggggcgagggacagtggagggcgttggaccttcttccgcaatcgggaccactccaggtctccccggagaaggctgagtctccagcgcgtggattcagatcaggactctgtctaagtaggcgagagctggggataccgctgggggctttggcgaagctaagaaagcactggcttcttattctcaccagacatctcaacacccacgtgcgctgggtcccgcagtctctcgcccgccccacgcgggtcccagccctggtccttactccccgcgcgggaagaatctggggagggtgggggcggagaggcggctgatcggagagtgggagggaggatgggagatgggcagaggctgcccgcatcagggccaggacagacgtccgcgcggccccaggcactcacttgagtgtcacgcaagtcaccccaacaccgcacaagacagtggcggggtgcgcaccgaggcccctacctggggggtgtgcgcgcactgaacgaccccttctccaggtgcgcgagccgctccggcggccgtgcacactgcgcccccttccgcccacctgcctggcctgcgtttctaaccacgcgggcggtcccgagacttcgcgcaaaaggcaggaccgcgactcccaataatgatatcttcgaaataaccccctgctgagccggcgcccagggccgggggtagagtcccgagtcccttttgcggaattaaggagacctctggcgaccggggagcctgcccctgtgaccgctccagcagcccctgccgcgtgcgtgcccgagtgtggcccgcagctcccaaagcccaggtgtgtgtggcctagggcggggagagttggcgacccgggcccatcaccgccccagtgccaccgccccagtgcctgaccagatggggtgcggtccctacgcccggcgtggccccgccgccgctcagat

SEQ ID NO: 241438 - DNA, 243 bp, Homo sapiens
  chr21:38065955-38066198
  hyper
ggagcagctctaggccgtgggcttcgtctcctcctcctggaaggaatgaatgggctccccgacacacacctctcagaaaactcacctttcacgctgaccttcaaaagaaaagaaagaaagaaaaagaaaaatccgctcgaagcgggaaaatgtccacgcccggatttggggtggacacgcgccccggcctggctggaggggccaacccagcggggcccgcctgcccgccggcctttctgtaac

SEQ ID NO: 241439 - DNA, 334 bp, Homo sapiens
  chr21:38066516-38066850
  hyper
gggctgtttcgcgacgtcattaatgaactaatcggttttcagatttcaagacggtgtgtaattgatgtaaccactgaggaatttcagtgcacaccagactaagactcttccagcgcaggggattccagatgcttcttgggccctctggaagccatggggatgtttccagaccgaaaggagggctttgctggggagcagatgtgctgcctctccccgacccaggattttgaggccatgtttccgttaatctggaccgagagccctctgggagagggaggcaggtcgtagggggcgggggtgagggggagcgagatgaggtcgtcgctggacgctg

SEQ ID NO: 241440 - DNA, 1292 bp, Homo sapiens
  chr21:38068886-38070178
  hyper
cttttccgagggcccgaggctccccctccagcagggagagctccgggacggcccccaccaagggttgggtttcttccttcacaattccacagaggcatccctgtccttcctacctgggaaacctcgaggtgcggtgcccgtgtacttctggtactttgcgtggtgccatcagggaccccagagccacagctgcgtgtgtgtgtggatgtgtgtgtgtgtgtgcgcgcgcgcgcgtgtacggcgaaaggatgtgcttgggggagccgagtacacaacgtctgcttgggcagctgctgggcaggcgttgggcctggaggtatctcacacccacgtatcttccagtcttcaaacacggcattgctctgcctcccgtagcgcgcttcgaacctgcctcgcggacacgtgaacagaggctgtccctgggaagataagtgcgctttcccgtaaaatccgggaaatttgccttgaggaaagtttccgttcttgttacttgtcgggtttctcccacttccacttagccatgtttctgcgatctgggtaatccctttcaagcccaggaggaattctcccgggtccataattgagggtcggaagccgtgggggtgagaaacgcattaaatcctcccgaagcccaggaggtgccagagcgggctcagggggccgcctgcggaagctgcggcaggggctgggtccgtagcctctaaccccttggagctccttctcccagaggcccggagccggcagctgtcagcgcagccaggagcgggatcctgggcgcggaggtgggtccgactcgccaggcttgggcattggagacccgcgccgctagcccatggccctctgctcaagccgctgcaacaggaaagcgctcctggatccgaaaccccaaaggaaagcgctgttactctgtgcgtccggctcgcgtggcgtcgcggtttcggagcaccaagcctgcgagccctggccacgatgtggactccgcaaggggctagggacaggcagggggagagcccgggtttgcgcacaccttccagcccctggagggagcctgctcggcttcgaacgccttcgaacttttgaccttcaaaggagtccctggaaaaggtcaggagcgcctgctgcaggcacggttgccgaaggccaggccttcctggcgcaggggagggccaggggagggaagcggatactcagtcgctgtccgacggcgagttttcggagcagcaggctcatgatcccgggccagtggcgagagcagtgacaccgagaacccaaatctccgcgcccccatccgc

SEQ ID NO: 241441 - DNA, 2016 bp, Homo sapiens
  chr21:38070510-38072526
  hyper
aatgcccagtggccgcgtctgcaacggagtcttctttctccaattgccttctgccccatcaccatgggccccacctgcgccacctgcgcccaccctgtgaccctggctcagcgaccttggcccttaatcgcccaacgccgattcctcaaaattccggctgcgctgaatcgggctgcttttgccgccgccccggcagttgggccctgtttccgccggcgccctgggagaggcctcaccactcggctgggctccctggcccctcccttcccctggcctgagcgcccctgcggcctcccgctcctcctgagaaggcgacaatctctttgcaccttagtgtttcgaggacagaaagggcagaagggtcacttcggagccactcgcgccgttttcacgtgtgtgtgtaatggggggaggggggctcccggctttccccttttcagctcttggacctgcaacaccgggagggcgaggacgcgggaccagcgcaccctcggaaggctcgatcctccccggcagggcgcctggccaacgagtcgcgccgcctcctctcggccgcgcctgctggtgaccttcccgagagccacaggggcggcctcggcacccctccttccctcgccctccctgccgcccatcctagctccggggtccggcgaccggcgctcaggagcgggtccccgcggcgcgccgtgtgcactcaccgcgacttccccgaacccgggagcgcgcgggtctctcccgggagagtccctggaggcagcgacgcggaggcgcgcctgtgactccagggccgcggcggggtcggaggcaagattcgccgcccccgcccccgccgcggtccctcccccctcccgctcccccctccgggacccaggcggccagtgctccgcccgaaggcgggtctgccataaacaaacgcggctcggccgcacgtggacagcggaggtgctgcgcctagccacacatcgcgggctccggcgctgcgtctccaggcacagggagccgccaggaagggcaggagagcgcgcccgggccagggcccggccccagccgcctgcgactcgctcccctccgctgggctcccgctccatggctccgcggccaccgccgcccctgtcgccctccggtccggaggggccttgccgcagccggttcgagcactcgacgaaggagtaagcagcgcctccgcctccgcgccggccgcccccaccccccaggaaggccgaggcaggagaggcaggagggaggaaacaggagcgagcaggaacggggctccggttgctgcaggacggtccagcccggaggaggctgcgctccgggcagcggcgggcggcgccgccgggttgctcggagctcaggcccggcggctgcggggaggcgtctcggaaccccgggaggccccccgcacctgcccgcggcccactccgcggactcacctggctcccggctcccccttccccatccccgccgccgcagcccgagcggggctccgcgggcctggagcacggccgggtctaatatgcccggagccgaggcgcgatgaaggagaagtccaagaatgcggccaagaccaggagggagaaggaaaatggcgagttttacgagcttgccaagctgctcccgctgccgtcggccatcacttcgcagctggacaaagcgtccatcatccgcctcaccacgagctacctgaagatgcgcgccgtcttccccgaaggtgaggcctcaggtgggcggccggggacgctggggagcccggcggccccggcccaggcgggaagcgcaagccagcccgcccagaggggttgccgcggcctggcgtccagagctggggcgtctgagggaggttgcgtgagggtcttcggcttcggcgctggcttggggcgaggggccagggccttggcggcccaggcgaccaaaccctctcctggtccagggctgggtgagggcgaattacgaattgttccaggggcaggcagtcccccagcccgcacggccagcgagttctttctggttttgttc

SEQ ID NO: 241442 - DNA, 1225 bp, Homo sapiens
  chr21:38072900-38074125
  hyper
gaaggagggtcagcttcaggcgctgcgagtcagcggggatcacggtgaggcccaagcactgcaggctgaggccacagagcgaacacttgtgctgagccgggccctctcgtgaggctggggtgcgggaagtccgggcaggagagacccgcccccgccgttgctgagctgagacccggctgaaagagaggggtccgattaattcgaaaatggcagacagagctgagcgctgccgttcttttcaggattgaaaatgtgccagtgggccaggggcgctgggacccgcggtgcggaagactcggaacaggaagaaatagtggcgcgctgggtgggctgccccgccgcccacgccggttgccgctggtgacagtggctgcccggccaggcacctccgagcagcaggtctgagcgtttttggcgtcccaagcgttccgggccgcgtcttccagagcctctgctcccagcggggtcgctgcggcctggcccgaaggatttgactctttgctgggaggcgcgctgctcagggttctggtgggtcctctgggcccaggagctgggagggctgcgccggcctctggagccccgggagccagtgccgaggtagggagacaacttccgccgcagggcgccggacggtcggggcagagcaggcgacaggtgtccctaggccgcagggcgcttccatagcgccatccccaccaggcactctactcgaaatcggaaagctcgaccttttgcgttcgcctctgccaagcctgttatttgtgctggccgctgggtctggagctgcgcttctcggcccctccccggtggagcgcagagggctggtctgcaagcgcggcctccagccccgcggctccccggcccaggagccaggcgcgggctgacccgggagcacccggcagcggagggggctggaagcggaccctaggcctctcctgtgccacccggccctaccgcgcggccgcggggcgctctcctctcgggcgcagcggtccttcagcccagggcaggttcctccctttcctactcggaacgtggcaaagataccccagtcccagcccctccagctgagagctgttgcccaaggtcgtcgctacttgtccgctcaatggtgaccccttggcagagaactagggatgattccactccggttgatgttttaggggaaattaaaagaacattcggttttctgagtctccttccggggaggcgtggtggtaactgg

SEQ ID NO: 241443 - DNA, 574 bp, Homo sapiens
  chr21:38076669-38077243
  hyper
gtttagcagaacaacgtagattttttacaacgctttccccgtctctgctttgaagcctgccaggctgcagctggggatccaggagggaaagcccgcaggcgcagaggggacaatccgggaagtggtaaaggggacacccgggcacagggcctgtgctttcgttgcaggcgaggaagtggagcgcgcgctgcagattcagcgcggggctagaggaggggacctggatccctgaaccccggggcggaaagggagcctccgggcggctgtgggtgccgcgctcctcggagccagcagctgctggggcggcgtccgaactccccaggtctgcgcacggcaatgggggcaccgggccttctgtctgtcctcagaatacgtaggatacccgcgggcgacaagccgggccaggctaggagcctccttccctgcccctccccatcggccgcgggaggctttcttggggcgtccccacgaccacccccttctcacccggtccccagtttggaaaaaggcgcaagaagcgggcttttcagggaccccggggagaacacgagggctccgacgcgggagaaggatt

SEQ ID NO: 241444 - DNA, 227 bp, Homo sapiens
  chr21:38077461-38077688
  hyper
tgggtcataaacgccgaggtcgggggtggcggagctgtagaggctgcccgcgcagaaagctccaggatcccaatatgtgcttgcgtggagcagggagcggaagaggcagccggtcctcaccctcctctcccgccacgcacatatccttcttgacttcgaagtggtttgcaatccgaaagtgagaccttgagtcctcagatggccggcaacgcgccgaggtcacgctc

SEQ ID NO: 241445 - DNA, 70 bp, Homo sapiens
  chr21:38078417-38078487
  hyper
ccaggaccagcttcggaagaggagggatcgcttggaggccgtgcagtgtgaggaacggcaggcagggtgt

SEQ ID NO: 241446 - DNA, 42 bp, Homo sapiens
  chr21:38078753-38078795
  hyper
gagtgctgggagccgctaaccccgaggcgcctagcacagact

SEQ ID NO: 241447 - DNA, 1826 bp, Homo sapiens
  chr21:38080009-38081835
  hyper
gcccagggcgttcccggggaggctgagagacccagggtgctctgggtgactgcacggcgactcctcgggaacccactcgtggctgcccgcttggaagggctttgcggccccgggaacgatctccaggatctccacggctggtcaggttccccgtccctcgtatcccgcgctgcccgggggctcctgcctttggttcagtgctcgcggcaccaccgcactcaggacggcagtggggggctggggctggggctgggcctggcccagcgtgggttggggcgggggacgcgccagcagcgcccgcagctcgctccgcaggggtcgcagccaggggtcgggagctaggctcgtgggccgggagacgccgggcgcgttgtcctccggggaggttggggtgcaggcggtgcaccgaccctcgccatctggcgctgcagccaccagccacggcgcttagtggagggtctgcggccaggctcccggcggaaagattccggggagggctcgggggttgtcccagcccgcgctaagcgccgcagcctcgcccggctttcctgcttcctcggactgtgcaggggaagcctggggtctcgcggggcgcagcagtcaggtcgagggtgcagcaggaggggagtcctgacgggcaggtccctctttcccctggtgcgcaacactggttggtagcttttgcggaggtggtgaagaagggcaggaggcctgttgagcggaggagtccggggatccctaattatgtgacaggagaccctttccagttcggcctgtggcccatccctctctcaccgccggcagattggagtctgctctcggggagcccccaggtaaacccctcacagggagaaggtttcggattggaaggaggaccgcgctcgtggggcgcctgtgagagctgggaagcccaaggggtagcgtgtagggggttttttatgcgggaggagctgcctcctgggcggcggggactttctgtctcagcctgtctgcctttgggaaaacaaggagttgccggagaagcagggaaagaaaggagggagggaaggagggtccttgggggaatatttgcgggtcaaatcgatatccccgtttggccacgagaatggcgatttcaaagcagattagattactttgtggcatttcaaataaaacggcaatttcagggccatgagcacgtgggcgacccgcgggagctgtgggcctggcaggctcgcacaggcgcccgggctgccggccgctgcggggatttctcccccagccttttctttttaacagagggcaaaggggcgacggcgagagcacagatggcggctgcggagccggggaggcggcggggagacgcgcgggactcgtggggagggctggcagggtgcaggggttccgcgtgacctgcccggctcccaggcatcgggctgggcgctgcagtttaccgatttgctttcgtccctcgtccaggtttaggagacgcgtggggacagccgagccgcgccgggcccctggacggcgtcgccaaggagctgggatcgcacttgctgcaggtagagcggcctcgccgggggaggagcgcagccgccgcaggctcccttcccaccccgccaccccagcctccaggcgtcccttccccaggagcgccaggcagatccagaggctgccgggggctggggatggggtggtccccactgcggagggatggacgcttagcatgtcggatgcggcctgcggccaaccctaccctaaccctacgtctgcccccacaccccgccgaaggccccaggactccccaggccacctgagacctacgccaggggcgcctcccgagcgtg

SEQ ID NO: 241448 - DNA, 539 bp, Homo sapiens
  chr21:38082592-38083131
  hyper
ggtgcttagcgccccgagcccggggccattcaccctgcaggagctgcacgcgcccctgacctcggcttttccctggcagcagaggggctttgcgggtcggccgggtagccctgagcacagctcgccacttccaggtgggctgttggcgctggctggggacacatcccgatctttcaaatgccctttacagagcctcatcaacgacccgattcattcccccctcctgtcatttgtctctgccatcgaaaaatgcctaccgagagctgctctgcatttccgccctctattttgtgttttactttaaaataataataaaaaaaatgttggctgcaggacgccatgacttaggtcagcgagtcagccgctagctctgcatttccaaaaagcagatcttttcacaactctcttgccccaagtgccctggtgtggtttattttttaaaatgcatgcctgcggaagagaagacccggggaatattcgaaaccccgagcttttacaacataaagcgcatggtgtggccgcggcgagtaatggcgctc

SEQ ID NO: 241449 - DNA, 927 bp, Homo sapiens
  chr21:38119710-38120637
  hyper
atatgctgcattaacgtgtattacttaacaggcattccacctgtttccctgctttgtaacgcggctcctggaacatttcaggtcgcgtcctgagattggacagcacggcctagactaaggcgggggagggcgacagcgaccccgcgggtgcagcgcgtgggcggccgaggggtggtggctgcgcccggggcttgggggtggggtggctgcggccgcgccccttgctgccctctaacgtgtcgcctgtccccgcagcgcccgccgccgccgtgcgcaggttcggcgaggacaccgcgcccccgagcttcccgagctgcggccactaccgcgaggagcccgcgctgggcccggccaaagccgcccgccaggccgcccgggacggggcgcggctggcgctggcccgcgcggcacccgagtgctgcgcgcccccgacccccgaggccccgggcgcgccggcgcagctgcccttcgtgctgctcaactaccaccgcgtgctggcccggcgcggaccgctggggggcgccgcacccgccgcctccggcctggcctgcgctcccggcggccccgaggcggcgaccggcgcgctgcggctccggcacccgagccccgccgccacctccccgcccggcgcgcccctgccgcactacctgggcgcctcggtcatcatcaccaacgggaggtgacccgctggccgcccgcgccaggagcctggacccggcctcccggggctgcggcgccaccgagcccggcaaatgcgcacgacctacattaatttatgcagagacagctgtttgaattggaccccgccgccgacttgcggatttccaccgcggaggccccgcgcgccggtgccgagggccgaggagcgcccgggtccgggcaggtgaccgcccgcctctgtcctgcgagggccggtgcgacccagtt

SEQ ID NO: 241450 - DNA, 89 bp, Homo sapiens
  chr21:38362345-38362434
  hyper
agacggctgttccctggcagaggctcgcggtggactgcctgaccctcgcccggccccagcacgcccccggcgaacgcccacccctgtcc

SEQ ID NO: 241451 - DNA, 1004 bp, Homo sapiens
  chr21:38378577-38379581
  hyper
aaacgcccctagcccgcgggcctcgctttcctctcccgggttcctgggtcacttcccgctgtctccagcccgagctcgtggccccaatccctggtacctccatcctctggtcaccccttctctggtgccccctccccgacttttctttgtcccgtccccacccttgcccgggcctgccggacccccctccttgacacccggcgccacctccttgagcttttctcgtctcctccccatccccggctccctggtcccctcccggaacttctctggtcccctccgctcctccgacccgggcttttccttcgtaccctgcggccccctccgcacccctcacggagctcctcgggtcctgccccctcccagcgcttgcccgcgccgccccgcccccgtttttaaacctggcgcgcgggtaggtgagcgcgttagcccgagtggatctaggcgcgctcgtaggccggcgccgcagcaaggggcgcgggctccgccggcaccatggagcccgaagcggcggccggagcccggaaggcgcgggggcgcggctgtcactgccccggggacgctccctggaggcctccgccaccgcgcgggccggagaggtgagggtggccccgcgccccggtggacgcgctgagaggcgtgcgcggtggcggtgcggggagcgcagcgagcgggaggctggggcgctgctgaacccccgatccccagcggagctccggagctcgacggcgacgccaagcaagctcctgagccggcagccgggttcccgggaggggcgctcagttctccggttccaacgcacagctctgaagtgcggaggcccaggatgtagctggccaggaaaggggccgacgcttccgtgtagaggagatctcagttagccagccggggacactgcagtctcgggctcctaagccagccttgcaaaggcaatctctcaccttgctactttctcggtagccgtttctgttgtccctggattgggggctcggcgttcgctgtcc

SEQ ID NO: 241452 - DNA, 321 bp, Homo sapiens
  chr21:38382168-38382489
  hyper
ggggctgtagagcccgccaatcctcacccctagcccggagcccgctctttgcagagcccagctggttgcgcagagcgaccagcgccagtctgtgctctggtactgtgcaccgccctgggttccctgcagtccaccgacgagagctgcccagcgcagggaaggaacgcttcttgctcaacagcgccctcgcccgacaaagcaggacaattccccagctcccaagccctcttctgtatttctcaaaaatgccattggctggagtggcggtgaagaggactaacgcctggtgacctgtaccagggctcccggcaagcaaagcaa

SEQ ID NO: 241453 - DNA, 244 bp, Homo sapiens
  chr21:38445155-38445399
  hyper
gggcctactaggtcgcggcgcccaggccccgggccctgcccattcgtggagacttctatttctcattcgaggcggggtatgggggggccctcgacctcgggtccttcatacgcccacccaggcccctcccgacacctcggccacctcagcgctgagttctccgcgcaagcgccgactggggagccgcagtggggaagaggaaaacctgagggaaaggcctaggcgcgacggcaacccccaccct

SEQ ID NO: 241454 - DNA, 944 bp, Homo sapiens
  chr21:38592844-38593788
  hyper
cagttccctcctcacagggtcgctataacgaggtaacatacagcacttagaagacggcctgacccagaataacactaatgttcacatggctgcgagtctcagaccaaaatcaatagccggtatctactgaaactgcagcaaggcgaaaccacgggaatggcgctccgttgagtagagcaacgcacagcacatcacatcgcatcctccgtagcgggaggctctggcctcaccgcagcggcacttcccggaagagcccaggatattcggggacccgcaccggacaggcggcccaggccccctggcgcccagctggccgccctgttgcagctctcatgccaagacctgcgcctaacggcagggattccggcggtcatcatttattcttggcgctaagctgccgcttctcttttttatcaccacagagtaacgcagaccccaccgtttccttccattctgagccaaccactccagcagccaccggggcgccaggttatgctggggctgcaccacccggcccgaggcttttgaagccacgcctgagcgcggaggatgggcaggatttgccccgtgaactcccgcgcacgcaggctccgcgcgaggcccgggcgcccgagcggcgattccctcccctatcaccagctccagggtggtgccccccggctgtggagcccagaccccggccgtccagcagcgtatagacgagcccatgtctgcgatgtaactgcaccgcgctggggatccacctcccgccagggtgagggcgccgtcctccagcgtatgctaggcaggcgcgccccgccctcctggtcacgtgaccacgcctacagccgaagaggatgggaaaatgcggccctgttcctgaacaggaagcggaagcaggaaggaactgagaacaccagcatctgctgccgccctgaatcagcgttagcatgtggaggcaacct

SEQ ID NO: 241455 - DNA, 109 bp, Homo sapiens; identical to SEQ ID NO: 205998
  chr21:38608386-38608495
  hyper

SEQ ID NO: 241456 - DNA, 513 bp, Homo sapiens
  chr21:38639530-38640043
  hyper
ccacttaccccggcgtgataaactttattcgctcttttaatcttgatgtccagggcggtccccatctccaattctccgcagcagccgccacttccggctgcgcgtgaccccagggaaacaaggggcgcctccccgcttcgttctgggccccgcccctttccctctctgccggcagtggctcacgtgacctcgcagcggcgtcgcacacactccctagctccgaggggcgaatgcccacgccttcctccttccggcacaagagccggccttagtgcgggccgaagcgctgtcacggttcaccccgccccctctgggcgtgaaagacggggccaagctagccccaccccttccgtagggacagtcttacgccggaaatgctcctttgctgtccgggttagcggagggagggaggaacggctctccccgcgtgccccgcggctggaggcggagccgagcctgtctgtcggttgcagcctgcgcaggaaggatgacgctcccgtcaggctgtgcggc

SEQ ID NO: 241457 - DNA, 253 bp, Homo sapiens
  chr21:38737938-38738191
  hyper
agaataaaaatcagcgaaagccaggatattaataaagagttttgatggttaaggacaagcaggcgaattaagactctggaaaccgagaaggtgtatagaaaagaaaaccagagagctggacgacaaggacacagtaacagcacaaggggattcatctaaagggcattccgatggagcaggcaggctgcgccccgaaaggtggggagaggttggaagcagatgggcaggcacaggcgagcgtgcactgcctgaa

SEQ ID NO: 241458 - DNA, 372 bp, Homo sapiens
  chr21:38936052-38936424
  hyper
gggccgcgagccgccggcgtaggccgctccagctggaagaccccaccgctagggttccagggggctgcggacgcttccgaggggcccaaggcgaaagaacgcagcccgcttgtcggccacgtgaccgtccccgtccgcgtccgcagcgaccacgtgactgtgcgtccgcggcgtcgattgactgggagctccctggccacgccctaagcgccagccccgggcttcggggggcggtgctgctgcggttgccatggcgtcttccgagcgcgcaggcgtgggcccagagtagcttttcgggtatttgctaccggctctcggtagggctggtcacctttgcttgctgagcttcgcgccctgcgtcctttggtcccc

SEQ ID NO: 241459 - DNA, 239 bp, Homo sapiens
  chr21:39047606-39047845
  hyper
agaggaaggaatcaagttggcggggatttttccgcgagtggctgcattggctttaagaaactgcgccgggctgggcagccgacgcaccgctaggtggcgcacgcgctcgctgcgtctttcagggctgcaggtacggtgcgggtttctggtgcgctgaccgcgctggggatgagcaccactgtcatcgcggggaccctcgggctgcgcctctgcccctcggtccccagcacccctgggag

SEQ ID NO: 241460 - DNA, 505 bp, Homo sapiens
  chr21:39288198-39288703
  hyper
ggggtggcttcactcaatcatgatctcctctcttgaaacggagcaagactgaacaattcactacacgacggatggcgagggaaggaaatgcaaaaaagaaaaggaaaagaaaaaaactggaatcagatggtcaaatttcacatcagcaccgagaggctgttaggagactccattctgctcgcggctgctccggctccaggtccggcttcccggcgtccgcgggtctccacccctccgcccgcccagcctctccagccaggtgcggccgtctccggactggctccctctggccgagcgcggagagcagggctgggcgctggggccaagggaggggcggaggggcgcgcgtttgggcagggacgggggagggagactgggtggaatgaagtggggaaagataagagtggcagaagaaaaaaaaaatccccggttaggagaaaagtggtggaccacgcagagagacgtcatgaaatccgcagattcaatgaatgctactcaattccag

SEQ ID NO: 241461 - DNA, 92 bp, Homo sapiens
  chr21:39289003-39289095
  hyper
ccccgaccccccagtcccaacctttctcccagtgccactaagtaagttattcccggagaaacgcctggaaagcaggaaagagccgaagctcg

SEQ ID NO: 241462 - DNA, 99 bp, Homo sapiens
  chr21:40032974-40033073
  hyper
aggagcagaggctgggacggccggaggagagagtccggccccagcaggaaaggaacccagcacgcgactactggaggggcgaggagcaagggaaggacc

SEQ ID NO: 241463 - DNA, 348 bp, Homo sapiens
  chr21:40033253-40033601
  hyper
aaaatgaccgcggactgccctcgatgctgatgagaactgggacgacgtcgcgcagagcgtccggagggagaggcgcggtgcccgggacctcggtcgtggggaggagccggatacagccgccgggacgcggggatgccgagggcaccgcggcctggtctgaccgacgcacgcggtgacagccgcccttgggagacgacggcgtctgcaaccagcagcctccaaagggtgcagccaggaggctcagcttgtccgcctccggggctcggggctaagccccttccagaagttttcgtttctacgcgaattccgaccgcaaaatccagcttacctgagcgccgctcctcttct

SEQ ID NO: 241464 - DNA, 573 bp, Homo sapiens
  chr21:40105802-40106375
  hyper
ttaaacccaaattattgccagagaaattggtatatttattcagatgaaaaatacttgcattagtaagcgaaaatatctgtcatcgtcactttacagaaaatggaaaaggatgaggattgcacaaaaactagaaattccatcccgggtgtttttcctcctcagcaacgggcacaggtcgttccagttttggccaggcggtggcgctcgaggcaaacggtgtcatgaaacggtcactggatgcactgaccctgaagatgctctcaaagcacgagtccgttcatcagagagtggacttgacacccatcagaaacattcccggagtgcgttggtgtgaaggtgcgaggagagtcggggaagcatcccgaagccctgctaggcgaatgggtactgctgagattacagggtcagcacaaagcagaatacaggacccgaaaataacagctgcaccggaagaatacttgaccactgtttaagaaggaatttgacgaagagcagtcaccgagtgcagccctgggccggctaaaggaaaagaaaaaaaatcactcaactgccgctcggcggcgggaatgccag

SEQ ID NO: 241465 - DNA, 123 bp, Homo sapiens
  chr21:40178605-40178728
  hyper
cgcgtccagggcccgggctggggacccctcggtcgtgcgaggagagcgtggggaacctgtcggaaatgagatctggttgcgctgggctgcctttattttctcgttcctacagcatttgaatga

SEQ ID NO: 241466 - DNA, 99 bp, Homo sapiens; identical to SEQ ID NO: 206011
  chr21:40752032-40752131
  hyper

SEQ ID NO: 241467 - DNA, 245 bp, Homo sapiens
  chr21:40984529-40984774
  hyper
agttaactttgggacggttctcccggagggccagacagaaactcaaagaaccggcctcaggggatctgagcaaattccaccgtcgtcaattcctggtgctccgtgaaagatgctctttccctcggggcttcggagccggagcatttgtagacagttcctgcctcttcactcggctgccggcctgggggtcccgtcgcctcccggagccgcccgccgcgtcccccagcccgcgccgccctgcgcgg

SEQ ID NO: 241468 - DNA, 252 bp, Homo sapiens
  chr21:42218893-42219145
  hyper
gccgcagacgcgggcgtgagctcatcccgggcactcggcgcccagaatgcgcagccagcggcctcccgtgcgccagccctcaccctccgcatccaggcagcaggcgggcgggcaggctcatctttgccgtgctccggcctcagtcacatggatccctctgccaaccttccctgcctgcgagccgggcgagtgaagccgagcgcggaggcgagcagggacccctcccctgcctctggccgctggggcgctctg

SEQ ID NO: 241469 - DNA, 812 bp, Homo sapiens
  chr21:42540364-42541176
  hyper
ggcttggcgctcgccctggagcctgccctggcgtcccccgcgggcgccgccaacttcttggccatggtagacaacctgcagggggactctggccgcggctactacctggagatgctgatcgggacccccccgcagaaggtagggacccccggctgctgccgcgggcttttcgggctcgttggagggagggggctgtccagagacgcctccacgcggcttagcgtcgcccccaaagcagcagctgtccccgcacagaagagcggggaacgcagaggggctcgggtgggccggggagcgggggcgctcgctcttgagtcgcggaggacggcagcccccgcccggggcgcactgaggggtgtgcgcgagtgtttcagaacttgtgagctccccctccgcggggctgggcgggagaggagacctggaacttgccgcctccaataacgtgatttccttcttgcgggcgacacctacttccagcgggagacggagcggtgggccttgggcgacgggctattatggggaaaatcacctcgtgttcataccctccctcccccccgccccccccccaccccaccaccatgctgtctcattgctaaagaggctcgtggccggcttccaaaggcgcagtaccctttaaaaaggatttatgcatgagctcagctaaaagcaacccggttaagaagtggctcgcttgctgctctgaggaaggagcagcgtctcccctgcgcccgctttcctttctcggagttggtttgtcagctgtgtcctcgctcatccggcggccctgcccctctgcacggagcgatgcatct

SEQ ID NO: 241470 - DNA, 637 bp, Homo sapiens
  chr21:42688551-42689188
  hyper
ccaccctccgccagcgacctcagagctcccgggcacagcccggggcacagccccgcgcacctgccccgcccacgcccgccccgcgcacctgccgggtccgcacctgccatttgcccgactggccgcgcacccagctggcccgcccctgcccgacacgaccgctgcccgccccttgccttcctgacccaggggctccgctggctgcggtcgcctgggagctgccgccagggccaggaggggagcggcacctggaagatgcgcccattggctggtggtgagtgcgcccccgcctcggggcgagggtaggggcggggaaggaggaccccaggggaagcgtcgctccccaaccctgcctgggacccgccacgcttagcaaaagcgggagggctggttcttggcgccgaggctggtcttagacctgggatcaggaatgcgggaagcgattccagagggggcgaacagcgggggtttccagcagggttccccgaccctgtttccccgcgctcgccaggcctgttcccgccgccccagccggggtgcatgggattagggaggaacctggaatgtaacactgtaacattttacttggaaagtagattggtggggagcgcaggcacagccccgcacccccaccccc

SEQ ID NO: 241471 - DNA, 1779 bp, Homo sapiens
  chr21:42878705-42880484
  hyper
aatgccttgtaactgggctgcgtagcctttgtaattttccatgattcgggaggttctcgcggctgggagctccgtgaggtcaggcattgccttgggcgcgatgcgctcatctttcccgcgggaccactgcacaggttcgcacggagggaagggctgcgcagcctcgaaggcgagccctgggtgctccctgcccacagggctcacctcgggccgccgtgctatcctttccttcccaaacaagccaccaggattcctcgtgattagggctgccaccagggcgttctgaacaggattcagggccaccgcgctgtgctctacggcggagcgggcgaaggccctcctctgccacaagcgctcagggctctcggcgcacaaactttctggacatggggcagtttttcagctggacccgtgctcgagcagagcgcccactgccagactggagcacttgaccactcagggtgccactgtgccgagccgggcaggacaggatgaggtggaccgaagcgcccaggtgccccgccttccccccaacccggcacggagcgcaagcggaggagccagaccggctcctcccgggcgggttcctgccggtgccgggtgtccaggaggccccggccctgatcgccgccagcgggtcgccgcaacggggcctgagtcgcgagcagtccctccccgagactgactggccgttcgcacctcgcccgggggccctccagcagcctggcccagcggtccccgccgcgccggccgtatcgttcccggcatctcagcgagtttccagtttctccctacctcagtagggaaccaagaagcagaaggagttcaggtaacactgcgggactgcagagatttcccccaaacaaagaagccaaccgacagcactcccagtcctcctccccaaagagaaaaggcgcaccggtgctcccaggcgggggccgtggagggcaggcggactaggagccagctttggggaccccgggggactctcttccaccaactggctagggactcgcaggaccacctgccccaacctcgcgatgccaagccaacaggggcggcgagggctctcggccgtgcgcaaggggtcccaggcgcccagcactctcccagcaccccgggaggcgccctgcccggctggccccagcgctcgaccctcgggcgcactcacctgccgcgccgcgctcctcacacccgctttcacctccgggcggggcagggggcatcggcgggtcccaggcgcccaggttcccctccccagcccggaccccgagccgggaccctggtaccggcgccgctcacctgccgcgctccaggcggcgctccccgcccctcgccctccgcctccgcctccgcctcctgcttagctcgcgcctactcggcccggcccgccctggctctcgctttaatctcaggaggcggtgtcccagggtccagggcgacacccccaagcgggtcgcgggtcaccctgggcgggcgggggcgggggcggcgggaggaggcgtttcccaagggaagtccgggacgggttccctgcctggctcaaccccggctgcggagggacccataagggactctggggcgcttcccgggcccggccacagcggccaacctgcccctctccggtccgcggcgcagcgctgcccgagggctcgagtttgggttaaggaaggggattctggggagcgctcctggagtcctgggtgagcccccggagctgctacctcacgagctcctgtaggcggccggccccgtcttggcctccggggaacccactgt

SEQ ID NO: 241472 - DNA, 883 bp, Homo sapiens
  chr21:43181580-43182463
  hyper
agttatgatttgtctgtttccgattgctcaaatgtggccagcttgccgcccctcccctaccagtgtggcctccctcctccggacactctgccccggggcgctggcgaaagtccttccgtaggactcagacccacatccactgtgcaaccgtgtgaggcacaccctcctcgccggagggttttgaggaaatgacaattcgggtgtttagaggccagccattcgcaagggtcatttttccacattaagtagacattctgagagtgaactctctaagccaaagctgactgataataaacacgtattctgagaacaatgtcaatcaaaggaaggctgagtagcttattaagtggaagctctgagccactccacaaatagtgttttcttttatttgcccaaagggcttaatacataaaaccccggtgacttctgattgcagagtgagctcattggcgactctaacagctacgggctggcagcagtgcacacccctccccagcgcaccgagttcagcaagtactttactctccctgccccgggctctttctgcagaacggagaccccatttaccttactttaaaagaaacaacaaacaaacaaaaaagggccactgctgctagttggctcctgaaagcggatcccggctagaatttcctaacggagtccaccccagctttgcgcaactgcctgaagggagcccggcacgacttcccccttccatgggccacacatttgagggcactttctcgaggaaaatcagctgtcctggaaaaaaaaagtcattgtttccgtggacaaaagtgttgtgacagcatgatccaaactggcttggggtagacaggattccagctgaggaagggggtcccgggaccgccctgtgggagat

SEQ ID NO: 241473 - DNA, 1071 bp, Homo sapiens
  chr21:43186325-43187396
  hyper
gaggaagcgctgggcggacggatcaacaccccgggccccgtgccggaccccactgccaggcccgagccccggagctccaccgcgcaagcgccgggcgcccgggaagcctcgcccgagccaagccgaagcttccgaccgaaataattacagtcttacaccaatttgtgttccaacgtaaattactaagtaagtcgaacggaggctaactccactcacaaagcccagaggcccacatggcaatttttctaagccctgcgcagaccgcagcgccccggtgggtcccgggcgggccggacgcgcctcccaagggcgcgggtccgaggcgcaaggcgagctggagaccccgaaaaccagggccactcggggagtgtcaggaagcacgactgggcgccttaggacgtccgggcagacgcggcccccgaggagccccagaggagccccagaggagccgcctgacccggccccgacgtgcgcgatcgagcccgggctcgccaaagcccccgcgcccctccggcccggacaggccgagtggacattgtcggagccccgcggcctcgccggcaattggtttcccccccgaagctgctccgggggtgagttcgggagagagaggcaggaccccgggaccagagcaccccgaccccgaccccagcccgggccccagccgccccagcgccccgcccgggccgctcacctgtcgtcgacgtgcaggctgggcgagcacttgatggccagccaggtcttccagtggacatggcgcaccttgtacacctgcccgaagccgcccgagcccaccttctcccagcccgtgaactcgcccgcgtcgaaggtgcgcagcagcgccagggcccatggggtcccgccgtcgccctccatcgcgcacgtctagccagcgccgcggcggctgcccaggtgcccaggtgcgcgctccgccctgttacgtcacttccgtaggtcgtcccgcccccaggccccgcccacttacccgccccccgggcgccctctctgccagcgcccggtgactgcggacggatgaatagacgctgcgggtcactgcgctctcccctgggt

SEQ ID NO: 241474 - DNA, 335 bp, Homo sapiens
  chr21:43188161-43188496
  hyper
ttcctgagacgcaacggtgagtgaaggcttatttttggccacaggagattaataatgaagacaggagggcggagctaaaggagagggtattttaacgacattaactgtgtttttgtgttagtaactcggaaagagagaggctgccccaagtcagcgcattgaaagccgcagacctagtgtctccaggctcccccttccaaacgggcgcggaccttctttcatagcctgtagcggggagccgcgtctccccactgcctccccactcccatccggccgctctttggagggaactcacacatcccaacatgacgatgcttgctcggggggcctcctgg

SEQ ID NO: 241475 - DNA, 612 bp, Homo sapiens
  chr21:43188776-43189388
  hyper
ccggcacacagctccgcagctgggggtgactaagagcccacaccacgcaagtaataaaacgctccaatttcatttatttaatcatctgtgtgcttcatttgacaaatatttatggagtgtctgctgctagctcagtgcctggtgcctgggactgaagaccagagccccctggagaccaaaagagccagctcccagctgtgagcagatcgggtccaaagatcacgggctcggcggcaggaacctggtttggtatccggctcctctgcggactttgaagtgctttaccgattcacatgacaactggtaaaacgaaaacaaacacctttccaggaattgtgaattcgagttccagaccctctgggattccgggagcgcagctgctatttatgttaacagtcattggtcccaggctggtgaggttagaatttccaagtataaaagtaatttagtttcgttttaaatacattttagggccaaagaaaagtggaacgatttaaagaaaaagatgaaatgaataatagggcaagttgggaggtggctgtcctgaggtttcatgggacaacattaattaacctcatgaagtgcctgcatggacaacgtgcccggtgtggt

SEQ ID NO: 241476 - DNA, 173 bp, Homo sapiens
  chr21:43373823-43373996
  hyper
acacgcgctggctgcggccacagcgcgctgggggcgtggagggggcgcggcggggtcggagcccggcgaggagcgtggccgggggcctctgggcgggcaagcggggaggaaacgcgcggcggccgcggcccgggctgggcgcaagccccgcacacctgcggaacaggggcgcg

SEQ ID NO: 241477 - DNA, 246 bp, Homo sapiens
  chr21:43429158-43429404
  hyper
atcgtgtgaacaatcgctggactattttgtaacacacgcgtgccctcggaggctcggtgccagggctgtgagcgcttgcacgaaaggaaaaaccccaggccgtgtgaagtctaactttccccgtcctctcggtcaggcaatcccaccggggcacctgtctaaaaacaccccgcctccgaacgcgcgctcttgcggaattctcccgaaccgcagagccctcgtggctgggaccgcatagcaaccggg

SEQ ID NO: 241478 - DNA, 112 bp, Homo sapiens
  chr21:43430369-43430481
  hyper
gtctcgaggcagacgccgggcccctttccgctcacactcggctcgcgcgcgccgcagccgccgctgccgctgtgattccatccatcttgaatttgacgtcatcccacaccag

SEQ ID NO: 241479 - DNA, 46 bp, Homo sapiens; identical to SEQ ID NO: 206025
  chr21:43639848-43639894
  hyper

SEQ ID NO: 241480 - DNA, 282 bp, Homo sapiens
  chr21:44494616-44494898
  hyper
taagaagccgccgccgtgagcggagcagcaccttcctccgcgggtcgcgggagtcacctacgggaagggactctccgtctggcacaggccctgtctggcctggggcgcgcatgctccgccgccgaatcttccagaaagccgtggacccgaggccccggcagacgcaggcggcccagcgccttgcttttggcccctcgcctcgccctggagccctctctcgcaaggtaagggactgccgggaacgcagatcgcaagccgtcggggctctgtagaactcagagg

SEQ ID NO: 241481 - DNA, 53 bp, Homo sapiens
  chr21:44495378-44495431
  hyper
gaaaacctccatcccccgaacgcaacctgggcagagccccgcgtccctccccc

SEQ ID NO: 241482 - DNA, 251 bp, Homo sapiens
  chr21:44527798-44528049
  hyper
ggctccgccttttcggtcctgggaacccgcgccccctgccggtgccctccccgcccggccctagctctctcgccttctcgcccgcccggcgctggccctgctggatcctgcgcgccggggactgggggctggcagtgcagaccgaacccggggccgaggggcttctccacagagccgcctggggctcggtggggggcgctcagctcgaccccagctaagggagcactaggaagtgcgggcgtccccttccc

SEQ ID NO: 241483 - DNA, 75 bp, Homo sapiens
  chr21:44845911-44845986
  hyper
ggtgactcgatgccgcgccagcttcaccaccgcgaagttgcctttgcccagggtccgctcgatgtcgtaaaaacc

SEQ ID NO: 241484 - DNA, 189 bp, Homo sapiens
  chr21:44847734-44847923
  hyper
cagcggcgctggcgtctgcgcgtcccggggctgcccccgcagcatgtggggctgggaccctcttcccgcgcgggccccgggcggacgctgcgggcggtgacggagccaggccggccgcctgggtaggggacgggggcgcgggaccacttgcttgcccgtggccgatgcctcatccgaacggaaaacgtt

SEQ ID NO: 241485 - DNA, 865 bp, Homo sapiens
  chr21:45148316-45149181
  hyper
tgctctcccctggaacgcctggaactagggtggtcaggctggggtggaggagctcccctggaatgttccagagcttcccccactcctgccgttctgagtcaccctgcctccccggaggaggaggaggatcagctgagccgccgcgctcacgtagtgtctggctgtctgcctgtctgcctcgctgtgagcagagtgggatgctgccgataaggcgcgcacgtgggccctgggaggagcccgaggcagccactcccgcacgtgggcaggaggagggctgctcacaccaccggccgagggaggaggactgcgggctgcgcctgggcaggggatgagcttgtgtcgcgggcggcagggggaagggagtcggagagctcctgcggtccagccggatgactgatgaggttgaaagcacttccgctgcggcccccgcaggaagttcccaggaggaagttgcgaccctttctaagccatcccactggcctggactctgctgggattattttgaccccccagggcagagtgtagccatctgactggctttctctctcggcaggagacggggcgcacgcctgcaggtgggggagccccaatacgtcacacggatgagcggggcaaagcccagccccccaccccgcacccgcccgcccgcaatcctgccccctggctgcggcctccgcggctcttcccaccccggctccgctgggtgcttggcgcttgtttacggagttacaccttgcggtagaggctgagcaggagcttgtccttcagacttcccagcggagacagccaggctgtcctgtggcagcagtgggtttgtcagaggccgggggctttggccagggccggcagagagccccagtcctga

SEQ ID NO: 241486 - DNA, 159 bp, Homo sapiens
  chr21:45286201-45286360
  hyper
agggtgatgagcatgcggctcttattaaaaatgaaagccaacgccgagagcctgctgggggctgggaggtggggcgggcggcgggcccaggctgctagagggacccaggatcctgcagcttttaaattgcaggcgcggctgctccgactcgactcgctt

SEQ ID NO: 241487 - DNA, 71 bp, Homo sapiens; identical to SEQ ID NO: 206031
  chr21:45526943-45527014
  hyper

SEQ ID NO: 241488 - DNA, 92 bp, Homo sapiens
  chr21:45557938-45558030
  hyper
ggaagaagggaggccgccttggcgtggctgttttggtagctggaccgtgaatcatggaggcctggctggctcccacacggtggcgtccttga

SEQ ID NO: 241489 - DNA, 90 bp, Homo sapiens
  chr21:45661247-45661337
  hyper
aaggctgggagagcgccaggcccctggccggctgcgctccgatgatctccaggacttaaggcgagtgagctcagcgactgctgaggaatg

SEQ ID NO: 241490 - DNA, 228 bp, Homo sapiens
  chr21:45662076-45662304
  hyper
ggcggcggcgaaggcgcaggaagccctgaagccgggcggcttccccctcccaggccacgctgagagacgggggttggggggatttaaaatcgcgcgcctggcaggggcggggcgggggccacctgccctccggcgggaagagctgggcagggcccgcggagtgcagggcggaggcactggcggtccgcacccgggtgaggtgaggcgcgtaaccgcatctgagccgga

SEQ ID NO: 241491 - DNA, 139 bp, Homo sapiens
  chr21:45719673-45719812
  hyper
gggcgcgtgcggccgcactggggccagccccgccctggtccccggccacatcctcgagaccaccggggtggaggggggggtctcactgctcagggcccgcgtgacattgcacaggtttagaaacgcacagcgggaaggt

SEQ ID NO: 241492 - DNA, 625 bp, Homo sapiens
  chr21:45875407-45876032
  hyper
ccagctagtggtcgcgggcgcggtcgcaggggcagcggggtggccgccgcgccaggcgtggagctgggtctggcgggctccgagaggcccgggagcggcgcgcagagcagcctccggccgccgccgcgcaggtaaagcccccgcccagccctgggagcgtggattcccacccaccccatgaccatccccccgccgcgagtgctggggtctcgggggtcccaggttccgggggtcctagggccggagggtctaaaggctggaggtcctgggggtccgagcctctcccggccggctccgcgcgcggccccgccgtccacgcccagcgcgggccgcgcgcacagggcttggcttctctgttttctcggtttccttcttcaggcagttgaaagaaaaggcgcggttctgtgcccggtgcgagccgcggctcctttagggctggcagggaagggcttgctgggttatgacagtttttaggggttgtcggagtcagccaggcgttggctgctggagtagcccctggcgcgcgagcgcccgctggtgcccggccacgtgcccagcttgacccgcgctccaggttcgggagaagctgcagccgtcaccgtcctcctggcgtccaccctgagga

SEQ ID NO: 241493 - DNA, 597 bp, Homo sapiens
  chr21:46126019-46126616
  hyper
atcgaggcctagtgcgagcacaggtccccccagacccttcccagtgcccaccaaccggcggcctaggccaggtagaactggcagcgcctcccctgctgcaacaccaggctctggtagaaacttcagaaaacatgcaccggcaaaaccaaggaagggtggctgcgtcccgggttcttccgcgcagctgtgtgtacacgcatgcacacacccacacgcacacacccacgtgcacacccccatgcacacgcacccacttgcacgcccatgcacgcacacacgcgcgtgcacccatgcgcacgcacccatgcacacacacgcgcgcacacacccacgtgcgcacccacatgtacacacccacgtgcacacacccacgcgtacacacccacgcgcacacaccgctgtccccagccgtgcagaacgatcctccctgagtccccggctccgacccacacgcagcactcgctaaacgcttcccacgcagtcgttttgctgggttgcgcttcacccacttctcagagggggcggccgaggcagaggtgtcggggatcgagcagctccgggcctcaggggtcgccccgccaccgttttcctttccca

SEQ ID NO: 241494 - DNA, 180 bp, Homo sapiens
  chr21:46126914-46127094
  hyper
cgtccgcccctgcccggctttcctagcggaattggcgccggcatcagttgggggttgtgggatcagtgaggaatcccgtggggtcgcctccatttatcagttgtgtggggttgggcgagcacccctagccccagcccaggcgatcagggcgcgaagcccactggacgcggatttgggatt

SEQ ID NO: 241495 - DNA, 87 bp, Homo sapiens
  chr21:46127352-46127439
  hyper
cccgtcggggccctcgtgtgcggctcgttatcctggaaccagagaggctggagacccttggcttgtctggagcggaaccgtagtgtc

SEQ ID NO: 241496 - DNA, 91 bp, Homo sapiens
  chr21:46128894-46128985
  hyper
ggtcccgcgtgaccggtccccaccgctgacggttcctggggtaacactcaggacagggagaggcaatggaaagagacgtggccgccctcgc

SEQ ID NO: 241497 - DNA, 495 bp, Homo sapiens
  chr21:46129207-46129702
  hyper
ctccttacaagaatcggaagggtccctgcaatcgcccttcgcactgaggcttcctactgtgtggtgtaaaaacacaggcttgtcctcccttgctgcccacggggctggagccgcctgaaaatcccagcccacaacttccccaaagcctggcagtcacttgaatagccaaatgagtcctagaaagcgagagacgagaggggaatgagcgccgaaaatcaaagcaggttcccctcctgacaactccagagaaggcgcatgggccccgtggcagacccgaacccccagcctcgcgaccgcctgtgacctgcgggtcaaccacccgccgcggctccacgccgtgggcacagactcagggagcaggatgagaaagctgagacggcgcagccacggcccggtgccttcacgcgcacagcgacacagccccagccagcggggcccacgctaaggcggaatcccacagaagcctacagagcgagcgcgcgcctgtgcttccca

SEQ ID NO: 241498 - DNA, 923 bp, Homo sapiens
  chr21:46130970-46131893
  hyper
gcacagtagcctcccgggctgctgcgacttcattcttcattcccaaagcaggtgtcagcctttcccgggaggcccagcaggtaagcacttgtggaggccccggtggctgctggttagctcttgaagctcgtccccaccctgcgtgcgttctaaagagccgcgtttctattgcaactgcctgccctgcgctttcatcttccccacctgtgctcctcccgcctctgcccatctccacagggtgctacctgccagtcctgccaaagcgtcctcgggcaccgcggcttgaatcagtgttagaaagtggcatttgtgactcgacacccctcccagctccccggcaagatacccccgcccgagttcccatgcccctgccttacctgtgcagggctcccaaccctgcgtgccgtggccgggggccgccaggggcagcacaaaacacagactcagcagggcagacatgaggggcttgggtgccaagctccatccagggctccgctcagcctgcagggaagtggctgctcctcagacgtctgcgtcagcctttccaggggcggccgcggggcccccgggggtcactgcgacggccacatgccagcggcctaaggcggggacagaggtggccctggcggtcgcagtggggaagcttctggttgctgcctgcgggaggcaggtggcccctggcaggttgggctgcagccgctggtttatctcttcatttccctgatgggcttgggccctgcgtgcaggtgacaggtgataacaatctcggcccggcctgggattagtcgctggcaaagcacactttccaaaaggaaagacagaaatagatcgtgctgcggagagctgagaacaagccagagaaacttaggagacccgtttccctcaggcgcaggctccctgggctcaccgccttttaggaccag

SEQ ID NO: 241499 - DNA, 502 bp, Homo sapiens
  chr21:46143107-46143609
  hyper
tagggaaaggaagccgacgttcagttggcgaggctttctggtctaaaggcacaggcaagggagtgttggccatttgtctcctagacgaccaggcggcctcagccacggtggaggccaccggcgcgccttcccctcgggttcaccaagcctgtcattttcagcctgcccgaggcaaagcccaccctacccagccaagcatgttcttaaaattctttacagattaacccacgtgaatctaaacccggtagaggcaaacgctttcccttccactgtgagctgcgttgtaatttaccccaacgacctgttgaaaagaccaagggagcttagcaaccagccgtccccagggccccggggggaagctgcaattaccgggtgcgaggccggcggggccgcagcccccacttcaaaggcgcgggaggagccgagggaggcggagctgtaattagtgcgggccccgccgggcgaccacgggcctgctcacgcctcgcggcctccgaggagc

SEQ ID NO: 241500 - DNA, 275 bp, Homo sapiens
  chr21:46293549-46293824
  hyper
tcagtcagtggagcgttacaactccgactccagcacaagcggtctccgcccggaacagccgcggcgccggaagtggacctgcgaggtggggccatgcgagtgcgcagcctcaaaaagcagctcgccccgctccctcgccatctgccccgcccctcgccaacgggctcgcctcccggcgcggctgaggttcagtgcgcctgcgcgatagaggaaaggagcctggtagcgaggagagcggctgaggctcagtgcgcctgcgcggcgcggatgggcga

SEQ ID NO: 241501 - DNA, 208 bp, Homo sapiens
  chr21:46294044-46294252
  hyper
gcgtcccggacggcggtcccaagcgctgctcacgctgctcttaagtgagccctggacgaggcgcggtgggccctcatagtccgcgccggcgccctcgctccacaccgcggcgtccggccctgggctcccgccgatgtccgcgtgggacttttaggggatttgtttatttttgtacgttaaccacactagaaacggccccagaatgggc

SEQ ID NO: 241502 - DNA, 79 bp, Homo sapiens
  chr21:46359652-46359731
  hyper
gccgcgggggtcgcgtcctctccatccccgaccttggacgcaaccccgggcttgggtcccccacgatctagacagaaac

SEQ ID NO: 241503 - DNA, 252 bp, Homo sapiens
  chr21:46360135-46360387
  hyper
gtgggtccgagggcgggtgagctgcggggcgccgcctccgggagggttccgcgaccccggccttccctcgggctctgcgggcatttgctgcgctacagacgcgaccttcttgcttcgcgaagcgtcgtaaactccgaggctccgctctgcgctgccgtcctgggcacacggactcgcgccgctcccggggaggggagagagccaggaacctcccgctgcggtccagggttgccacgcggaccccagaggttc

SEQ ID NO: 241504 - DNA, 122 bp, Homo sapiens
  chr21:46438729-46438851
  hyper
tctgtgatgcccacgctgggtgcaaatgttgctttggtaaaaataacaacaacgaaaggaaaagccaagccggaccagccccacccgcagggccccggccccggccccggccccgcccttgg

SEQ ID NO: 241505 - DNA, 60 bp, Homo sapiens
  chr21:46824687-46824747
  hyper
caggggctggggtcgtagcccggcgggcagcggtgttcaccttccgcataaacctgggct

SEQ ID NO: 241506 - DNA, 832 bp, Homo sapiens
  chr21:46825135-46825967
  hyper
tggggagagcatggcgccgaggtgaggccggggctgcgggcaggggttgggggacgccaagatgcggctgcgggggtcgcgggggtcgcggggctcggccgggtcctgcgggggtcgcgggggtcctgcggggtctgacccgtgcctgtcccgcgcaggtgcccctggccatggccgcggcggcggcgcctcctggacgtgctcgcgcccctggtcctgctgctcggggtccgcgcggcctccgcggagccaggtaagacccgggcgggacgggaaggttcgcgccggtgcccgccggcctcgccgccctggctggggtccccgcccggctccctcacccccgccccggccgctctgggttcagccccggccctgcccacgcgcgcaggaggcgccggagccggacggagcggggcggggtggccggagtcccgcccattcattctccccgcggggtccgggccgggaggggtgcgcggtgcgagcggccggagtccccgcgcggggaccgaacctccgcggccggcggggtcgtcggtgccgggagggctcggggcggggccgcggggtctcgggagacgcggcctctgtcgccgtcacggcctcgtccccgcagcgccgggtcccgggactgaccgcgggcggaaggcggcggagcgcggggcgtcgtctccgcgtttccaacctgttgaggctcctcgccgcgggccgggccttgtgcgcctctgtccccgccgccctcaggcctctgtccccgcgcccgccgtggtgtcgggttgcgcggtcccctttgatgccaaccgagcgccgcgcggtccgagaacaatgccca

SEQ ID NO: 241507 - DNA, 475 bp, Homo sapiens
  chr21:47010001-47010476
  hyper
gtcggtcacggtgtcgcgtattctccgcgggacggacgtgtcttcaggtccaacccgcccggtgggaagcgcagacactgattttccagaaaaagtcctccttccgtttcccgcactggtaggaaagctggggagagagaaggagtctcaccgtcctggaccagtcggaaccacagaggccgctccgggtccgggggcgacttccgagtgggggaaggaggccggagggcgcgcggccgagcccagacccagcagagcgcgcggccgcccgctcccaggtttccctccatctcggccccggccgcctctgaggttctggaccaagcccagtgcccgctgcccgcagaaggcctcactctggagccggcggggagggcggggacgcggctgtccagagctccgtgcccgccccgggagttcgaagggtgctggggccgaggggaaggctctggtcggcggcgtcagcggcagctcc

SEQ ID NO: 241508 - DNA, 106 bp, Homo sapiens; identical to SEQ ID NO: 206044
  chr21:47394340-47394446
  hyper

SEQ ID NO: 241509 - DNA, 280 bp, Homo sapiens
  chr21:47401140-47401420
  hyper
gtgaaaaaagaacgcggagatctgataaagcaacaattcagctcacggcgaggtcctctgcaggaggcggttggtgggaagaggcgagtgagcctgcccgtgcgtcccgcatggagacgtctggattggaaactaccgaaagatgtttcaaggaactctccctgggtgacacgctggttttcagacgtttgattcagctgctgcagtttcctcctccctgacacgggaactgaactgcaggccgcggcgagccagccagggaaaccgccttctccctggg

SEQ ID NO: 241510 - DNA, 198 bp, Homo sapiens
  chr21:47401762-47401960
  hyper
acatgagggcggcccgtgctctgctgcccctgctgctgcaggcctgctggacagccgcgcaggatgagccggagaccccgagggccgtggccttccagggtgagtggtggcttggggtgcaggctccagaccccccgctctttgctgccggccagggccagatgcgcggggtcccctcccacgcgtggaactgcagac

SEQ ID NO: 241511 - DNA, 887 bp, Homo sapiens
  chr21:47518044-47518931
  hyper
cccgcgcctcgggccgtcgggagcggagcctcctcgggaccaggtgagcgcctcccggaccccgcaccctggaagccgctcggcccgcggggggtgaccccgagtcctgggaaggcggcggcggcggctccgtccctcgggtccccgggaagggggactccagccccagggacggcggggggctcggcgggttcggggctcctcctcgcggggctggggccgcgcctgcccctgtggctccgcgtctctgggtccgaccctcgggcgcgcgacttggggccacctccccgcggcctcctctggggcggagccggcctgggcggggtgggggggtccctgtctgcgcccgagctcggtgctgggacccccgctcccgagacgaccccggcaccgcacgccccgccaggccccgcgtctgcgagcggttcgggtccggctccggcccgcggggaagacgccccggctggctgggacctccgggggcgcagggcctctccccgggccggacggaaggggcggcggggcggggggaggaggggctttcggtgcccgagggcgggactgggcggggaggggacgcgggtggccccgacgccccatcgctgcgcccctcccggcctggagcccaccagggccccgccaggcccaggagaagctgcagacggaggcggctccccagggcggcgggacccgggctgacagcgacccgcagcccctgccgggccgcccacacccgccctgggactccgccggggcgctggtggaaccgctgggcctgggtctccactgctggcaaccgaacggatcggccctctgtggagccgcaggtgtgcgggcgagcggcgcccatccgggctgtgccagcagaaccccggtgcccgcgccta

SEQ ID NO: 241512 - DNA, 165 bp, Homo sapiens
  chr21:47744098-47744263
  hyper
tcagccccgtcaccgccgggcggcccgcgcggagtctgagggagatggaagttgagcaagagcagcggcgcagaaaggtggaggccgggaggacgaaggtaaacattaggggcttcttctctagctgctctggcgtgaagtcctaagggcggctccggtgcccgc

SEQ ID NO: 241513 - DNA, 37 bp, Homo sapiens
  chr21:48087089-48087126
  hyper
tggcatctgggcctaaaagccgtgatgcaggtgagca

SEQ ID NO: 241514 - DNA, 1634 bp, Homo sapiens
  chr22:17081881-17083515
  hyper
gaaactgtaactggcgttggattagaacgaagttgactccattccttttcctccccgtagtgtgggcgatacgaggaaagacctcggcaagaaccagcgaagccccggctgccctcgccctgcgggcgcacacttgctcctcgcgccgggctgcgccgggcgcccgcgccgcctcggcgtgtgtccgcggctccctcccgccctcgcccgcagtcccccgatcccgatcccggatctctgggtccacagcttggctccctcccgagccggagccggagccggagccgaagtcgcggctgggcccggccgccccgtcacagggggagggaacccatggggagggggaggggcggtgaggtcagcggcggcggcgcgtccgcgggcggcgggagcttcgcatgcgcggagcgaggcccgtgagtggcagcggcggcgcgcggggggcgggcgaggggccgagagtgggggagcgggcgggggccgtcgaggaggcgttgtgtgggcgcgacggctgcgagttggggaggtctgtggtgcgggtcgccccgggggatccccggcgcgggcctcgcgcgacggccacggtcgcgcggcgtgtgtggggggtccacgcacacccgcaaaacttcctcctcccctgctccgggagagcgagcgagcgtgtgtgagagcgagtgtgaggagcgagccgcggcccgacgcccagcgccgccgctggagcagctgtcaaaacttcgccgccgcccgggccccgcggcccgccctccccgcgccgggcccctttctcttcctgctgcgggcggcccgggggaggggccgcgggcggagaccccggaggccggcgcccctcacgccgcccgcccgcccgctccccgcccggcccctgcgcgcgtgcgtgtcctgctcgctccatgttgccgcctctcccggtacctgctgctgctcccggggcttcgggaaatgcgagagtctgagccggggaggaggaacccgagcagcggcggcggcggccgcggcggcgggagccccccaagaggaggaccgggatccatgtgtctttcctggtgactaggatgtcgtcggaggagaacaagtgcgtggagcagccgcagccaccaccccccgaggagcctggagccccggccccgagccccccagccgcagacaaaagacctcggggccggcctcgcaaggcgcttcccctttccagagagccagaaagaagtaagttgagtgcgagggagccaggccgggagccagcggcggcgccgggccggagctgccaccgggcgcccgccccgcggcctccacgccttggcgccccccggcgggatgggggcggggcgggcccgcgggcggcggcagctcccggccccggccccacgcccctcggtagccgcccgcgcccggcctcccccgctccgcgccgcccgcccgggctcccgtcggcgcccggcttcgcacactttacttttcagtcgggccttttcagtgggtcttctccgcgactcttcttttggagaaatttctcgtagccgcgtcttggcctagctggatcattgagaaaacaagcccggagcgcgcgcaggtagtccccggacggactccgagcgaaccgccgagccgtgggcgct

SEQ ID NO: 241515 - DNA, 40 bp, Homo sapiens
  chr22:17565650-17565690
  hyper
gcagcgggaggagcgcacctggggcgcgcgggcggaggag

SEQ ID NO: 241516 - DNA, 267 bp, Homo sapiens
  chr22:17601524-17601791
  hyper
cgctgccggtcccggtgccgcccgcgccccccgccgagcggctcccggggcccccgacggccccggccgcggcgcccccgccgaagtccgcggctgtcatgctgcaggaggaggtgggcgtggaggtggaggaggaggtggccgctgaggaggagaaggcgacaggcgcggggccggcgggggcgcccacctgagccggcggccccaggagcgcggcgttgggcaccagcggcttgctgacgctgaggctctcgtcgtcgtcctcgc

SEQ ID NO: 241517 - DNA, 175 bp, Homo sapiens
  chr22:17601991-17602166
  hyper
cgagggtggccgagcgccgggcgcattgtcctccgaggggctctggggccgcccagctgttccctccccgccaaccccgggcgggcgaggcgggctaggcggccgaggggagccggggcccgccgcctccccagcagtggggactcgcacctgggccgggcggcggcgagatccg

SEQ ID NO: 241518 - DNA, 160 bp, Homo sapiens
  chr22:17602425-17602585
  hyper
cgtcacagtcgggtcgggagccctgtggcctggaggaagcgggaggaggcgcgggcagccgccagggcgaggcgacccggtgcggggggactcccatggagcgcggactcctaaggaagtcgctgggaatcccaccggctgtaccgcagggcgttagtac

SEQ ID NO: 241519 - DNA, 771 bp, Homo sapiens
  chr22:17849492-17850263
  hyper
tccctccgccggggcgtgggggtctcctcccctccgagcacagtccccggcttcccgatttcctctgccccatccccccgccttccaagcacattgtgctcactcttccaggcagctctttcagcggccgggcagtagcagggttccgagcccgtcttctccggggcggtcacacgtgtccattccctggggttggggatcgctcttcccgcttggctgctgattggtgcctccccctaccccacccttcccgccgctctccagcctccatcctacttcgttccagctcaatcagccccaccgccttcttccctcggagaaaaaagccacttcagagctccttgggcgccgttctcggctggaataaaagcgttaagaaacaggtggaaagcacttcacttctctaggcttcatatttctagggtggacagcccgctcctgctccggctctgccctcggcatcaataataactgaactcccacacgtgcacgtttctgtctctagcccgaccgaaaggaccaccccgcgggccctttaaaaggacgcgaccactcaggccaagtgggggtgggagagctcctggccgtcctcccttgggaaagtgcttcaactccccagtcccaaagtcctggagggcggagggcgcctcgtgagagttctcgggggtgcggcccgcgccccctgggtcctgcggatctgggcccgggggcgcgcgccccgcccctccccctccctggcggtgcagctgtccgggcgggggtggggcgggg

SEQ ID NO: 241520 - DNA, 76 bp, Homo sapiens
  chr22:17850803-17850879
  hyper
ttgaattgccttctcttctatggcaatatgtgtcgtgacttttcaccttttgcctttggacaaaggtgaatggcaa

SEQ ID NO: 241521 - DNA, 50 bp, Homo sapiens
  chr22:18257398-18257448
  hyper
cccttaccccttacgcgactgtttcagacagtgtcgtccaactttaagtt

SEQ ID NO: 241522 - DNA, 36 bp, Homo sapiens; identical to SEQ ID NO: 206053
  chr22:18441176-18441212
  hyper

SEQ ID NO: 241523 - DNA, 186 bp, Homo sapiens
  chr22:18507000-18507186
  hyper
tgtcatttagattcgctcgcccacagggggactggagggtactcaccgactagggcttcacagccgcatcaccgccggcggtgggcgcctgcctcggcaggggcagggtgggtgcccgcagggcacaggtgccgccgtggctgctcgcacaacccctgcagctgcgatcccgcccagttagcctcg

SEQ ID NO: 241524 - DNA, 198 bp, Homo sapiens
  chr22:18560627-18560825
  hyper
gcggcttccggggcgcggcgtgctgggggttgtagtccgcgctctgcctcctacttccattacagaaggcgatgggccgagagctgaggaactacaactcctagagtactccgcgccgccgggacgccgcgcggctgcggggctgggcgagcgcaaagatgtccgcgcccgctgccgggaggcgaggtgagtctttga

SEQ ID NO: 241525 - DNA, 31 bp, Homo sapiens; identical to SEQ ID NO: 206054
  chr22:18593348-18593379
  hyper

SEQ ID NO: 241526 - DNA, 513 bp, Homo sapiens
  chr22:18923387-18923900
  hyper
gggactgcaggaaacgcctcccttcctggcttcccttgctccaggagatgcttgggaggcacccgtttcaggccaggaagctccgtaaaggctcccgggaccggcagaagcccccgcgcccccgcctgcaccccgcgcacctgctcgtggcgcgccagcagcgcgggccaggcgcacaagcgcagcaccagcaggctccgcgccagctcccaggttcgccggctgcggtacgcctcctgcgcgttgccgaagtccacggcgggcaccggcggccgcactgccgtggccgacccacctcctggcacggccgctgggcccgctgcgggctgctcgcgggaggccggcgccgtggacagcgggacgaagcggggaatgcaggggcgcagcgcgggcagggcgcgcctcagagccatggcgggacggcggtacccgcccgggccgcttaagtgtgcgctgttggtcccgccccgccccgccccgccccgccccgccccgctcggtcccagaggcctc

SEQ ID NO: 241527 - DNA, 130 bp, Homo sapiens
  chr22:19132116-19132246
  hyper
gcaacaaggacgacgctgatgcgcccggcgtctccatcgctatcccaggaaaaagctcgggcccagcaggcgcgtcacagggtggagggggcgggactgcaccatttgcgcaggcgcctccaatagttgg

SEQ ID NO: 241528 - DNA, 426 bp, Homo sapiens
  chr22:19419825-19420251
  hyper
cccgctgcagaggcgcgctcccagcacagggcggggacggaagggaggaccccgagccgcgtgaaacgcaaggccctcgtgtgtgcgcagctgacaccctaggcggggctgcgtcgggggcggggacaggcgcgtcccagcccacgcagccggaacgcctgagcgctgggcgcctggtctgccggacctcagcagggggcaccgcgggccggactgtggaggggcgcacgcccggaagcggcgagggtagccatgacggcctccgtgctgcgaagtatctcgctagccctgcgcccgactagcgggtgagtgcggacgctggccggatagcggagtgcccagggcgcgtgcggggtcttcgcgactgtccgccaggactcgcctgtgctccctgctcgcctcccagtccacgaatatctcagggat

SEQ ID NO: 241529 - DNA, 472 bp, Homo sapiens
  chr22:19466618-19467090
  hyper
acctggcagactccgctcctctcaggcaatgcaacgaagaaaccccgccgaccgctctcccagccgccgctgccgctgccgccgcgccaagccggtacgccccagaggctcaccggaagtgccggacccgagacccggagggggggtgcccgggacaaagcgtcggctgcaaaagagaaaaggccaggcgaagacgctaggctctaaaacaccctcagtagaagcattaaaatgccctttcgtgatttatttccccttttataggtatttttaaacgttattttaaattacgtgttgacagtattcccctccagacgaatttagtagggcccattgtccttacgactacactacccacaatgcactacccagactgcctctgcttcagccatcgaggactcgggcggaactaagctacaaatccttcttcaaaccacaccaaaaacctattgcaaacgtaaatgctgcccca

SEQ ID NO: 241530 - DNA, 1513 bp, Homo sapiens
  chr22:19510794-19512307
  hyper
gcagcagccaagacccccagcgtcttggaggggaagcgaaatcctcagtctgacacccgctctgcctatggaaacagcgccgcgcacagaaaaggaaacttcattccgtctgttaagggcagggccgggctagtggcaggagaaggtcagctgcgggcgcaggcaggagcggatccaggagccgcgtcggggcgcagagccggacgttccgaggagcctgcgcgccgcgctacccggcggaagccgcggtccatgcggggctccccaggcttatccaacgcctcgcaggcgtggctggcaggaggggcccggccgtgcccagcgccctcagacgtagttcttcttgtcgtagtcgccggtggccgtgggccgccgcggcgctgagtacttcacggggaagctgaggtcgggacggccggtgcagacccaggcgccgcagcacaagaggcagccgcctaccatgagcagcgcggtggccgcccagccgatgtacagcgctgcgcccagctcgtacttctgcgacacgggcacagacgggtcgtaaaactcgcggacgacaatgttggcgaaccagcagagtggcacgagcgccagcagcccgcaaaacaggtagagcacgcctcccgtgagggccacacgcgccttggccgggcccggggccacgcaggtggtgcactgcgcgcccgccagggtcacgaagagcgcaacgaacgccagcagcacggcgctcacggtgagcgcccgcgccgcctgcacctcggtgctcagagccagcaccgagtcgtacactttgcactgcatgtgcccggtgctctgcaccacgcacgacatccacagccccttccaggtggtctgcgccgtcacgatgttgtggtccaggaaggcggtcacctgccacatgggcagcccgcacgccaggatcagacccccccagcccaccaggcacagcaccaggcccaggatctccaacgctgcggaccccatggctagaggcgagacgcgcacccgaaggcccgcagaacccccaaggccgtgctgcgcggcgccctgggcgggccctggtgcctttgcgcccgcgctcccggctcttggccccagtccgtttgccccgcgggtctgtcgcacctcctgggtctgccagctcctgccggggggtaccctctttgaaggttcgggggcggattctgtcccccgggcccggccccccggcccgaagcagccaatccgtgcgcgggtcatcgtgccgcagccaatcacagagcctctggcagctgaagttagggaaacaacggctcttgaggggtagctgagggcgcgggaccgctccccgcccggcagccgcccccagccccacccgccgttgtcctagtcgcggccgagcgcattctgggctggcctagggcgcgcttcttgggccgcctccctgcgcgtcccggccccgtcacttcagaaggcgctcgacccccagtctgcaccacccagtccactcccacatccccgactgagccgggtg

SEQ ID NO: 241531 - DNA, 780 bp, Homo sapiens
  chr22:19701676-19702456
  hyper
ccggacggatggtccgaggaccggcatggacccgggtcccagcgagggcggggggagcgtaaggctgggcctgggctgcggcaccggggaggtggcggggaggaggccggcaggaacagccgtgcagggcgggggcggcgcgggtctggtcgggtgaccccgggcgcggccagggctgtaggaggcgagggcgtcgccccgaggccgtggtctcgggtccatggtgggggacctgggtccccgcccccccgggccgccctgggtcgcgcgtgggcgcggcgggcgccgattggctgccgggcgcgcgggcggagcgggcggcggcggcggcggcgcggaggggccgctcaccccgcagcccggcctcggcctccgccgcttgtcgtcgcgccccgcccgcgagcccgccccgcacgtcccccgccggcggccaccatgagcacaggcctgcggtacaagagcaagctggcgaccccaggtgagcccagcgcctgcccgcgtgcccgcgcgcgcctttgtccccgccgcccgcgcgcctctcaccgtgtctctccgtctctcccccgcccgccggcccggacccgctcggaaccggacccggactcgaccccgaccccgaccccgcagaggacaagcaggtacgtgcgcagcgccgctcccccgccgggagacccggccggctgtcacccattgtgacactagcgccttgggcgcccaggcgcgaccccgcccccgccggccctcacccagccctgtcgcgatcaccgattgtcagccggg

SEQ ID NO: 241532 - DNA, 898 bp, Homo sapiens
  chr22:19711135-19712033
  hyper
tccctaggccgacccgggttgagaggagctctggtcgtttggctgcagctgggagagacttgggtcagacttagaggggacttccagccggcgtgcggggtggtcagggtggagaggctggcgggctaccgggacgccgggcatcaggggctggatggagccgggccggcagtctgggtactcagagatgtcgcccaggtgcccgccgaccgctcggcttactgcggcgcttcccttgcagggccgcgcggggcgctgagcttactgctcctgctgctggccccgccgagccgcccggccgcaggttgcccggcgccctgtagctgcgcggggacgctcgtggactgcgggcgccgcgggctgacttgggcctcgctgccgaccgccttccctgtcgacacaaccgagctggtgctgaccggcaacaacctgacggcgctgccgccggggctgctggacgcgctgcccgcgctgcgcaccgcacacctgggcgccaacccctggcgctgcgactgccgccttgtgccgctgcgcgcctggctggccggccgccccgagcgtgcgccctaccgcgacctgcgttgcgtggcgcccccagcgctgcgcggccgcctgctgccctatctggccgaggacgagctgcgcgccgcttgcgctcccggcccgctctgctggggggcgctggcggcgcagcttgcgctgctgggccttgggctgctgcacgcgttgctgctggtgctgctgctgtgccgcctgcggaggctgcgggcccgggcccgcgctcgcgccgcagcccggctgtcgctgaccgacccgctggtggccgagcgagccggaaccgacgagtcctgaggagagaaccggtgcgtcctgaggagagaaccggcgctgggcaaca

SEQ ID NO: 241533 - DNA, 119 bp, Homo sapiens
  chr22:19718927-19719046
  hyper
gacccccgactagccgaggcattaatggggccccgtggaggaggtcctgggaaggtctggggagctgaagtcctggccacgtgggggggactgcaccccctgcccagacggagcaacaa

SEQ ID NO: 241534 - DNA, 701 bp, Homo sapiens
  chr22:19742732-19743433
  hyper
tcccagctcgctcccgtgccggctcccgctcccgctcctcccccgccacccccgcccgcggttcttctctcggcttggcggctggggtccgacgaaggggcagaggccacaactcagcggccccgcgggcagccccggcacgcggccccacccgcccgcctcccaggctcggggtctcggctcgtccacggccacgagggtcgcccggaatgtcgcgttcgccggtgctgtgggccaagcactttcgtgggatggagggacgattggggagcgcccgaggctgctgtgttggcgcccgcccccgagggctgggagtcaagaggtgggagtggagaggggaggagagggcagagctcctgggcgcgcggtcctgtccgggttcaggcgaggtttgggcccccagccgcccgcccttctctggggcccggggctgagctgctgatggcgggagggaggacggtgagggcagctcctggcggcgggccttccccgagaccccgaggccgcgtccaaatagggcgctgtaagcaactccaggcggtccatcctaaaacgaattagcagggtcaagtaaagcccggctcctcagtgcttccctttgcacggtgcgcggcggagcccgattctgctctctccatactctgaggcctagaggaggagtcccccgtgcacctcgaacctccggccggtcccttctgtgt

SEQ ID NO: 241535 - DNA, 206 bp, Homo sapiens
  chr22:19743887-19744093
  hyper
ccgccgcgggtcctcggtcgcatccctcccttcagcctcctgcactcagccaagcctctgctccccaccccttacctacccgagtggaagccaagcttcggttttccggcctgtaaaatggtatcatagctcccatctcgccccctgcgctgggagaaatgggcgtcttgtcttcgctgcgcattgcatgcggaggagcagatgtc

SEQ ID NO: 241536 - DNA, 38 bp, Homo sapiens
  chr22:19754288-19754326
  hyper
gccgcggccgccgccgccgctgccgcagctgccgcggc

SEQ ID NO: 241537 - DNA, 142 bp, Homo sapiens
  chr22:19754594-19754736
  hyper
ccctggagccaccgcgggtccttccccggccccgagggccaagggggtccccgcccgccagtgccaaagcgcccggtcggaggcggaaggaagtgatatttattgttctccccgagaccgcgtcgcccgcggcccggccggc

SEQ ID NO: 241538 - DNA, 42 bp, Homo sapiens
  chr22:20004350-20004392
  hyper
cggaccgggccggcgacgcgaatctccgccccgccccatctg

SEQ ID NO: 241539 - DNA, 251 bp, Homo sapiens
  chr22:20104760-20105011
  hyper
ctggcaacgtcatcgtcacgcgccggatccaacccccaaccactttagccagctctagaggcgcgcgtggccgggacggaagtgcgcgcgggtgtcgccgggagtgcgcgctcctctggctgacgggcgggccgggcatgcgccgcgggcgttttggcgggaagcgcggggcgggccggacaatgagagtgtccgcctcctgagccaataaagctgtactggttttgaatcgcggcgcgtttcccgccgct

SEQ ID NO: 241540 - DNA, 101 bp, Homo sapiens
  chr22:20255393-20255494
  hyper
cgcctccggctccgccctcccggggccggggcgccagcggccccagcctggcgcggcactgcggtggctttccctgccgcccggctacgcttccctcgcct

SEQ ID NO: 241541 - DNA, 353 bp, Homo sapiens
  chr22:20286611-20286964
  hyper
cggggcggaacctcccgaggagagggcgcggctgggagcgcggggcggggccttccgaggagagggcgagactgggagtgtgaggcagggcttcccacggaatgggggcgcggagccggtcctcccgaggagcgggcgcggctgggaaggcgggtcgggtcctctcgaggagcgggcgcggctgggagcgcggggcgcggcctcaagaggagaaggggcggtgggtcctggggcgtgccagaacccttgaggaagaagcgctggtgttctggagtatgaccaccggagccggccgggcctcgggttggggcggggcctcaggggtggggttgggacttcgggatgggttctcc

SEQ ID NO: 241542 - DNA, 989 bp, Homo sapiens
  chr22:20790618-20791607
  hyper
gagtgagtagacagagaccacggcgatcgcgccctccccctctccaggcaccgccccgcccgccgccgccgctgcattcctggggccggggaggcccgggagtccgcggcggcggcatcgatgcgaagcagatggcgggccaggccggcccccgccccggaggcggggctcgcagcggggaggggtctgcgcgcctccggaccagagttcggaaaccccgcgctgccccctcgcagccccttgtctctggcgccgagcccctggactcggcttgccccgggtccgtggctcaggcgccccgacgcgacccagctcggagcccggcggccgcctctgcggctgccagcccgtgcggcgtctccaatccgcgccaaggcgcccccacacgcccgctcctcacccctgcgtggagatgcccttgaccttgtggcctttggccagcccaccggctcccccgaccccagctcctaactcctggcgtccggggctcacctctctgccctccgtgcaaactcccggactcgcccccccaccggccgggcctgtcgcctgcctgtcccacactggcttccccagccggcgccccacatttgcgcggccccttcttgcacccagaatccccacctggttgtcgccagggttcccacatcctccggtcccctgtgcctgtcatagtccttccgcctcccgcttctggtccacttcgagcgccggctcctcgacgctcgcctgggtcaccaccctcccacccgcgcccgctctaagacgcgaatctgtctttccaagtctggcttgctccaggacctccccggctagcaccgctcctcctcccctgaccttcctcctcactcccactcccggctccagtcggactagtgcggggctttagcacatgcagttcctttggcttgaatgcccttccccagcttttccccgtggacttcacaactcggtcaagggtccctttttccaggtctttcctgatatcc

SEQ ID NO: 241543 - DNA, 105 bp, Homo sapiens
  chr22:20791787-20791892
  hyper
ccccctcccaatgcccggcgccgccacaccactgcccagagcgtccctctcgccccctcccccagccaggccggctcctacccgggagcacggcacacgttgcgg

SEQ ID NO: 241544 - DNA, 33 bp, Homo sapiens
  chr22:20792072-20792105
  hyper
gcgcgggtgcggccgcagcgagagcggccggaa

SEQ ID NO: 241545 - DNA, 713 bp, Homo sapiens
  chr22:21319195-21319908
  hyper
tccctgggaggtcgcgaggatccccggagacccagactcgggcccggggcgcccccggccagagcggcccctggctgcctccctacgccccgcgactccggtccggacgccgagggcctcggcctgcccctgtcccccggccgccccccacctgctccggcccggcggggcggtgctgggcccgcgggctccccggccgcagtgcaaacgcagcgccagacacgccccgcccgcgcctccccgcccccccgcgcccgcggccccaagcggttcccgagcccaggcccgcgccgagcccaggtgagcgcccgccccggggaccctggtccccggaaccccggtccccgcccgccgccccgcctcttcgccccggcgccgggggccagcgcttgcgctcccaagtctcggaccccggcccggcacgttaggggctgggggttggcaagcggggccagaggcactggccggggtccgaagctcacctcgtccttctctcgtcccacaacggccccttcccggctcgccgcggggccccactgtgtgccagtcccccttctcgggctgcaaggtctggcgggggcaacgggacggagccggcgaggctgctggcatcggcttcccagagagagggaactgcacgtgcagaggcggggagagtggacagaggcttgccctgagctccgtgggggaggggagagcgcggagcccccaca

SEQ ID NO: 241546 - DNA, 116 bp, Homo sapiens
  chr22:21336323-21336439
  hyper
tgggcctgggaggcgccgggaagagcagtcgcgacggggctagggacgacacactgcattcactggaagggacaacgcagcgccagtacatagcctgaaacgctccccagaaggtc

SEQ ID NO: 241547 - DNA, 156 bp, Homo sapiens
  chr22:21356377-21356533
  hyper
ctggccattgctgcgccgccgaagtctcgcgaggggtagcgcgcgccggaagttggtaccatagagactggagagccggaggtgcccccgccaccggggcggggcggggcgaggtcctagctagctgggttagtaagcggcgcgagcgtgcgagtt

SEQ ID NO: 241548 - DNA, 587 bp, Homo sapiens
  chr22:21368225-21368812
  hyper
ggctggagacgccccgcagagggctacgtgccctgctggacagaggtctcctgcctcctcggcggcgccagcccacctcccacaacccctgcgggagaagcccccaaggggaggagacgggcctggcccctgccccgagcaccttccgtctctaggtcggagtctgaatcggccttgggaccctgcttggcttcggggacccctgcaagacgtccacaggccgccgtcgcctcttcctcctgctttttatcctccccagacctctggcaggaaccgctcatcgttacgcccctttcgcagcctcagaccctgaggcggagaccgcttggcgcctcacttagagcgcgacccggggatgtgggcggagtctgcggctgcgctgaccaatcgagtgtggcgtccatcgactggcgtctgccacggcaattagcgacgcgctcccccgcggcggtcgccccggcaacccagtgctgtaggttgccgtagaaaccgtggctctcctgcgctgaggctcctcgcctgagaggataaactgcacgcgccacgggctatgcactgggctgggcgccttgtgggcatcctccctg

SEQ ID NO: 241549 - DNA, 105 bp, Homo sapiens
  chr22:21386898-21387003
  hyper
ccatcccaggccccccgcgcggccccacccgctgccacacacccagatatttcaccctgcccactctgcccgacctcgcaaggtcgttaccggagctcaccgggg

SEQ ID NO: 241550 - DNA, 490 bp, Homo sapiens
  chr22:21399922-21400412
  hyper
cccattccatgaaaggggggcgatgctggaaccgcctaggggaggcagggggataaacgcagcaaggcgcccaatccggtgcatggtctgtggcgcatgcagtgtatcagcccgggcgaggagcctcagcacaagccggccacagtttctacggcaaccgacaacaccgggttgccggggcgaccgccgcgggagagcgcgtcgctattggctgtggggggtgcctgttgctggacggcacattcggttggtcagcgcagccgcagactccgcccacaatcccgggccgcgctctgggcgcggggtcaagctgtctccgactcagtgtctgagactgcgagagggtcgtaaccatgaggggttcctgtgagaggtctggggaggatgaagagcagaaagaagaggctatggtggcctgtgggcgtctttcaggggtccccgaggccgagcagggtcccgaggccaattgggactccgacctggagacgga

SEQ ID NO: 241551 - DNA, 195 bp, Homo sapiens
  chr22:21922624-21922819
  hyper
cctagcaaactgtcgccttgtgactgcagagtcacacagcgggtaagttccaactccaggaaggcctgaggtcggccccgatcgcggcgcggttctgcttccctctcctccactcagtcatcccgatctcccctccctgataaagtgccatttttggggggataacggttgatttcagtcgttcgaatcaaaacg

SEQ ID NO: 241552 - DNA, 51 bp, Homo sapiens
  chr22:22005759-22005810
  hyper
atatacttcctagtcatcagcgaagggtaggcgcttaatgaatgcttctcc

SEQ ID NO: 241553 - DNA, 334 bp, Homo sapiens
  chr22:22006590-22006924
  hyper
gaccgggccctgggcggaagggatgtctgcgtgagtcagctgtgtctgaggaggggatcctgggctgggctgggcggccctactcggcgggtcaggcggaggggcgcggccgggatcccgggggccctctttggagcagggaactctagaagggcggggagcccccatcctctgctccactctgggcctccaggcagaagaatatgttagaaaagaatccagagtgtatctagtgcagggcaaggggccagggatggagtcgtcagctagaaggggcgcgtcgtcccggggtggggccgccctttttctcctggagccgcgggccgagtcaggg

SEQ ID NO: 241554 - DNA, 321 bp, Homo sapiens; identical to SEQ ID NO: 206066
  chr22:22012021-22012342
  hyper

SEQ ID NO: 241555 - DNA, 96 bp, Homo sapiens
  chr22:22020155-22020251
  hyper
gaaaagacgcctgcgggagatggcacacctagctaggaccccatactgggcaggcgatccttccgagcatgagcacctggcgctagcgaaccacaa

SEQ ID NO: 241556 - DNA, 226 bp, Homo sapiens
  chr22:22220990-22221216
  hyper
gtaaaaacttcaagacggaaatatgccaccaacactggcgtcagtaatccattttagaaagcctgcgcggagaccaccattagcaccgctgaggatatttaatgaaagccgttggctgcaaacagaggcgaagagagaaaaacgattatttcggtgttctgcacacacgcggaggcaaaacgctttcaggacctcagcagccaccgccgccaacaccgacaagcat

SEQ ID NO: 241557 - DNA, 206 bp, Homo sapiens
  chr22:22307056-22307262
  hyper
ccctccggttcctcggtcccatttcacccctgtgcgccttgggcgctcgcctgaccctcgtcccagccccgtcagccctctaatcccgtcccccccggcctcctcacccctggtctccgcgggcctcagctgtctcctcgcggctccgtgtcccgcaagctgctgccggccggccccgcccacttcccgtccctggccgccgcggg

SEQ ID NO: 241558 - DNA, 257 bp, Homo sapiens
  chr22:22337127-22337384
  hyper
cacagccgcaccgcggatccagctccggtccttgttcccggggcggctaccgacaacccctatttccgggtccagccgcttctggcgtccccgcgtccggtgtgccagcgtctgccctccggctccggcgggtcggcgttcttaggttccgtggctcgcggattccgggagcaccccagggagtggcacttgcacgccgcggaccgcagggatccccaagccctgcacccagattcttccccgccacggagagacaa

SEQ ID NO: 241559 - DNA, 92 bp, Homo sapiens
  chr22:22862458-22862550
  hyper
tgcattaagagtcccgacagcgacgcagtaaatgagacaagacgctgcggtaggggagagagacccatacattcaaatgccttaaggggtct

SEQ ID NO: 241560 - DNA, 351 bp, Homo sapiens
  chr22:23411783-23412134
  hyper
gggggccagctcctcggtccttctcccttccttccctcccaaggccacccttccgtgtgccaggattgccagggacgccaaagagcccctagacactgggcggtggcggcggggggcggcggcagagatgactaatgctccctcccatcgctgcacaaacctcaccggtgtaaatcgttagggtttgcataggcctttcacacgttctgaaggattggtgagacaatccaggagagcaggtgccactagccccactttgcaaacagaaaggctgggagaggtcagtcggttgcccaaggacgtagagctcacaagaggccgaactgggtttgaacccgagtggagagaagg

SEQ ID NO: 241561 - DNA, 166 bp, Homo sapiens
  chr22:23484157-23484323
  hyper
ttccagtagcccgcgccactggccaacctattcagttgccaggcgacatcgttgccaggcgactccagcagcgtccgcggcgccgcggtcgacataatcagcacccactgcgcaggcgcaaacagcccaaggctgcggccggctgcaaagcgggaacaatcattta

SEQ ID NO: 241562 - DNA, 80 bp, Homo sapiens
  chr22:23522446-23522526
  hyper
ggaccagggagtccggtgtcttttttacgggggacccctgggctgcgagttgcacagtccaattcgctgttgttagggcc

SEQ ID NO: 241563 - DNA, 242 bp, Homo sapiens
  chr22:23523309-23523551
  hyper
cgcatgatctacctgcagacgttgctggccaaggaaaagaagagctatgaccggcagcgatggggcttccggcgcgcggcgcaggcccccgacggcgcctccgagccccgagcgtccgcgtcgcgcccgcagccagcgcccgccgacggagccgacccgccgcccgccgaggagcccgaggcccggcccgacggcgagggttctccgggtaaggccaggcccgggaccgcccgcaggcccgg

SEQ ID NO: 241564 - DNA, 91 bp, Homo sapiens
  chr22:23864330-23864421
  hyper
cccgggcgtcctccgcctgtatcctgggccccccaagcagcgagccccggtgccccccacccttacccctcctccccggtgcccagggccc

SEQ ID NO: 241565 - DNA, 213 bp, Homo sapiens
  chr22:24110206-24110419
  hyper
gcactgcccccaaccctatcccccttctcccgtcctccggacatctcccttccagcagctccgggtctcggctggaaatgggaccctgctccctccctgcgcctggcaggctgtgcgggttctggggacaggggccagtgtcgcaaagcgccgagggcttaaggagggcgacagtgccttctgttaggaccaccgcagagggcagggagcgga

SEQ ID NO: 241566 - DNA, 1259 bp, Homo sapiens
  chr22:24180529-24181788
  hyper
gaaggatacggtcataaggacgcccccgaagagaaacatgaagacgaagtcggccgtgcggccgcggaaggagccctcttccagcatgcggcagtagcggaacctacggcgtcggtataggaagtgccaccaggcggggcctcagtttccccgtcccggcctctctcccagcccggccggcctgccctccacccagcccgtgtccgcagggcgcaggatacacgaagagcatgttgaagaagaagctgaatcccaggggcccgaagaagaggaagttggtgacgagcctccagacctacgggggacgggcggtcaggtgcggggtgggtgggtcgggcccacaggtgcgcggcgcggggcggcctcacctggaacttccggaacacaaggtgcgggttgaagtagagttgaaaggggctgaggagctccagctgctgtggaaccaggggccagtcaagagctgcccgggagccacgccgtaaccatggcgaccctcacccctcccgccagaggctgtaaccaaggcgacgtccggtccgcccggccgcttaccaccgcggcggtggtgaggacacaggctgcggtgtaagcccgcgtcaccgccggcacctgcaggaactcggccgctagtccctgccacgccattgaaccttctcaagcacgcgtggcccagccagcaacgcgctctttaacccgcctcccagccccgccttcggccaatccgcatccgaggcgctgcgcgccccaggctgaaaagagagcccctgagcccgacagccaatggaaggaagaagagggaaattaggggcggaaagggagagtgggcgggtagaggctggtggccaatgggcaggcgccaaggttgagcacgtggcggttgttgtggctgcggtggtggcgcgggagaacgtgtggccaatgaggaactggtcatttcgcggctttctaggagaggaccagtagcgtggacccacgacaccacgggggcggggctaagatcgtatgggttacaggagcgaagacccgagcaggcgaggcaaaactggaaagggcggggcgcgtgggcggggcgcggagtgtggcggctcagaccgtgctggctcactaactgacgacctagccacaacgttgtcctcgctgccagcccaagacaggcccacctaacccacagcagggaggcattcgggaatgtgtccaaacctccccaaacgtccagggccccactcaaatgtgccggccgctgtcggggttcttccccg

SEQ ID NO: 241567 - DNA, 89 bp, Homo sapiens; identical to SEQ ID NO: 206070
  chr22:24236849-24236938
  hyper

SEQ ID NO: 241568 - DNA, 36 bp, Homo sapiens
  chr22:24372937-24372973
  hyper
cggaaatcagagccggcacacgtgacttttgtttgc

SEQ ID NO: 241569 - DNA, 469 bp, Homo sapiens
  chr22:24551715-24552184
  hyper
gccaatgccatcccggcctgccgcactcctggccacccctacaccatgctctctggggccccacagcttcctgcagtgagagctgcacccactttgcccggcagcggtccacagcccgccaccagcggccagtccagggaaccggagaggattggccggcaaaagtcagttgcgctcctgggcccgcttccagtagagtgccggcgccccgtccggccgcgcctgccccgccccggcccgccgcgagcgagagagcgaacgagcctccgcggccatggcccggcgctcgccctagctccactgcacagatgccacggcggagccggcgggtaggaacttggcgggggcgggggccgggactggggccgggactggggccggggctggggctgcgcaaccgcttcgcctccgctgcccgtctgggtctccactttgctggcgcttttgctcaatcgtcccctggtgggct

SEQ ID NO: 241570 - DNA, 307 bp, Homo sapiens
  chr22:24552424-24552731
  hyper
ccccgggctgggagctggctcgtgggggcgtgcgctgcgcgaaagcgaaagccgcccgccagagcaactttgcggcggaaggcgccgacgaggagctgtgccgtgccgctcttggggatggtgagctggccgcccggccgggtgggcagcgcgtccgggcgcggtgcttcgctagctataaataggtgctgtgcggggacaggaagatggttccagccctttacaagcaccggcccgttatgtgcgctgggctaggaccttgccccgcagcggagtgggaggagtgaggttaggggtaacggttgca

SEQ ID NO: 241571 - DNA, 36 bp, Homo sapiens; identical to SEQ ID NO: 206072
  chr22:24643678-24643714
  hyper

SEQ ID NO: 241572 - DNA, 237 bp, Homo sapiens
  chr22:24666726-24666963
  hyper
ggcggggcctccacgacgcctgcgcagacggccgcagccctgctgggcgcgaaggggctggccaagggcggggcccgcgagggaggccgggcggcccggcaagcggcgctgcggggtaggctgctttcctgaggccggactcaacgggtctcggctgagccaccgggtgagctcaccgcccagcccaaaccaggagattgcgagggagcgatgcggtgcagcgcggtaagagcagca

SEQ ID NO: 241573 - DNA, 170 bp, Homo sapiens
  chr22:25348188-25348358
  hyper
gtgcccttgcttggcgcgaggaggcgccagcaccgcgcacagaccttgcccgcccccgggccggcaccagcagcccaggcaagtcagtgggcccacatttatggagcgcctcctgaaatcctgggttgcattaggctctcggggtcgccggctgggcagcgggtcggtgc

SEQ ID NO: 241574 - DNA, 319 bp, Homo sapiens
  chr22:25349438-25349757
  hyper
gtcctctcggcctggcctgcgccccccctccgctcgtcttcccagggcggaggcgccctgatgggattaagcctcagtccccctgttaccaggcaggcccgcgtggtccccgccccgatggcggcgcggcccacccgggctcacgggtggggccctcgggatgggaagcggctcgttgacccccacccgagcctgaccttttcacaccctgctggcacaaactcgcctgggagtggggacgccgcgccttaaaaccctgctgtttgtccagtcccggagcaggcgtgtgacctccaccgcgcgacgcctaggtggctag

SEQ ID NO: 241575 - DNA, 596 bp, Homo sapiens
  chr22:25507304-25507900
  hyper
agccccgagggaccgtgagcgagttgggacttgggggagaaaaaaatgggggcggacgtcagctccctgggcggccgccgccaccgcctccgcctccccgaggcccctcctgcattcctgggcagcgaagcccctcgctaagacgggggctgatgtcatcccgggctgctcagccaggggacccgggggccctggtggctgcctccggaagtgagctagccgcctgccggccgacaggtttggaatctccagccagaggacagaaaacctgcatgggtcaggtgagcggggtctggccgagggcagccgggcagggggcagcagggtgcggcagcttgcccaccggaacctcccagggtgcacctcaggggggctgcctacctgaagggaagtgaggacgagggtgcccaaaggccgccccctccacccccacccccatccccatcccccgcctttcgggaccgtcacgccctggagtgagtgcagccggcttgttcctcaaagctccttgtctcggccgatcagctgggtgagccctggaactggaacctggactgcccagtgtgttgactttataactccgctggggtggactc

SEQ ID NO: 241576 - DNA, 226 bp, Homo sapiens
  chr22:25678296-25678522
  hyper
tcccagacctcctggaggatgctgattgatgctgtcccgtttgagaactactgtgtccaggtagcagaggcctccccgatgccccttgagtagtgggcacggggcccagggcttctctggatgagctgggcgggcatgagaacgcatggagctgggggcaggaggtcggagcagcgaacgaggaggagaaggagtaggcggaggccgaaggagaggtgggggagga

SEQ ID NO: 241577 - DNA, 1529 bp, Homo sapiens
  chr22:25959829-25961358
  hyper
aaagacaccgagaccgaagatcaggaagctggaaattccccccagcttcggtgtttgggctgtatctcgcttttccacttccctaaatcaccctcgtggtgcgagtgtgctcgcagcagatgctccctaattgtctcttgtattgaccgtaaaaccctaacgacaggaatactctctctccttctatttctcaacaccatttcaacacccaaactaaaacctctcacctgagtgtaagggagtggtgaccttcttaagcggagagctcttccatcagagggctccctaagggcatctctgttcctagccggggagccgtcaccccactttgttctgcttagcctaagacacgcaactttttccagcttttactcttcgctgaattctcacggtggggttggggggatgttcaggctcaggagcgaggttgggggcccggcccgctgggcgctgttcaccggtagcccggaccagagcaggagtttcatcattacctgctgggataggtgggacacatgtatttccggggccaccccagacctcccggaggatgctgattgacactgtccagtttgagaactactgtgtccagggagcagaggcctccccataaccccttgggttgtggacgtctggcccagggcttctctgggtgagcggggcgggcatcagagcgcgtggaacctggggcgggaggtcggggcagtgaaggaggaggagaaggaggaggcggagaccgagggggagggaggggaggaggaagaggaggaggagtccctcgtggccaccccgaggggagggcgaccgtagagacttggtcgggaggcgccggcccagcgaggccgctgggactgtgcactgaggggcgctgaccgttggacgcgcgctccccgcagaccctcgctgaaggagcagggggcggcgcgcgtgcgcggggcgccgggcggcgcgcgagggggcggagcggggaggcgtgctgcgaccccggccggctacagcctgcggcgcgcgcagagcgctagtggggcgcgcggcgcgcgcgcggggcgggggcgcgcggaggggggggctgccccggggcggcccccccaggtcggggcgcggcgggcggcggcggcgggcgcgcgtcccgtccaggtccggagtaaccgccgccgccgccgccaaagctcgccaacatggcggacctggaggctgtgctggccgatgtcagttacctgatggccatggagaagagcaaggcgaccccggccgcccgcgccagcaagaggatcgtcctgccggagcccaggtaccagctgccccggccggcgccggccccaagccgccgccccctgcggccgccagctaccccctgcttcctggagggtcgggcgctgagcctccgctgccccggggcgggtgacacagcggagcgggcgatgcggggccggcctcgtcgttccagtctctgaaatggggcatcggagggccggtggggggcaccccgggagagagcgctccaaagtgcccggcgcggcgccctgcgc

SEQ ID NO: 241578 - DNA, 315 bp, Homo sapiens; identical to SEQ ID NO: 206080
  chr22:26756625-26756940
  hyper

SEQ ID NO: 241579 - DNA, 247 bp, Homo sapiens; identical to SEQ ID NO: 206081
  chr22:26763714-26763961
  hyper

SEQ ID NO: 241580 - DNA, 215 bp, Homo sapiens
  chr22:26773510-26773725
  hyper
gcacacatcctcgtcgtcattcacagaggtgccgctgctcaggaagtggcaccaactgttcccgttcaatattgtaatgtttctcctagctggggagaagtaacttctctctcctttctttcccccagatgtcgctactattccaacctccgcctgcctctgatgtactcccacccctacagccagatcaccgtggaaaccgagtttgacaaccc

SEQ ID NO: 241581 - DNA, 171 bp, Homo sapiens; identical to SEQ ID NO: 206083
  chr22:26879459-26879630
  hyper

SEQ ID NO: 241582 - DNA, 139 bp, Homo sapiens; identical to SEQ ID NO: 206084
  chr22:26880366-26880505
  hyper

SEQ ID NO: 241583 - DNA, 190 bp, Homo sapiens
  chr22:26908201-26908391
  hyper
ccccaagcagcaccgcccctctccgtgcctcggcagagctgtctacgaaatggattcccctccccacaccccaacggcttggaccgaagctcgccttccctgagccttcgtccctactctcactggcgctgagtccccttgtggccagccgtgctcacctgtccgagggtccagcgtaccaaattcagct

SEQ ID NO: 241584 - DNA, 1167 bp, Homo sapiens
  chr22:27053097-27054264
  hyper
gcgcccctggtccgcggtcgcgcgcagcccccgcgcctctccagccctgagctctctgcggcctaatgtggacgggcaagcgttgccatgacagcgccgcgggtggggatgcgggaggctgagcgcaccggccagctagcccctttgtgcggcgggggctgcggagtgctccctccaagaccggttgcaccccgctttcctggccaggactctgggcgcgggtaaggaggggttgggtgtgaggttgtaggggcgcaaggaggcgggaggagggtggaggtgagggccgggggtggggcgcctccgcccgccagccgctcccgcattaaaatttcatgggcgctgcagcagctacaaagacgacgccggctgcgctcgcgggaccagagggagggaggctgcggacgagtgcggggaggagtttgagatgggaggcgcttgcaggggctcccccagttctgcgctgtgagccggggcacaaagagccctctgcactagcgccgcaggaccgcggacccgaggtaagacgtcgccccatcctagaagccttccttcccaagtgtccttgtcccctaacggggaacagcctaattccccaaggctggggtcgagggtaggtcccagagtcccagggctgggttcagggatgcaacgccgcctgaagtgtcccgcattggatggatgaagaggctttacagcctgtaattctcaaacacagccaagactctggctgggatggggggtgaggtcaggcaaggggaggatgctttaggagtccagtgcgaatggggatcttgcaatcatgattatgagggggaacaaagaccctttccttccgacgacacaagacacaatttgggaggtggacccgcggaccttctcggtccaccaggttagcaattaactggccaagccacgggcagagccagagggtctcggaactggaggtgggggtggggcggtggggcagggtccttgagctccccttccctcatactcagcccgcccccgacccaaccccccgagcctgccattccttcacttcccagatgtccggcgtcaaatttggctccaaaaggatggagagggctggtaggtaacccaccctcgttgaaaacaacagtgacatcagtttatggagaggttactctacgcagggacgtgctt

SEQ ID NO: 241585 - DNA, 345 bp, Homo sapiens
  chr22:27054544-27054889
  hyper
ttcccctcttccagcggagggccctggggtagagaaattgtttctgggattgtgcaggaggaggcctggggggcgcgccctggattccccaccctcatcccaggctccggatccgaggctgcccggcgcctgggattgttggcgcgcacaccccactgcagtgccgccgcggggaaaacgcccccacctgctgcggcgggaggggaggaagtatgagagggaggactgcgagagaacttgagggaacggctttgttttttctcggggccaggctgggactgagcacgactcaaagcaaaacacttgctctggactcagtgctttgcaaagcgcattcccatttgg

SEQ ID NO: 241586 - DNA, 251 bp, Homo sapiens
  chr22:27068608-27068859
  hyper
tgcacaggaagtcacgaggggggcgtatcccacgaggaaggcaggagggggcgtgcccctcaccggaaattagcagaggggcgtgtcccacaccggaagtcagaaagcggagcctttcttacaccggaagtcaatgaagcgggtctttcctacgctaaaaaccactgagtggagtatttagtacacaggaagtcggccagagaaacatttctcatatttgaaggccggaaagagggacatttctgacaccg

SEQ ID NO: 241587 - DNA, 214 bp, Homo sapiens
  chr22:27069039-27069253
  hyper
aggggtgtggggaggggaagcagctttaccccgggctcggagtttgcaggagagagaagtggggagcaagaagtgaacctcaggggctcacagggttcccgcagatgctcaggccggccaggaatgcatctctggctctctgttcccacggacgtcactgcctcagccagcctcccccagagcccgccagccgctaagccggggccacacctgg

SEQ ID NO: 241588 - DNA, 750 bp, Homo sapiens
  chr22:27299014-27299764
  hyper
cttagtccttcagcaagggccggcccttgctcctttcctgagcggctattttgagagcgatggaggggagagggtattagattcctgaccttgaggtcggggaggggagggtgatgctagtggtggacgaaagacttgaagataatgagaaattgcatcaactttacccaggctgtttctgggtctagaagcaagcaaaaataaggcgggagcgggtggggggaagaaaaagaggcatttattttggagccgtatcggaagcacaagtgtcatgggctgaaaggccgccttctcctgcgggctaagggtgtgggcgacagctcgcacattcaaataagggagcgattacacggcgcttgcttctgaagacggatttcctggtagggggagcgggcgggggggctgggccggtgtaaaggggacggcaacattaggctttggcaagttaattagggttcaggagtccagcgagcgagcagggggagaggctggatttgcataaatccatttacataatgttcttcacaaattgtgcagccagaaggcagggagggggtggggagggaaagggctggggagggggaggtggttagacgcccgaggcagccgccgccaaagggggaagggcgaggcccgagatgggacccgctcctccttcgccgcttcacctctcccctgctcttgtctgcaccagggccacccctgcctatctcggccgtcacctccattctgggccggaccccacactgt

SEQ ID NO: 241589 - DNA, 163 bp, Homo sapiens; identical to SEQ ID NO: 206087
  chr22:27496885-27497048
  hyper

SEQ ID NO: 241590 - DNA, 97 bp, Homo sapiens
  chr22:27695127-27695224
  hyper
gagggtgcagggaagagagacgaagagaggaagggggccgagctggggagggggaggccgcgcagacgacgctgccgggagggctggtggaggagca

SEQ ID NO: 241591 - DNA, 534 bp, Homo sapiens
  chr22:28196459-28196993
  hyper
gttaaagttcctctcgccctggccagcgttcctgctgttgacctggggctcgaattggtccagcccaaacatacttggcggggggcagagggggatcaatagggcatgacagccggctctccgcggcgcgcctccggccagctactcgttccagcccaggattgggcgctccgggacgctcagcaccgcgggggctcagcgcgcacctccaccccgcctgatgtgagggacggggggcggggtattagctcctctcctgaagctccgattctgcccggggagggcctctcacatcttgcgaggccgcggggcctctaggagccgtgttggggggcccatgccccgggcggttgtcacagccgcgggtgggtctgcggggaggggacgaagccgcggatgaacggagacaaaaagttaagtggggggaatggggagggaagggggttgggagagcagagcgatcaccttctcaagtccgattgggtctgctggggagccctcaggacgccgcccgcagcctcccggagtccgtgg

SEQ ID NO: 241592 - DNA, 449 bp, Homo sapiens
  chr22:28198204-28198653
  hyper
ggggtgaacactccgttctccgctagcggcgcccaagttagccggccctgggattttcttggagggtaaagcagacggggaacctcgaagttagggttctcctcgagagacctgggcgcttgctcactcctccgtcactagggcgttcacaattgttccccttccccactgcctggggttcccggttctcaccggccggcgtgggctccaaggagtcacagtcactcagccactttatgggggagcacatcggttgagcccagtaaccggagcgacttgcgaggcggctgggaaccccgagaagacacgcacgaagagggcgcacccgccgggccgcacaccttgccctgggccacccggtccaagacccagaccctctgcgggtgcgaagttggcctccttaagagatcaattaaactgaagaggccgaggaatggaattgggctgtg

SEQ ID NO: 241593 - DNA, 267 bp, Homo sapiens
  chr22:28200773-28201040
  hyper
cgtgtatgcgccggcgtgtgcgcctccacagtgtgggcacccctgcgtgtgcctgtgtgtgctttcgcccgcaaggtcccgcagtgtttctttggaacagacacattgccccctagcgctcagatgaattcaaagtccccgcaggcgcagagccgggagcagtaggagcctcagggccctccacccgccagggctttctccatcctcctccctccccaggtccccctccgggggcactgagtgtgctggcaacggccagaggaggcc

SEQ ID NO: 241594 - DNA, 255 bp, Homo sapiens
  chr22:28315323-28315578
  hyper
tcgcgtcagcgcgcgagggggcctagctccgcccagtttcgtgccccaccccgggcacacgaggcctccactgcggttgcgcagcctgccgaagagcgtgcggcttctactgcggctgcgcaagctcgacgcgcgcactcttgtctgcttacgagggctcctcccttcagctttggtccctcggggcgtctgggcagcctacgctttccggtgagttttccagttggttctttggaagccgttttgcggtgactg

SEQ ID NO: 241595 - DNA, 1364 bp, Homo sapiens
  chr22:28838042-28839406
  hyper
cccacatttagaaacgttatttctgggaccaatagcaatttattttgatagaaccgctggatttttttttttcttgagttctcaacaaaggagccatattaggaaataatctcgcaaaaagcaaagtgccccctcccccttttccccatgatcgattcacacacgctggtgcacgctgacacgcacagacacacgcccgtgcacaatggccagcgcaggcaatcgcacgggcccacgaggcctcaggagccccgcaggctgaaggcccggctatggccagccccaggcgctcaggcaggaggcctctcggcccgccgccccggaaccagctgctgggctggtgtgctggggctgctcgccccccagcggggccctggggaaacggctgccagcggctcagagccttttaaccccttggggaaataggtgttataacaccacctgcggggcctgtgtcaggggtgcagcctcaaatccactcccgccccacgccccgccatggggcaacacctagtaggtcttggctggctcctgcaaagctaatcgtgtcgctgtctgcacaggacttctaaagcaaacgggtgcttccgagctgtcacccctggggctccaggcatatcatgaaggaaaaacttaaagggcagtggatgcagaccagatttggtaactcgtccctaagggactgatgcaagtcccaaaggaaccagggctgtttggaccagctggcccagcaaactacggaaggggtggagagacctgaaggtaaccgccccgtgttacccttccccgggttgggctttggggccccattcccctctccaggacacttaccttcttccggggctgccatttcatcatatttgtaaagccgatacgtggaacatcaagatgttggctgggggctgggggcagatgcagggcagcgacgactgcaagtcatgctgcctccctcccaccccctaattctttcccatattcactgcgaagggaaaagccccaggagagtccagtcttttcgccttcagttcaatgaaaagtatccccaaaccacgaacacacttcccaccaggctaggaagtcccagcagccaccggcgtactcctgccagagcggggcattttcccggccggcgcctgcaaaaggagcctgtagcagggggtctccaagctggctgcagagaccctccctcagagaagagactgagaacgcgggctgctacagaatcccagccgggcttctaccatccaaaccccttttggcgaattctcctcttctcaaaaaagattagacaagcaatcaaaccctcacgcgcagcctggagcaattcccacaattctgggtgtatttctcgtttgtaaaattta

SEQ ID NO: 241596 - DNA, 88 bp, Homo sapiens
  chr22:28839653-28839741
  hyper
cttcccttcagtgcgagcacagccagcccagcttcagccacacagagcaaacggtttctgggtcttagtgccacgacatctgctccaa

SEQ ID NO: 241597 - DNA, 60 bp, Homo sapiens
  chr22:29075306-29075366
  hyper
ggggaggcgctgggcgcattaggcgctgactgtataccgacaccccccaccccggtgtgc

SEQ ID NO: 241598 - DNA, 95 bp, Homo sapiens
  chr22:29137894-29137989
  hyper
ggccgtcaggcgccgcctcaatgcctcctgggagttgtagtttagaagggagagcggaacttagaacccgggttcccctcgggtgatcccgcccc

SEQ ID NO: 241599 - DNA, 73 bp, Homo sapiens
  chr22:29279556-29279629
  hyper
ggggataacccctcacgtggagcagatgaaagggccgcggcgcgacggccgggggagccgagctgagcctgcg

SEQ ID NO: 241600 - DNA, 73 bp, Homo sapiens
  chr22:29279911-29279984
  hyper
cgcgggccaaggagacggcgttcgtggaggtggtgctgttcgagtcgagcccaagcggcgattacaccaccta

SEQ ID NO: 241601 - DNA, 594 bp, Homo sapiens
  chr22:29426292-29426886
  hyper
gtgcaatggcgccgcgacccggccgcggactccagcctctaaagtcgggtacctttaattaggagaaattaagtggggctgctacatattttgagaataagtaacactatttaaacttaggcagccttaaccactaacttaaccgctgaattctcgctgctacatgtctcctaaatagatcagcataatcttaactaggacttaaaatgcatcatcttcgttccggaactcagaacctgcagccgacgggagcctttggaggcttaatgactttaattatggcgagaaatatcttctcccggtggggaggggcgcggccggtggcgaggagggcactttcccgggtcggagaaggccggatggcagcccgccccgaaagtcccggcccgctggattgggggttcgggggtggggggaacatagagaagcagggctggtggaggggaggagggaccctgcagggcggtacacgacgggtgggagtggggaggaggagggctcctggcgcggggaggagccgcgggaggggggatgttggccgcagggcctcggagttctgagctgtgtttgtggcttcagcgctttgatctcctg

SEQ ID NO: 241602 - DNA, 506 bp, Homo sapiens
  chr22:29467392-29467898
  hyper
ggagtttgggggtacgcgggctctgggagtggataagggggtggcgcccgggggttgagggggcccaggggcgagtgtacccaaggcgtgccggtcccgcccagccgcgctctgggtgcggcgagtctgcacactggtgcagatgttcccgccgccgcgccgggcgcaggtctgcacttgcaagcccgggaccagggacttgaaagcgcccggcgcgccgcctggacctgccccgccgggcgtcaccgctgcgctttaggcgggaactgtaggaaaatcccctctgcctggcgggagggcgggggaggaggacggcccacgaccgaccccgggtgcggcaggggaagaccttgccggggtcggggcggggggaggcgggcaaagggcctaccacgctggggccgaaagtttaagcaagccgcgcgctctctgatccctaacatcccaggctgtaggataagcagtactgtctcatccatttctggacgttgcgttgggcgttttac

SEQ ID NO: 241603 - DNA, 60 bp, Homo sapiens
  chr22:29469069-29469129
  hyper
ctgccccctttaccccgggccgcgccccggggccccgcactgacggcccatggcgccgcc

SEQ ID NO: 241604 - DNA, 136 bp, Homo sapiens
  chr22:29469369-29469505
  hyper
cccttcctgggacccgggctacccccaggcccgtcatcgacgcccccgggcccggtactgtcccccggctgcaggacccggtgctcctcagcgacgcccctcagcccaggaggccctctccgccttgagtcttcca

SEQ ID NO: 241605 - DNA, 220 bp, Homo sapiens
  chr22:29550499-29550719
  hyper
aggagctgcccgcccgcccagctcccgctgcggcagagcccccagccgccgcctcctgccgccctcgcctttcctgcaggagccgtcccagcgcaggcttgctcaccagcgccgccccgtggtaagactgcagatctgcggaagaaggccagccctgaaccgcaactgctctcaagcccttccattacagttacacggattttttgcccagcgcggtgat

SEQ ID NO: 241606 - DNA, 40 bp, Homo sapiens
  chr22:29550779-29550819
  hyper
ttcagaatcagcctgggcaaaattgcgagagaaaagaaaa

SEQ ID NO: 241607 - DNA, 213 bp, Homo sapiens
  chr22:29663973-29664186
  hyper
gccgactcttcagcgaccgtccctagagccagcggacggaaccattccaaacagcctagtctcgtgctgagagcctctccggtttcacgctgagacccgctcacccccgctctggccccttagatgctattttggcccgagtgtcacgtcgggcgctctttagagaggactgggacaagagttgcggacgcgaagaacgagtaagcggtggtt

SEQ ID NO: 241608 - DNA, 436 bp, Homo sapiens
  chr22:29702500-29702936
  hyper
tttcagggtcaaaaatgagcattcagtgagcacaaggagccctcagtcgccaggggcatcctccccctccccgcggcggtgccgtttatctggccaggggaggtccacccgggaggaggtgactttgcagcctccagccgctatcgcttcctgccttcatcttgggaacaggccgtgctgtgcgccagcccggggagcccaccgtctggggaggggggcgattaaaaggtcccaacctcctccccaggagaccaaagaggttggacggggccccgggtactaggctgggtgggggttgggcgcctgggccggtcgcagttgtctgggggccctggggctctctgcgtcgagagcgctcgaagacccgggattcctggcccgatcgcgggcggggggagaccccagctccaccccagctcccgccggctcggggaag

SEQ ID NO: 241609 - DNA, 144 bp, Homo sapiens
  chr22:29703176-29703320
  hyper
gtgcgcatggacgggggtggggaggcggggcgggaagcggcgtcctcggcctctgttccccggggctgtgtgaccttgggcggccccgcaccctctctgggcccagagccccagcaccggcagggcctgcggaggccgctctga

SEQ ID NO: 241610 - DNA, 42 bp, Homo sapiens
  chr22:29710517-29710559
  hyper
actgctctagggtcggaggtctgtcctttactttgcacaaat

SEQ ID NO: 241611 - DNA, 724 bp, Homo sapiens
  chr22:29710589-29711313
  hyper
aaatgatagggcagagaatgaacccctccaccagcccccgtagaaagtacacccctgctcctgaccccagtctctcccattgtagctctgctcaaggccccaaacacaaaacgccacactctcgggaaggcaccgttatgcaccaccaagagctgctccacacccccagccgaggcaggcaaaggtggaggcgctcacaggagcaagggaacgcccctgggcaaaatcgcccggcctccagcctgggcttgggcgtctccaggtcggcgggaagggctgaaacgcaagtatcccaggacgcacacacatccctccatcccggagcacagccaggcgcccgaggcctccacgcggacacgcacgtgtgcaccgagcacgcacacccctcacactgtcacacgcccctgcccgctcctcgagccgctacctccggacccccggggctcgagccggggccagcgacgtcgccgtcgcggatgctcaagtcgtagacggcgccgtcgagcagcaccgcgggtcggtagaggcgcggcccgtccgtgggccggtggcgctcggggtagtcaccgaacaggaactggcggatgatggccgtcttgcccacgcccggggcgcctagaacggccacccgcaggctaccccccatggccggccggcgctgtcgctccccgcgctggaaagcctcatgggccggcgccgcaccgtgcgcccccaggccgtgcgc

SEQ ID NO: 241612 - DNA, 39 bp, Homo sapiens
  chr22:29999383-29999422
  hyper
accccaaaggaggcgggacggagcgggaaagtcctgcct

SEQ ID NO: 241613 - DNA, 830 bp, Homo sapiens
  chr22:30115856-30116686
  hyper
gggagaaggagccccgggcaggtttggggcggccgctcaggggccggcggcgggaaggggcgggctgggggtggggagcgcggagggggcgggcgggcggctggcgggggaggcggggagcgcagccagcgcggcacagaacgagcgagcgagcgagcggagaggcggctacagcctgagcgccgggccggtagcggccgcgccggcgagcggactagcgggcggcgagcagcgcggagcgcgcggggcaccgaggagcgggcgcggcgggcaccgcgcgaggcagccggagctctcggaaaggccagagcggcgccgcccccgctgcccctgcggggccccggctgggagcccgacgagggagcgggcggcatggcccggcggcccggggcgcgggggcgctaggcccccggaggggcgtccccagcctcgccgctgccgccgccgccctccgcagccgcgcgccccgcccgctccagccgcccccggggccgccaccggcccatgagccccggcctcaaagtttgcggcgggcgggcgggcgcggagcctccaagatgccgttccacccggtgacggcggcgttgatgtaccggggcatctacaccgtgcccaacctgctgtcggagcagcgcccggtggacatcccggaggacgagctggagggtgagtgtccgccgggatccccgccccggcggccctcctacctgtgcgcccaggtgaagcgcgggccaggggcgcgggggcggggggcggggggcggtccgcaggtgccggttgccaggtgggcgccccagctagcagctgtgccccgcggcaagacctgtccg

SEQ ID NO: 241614 - DNA, 490 bp, Homo sapiens
  chr22:30162876-30163366
  hyper
aagtcttccagtgcggagaaaagagactaggactcgcccctcgacgtctcgcggaaggtacctggctccccggtggctgcagctccgggctcctcctcctgcgtcctcgcgtcgcgtactgcttgctgggattcgtagtctcgccttggccatcagttcgcccttcccagagagctttgggaatctaagccgggactgggcggagggcggggagaaggtgatggcgcgcgagggcttctgggagttgtagtttgacatattctaacagccaggaattctggagaagaaaaattgggtaataaatcttatcagattatctgggctgtcctgatatgaaccttttgagtttttttcctcattcccaggataggaatacctctgtggttcaaaacacgaaggctgagattcagaggaactacaaatcccataaagtgttgcacgtctagggcctttggggaacgaggtcggccccagcgcaggcgcggtggcg

SEQ ID NO: 241615 - DNA, 244 bp, Homo sapiens
  chr22:30234279-30234523
  hyper
agacaggaagtctcggcctggccccgcccccagagccgagcaaactaccgccgggaagccggacccgggttgcgcctctcttcttaagactccgccccacactcggcgtctgtagccacgcccccttcccctcctatctcccttcctgcttaagcagagaataggtcagctgagggcgggctgtgtgattacacctctcgggaaatccaagtatggcacctgagaggacgtctcggaatcccag

SEQ ID NO: 241616 - DNA, 326 bp, Homo sapiens
  chr22:30642417-30642743
  hyper
agaggaggaggaggaaggctcggcgccccctccctcgccgccaacctgccgcggggcgtgcggtgcttgggaccatgtgcccgcgctcgctccgggccgccacccagcgcctccggtggctgcgcgggcgccccaagtgttcgtgtgtctgcggcgggtgggcgtccggctcgcgctgccaagcgccccaagttgccgccgcgccccgcagcggggacgcgaagccggcgcggggcgggtgtatttacctgccgccaagaccttcattatgggctgcacttcagagggccttggaggaaacctcagatgccggcagttttcagagg

SEQ ID NO: 241617 - DNA, 112 bp, Homo sapiens; identical to SEQ ID NO: 206100
  chr22:30642966-30643078
  hyper

SEQ ID NO: 241618 - DNA, 69 bp, Homo sapiens
  chr22:30685652-30685721
  hyper
cggccacgccccgcgggaagagaagcctattgggtggtcacgcctcctcctaacgccagaacctcatcc

SEQ ID NO: 241619 - DNA, 36 bp, Homo sapiens
  chr22:30821612-30821648
  hyper
tcagtcctgggagcgattagcgccaacagctcagag

SEQ ID NO: 241620 - DNA, 374 bp, Homo sapiens
  chr22:30938194-30938568
  hyper
ggtcccctccggcccgcacccacccccaagaggggccttcagctttggggctcagaggcacgacctcttggggagggttaaaaggcagacacccccccacccccgcgcctccactccccgactccttcgccgcctccagcctctcgccagtgggaagcgggagtagccgcgcggccggagtccggaggcgaggggaggtcggccgcaacttccccaggccaccttaagaggacgatgtagccagctcgcagcgctgacctcagaaaaacaagtttgcgcaaagtggagcggggacccggcctctgggcagccccggcggcgcttctagtgccttccagccctcgcgggcggcgtagccgcggcccatggagccc

SEQ ID NO: 241621 - DNA, 86 bp, Homo sapiens
  chr22:30987535-30987621
  hyper
tggaatgaagctacgcttggtaagttcaactctctttcacagccctctccacagaaagaactctggagttcgttctcggatttcac

SEQ ID NO: 241622 - DNA, 102 bp, Homo sapiens
  chr22:30988134-30988236
  hyper
tgactgtgagcctcgttgcatgttgggacggagaggggcggaaggcttagggacagcgcggtgccttctgggatgcagaggggcgccgcactccatggtgcg

SEQ ID NO: 241623 - DNA, 321 bp, Homo sapiens
  chr22:31002908-31003229
  hyper
cactggaacagctggggggacagcagacaggcacggtcggacagacttgacagatcaggcatcaggccctctgcgctggtcccgggctctttaagcaggaacgtgaatggcctcaagatgtctcacatggtcccactagccctcctcctccctttgttccctacctccaggagggctgctctgcccttccttcctctgttctttggccttatgttccccgccaccacagaccttcccccgccccacccctctgcagacttagccgtgcattgcaggcatggaggattaatcagtgacaggaagctgcgtctctcggagcgg

SEQ ID NO: 241624 - DNA, 211 bp, Homo sapiens
  chr22:31031671-31031882
  hyper
tgtagggagcgggcggcggcgggggaggcagaggcggaggcggagtcaagagcgcaccgccgcgcccgccgtgccgggcctgagctggagccgggcgtgagtcgcagcaggagccgcagccggagtcacagccgcagccagagccgcagccaaagcctcagagagcaggagttggagcgcaggccctgctggatccgcgcctagctcgccg

SEQ ID NO: 241625 - DNA, 785 bp, Homo sapiens
  chr22:31090187-31090972
  hyper
tgtttagagaacccgaacgatgtcgtcactggcagcgaagcgccttggcatgaaccgtaggccagctggctcaggaggtggaggcggtgaggcggccacttggggccaccgcttctggcggccgcaggagcgacccacagacaggtaatggctgccatggggggcggggcgtcgtctttagcctttagcgcccctgtgcttcgtgcgcatttcgtggcctctgggtgccgtacctgcttcccacccggctttcctgggtggcggagagcgaacccaccccagcctgggttgggggagggggcgtcggcgcagggtcccgtgggcagagctgcgctgggagctggcgggctccgcattcatcattgttcctccagcgcctggcacggctgggccgaagcagagaccgtggcctgaagcgcgccatccccttcggagttgaccgaccaccaagctcttccgcccacaggtgttgtcagagctccttccaccggccggacctaggaaggacccagggtccaaacatggcccgaggctggccgagagcacaacagccggcgggcgctgacgggcacggagcgcacgggaccgcggaggaacccgcgcgcgcccccgcctcgcgccgcgcgcacgtgactgcgcccccggccccgcccccggcctgccccccgcccccactggccgctcggccgcgcgcgggtcggccggctctatggggaaagcggcggctccgagccgaggcggcggctgtggcggccgctcccgcgggctctcgtcgctgttcacgg

SEQ ID NO: 241626 - DNA, 154 bp, Homo sapiens
  chr22:31198441-31198595
  hyper
agccgtggaccatccgagggcccctcccctgctgggtccaggcaaagggccggccctctccagcctcgattggggcgcgatagcgcccttagtgtcgtgtcgggttccaggccacgctcgggcattttaagaggctgaggtgcgccttccgctg

SEQ ID NO: 241627 - DNA, 379 bp, Homo sapiens
  chr22:31218345-31218724
  hyper
gcgggacgaggccgcgctcctggggcgggaggaagtggtaggcagcaccgccgctcaggctgggctcggctcccgcggcgcggacggggttaacgcgctcatgtaccgggtggcgggcggcagtggtgcattgtggtaacgcggcgccgggacccacgagtgtccgccgcctccgccgggcggcccaccgagctgtgcacgcgtccgtgcaagcccccgggacccggcgccatgtagcgccccgccgattggaggctgccccgccgcgggaaatgaagggacgcggctgctgggacacggcctccgtgcgctccttctgcagctccggctgcctgaataaatttaagaagggttagtgcttgccgggcttccacccgga

SEQ ID NO: 241628 - DNA, 120 bp, Homo sapiens; identical to SEQ ID NO: 206107
  chr22:31477077-31477197
  hyper

SEQ ID NO: 241629 - DNA, 855 bp, Homo sapiens
  chr22:31480651-31481506
  hyper
tcagggttcttcagccgccacctccctctcttaagcgaggctcgggcggcgctggaaaagagttttggagagaagctggagcagtggttgaatctctgggaaaggacagatgagaacctgccccggtctcgggatcggtgcctctcgaagtctttccgaccccgggagcggctcctccagcacccggcgcccgccattactgcgccccgcgcgccggcccggcccccgctggcctcgtggcaagaacgggggcgtcccgagccgggctcctccccgcggggccgggccatataaggaaaagctaggcccgctccgcccgccctgcgccccagcgtctggccgatttggggacgcgggcagtcgcttccggccccggctcccgcacattcttgaggattgggccggggatgggaggaatggggacgcctggggacttgcacgccgcgtgcccctccaccacccgccgggacgccctctgcctcggtcccgagttcgagttcgacctccgccactcagctgggtgtcctggggaccttggtttcttccctttagatccggacactgaagcaggcggtagcgggtgtcttcctacctggctaccccttcggcgcctagcgcgaggcagggtgggcgaggcgagggcggcgccctgcgagggagggcggtcgcagaacctgcgggccttcagcgccccctggcgaggcttccctccaccgccggcgggacccccatgggcaaccgggggagctgggactgaaagcctggagagccccctccgttgtgctgttggggagactgaggcccagtgagacctcagggcctgccaggcgttcccaacagcgagggcagagagta

SEQ ID NO: 241630 - DNA, 306 bp, Homo sapiens; identical to SEQ ID NO: 206108
  chr22:31556066-31556372
  hyper

SEQ ID NO: 241631 - DNA, 31 bp, Homo sapiens
  chr22:31742464-31742495
  hyper
ggccttgcacgtgcgcgcccggatgcctagc

SEQ ID NO: 241632 - DNA, 99 bp, Homo sapiens
  chr22:31743474-31743573
  hyper
ccgcgtgtgcgggcgggaagttcccacagttgcaaagaggcagcgaagtatgtgttccaaactttccacggttccaaactgagcgcttccattaagaga

SEQ ID NO: 241633 - DNA, 127 bp, Homo sapiens
  chr22:31795654-31795781
  hyper
agggtactcgccacgatgagcagcaccttagctaagatcgcggagatagaagcagaggtaatggacgcagctggcggttcactcttagtctgagcattccttctttggtggcgtcgctccttcctgt

SEQ ID NO: 241634 - DNA, 219 bp, Homo sapiens
  chr22:31885559-31885778
  hyper
gccccggcgcccgcgctcacgcacgcgaccccgggagcaatgcgcccgcgccccttctacacccgggagcaccgggcgcgcggtgccccggacccagccgccaccgccgccgacccttactcggtgcctccgccgctcggcggccctttgcctcggccgccgctcccctccccgctgcccgcaccggtcccagcgccgctccccgcagccttcgctctc

SEQ ID NO: 241635 - DNA, 51 bp, Homo sapiens
  chr22:31892031-31892082
  hyper
cctgccgggtccacgcatgggcgggtcatactccacgggttccggtttcca

SEQ ID NO: 241636 - DNA, 248 bp, Homo sapiens
  chr22:31892329-31892577
  hyper
ggtgcatgctccacgcccctcgaaaccgattctcattgctgctgctgcaaagcaacccgaagtgcgccacctacccgactgaggctgcgcaagccccggggtctgggcggggtggtcctcgtgcgcgccgcgtcgccgtggagacgagggcgggcccgcgcgagactggcgtctagaggcgcgcgaagcgctgaggcgggcgtggaccgcgcgggagttaagaagcaggtcccggatcgccgtatacc

SEQ ID NO: 241637 - DNA, 304 bp, Homo sapiens
  chr22:32145988-32146292
  hyper
cctccgcggcccgcgcttgcccagccagctcagcccctgcagctgcagccccgtcgtcgccaggtctacctgagcctacggagccgacagaggccgggggcgctccggccgccgccacctcttcgtctctatggtccccctgcacttcctcatccggggcccgagccagccatgcggactcgcccaaatcccgcccccgcaccgcgcgcgcgcactccaagggaaggctcttcctgattctgacctcccgccctctgctagccccagcctccctcaaccccgcccctgcggctcaaactcttaa

SEQ ID NO: 241638 - DNA, 360 bp, Homo sapiens
  chr22:32149110-32149470
  hyper
tcagtggcagcaggcggagctggcaattgtcaggagtccttggccagagcctgacccagcccacccagctctctggttttctgcttggagagaaagatatcctgacagacgcgagtttaggcagtgccctgggtatgaccaaaggatgttggttaaaggccccgttctgggaacgggtcaggattcgtccttgcttccttctgaagggttttgtgtcctcaggctgtttcctggtttgtgaaataggatagtatctgcctcctgcatccatcaggtaatagggatgcaatgattacataaggactatgaagccacggcagccattcttattaataacctgaggggcgcagaacgtcgttt

SEQ ID NO: 241639 - DNA, 347 bp, Homo sapiens
  chr22:32149786-32150133
  hyper
cgagggcaggaaacgccaggaggtggcccaaggaagaggccgcacacgacgccccgcccccggctcgagccccggatgaggaagtggtgcggccaccgagacgagacggaggcccggcgagagcggcgcgggggcgcgagggcgggaaggaggcggggccccggggcggagccaccggagcggcgcgggttctcaggtgagcgctacacggtcggggcgggcctagtaggcgcttcaggcttaggggcggaacagcgcgggccgcgcgggcgtaggcggggtatctggaggaggcgcagggaacctggagagggtccagccctcagtgccccggccagaggcgggaa

SEQ ID NO: 241640 - DNA, 262 bp, Homo sapiens
  chr22:32340126-32340388
  hyper
gccagatctctaacgtggatggagtggcgcgtttcagggtggggctatgacaatgcactgcatgtgcagccgccatcaccgcgccccctccaccggctccgcagtctcctgcccggctttcccttctccacctccatctctgcggcggtaaaatgcagcactcgcagagcgcctgcgcggctttcaggccgggcggcggcggcggcggtggctatttatagtaggtgacgtcaccttgaaatagaccgttagggccggcccg

SEQ ID NO: 241641 - DNA, 85 bp, Homo sapiens
  chr22:32341314-32341399
  hyper
ttccatcttcccacgcctgggggtctggctttgtgtgcgaagacccctttcctgcagtctaggcgtggacgggggcgggagagtg

SEQ ID NO: 241642 - DNA, 35 bp, Homo sapiens
  chr22:32808157-32808192
  hyper
tagcaaaaactcccggctccgctttgaagagccgc

SEQ ID NO: 241643 - DNA, 63 bp, Homo sapiens
  chr22:32870503-32870566
  hyper
tcctggggagtggcgactgtattgtctgtctgcagcatccctatcagcgctaccgttgttcca

SEQ ID NO: 241644 - DNA, 105 bp, Homo sapiens
  chr22:32871125-32871230
  hyper
gggctgggcggcccgcggggagtggggagtgcttggggtgggtgcagggcgggttggcgtcatctgtgggctgcaggcgcgggcgtggccgggcgataggccaag

SEQ ID NO: 241645 - DNA, 230 bp, Homo sapiens
  chr22:33192954-33193184
  hyper
agctccggcagccacgaacccagacgggatgttgactgagagctttgtggccatggcagatgggaggggtgagcttcacccactcaaaggcacccgcaccccaccgatgagtgtggaattgtgctctcccgccctcgcagtgagacgaccgaccaggactgcaggctgagcaaatgggtgttctctggcttatagcgccccctagcaccagccagcgggatagagctccg

SEQ ID NO: 241646 - DNA, 855 bp, Homo sapiens
  chr22:33197432-33198287
  hyper
ccagcggcaagcaccggtcccgggcgcgccccagcccacccactcgcgtgcccacggcggcattattccctataaggatctgaacgatccgggggcggccccgccccgttaccccttgcccccggccccgccccctttttggagggccgatgaggtaatgcggctctgccattggtctgagggggcgggccccaacagcccgaggcggggtccccgggggcccagcgctatatcactcggccgcccaggcagcggcgcagagcgggcagcaggcaggcggcgggcgctcagacggcttctcctcctcctcttgctcctccagctcctgctccttcgccgggaggccgcccgccgagtcctgcgccagcgccgaggcagcctcgctgcgccccatcccgtcccgccgggcactcggagggcagcgcgccggaggccaaggttgccccgcacggcccggcgggcgagcgagctcgggctgcagcagccccgccggcggcgcgcacggcaactttggagaggcgagcagcagccccggcagcggcggcagcagcggcaatgaccccttggctcgggctcatcgtgctcctgggcagctggagcctgggggactggggcgccgaggcgtgcacatgctcgcccagccacccccaggacgccttctgcaactccgacatcggtaagcgctcctggtgccccgcccgagccccacgctgcagccaggactgcagcgctgcttagggaggcagggcgagccccactcctttcctctgccccaggagaggggcagacggggttggggcggagtggagaaactcgatgtccttgggcgggggcgctggcatagctgagagggga

SEQ ID NO: 241647 - DNA, 81 bp, Homo sapiens
  chr22:33454418-33454499
  hyper
cgcggcgccccattggctcgggcaacgaggcccccggacggccccgcccacccgcgcccactccctcgcccacgcctctcc

SEQ ID NO: 241648 - DNA, 337 bp, Homo sapiens
  chr22:35420072-35420409
  hyper
cgagggcacggacacggtagaatcccaggtggaagaaggcaaagtgggcgggaggggagaacttgcatgttttaacctttttcctgcacccaaccccgccatccggacgccaagcttccagtcaaacctgagaccacagctccccctggcggtcagcgcgagcccgcaccgcggctctcctgtgctcacgcagccctgcgcggcggaggtggctggaaatgaatttagcgtcagcacagttatttaaattgttttaattaatcacagattgagcagtaaatgaaccactaagtggagagagcgcgcgggagcaagcgagaaagaggtgaggggagga

SEQ ID NO: 241649 - DNA, 348 bp, Homo sapiens
  chr22:35695611-35695959
  hyper
gtcctttagacctcgccctaaaaggtcaggggcgtggcttaaagaggaccgcgcttcccgggccccgaccccagaccctacatcgtgtgtgacgcccgccgccgccgagcaagccgcagtgaggtcatcgccctccgcctcgggggcgggaccctggcgtctcagggcggggcttgtggtcgagcttcgcggtgccaccgccccgcccacgcctcctcgccggcctccgagtgcgtcacgtgacgggtcggtggcgctggcggttgctgtcagctgattcccggggttggtggcagcggcggtagcagcaatggactttctcctggggaacccgttcagctctccagt

SEQ ID NO: 241650 - DNA, 82 bp, Homo sapiens
  chr22:35776987-35777069
  hyper
gcgggtgttgcaacgcccggccagaaagtgggcatcagctgttccgcctggcccacgtgacccgccgagcataaatgtgacc

SEQ ID NO: 241651 - DNA, 195 bp, Homo sapiens; identical to SEQ ID NO: 206116
  chr22:35796009-35796204
  hyper

SEQ ID NO: 241652 - DNA, 290 bp, Homo sapiens
  chr22:35937044-35937334
  hyper
aaggtggcataggcgaccaggagggttcgcccacctgggacacgcacccacagtcacctccaaaggaccccccctccccaagtctctaggagctgctccttcatcactggagtcgcccctacctctctgcccccagcccgagagccccaggcggggacccccggatcggacgtccccaagcctccgggcacctggctcagcaggaggcccccggctcggggcagggcagggccggcggcggcgagccggagcccgccccctgcccgggccccgccgagccctcggagccc

SEQ ID NO: 241653 - DNA, 99 bp, Homo sapiens
  chr22:36424035-36424134
  hyper
caaaacctatccactcgtcgtgcctcctggcccctcaggaatcaggaccctctcgggcacaccaggttcagtcctgcaaccttcgttcctagcccgagc

SEQ ID NO: 241654 - DNA, 40 bp, Homo sapiens
  chr22:36425341-36425381
  hyper
acagagttaagtcctgagtttactcgcctgagcaccttgg

SEQ ID NO: 241655 - DNA, 93 bp, Homo sapiens
  chr22:36462236-36462329
  hyper
agtgagagggacaagaaaacgccttctctttatgtgactctctgttccccagcaaagttgccagggtccccaacaatcgtagtttctccttca

SEQ ID NO: 241656 - DNA, 333 bp, Homo sapiens
  chr22:36784309-36784642
  hyper
agggcgggtccaacggacagccaggttctaggacaaggattgacacagggggaatccaatcaggaggcggcgactcggggcgcggagagctccgggccggggttttggtgccttgcctgggccggggcgaggccctgcgggagccgactgggaaggtctggaactctgacaccccgccccgcgagctgtgctctcagtctcatgtcatcccaccacaaggacagatattaagtaccatatatgggaaaaatgctattttacataattatgatccctgtgggggcgggcatggactcagccctggattccattgtgagcgtcttgagttcgatt

SEQ ID NO: 241657 - DNA, 264 bp, Homo sapiens
  chr22:36847888-36848152
  hyper
tgtcttggctcatgcgtcgtaagcctttgttccccaacagggggaagtgaaccagcacacaaggcccttccgtcctgcggagctcactgccttcctcagctcctggcccgcacttccgaccacacactggggacacaccctcgggggggccccaccccagcagctgcccatgttcacacctcttcagttatttcaaactccgcctctctcggcctgatgcccaacacttccttcacccaaggaggtcctgttcaaatatcactt

SEQ ID NO: 241658 - DNA, 129 bp, Homo sapiens
  chr22:36850993-36851122
  hyper
ccaactttgtggccgaacaagccctccccggcttgttccgctggtcccaggcgcctgcgcatccggacacgatgaggagcaggtgcgcggggccggggtgtgttcgagggggtcgtgcgcgcctgggct

SEQ ID NO: 241659 - DNA, 169 bp, Homo sapiens
  chr22:36925411-36925580
  hyper
gtcaggcggtatccggggacgcccaaagagggcgttcatcactgaaacttggcggccgcgcaatcgaagctcgaggcggggagcgactggcgcccttctgtgtcccacaatgcttcgcggcgcgcctcagcccccatgtatcccaccgtcacccgcgactccccgcctg

SEQ ID NO: 241660 - DNA, 622 bp, Homo sapiens
  chr22:37099172-37099794
  hyper
ttggggggtctcggcgctttcgtttcagaccagacttcccagtattctgtaagcccttgagctcagctgcacaggtgcgggggtctcgctttccatggttttgcccgggcagcggcggcggcggcggcggcggcggcagggcgggcaggcgcggcggcggcggcggcagcaggacgagcagcggcggcggttattgttgttggtggcgggggtagtgttggcgaagtgggggagagagggggtttctcctggagaatcgaggcggatttccctccccctatctgcaaagctcctggaaacgagggagccggcgtcttgctgcagggtgggccgcgcgcctgccccccactcgctaccggctgggcgcccgcggaggcgctcccacctactgcattacgggtggtgctgaaccggacagctccctgcgccgcccgctccgcgcgctccccggctggctcccagggccgcccgccaggaggggggcgctggccagagtcctccctccccggggcagcaaggccagcgcagagcgggggccgcctttcctctttttacccctctcccaaatcctaaaatgagcgctctcctgggctcccggagcttagaggaaggcgtagctaga

SEQ ID NO: 241661 - DNA, 207 bp, Homo sapiens; identical to SEQ ID NO: 206121
  chr22:37172011-37172218
  hyper

SEQ ID NO: 241662 - DNA, 50 bp, Homo sapiens; identical to SEQ ID NO: 206122
  chr22:37172609-37172659
  hyper

SEQ ID NO: 241663 - DNA, 140 bp, Homo sapiens
  chr22:37212369-37212509
  hyper
gccagttcccctcccctgcccgcctaaggaggctggaggtttgaggcactgaggatgccccgtgcgggcttaggcagagctgtgcgccggctccagaaggtcacctcgcccgcaggtccgttgctgaatctcagtaaagg

SEQ ID NO: 241664 - DNA, 544 bp, Homo sapiens
  chr22:37212773-37213317
  hyper
gcgccctcttccccgcccgctccccgcgccaagcctcgcccggacagagtttgggaactgccaaggacgcccccgccccgacctcgccggcgcccagcgggaagtgtgggcagaagcgcgctggggaggatccgccggctgcggggccggcggagtgcaggggcgcgggcggtggacgaggggagagggatggggaggggagcgcgcttgctcaccgctaaaggctcccaccgccttcttgatgtcctcagcgttcagcaagtctgtcatcgacatcctgcaactgtttgagcgggcagagcaagtgcgaaaagattaaaaagtgcttttctcatcatttctgctcatatgaccagcgctgcagtgctgcgcgccgggcgcacgcccgccgggcctggcatggcgccaggggcccggactctgagcgcagcgggagcggctcagtccagccgcgccgctgagcagcgccggccgccggcaagaaggcgcgcggacctgctaccactcctgcaccgccaggccaggggtccgcgggatcccaggg

SEQ ID NO: 241665 - DNA, 119 bp, Homo sapiens; identical to SEQ ID NO: 206123
  chr22:37252548-37252667
  hyper

SEQ ID NO: 241666 - DNA, 40 bp, Homo sapiens; identical to SEQ ID NO: 206125
  chr22:37595694-37595734
  hyper

SEQ ID NO: 241667 - DNA, 179 bp, Homo sapiens; identical to SEQ ID NO: 206126
  chr22:37640350-37640529
  hyper

SEQ ID NO: 241668 - DNA, 464 bp, Homo sapiens
  chr22:37720792-37721256
  hyper
gcccatcggccctgcgcgggaacagtgtcacccgggcacccgggccagaacaggccacgcgtgtcccaggagcgcgggaagctcccacgccccctcccccgcaccgctcctttggctggcagagcgggtcctcagcgcgtctcagccgcaccaagcgcctcccgctcccgcgccacccgggcgcgctgctggggcctgatttccataataatcagccagagatctcccgaaaaggctgggagcggccgccgccgcccaccggggaagctcccgagggtgggcgccccccttcccaccctccctgccgccgccgggagggagcctcgtttttaaaagctttcgagaaaccgtccgtgcgcaggaggcagctgggagacacccaggatgtcgttctccgcattaaggagggggacggcggtgggggaggtgggagaggccgcggcgcaggtgtagaccaggctcag

SEQ ID NO: 241669 - DNA, 841 bp, Homo sapiens
  chr22:37730493-37731334
  hyper
ctgccggaatggagcagaaacgtctcggctgggaatcgaacccagggtcagtcagtagcggccgcgttttaggacccggcggtgcaccgaagacccggcggaacggcgcgcaccccgggcccagagctcattagccgggcgccgcgggggccttcattaaagctcagcgacgcggaggctgcccgcggcggccccgcctgggcgctccgggctggcccggacctgcggcgtcggcccaggagcatctggaaagggggcgcgggcggggatcggtaggaccgcctatgctcagggactgtcacccaccccctcccccaagccaaggagtagcggggaaggggggcgagtgcacccaggtattggggggagcatcaaatcggagtggagggggccggtgtcaccgagctatccccaaacctcgaacggccaaggccgagtcacccccgccccacccccacacactatgcacccatttcacagatggcaggtcctagctcagagggttagggcaggcccagaaccgcatcgccatcgcccgttcgcaggcctgattgagaggctggaaacgaggatgggcagggagtgaggacctgtaggctctgccggagaacttgggcgtgggcggagcggggcatccaggaagaagcccccaccccagccttggatagggtagtatacgatagggggcgtaaagaagggtcatgggctccggtggtcgcaggtcccaccggcaaccgccagggcgggggcagcaggagcaggaacctgctcgcctccgcatctcgtcggctcccctctcccgccagactcctgtctctgcgccaggctggccacccatccc

SEQ ID NO: 241670 - DNA, 450 bp, Homo sapiens
  chr22:37816323-37816773
  hyper
cgccccgtgcgcccccaggacggacaatcccagccggcctccagacccaggtctgcctccgccaagtggatggaccatatcgagccaccgctacgcggctgtgcgtcggtcgcctcctccaggacgtcttctctgctctccgccctcttcgccgcttctctgccctcacctccacctccgcctctggcctctgctcacatgcacagccgcaaactcagctccaccagcgccctcgctccacaggaagggagagggagggcattcgccctgtgcaaggtgctggggcaggcccgctccaattccacttcatcccgaccacactttaggctgctaacgtgcctagctttagcagctgtgcagcctcgaacccgtgaccgcacacgctgcctccgattcctcatctgtgcaacaggaatgatgcagaggggcgttctgaggatttaatgaggg

SEQ ID NO: 241671 - DNA, 382 bp, Homo sapiens
  chr22:37823289-37823671
  hyper
ccccggtcggtcgcggcgctcggatccagaggaattcacttaccccagccccagccgggatccgggccaagcaccgcctccgggaagcggcggccgcggggcctgcgcgtgtgagtgtgagtgtgaatgtgagtgtgagcgcgggtgtgggtgcggggtgcgtggccgtggggtggcccgcgtgtgtctgtgtgtgtgtctgggagcgcgcgtgtgcgcgcagacgccgccgccccctcctccccgccgccgcgcctctgcccctgcctcggcggggagggcgcccgggaggggccaaacggcgcgcgtcagggaccgcggcaggctgtgtccgtctgtccgtccccgtctgtccgtccgccagcccgcccgctcccggtgc

SEQ ID NO: 241672 - DNA, 290 bp, Homo sapiens
  chr22:37882383-37882673
  hyper
ggcagcacgatctcgaccgccgccagtcctccacctgctcccgctgtccggcctgccgcagcctccgggaccgcctggccccgccccgcttagcccgaggggcggggccagacgaagggaaccccagacagaggcggctgaaaggaggcaccagcagaaagggcagccccggctctgccagctgctgcggtgggaggaagtcacaacaaaccctccgtgcccggtggaagggagtgtcctccagcaccgtccactcccccagagagctgtcagctcggcccattcaacac

SEQ ID NO: 241673 - DNA, 645 bp, Homo sapiens
  chr22:37956994-37957639
  hyper
gggaagtggggggtggggggcccggggagatggacaggcaccctgcccccctccccgaccgccgcattccaggctggagccgcggatgaggtcatcccgtccggttcccctccggccaagacagccggtcgtccccttcccccgcggagcgaccctccgcgtcctgagccccgtccccccagggaatgttggatggccgaagtctttcccggacttccaatcccggccgccctccagattgttctgcctttgccccagcagtgccagacccgcaacattcgaagcccttttcctagaccgggaaactgaggcttagagagtaggggggactggccgggaggccgcagcggcactaaacgtggcgcggggacccgagacgcggcccgcagccgctccgtctcgctcggtcccgggctggttcggctctaactcggggcggtgggcacgaagcgcgtctcctttccactttccccgtcgctccctaatggcccacggtgccccccttggaatacggaggaccgggtcccctagcgcgactgcgaacaactagctaccccgttctggcctcagtttccccgtctctccaccttgaagcgtctggactttgaggagcaggagaagtcagccgaccggtttaacccctta

SEQ ID NO: 241674 - DNA, 210 bp, Homo sapiens
  chr22:38004378-38004588
  hyper
gtcattttcacagcggccaaggtacatgaggatgtagcttatcgcccttttaagggactctcccacgttcgactctaagcggaagtacccgctcagggctccggaagtggcctcagagcccctcagcaacatgcccgcagagaattcttccggaggcggtcacagacatctccgtgacgcagaacgagttagagcgtcccttggggtttc

SEQ ID NO: 241675 - DNA, 83 bp, Homo sapiens
  chr22:38054576-38054659
  hyper
ttggccacgaatccgcccctctctccaagttccgttagctcgcggcttcgctcctctcccagactctcgcccccattggctgc

SEQ ID NO: 241676 - DNA, 216 bp, Homo sapiens
  chr22:38070987-38071203
  hyper
acgcggccaagcccgaggccttagccaagccctgcagcctcaggcttggcgcccggcccagcctttctttagccttcccgaggagccagcgagagagcgctgcagcagccgcagtccttgcttccggggaaggcccgggtggggccagggcctgtggttaagtcagtggccctctgcagacgcgcacgcagcaggagccacgccctggtccctgcc

SEQ ID NO: 241677 - DNA, 34 bp, Homo sapiens; identical to SEQ ID NO: 206130
  chr22:38072875-38072909
  hyper

SEQ ID NO: 241678 - DNA, 47 bp, Homo sapiens
  chr22:38082317-38082364
  hyper
acgctaaagtgtgcgcccgggaggatgagtacgctacacccggaagt

SEQ ID NO: 241679 - DNA, 199 bp, Homo sapiens
  chr22:38142984-38143183
  hyper
cagcgggataccacgtcttcctgggcttgcactttgcagcggtcctggggccttgggacaagcctgcgagtctgagtagggggcatgatggcaggggtttgcctttctcatgggggtgagctgtacccaagccccatcaattacctgtgccatagttagcatattgagcctcacagctgggttcgctggactccccact

SEQ ID NO: 241680 - DNA, 114 bp, Homo sapiens
  chr22:38200880-38200994
  hyper
gggtttcccgcaccgaggctccctagccccgcagagccagccccccgcaaaggggaaatgtgccggcacaccagcggtcctcggcgccgtttggggtgcgtggcgggcgcgggg

SEQ ID NO: 241681 - DNA, 204 bp, Homo sapiens
  chr22:38201307-38201511
  hyper
ggtgccgagaccaagcgacagaccggcggggctgggcctcgcaaagccggctcggcgagctctcccgacacccgagccggggaggaaaagcagcgactcctcgctcgcatccccgggagccgcactccagactggcccggtagtcaggggctcaggagcagatcccgaggcaggctttgctcagcctccgacgagggctggccc

SEQ ID NO: 241682 - DNA, 107 bp, Homo sapiens
  chr22:38203663-38203770
  hyper
cgagaggtgagtacgtgggaatgcggtggggagtctggtgggcttggccctgacgcgacttcctccgcccccttccctcccctctgccatccggacttcggcagtct

SEQ ID NO: 241683 - DNA, 321 bp, Homo sapiens
  chr22:38214527-38214848
  hyper
agccagcagctcatgttaagcgccacgggcagctgcggggtgacgtgtggcagtcggtgtgctgcacccggcggggccagaacagagggcccaggtccacccagaccgacgtgaggcggcacgaggcgagatccagacagcggcgcagaaagtgcgtcgccgcccctgtggctcccaggagccgccgctggcgttgccctgctgcgctggcagcgccgcgaccccctgggctagccgatcgcggtagggctccacgccgttggccaacccgcggctcagcgtgtcctgctgcaccagcccgggtccgccgccgcgcttctt

SEQ ID NO: 241684 - DNA, 743 bp, Homo sapiens
  chr22:38220618-38221361
  hyper
cccccacggttcacaggaggcgcactgggccgcagggcccgggcgcgggacgtggcgcgggcccctgcgggagggcacctgcccgccccgctgaccaggcgccctccgcaggtacctggccgtgcggcacccgctgcgctcgcgcgccctgcgcacgccgcgtaacgcccgcgccgcagtggggctggtgtggctgctggcggcgctcttctcggcgccctacctcagctactacggcaccgtgcgctacggcgcgctggagctctgcgtgcccgcctgggaggacgcgcgccgccgcgccctggacgtggccaccttcgctgccggctacctgctgcccgtggctgtggtgagcctggcctacgggcgcacgctgcgcttcctgtgggccgccgtgggtcccgcgggcgcggcggcggccgaggcgcggcggagggcgacgggccgcgcggggcgcgccatgctggcggtggccgcgctctacgcgctctgctggggtccgcaccacgcgctcatcctgtgcttctggtacggccgcttcgccttcagcccggccacctacgcctgccgcctggcctcacactgcctggcctacgccaactcctgcctcaacccgctcgtctacgcgctcgcctcgcgccacttccgcgcgcgcttccgccgcctgtggccgtgcggccgccgacgccgccaccgtgcccgccgcgccttgcgtcgcgtccgccccgcgtcctcgggcccac

SEQ ID NO: 241685 - DNA, 48 bp, Homo sapiens
  chr22:38239779-38239827
  hyper
gtgtggccctcagcgcagacgtcgggggaccccggctgagggtcgggg

SEQ ID NO: 241686 - DNA, 213 bp, Homo sapiens
  chr22:38240370-38240583
  hyper
aaccgagcgggggcgggctcaggccgagacagagcggcgaaccaatgactacccttccagcttaaaccggtcccaaaaccaatcggaaagggagggcacagtacaagcaggataattggacagggtttccggcaacgtgactgacagacattgtaaccaattacaaacttgaagtgaccttggctttcgctgtacgtcgctaccggagccagt

SEQ ID NO: 241687 - DNA, 58 bp, Homo sapiens; identical to SEQ ID NO: 206131
  chr22:38302076-38302134
  hyper

SEQ ID NO: 241688 - DNA, 463 bp, Homo sapiens
  chr22:38349495-38349958
  hyper
gggctcccggaggcggtgaccactgctttacagccgcatccgcaccggtgccacgcagaaatactgcgcgatctgggctgctggagctggcagctagcgcctctcgctactatagaaacgcgcacacaccagtcagcgcatgcgcactttccccgctctgtcctgcctcccggaagtgatttcctctgggttacggcgcaggcgcaagataagctaggagccgcgcgagtcgtagtgtcgctgtttgcgggtctccgcgcgggaccggggcgcagcggggtcgctgaggcgagggtgtcatgtcagacaacgaggacaagtgagtgcgggagcggagtggcctttgcggcaaccttggaaggggcggatgaggcaaggcttgggtcggctgaggagcctggcgtctaggggcaatgtctgaggggactggggtcctgagggggccggcggagccgaggaaggg

SEQ ID NO: 241689 - DNA, 820 bp, Homo sapiens
  chr22:38476997-38477817
  hyper
gaaggcgacgagggcgccgtaggagcgcgcgcgtgcgctgctcaggtctgtgagcccattggccagcagggccaggctgaacagatacgggacgtgcggccgcagacgcgccaggcccgccagggcgccgcacgccgggcgcgccacgatgtccacgaagcccacgatggacagcaggaaggcggcgtcggtgtcgggcacgcccgcgtccttggcgtagttcaccagcaggatggcggggacgaagagcccgagcgccatcaggaacttggtgacggcgtacacggcgaaggcgcggtcggtgcacactgccaagtccagcaggcgccggcggggccggaccctgggggatgcctcgcgcagctgcagccccgcaccgtcagcctccgcctcgcccggagcgtccccggcgcggtcgccggcgctgtccctgcgcggtcgcgggcccggcccgggcggcggcctcatgacagccccgcaggcgcagcagtgcagcaggagcccgccgagcagcaggaagccgccgcgccagccgaagcgctccagcagctgctggccgagcggcgacagcgcggacaggaacacggggctgcccgccgccgccagcccgttggccagaggccgccgccgctcgaagtacagccccagcatgatgagcgacggctggaagttgagggccaggcccaggcctgcgggcgaggcggtgctgtgccggggtccccggagagcccctccctggcccccacaggagggaggggccaggcccgggaacccagcagatccgggaacccagccgagggacttcgaagactgtccctca

SEQ ID NO: 241690 - DNA, 184 bp, Homo sapiens
  chr22:38577754-38577938
  hyper
gacccccaggccccgcccacccgcgaggtcactcacctcggcttactcagcacttctacttcctcctacttccgcaaacaaacgggcctcgggccacgtgatggcctgaccaccgctctccgccaatcactggtggccctgtcccaggcctcctctaggctccgcccccgcgcccgaggacggc

SEQ ID NO: 241691 - DNA, 155 bp, Homo sapiens
  chr22:38597888-38598043
  hyper
acgggggcggggccgagggaccaagcggccgctcctggccggagggcggccgggtcggtgacgtcaccgcatgactgggtttttatgaatgaaaggaatcctgtgagtgagtaattccgggaagctcgccttacaactccgcgcggcctcggccc

SEQ ID NO: 241692 - DNA, 320 bp, Homo sapiens
  chr22:38598861-38599181
  hyper
gggaattctggcccgggccgccccagtcctactacccggggctgtccgtccccggctctccccggagtttcccagggcctccgccacgtgaccccagtgtttgtctcccgcccagagcccgcgcccgcagccacagggtggggcaaggtatcaaagaccccacccagctgagctaggagtgagggatgtgagccacccccgcttggcaccccggtggatctggtaacaaagtgagttggagcccaggttcttgtccccagattttggggcttcctggggagggaagaaccaagggactctcgttcgtccccagggttgcc

SEQ ID NO: 241693 - DNA, 305 bp, Homo sapiens
  chr22:38668915-38669220
  hyper
tctgcggacgatgcgcggcagccggactctgcgggcggggcgggcggcgccgcagccccggagtctccgccgccgccggcgcgtcccgggcccagtggagtgcagccgcggcgcgcatgcgctctgggctcgccgccggggagggcggggcggcggacgcggctgagatcactgcctgggccttaaaggggccgcgccccgaaccccagcccgccgccccgaaccccagcccgccgccccgcgggttggggcgcgacccgggttctcttgccactcacaaaaccagctacgaccggcccccaacc

SEQ ID NO: 241694 - DNA, 31 bp, Homo sapiens; identical to SEQ ID NO: 206133
  chr22:38713592-38713623
  hyper

SEQ ID NO: 241695 - DNA, 302 bp, Homo sapiens
  chr22:38850746-38851048
  hyper
ttccaggccacaacccagaccgcgacgctcccagacggacagacggacagagcccgcccgtggagcccgcccgctcccggggagtcacgggaccgcgcgcgcggcgccgggcagccgggacccggctccggatcaggtgcggagcgggcggggccggagcggcgggcccgggacacacagacacgcacgcggcgggacaaactgacggacagcgcccggggtgggcgagcgcggcttaccgctgggcggagggtccgacgagagtccgggaggcggcgagcgggcgctacatcccaaggcgc

SEQ ID NO: 241696 - DNA, 39 bp, Homo sapiens
  chr22:38857560-38857599
  hyper
gagtggtgtttgccggaagtcctcggaatgccagcgcaa

SEQ ID NO: 241697 - DNA, 95 bp, Homo sapiens; identical to SEQ ID NO: 206134
  chr22:38863833-38863928
  hyper

SEQ ID NO: 241698 - DNA, 72 bp, Homo sapiens
  chr22:38864201-38864273
  hyper
tttgctgggcgcgggcgcacgactgactggctggaccatgaacgtgttccgaatcctcggcgacctgagcca

SEQ ID NO: 241699 - DNA, 370 bp, Homo sapiens
  chr22:38902268-38902638
  hyper
gccgcggtttaggcgtctccttccttcccagcgactgcacaaaatggcggccgccgctgagtcggctccaacttaacgctgcgtacggcggagacgatacgtaaacagcgcctcggaatagcccgagggctccgcggggaactacgggtattcttggaagcactttacgtcagttgcgacgatgggtgtattttgcggtctgtacaagaaaaacaaagtacggagcgagcgtagagttctcgcgccacccgaactagaacgtgggatgaggtgggaggaagcgcctctggtgcgacgtaacattctttgcgtcgttagccggcctgctgttgctaagatgcgcagtatgcgtaacgcattctgtttagag

SEQ ID NO: 241700 - DNA, 50 bp, Homo sapiens
  chr22:38966006-38966056
  hyper
cccctcagagtcttcgcacgctgttcgtttttgccacttacccccctcgt

SEQ ID NO: 241701 - DNA, 236 bp, Homo sapiens
  chr22:39052538-39052774
  hyper
ccgaggtgattcacggagtttctggggattggcgcaggctggcgctgggaacccccgcgccggttacccctttcctcggtggtagaggccgggcggggcagcgcatgcgcgtggcgggcaggcggcaggaggcgggtgggtcaaggtaactctgggctacagagtccttgctgggggttcggggagcgcttggaccccggcttctgggacgcgtcaggtacgtctccgagtccggc

SEQ ID NO: 241702 - DNA, 166 bp, Homo sapiens
  chr22:39078160-39078326
  hyper
cgtggtacgggatcggagcgaagcggctgctttgggaggcggggttaggggccctgctgggccctgggtgccctagctccagtggggctcggcggctcccagtgccgcagcggggccaggaatggatgtcgctttttcggctaagacccgcgtctactccaccaca

SEQ ID NO: 241703 - DNA, 233 bp, Homo sapiens
  chr22:39096461-39096694
  hyper
taaatttagcgcacgagtcgagtagctagcgcgggccggcaggcgtgggaccgcgagccgcgcgggggcctcgggggcagccctccatcccctcgggtacggtggggcccgcagggcgcggctccctcggaaggcgcggattctagccctctggccgcggccctgcggaggaggagacaactccggtcagcggcgagcgggcgcgggaagtgagcggcggggccggcccctgc

SEQ ID NO: 241704 - DNA, 71 bp, Homo sapiens
  chr22:39101417-39101488
  hyper
gagcaggtccaggcgcgggacctgttctatgactcgattgggtcctgcccttgtccgtcatcggaaggctt

SEQ ID NO: 241705 - DNA, 124 bp, Homo sapiens
  chr22:39150523-39150647
  hyper
gttggaaaagggaccgattggtagtaggaaaagcaggaagttggcctgggtccttgtctctattcctgtccttataaggtaatctcccctcccccctccctgccccgcccgtacggtccctacc

SEQ ID NO: 241706 - DNA, 114 bp, Homo sapiens
  chr22:39189708-39189822
  hyper
acctagttgatggcgaccccgcgggagagggaattactccgcgaaaggtcgagggatcaaggtgctgggggaagtcggctaaagggggacgcgggaccacgaagctgggcaggc

SEQ ID NO: 241707 - DNA, 293 bp, Homo sapiens
  chr22:39190104-39190397
  hyper
gccagcgaacccccgccagggttgtcaaggagcgaaacaagagtgtcttagcaaccagcaaggaagtcctgccccctcaccggacgttgacgagaatttcacttattattggtggataaaagtatcaatcagagtgaaaggcccttataagtcaggcgtttgcaaggacaggggcgtggtttagaggccagggaggcgggacttcacttatagttgtcttaagcgtgcccgaggagcaggggacacattgaagttctttttctagggaaacaaacttcgaaaagcagtactgc

SEQ ID NO: 241708 - DNA, 84 bp, Homo sapiens
  chr22:39240040-39240124
  hyper
ggcggcgggaggaggagaagacggcaggcggcggggagggggagcgggcgcggcggccccgccccactcgcttccccgggccgg

SEQ ID NO: 241709 - DNA, 37 bp, Homo sapiens
  chr22:39268148-39268185
  hyper
atggattcggccgcgaagacccgctcgcccactgcag

SEQ ID NO: 241710 - DNA, 31 bp, Homo sapiens; identical to SEQ ID NO: 206138
  chr22:39268735-39268766
  hyper

SEQ ID NO: 241711 - DNA, 34 bp, Homo sapiens
  chr22:39641113-39641147
  hyper
cttggggccagggcggggcgcttagggggtctct

SEQ ID NO: 241712 - DNA, 173 bp, Homo sapiens
  chr22:39696377-39696550
  hyper
tccccggtctctcacgcgctccagaccacatctcccccgccctcccttctctggaagcctggagaacagagacccaaataaagggccctgccctagtgggactcggggagacacgcagtgaccatgacacagaagtgcatcctgctgccggtggcaggcgacagtgcctggaa

SEQ ID NO: 241713 - DNA, 89 bp, Homo sapiens
  chr22:39715082-39715171
  hyper
gtttctgtccgcccgtcaataagttcatcatctgtggtttctgcgagctccagaggccttcggagtgcaccagcggccccagatattca

SEQ ID NO: 241714 - DNA, 189 bp, Homo sapiens; identical to SEQ ID NO: 206140
  chr22:39715621-39715810
  hyper

SEQ ID NO: 241715 - DNA, 919 bp, Homo sapiens
  chr22:39745646-39746565
  hyper
ggtttcagcagagccgacggctcagaggggctgcgaccggggcaggggaccggggatgcggggcagggacacggcccacacttgctgtgcacgcaccgccctcccccaaacactttgcaaagaggtcaccgcactggctgcgagcgcgccctgagccccgggccgcagcacgcgcgcccccgcgcccgaggtcgcgcgctgcccagccccccgcccgcgccccgcgagctgcgcccgccgcgcacgacgccccctcgcgggagccctgggccgccggccgcgcgcgcaggggagggggcgggggcgccgcgcacgcgcacgggccggcggcgcgcgccgagcggggggcaccgcgcgggtgcagccacgatggaagggggtgcgtacggagcgggcaaagccgggggcgccttcgacccctacaccctggtccggcagccgcacaccatcctgcgcgtcgtgtcttgggtaaggacggactggccgacggctctgccaggccggggtggtgggggtgtgagcaaaggcggcgcgcccggaccgaccccgaccccgaccccaacgggcccccggcggcggcgcggcggcgggcgaggagctgtcctgcctgcggggcccgctgccgccgctcctccttcccgggcccggggcgggcgggatccctggtgctcgcgggagacgccgctccggctcccggagccctggtttcctggggcccccggttcgtgcgccccccttcccgccccgattgctgtgacctccaggccgcggctatgccgcgaaaggctcggattgtgcgcggccgccagggcggactggggaccgtggggacggagccagggtttaaggtggccttttttggggggtggatcagggcgtggaccatctcggtggggtgcatgccgcgcctgcgatggac

SEQ ID NO: 241716 - DNA, 644 bp, Homo sapiens
  chr22:39852944-39853588
  hyper
gcccccgcgcaggccgccccgggccgtgggccggcgcacgcacggtcacaggaggggcgcgcgcacactcgcactcacacacactcgctcgcacacgcacacactcgatccagcacgcgcgggcggcgcggggcggcggcggccggagtctgcggtgcgaggcgcccccggcccggcgcggcggcggagcccggctggcgggggaggggagggggttgcggagggggcggggtgggggccggagccgcttgagccggcgggagcgggcacccctgcgcgccgcgctcggcctcgcctccgcgccccccgcgcgcccgccgcggtccctcccccgcgcccgtccgctcgccgggcccccgccgccgccccggggtgcagccgagcggccgcgccgggtccccgggacggggtggaagtgggggtggggggaggggatcggggccgggccggggccgcgctgcctgcgatgccgggcgcccgccgcagccgctgccgccggagcccgggatggggcgagaggctgcggcggacgccagcatctccccgccggggaccccgggggccgcggagccgccgccgccgctgctgccgccgttgctgagacccagcgggcgatgggtgagttgaccccggcgtcctggggg

SEQ ID NO: 241717 - DNA, 255 bp, Homo sapiens
  chr22:39898606-39898861
  hyper
ccctcggctgccccgccccgccccaacctcggagacctccagtgccccgaagcaggcctgccctggcctctgggcctccgcaccccggcccggcccccacggttggtgaagtgcagactggctggggctcagccgcccagtcgcccagcgaccttgtagttacagccctcgccgtgacagtcgccttttacagcatcaaacacttctgttgattttctgcatcgggaggtccttagggccgagggatctcttaaa

SEQ ID NO: 241718 - DNA, 40 bp, Homo sapiens
  chr22:39928913-39928953
  hyper
cggaaactggaggcgggtccaaggcgcagaaagacacatg

SEQ ID NO: 241719 - DNA, 91 bp, Homo sapiens; identical to SEQ ID NO: 206142
  chr22:39930975-39931066
  hyper

SEQ ID NO: 241720 - DNA, 208 bp, Homo sapiens
  chr22:39941856-39942064
  hyper
cccttccttcctgccgcagcctcttccctcaatcctactgaactccttcctgggagaggttagggcgggaatcgccaccttccagggcacggagaggcgaagcggaattcagcaccacggacagcagcccggcgcgcagttggcgtgcggttggctcaggaagttattctgtaggttttgtaggtttatgacccgctgttgggtagca

SEQ ID NO: 241721 - DNA, 287 bp, Homo sapiens
  chr22:39953430-39953717
  hyper
aggggtgggagctcaccagccgccgccgtcagtctgtctgtcgcctccacgcctcccccctccagcgtcccgcgcctgcagctttccccgaagacatttggtgtcagtataaggacggcttttcctcgcacgcagcgcggctcggtctcgccgccgccgcacgtccccgcaccgccaggcgctcgggctcctccgcagcccccgccgcgcgcagaccccgcgcttcgagccctgagccggaggcgcgagcagagccgaggcaggcgagagaccggcctcagccccgc

SEQ ID NO: 241722 - DNA, 575 bp, Homo sapiens
  chr22:39953971-39954546
  hyper
tgggggtccctctcgatcgccggcttcgggtggggacgcgttgtccccgcgtctctaacctggacgaccccccgcggccgggccacgtccatgccaaggtaggtgggggctgggtgggtggggggaaggaagggagggcttcgcttcgatgccagtttcttggcgcgttggcttctctcttcactggggcatttatttatttatttctggggatcgatcctccccacccgcgcgtacccgtcaggtgagccccccatcccgcgccttcggggccatgccttgggaggaaggacaggaaactttgaccggtcctctctccaaggccacgaaagttctctcggtgccaatactgaagccagctgagccagcgctgcagaaatttattcaacaagtcaggctgccggccggggcccgggttgtccgcgcgtccggccgcccctccgcggctgcggctctgcgggcagctgggccagagctggtgcccgtgtccggcgggctgagctgggagcgctggcctgggagcgcggcagcgggggccactggatgggggaatcccgggcagggtttaactttcc

SEQ ID NO: 241723 - DNA, 73 bp, Homo sapiens
  chr22:40440608-40440681
  hyper
gccaatcctagctcgttaaacgggaagcacttaaccaatgaggggcgaaggcagcaacgaggaattggagggg

SEQ ID NO: 241724 - DNA, 98 bp, Homo sapiens
  chr22:40742291-40742389
  hyper
tacctcttttcagacaggaaaactaaagtgtagcgcggctaagtaacgtaggaagcatcaatcatgtttctggtcaaagaagcgaaccaagtcaattc

SEQ ID NO: 241725 - DNA, 94 bp, Homo sapiens
  chr22:41215480-41215574
  hyper
acagcgaggtgttcgcggggctgggctccaaggcgcaaggcggcctgacaccaggtacccggctcccggttcctccgacgttctctggcgttcc

SEQ ID NO: 241726 - DNA, 182 bp, Homo sapiens
  chr22:41252792-41252974
  hyper
gcctgcctccctgcgcatacattctcatattcttaactaggaaccagctccctggatggggcaaccccagaaatgggcgacttcaaggaggcgggagataacatcccctccagggggcgacgtccaagagcatattgtgtggctgcgtgcactgagtagagctcaacgcccgggacctaaaa

SEQ ID NO: 241727 - DNA, 354 bp, Homo sapiens
  chr22:41418633-41418987
  hyper
gcaggtcacgtgcccgcggtgggggcagggagggacgcgcagcggagtctccgggctgcacgtgcaaggcctcggggagggtggagctctggcttcccgagctgcgctcgctcccggcttccgccgaggtgcccggggcgccggcctggagcaggcgggggtctgggtgcctgggctgcggtcgggagcgcctccgaagaagcactcggtgcctgccccgctgggagcgcaagcattgttacctatcagcgccgcacttaacagttgttaatagcagtaagccctcactaaattgtcactgctggcagaccgcagtaactcggtctgacctcaagcacccgataaaagagttct

SEQ ID NO: 241728 - DNA, 191 bp, Homo sapiens; identical to SEQ ID NO: 206145
  chr22:41593089-41593280
  hyper

SEQ ID NO: 241729 - DNA, 104 bp, Homo sapiens
  chr22:41593898-41594002
  hyper
gagcacaggggcacgcggtacattatttgaatgaataactttcttatcctggcctttctctaactctctcacttctacttgggtcacccgccccctccccagga

SEQ ID NO: 241730 - DNA, 251 bp, Homo sapiens
  chr22:41601071-41601322
  hyper
taattggaacactcggcgtgaggcgcaccaggtttccagcgcccctggtttccacgtcgctatggtaacgactcaccctgcacacatgcgaactacaattcccataaccgcccgcggcttccccgcccacagggagagaatggcgggagcaggcacggaaccggcttttcctccttcctgcagcgtgattggcccgcggctcagggaggcgaccaatgagtgctctcgcggagagcgacggggcaggccaa

SEQ ID NO: 241731 - DNA, 268 bp, Homo sapiens
  chr22:41682088-41682356
  hyper
cctccggatccagcggtccagatgtccagccggctagtctgttagctctctcgagctcccggcctcacgcgcttccagcaccacctgctctccgcaccgcggcggatgatggcggaggaggaggattttgaaagccggcagtttctttgcttcgatttgatttgttcgaggccccggccggcttgccctcgccccgctcgcgcggcctctcgggtagagtagtccggttccccatctgggagcgcgatggggcgcgcaccgcgaacta

SEQ ID NO: 241732 - DNA, 231 bp, Homo sapiens; identical to SEQ ID NO: 206146
  chr22:41682703-41682934
  hyper

SEQ ID NO: 241733 - DNA, 451 bp, Homo sapiens; identical to SEQ ID NO: 206147
  chr22:41697265-41697716
  hyper

SEQ ID NO: 241734 - DNA, 212 bp, Homo sapiens; identical to SEQ ID NO: 206148
  chr22:41763239-41763451
  hyper

SEQ ID NO: 241735 - DNA, 36 bp, Homo sapiens
  chr22:41843183-41843219
  hyper
tgtgtttgggggacgagtatcgcgggggaggggagg

SEQ ID NO: 241736 - DNA, 395 bp, Homo sapiens; identical to SEQ ID NO: 206149
  chr22:41864720-41865115
  hyper

SEQ ID NO: 241737 - DNA, 204 bp, Homo sapiens
  chr22:41940462-41940666
  hyper
gcttgcgcgactgcgggcgagattccgaatccatcgcttccggaaaactcaccaataagaaacctctgtccacccccaccccgccgaggcggggcggggctgcctgtgtgctcgcgcacagcgtggggcagagagagggcgaggagagggcggggcctcctcctttcacaggagcagagcggttcccccgcccccgacagcgct

SEQ ID NO: 241738 - DNA, 78 bp, Homo sapiens
  chr22:41985628-41985706
  hyper
gtgtccacggtcacgctgctgcagaccccacactcagcctcgggggtgtccgcgtgacactcccggtgggagcttcca

SEQ ID NO: 241739 - DNA, 269 bp, Homo sapiens; identical to SEQ ID NO: 206150
  chr22:42016977-42017246
  hyper

SEQ ID NO: 241740 - DNA, 80 bp, Homo sapiens; identical to SEQ ID NO: 206151
  chr22:42228658-42228738
  hyper

SEQ ID NO: 241741 - DNA, 141 bp, Homo sapiens
  chr22:42229198-42229339
  hyper
tgggcggtggcgacggcaccgcccccgcgtctccctgagcgggacggcagggggggcttctgcgctgagccgggcgatggacgacagcggcgagctgggtggtctggagaccatggagaccctcacggagctgggcgacga

SEQ ID NO: 241742 - DNA, 1379 bp, Homo sapiens
  chr22:42305985-42307364
  hyper
gcataggggcccggcgcggcagggggcgcgtagaccggcggggcccaggggcaggcgtccagcggcgcaggcaagtccggggatggtcgcggagcccgcgccgggggttgccgcggggacggctcgagggcggggaaacgctgacagaagtcccgcggggcggcctctgcggggacagggcagggaagagtgacgccgcgccgagcacccaagctcaggactggacaaggggtcccggccggggactgggacggggaccgggccggggcgggccgggggcggggcccgctggggcgagggagccgattggccgagcggcgggcgcgcggaactgggaatttggcgcttggagctgcggccccgcgcttcgcagtccgggagctcgtgcgcccaggtgccctgacgctgcccgcacccgccactcacctgcggccttgagcgcggcggccttgaacgtggcgtacttggcgtagtctggctgcagcgtcaggctgccgccgccctgcagccgcgggccgcgcgggggccccggggcggccgacccccggggcgcgttgttgaggcgcttcttgtctggagcgaggagtgagacgcggctcggtccgatgccccggttcactccgccctcgctgtcacctctccgtagtcctctccccgaggccgttcggtgagaacctgggggaccgttctccgggcgaggctgcgagccaagcctgtcttcgccgcagcctccagcgcctggaacagggcctggctccgagtcacgcgcagcggcggcggcagccagcccggggggtgccaccctcatgaacggctcgcccggaggcgacgctcgagccaggcgcggagtcctgggacctgctcccgccgagacgggggatgtctgaggaacagaacccagacggggcgtgggggctgccaagcctgcctgcctctcgagagacccagggggaggctctggagcccgagcctcagatcacagccccggccagcaaatcctgcatctggaaccttcctcacacatcacagccccccagactcgaggccgcaggacccgtggggggtccctttccaccctggcgagctggctggccggtcgggcccctcacccgcagaggccgcggctcatttccaccggggaagcctctatgccccagccgagggaccgcctctcggcctctcacgcccctccgcgtgctccgccgccgctcagccccgcccgccaccgactcacctgcgctgttgtggggggagccccgggggaggccgtcccccatctgcacctggacacagccacccaggggtgggcccagggtgggaggcagtggctcctgggggcccggctgcttcagaagctctgtcagcgccctgcggggaca

SEQ ID NO: 241743 - DNA, 240 bp, Homo sapiens
  chr22:42311269-42311509
  hyper
cccgaaacattcatcggaactgggcgctcgaaggggatcagttctagggcccgcgactagagcgtccctgtcttacaggtgcggggacctgtaccttacaggcgcggaggtcaaagcagcccggaattgccccgggacgggcagggccaccctctcacctccttcccgtcccctctgtccgttctgatcataacataaggagggccccttcccctctcggcgcctcgattttcccacctg

SEQ ID NO: 241744 - DNA, 580 bp, Homo sapiens
  chr22:42315449-42316029
  hyper
ctccctgctggtgcaaatgccgataccaggaggggttctggagggagggcccacggctgtctttgtctcccgcgaggcaactctgactcaggctccagctgcccgtgggagggagggggcgcccgggctcctgaggtcgccagggagcggcgggactgggaggctccaaagccctcagtgtacgtgcgaatccggagcggacaccgagaccttagcgcgggaaccaagagaggacagagctccacggaggccacagcgcgtgcacggggacaggtgcgccctccccggcagcccccctgctcctcggtcacagttctgtgcggaggcgtcttgcgccctcccccctgagcctcgcccttgagtcggggccgtgggccgcatccaggcccccagggctcgggatgcgcgtgaggacccggactcccgagggcgcagaggtcgggagcccgaagcaggcgcccttggccttggtcccgccccttatccggtcccaagctttttcctcgccccttggccttgactccaccccttaggcatgccgctggccccgcccctttccggccaccttgaggcttggggg

SEQ ID NO: 241745 - DNA, 174 bp, Homo sapiens
  chr22:42322725-42322899
  hyper
gcgtgggggctggcgcgtccctgccccgcaggctccggggccctcgcctcatggtgccgacgccgccgcacaagctgcggggactgaggctgagctgggctccggggccctcggggaggaagcggggggcggggggagcactctgccctgccccgcccccgcctgctgggtggg

SEQ ID NO: 241746 - DNA, 429 bp, Homo sapiens
  chr22:42353611-42354040
  hyper
ctccctctgggtgggcgggacagggagcacctctgctggccctcaccacgctgtgtctccgcagccaaggccgccgcgatgccgcacttcctggactggttcgtgccggtctacttggtcatctcggtcctcattctggtgggcttcggcgcctgcatctactacttcgagccgggcctgcaggaggcgcacaagtggcgcatgcagcgccccctggtggaccgcgacctccgcaagacgctaatggtgcgcgacaacctggccttcggcggcccggaggtctgagccgacttgcaaaggggataggcgggcggcaccgggcgccctcccccagcccgccccgcccgcccagcccggagacccccaaggcagagggaggccggcctgttggccctccacgctatccctctgcagcctgggccctcccga

SEQ ID NO: 241747 - DNA, 477 bp, Homo sapiens
  chr22:42470152-42470629
  hyper
tttcccgccctggcagacctcgaggcggcctcggagatcccgggcctggcgaatactgggcggggaggggcgttaactccagcctcccgggcggggtctcccggctcccgcggccacgttgcagcccaggcggaggcgcgggatctcgagctgggatcgccctcttgggcttcggtgcgatcggcggcgggaggtgagagtgggcccggcgggctccgggaggaggtggccccagggaaggtgtggccgcggggaagtggcggcgaacagccccgacgcgaggacggggaaaccaaggcggcagccagggagaccctgaccgaggtgacctctgtttagggcgacaaccgggttggggctccccgcagtggccactggcccggcggtcccgcacccccagcccgcctctcctccaacaaaagaatccaggaagacggtggggcgggcgggaggcccggtgtgcggtggcctggcccc

SEQ ID NO: 241748 - DNA, 709 bp, Homo sapiens
  chr22:42679429-42680138
  hyper
cgggggcgggcactcggcccctgggactgtgacccggggccctgcccttcacgcccctgctgctgccgcgctccccgagcagccccctcgggcccctcctctcccggccaccctcctgggcactgctctgaacatcccccgcctccccgccctccatcgctctttatggcagtttcaaagctacagccgccactcgagcagctgcggcctttgatggggacaaggcagtaaaggccgcccgggaggcccctgcccagccctgccctggcccggcgcggcccctgcccgcccccggggagcctcgggccagggcagcgcggcgcggcggagcacccggcgggcacgcctcgcacgccagagcaaactttcacgaccgcgggagaggcaccgcgcacaccgttacctttgcagccgcatccttccctggcccttgccccagaccccttgccagcccggcgaccacgggggaggaaaacaactcctgagccgaggcgggggaggaggggaaagggaaaaaaggagaaggaaaaggaaaggggggcagtttctcggctctcagcctcctcgcggctcctcctgcccaagccggcaagtgaagtcacagggccggggcggtgacatcagctgagcctctgacatcacggcccctgccgatctcacctctgcagggtggagatggaggagcagcggggaggagggatggatggat

SEQ ID NO: 241749 - DNA, 46 bp, Homo sapiens
  chr22:42696044-42696090
  hyper
cagcctggttcctttcgttccttcgttccttcgctggtagaagccg

SEQ ID NO: 241750 - DNA, 134 bp, Homo sapiens
  chr22:42896454-42896588
  hyper
gggccggcggccctcgggatgggtcctgccagggcgcagagatggcggtggaaaggcggggcgaaggcggggcgtgaggcgtggaggtgtggcctgactggggcggggcggggcggggcggaacagcctagaag

SEQ ID NO: 241751 - DNA, 261 bp, Homo sapiens
  chr22:43010938-43011199
  hyper
tacttccggcgtccgcggaccaactctcgcgacagccagctcaaagcaggcaagaaccggaaggggcggggacgttccccgtgagccttcgcggtgctggctgctcatctgcatacggaagttcggcacattatgaattatttattttcctcgagggaaaaaattaaatgaaaagcaacaaaatacattattaacaagtgagacaaacttcaatggaactggatcatgacctcaacagtcaactacgatagtcatcatacg

SEQ ID NO: 241752 - DNA, 518 bp, Homo sapiens
  chr22:43115856-43116374
  hyper
gaacaatcactcgacgttggcggaggggaggaagccgcagagagggtgtcgtgagggaaaggtgggtgcaggggaaatggcgctttaacccactcagggccagaggctcagccgagactatccaggtgggaacttgtccctccggatgacaggtgatgaaactgagggaaggggactcgccctggcagtgaaacgggatgggcgctgggaccaggtgccccggcagatcctctcccaagcccagttccgctcccgctcagtcctcaaccttccccagctggagaggagggaggggcgcctgcggatccgaggcgagcgcggaggccgggcgactccaaccggctcgccccgtgcccagctcgtacccaggccgtttcccgcacggggagggcccttcccgcttctgggcaggtccaaatcctcaccctccctaaggccggcgccgacgctgccagcccggcagagccccctcctgccggccgctctccatccccgtccccggtcgcatccgctccggg

SEQ ID NO: 241753 - DNA, 117 bp, Homo sapiens; identical to SEQ ID NO: 206158
  chr22:43116624-43116741
  hyper

SEQ ID NO: 241754 - DNA, 47 bp, Homo sapiens
  chr22:43411069-43411116
  hyper
ccagacccagctccggccgggctcccgctaccgcttttgctccggca

SEQ ID NO: 241755 - DNA, 296 bp, Homo sapiens
  chr22:43506224-43506520
  hyper
caaatgtgaacctcggttttcatatttgtgaaataggctttaaaacacctaaatcccaaagctgccagcctaaggagcacacgtctttgaacgctggcttcacgctgtcatttaagtcatttcgtcctcttggagcctcggtttccacgtgggtaaaatgatcgtgaaaaaaagcaccgaggagtactttgagctcgaacggaggccatccgtgtaaagggccagattctgtcaatggatcgatccccccgatattgatggaaacccctgagtgcacgcccgtgctgggcgcaggg

SEQ ID NO: 241756 - DNA, 126 bp, Homo sapiens; identical to SEQ ID NO: 206159
  chr22:43547284-43547410
  hyper

SEQ ID NO: 241757 - DNA, 88 bp, Homo sapiens
  chr22:43583724-43583812
  hyper
gcgctgtcaggaccggaaaaggccccaccgacggcccggaaggtgtcctggggcccgaacccggtgaggcggcgcttctgtgcctgca

SEQ ID NO: 241758 - DNA, 642 bp, Homo sapiens
  chr22:43659491-43660133
  hyper
agctcaggcaggagtgaagccggctcggggagcggcagtgaaggctgcagacggcgaacacgcacagggcaacctccttcccccgggacacaccggcctcttgttccaagggaggactggctcaatcctgaccccgtccactttaaatacgggtatgcagcaacacagaatagatttaagaacacaaacaccctgctagttgtaataaagacaaaaacgtctaaagttaaaaatcaaacaaacaaatggaaatgaggaagcctgcattttgcccggcactgtaactcctggtttcacctgattttgcgactcatatttcctcaccttgattttctcactaatcaatcaaattgttggaatgacgcagagtctaactaagcaacgagttagcacggaaagcgctttcatgctgctgccctgcacagaagctgcaagttcacacggaaagaccctttccgctggctcgattccaaaacagcatcagcgcctgagtcacacagatagtggcgtgcggtcaacgcttaacagccggcaggggtggaggctgatttgcagtatttaccaatttacgtgggataaatacgccagccacggctaatttcaaggtaccagggagatgtcgccaagggtagagctgggaac

SEQ ID NO: 241759 - DNA, 820 bp, Homo sapiens
  chr22:43738651-43739471
  hyper
cctctctacccttccgcatctgtcttttctccgggcttccttttgtctgctccctcggcgccggctcttctgtccgtctgtcccgcacctcccgccccgtcccggtctctcggtccgtccctttccccgtccacctcctggcgtgtccccctccgcccgccccgccccgcgccccctctcccaggaggagcgcccctctgcgctcggggtcccgccccgcccaggtccgcacgcggggtccccgggaaccgccgcctttcttcctcgctcccgcgctcgcgcttcccctcccggggccccggcccacccacccctggtgcggccccgccggactcaggagccccggccgcccgggctgcggggagggggcgccccgggccggccctagaagttactttgcaaagaggcagggggcgcggggccgcgcggggcgagctcgggatccgcggggaagaagccctccgggaccgcgcctcggccgcccgagccccccgcgcccgccgccccccacctcggtcgggggcttacctgggagcccgctgcccccggccagccgcccgcgtgtgcccagggccagcagcacgcacaagtgccagcgcacggccgccgcgcccatgctcaatgcgggccccgctgggcgtgcgggcgtgcggggcgcggggacccgaccgaccggccgctcccgcaggcgctgctcgctgctcgccgctccgccaccgctcgggctcccgagccgcccagccagcccggctgatgagctgacagcgcgcgctcattggcccgtggcgtcggaggggcggggcgtcgcccagggccggcc

SEQ ID NO: 241760 - DNA, 554 bp, Homo sapiens
  chr22:44208018-44208572
  hyper
gcgcgtggccaccccgaatacagccttaccgggaacccctcctcgattctccgcctagctgggccggcacccgcgtgcgcggaccccaagccgcggggtctcagaggggctgcccattcggcgtctctaggacgctgttgcccgagagacgacggcagtcgctgactggagaatgagcctacgcgcctggcaagaagctgagctgtgattggtcaattggagataaacgaggagggggcggggccaggtcagtcccgcgcctccgctcccggaagaaatttccgccggaagtcccgttctctggggagcgggaaccctggcgacccgtgtcatgggagcgggtttctgttacgtgggctttagcgcgagctgggcggtcggcccggtcccaccgaactgcatagggccgtgtagccgggggaagtcagccccctgctctgagaagcagactctgcatctgtaaaaggctaagcgtgcccactggggcctgtggtcaggattggctgcagtgaggtccgcaaagcccctaccgcatcctgcgccttcgttagggt

SEQ ID NO: 241761 - DNA, 585 bp, Homo sapiens
  chr22:44258003-44258588
  hyper
gcagaagccccgggcgcgggcgcggcgtctacgcggccgcgctgcagggctggggcatggcgtggcgggcgcggtcggcgcggggctcaccggacttggggtaggtgacgatccacacgtcgctgggccgcaccgggaagttggcgatctcctccatcttcccgcggcagaagggcggcagccgcacgccatggaactcgaagtacttgctctcgaactcccccggggtgctgggggtctcggcctcgctctccgccatgccgccgccgtcgccgtcgccgccgccgcctcccggctcgcagcccgcacgcgcccgcgcccgcgcccgcgcccgcgccccgcacacgctcgcgccccaccggcgcgcggcggcagctccgcaggcgtgacgtcatggcgccgccgacgcgcggcggaggctccgcgggtatgacgtcatggcgccgcccggcacgcggccgcggcgctgcacgggcgtgacgtcatggcgccgcggagccgcgtcctccccgccccgcccccggccggggtcacccacccgctgccggggctgacagagaccctggcccgcggtctgcagcctcc

SEQ ID NO: 241762 - DNA, 62 bp, Homo sapiens
  chr22:44287778-44287840
  hyper
ggtgatcgggacgaggaagggtcactccgtgacccgggatagggccgggatgcagccttgga

SEQ ID NO: 241763 - DNA, 34 bp, Homo sapiens
  chr22:44288020-44288054
  hyper
cgctggcgccgcccccacgcgcccgccccggatc

SEQ ID NO: 241764 - DNA, 169 bp, Homo sapiens
  chr22:44319565-44319734
  hyper
ccgcccgggagggcgtcctgcccgctcattgggcctcccgccggctcatttgcatggtccgaggggggcggggctgacgtcgcgctgggaatgccctggccgagacactgaggcagggtagagagcgcttgcgggcgccgggcggagctgctgcggatcaggacccgag

SEQ ID NO: 241765 - DNA, 98 bp, Homo sapiens; identical to SEQ ID NO: 206162
  chr22:44351287-44351385
  hyper

SEQ ID NO: 241766 - DNA, 499 bp, Homo sapiens
  chr22:44419839-44420338
  hyper
gacctgattctctccggctttcaggacgtcctgaggctgcacccacgtggcaatggtgtctgtcgcgctgtcgcctggatccggcaccactagcggagccgagcagagcccagggctccaacgcgtagggaaaaggctgcgccgctcccggggtggccccacgccccttctctgagcttgagcggcggcgcgggacggggacggctctggccgggaccagcaggcctcgggcatccgggacgccggggccgcgctccaggccaggggcgggggcgggaccggggcgggggccggcggcggggccgcgccctcggcctctccccggggcgaccgggcggctccacacgcgctgcgcccgccgccggccccacgcgcggcccatgtcctccgcgccgcgctcgcccaccccgcggccccgcaggatgaagaaggacgagtcgttcctgggcaagctgggcggcaccctggccaggaagcggagggcgcgcgagggtgagtg

SEQ ID NO: 241767 - DNA, 285 bp, Homo sapiens
  chr22:44420518-44420803
  hyper
cgtggggccgcggtggcctccggagtctgccaaacgcgcgtgcgggcgcctgcgcggcggggacctcgggccaccgtgcggggcccgcgcctgctctgcctgccgggtgttcagctcttccctgggccagcggcatagccagccgcgcggggtgaccgttcattccatgagcagtgacgctcacgtgtgcagggcactctgggcagacacggcctgggggacccactactgggtgttgcgcgggcgccctgcagggtgcggggctcagggcgtgcagggctgagg

SEQ ID NO: 241768 - DNA, 1316 bp, Homo sapiens
  chr22:44726728-44728044
  hyper
cccggaggcgacagcggttccgcaggggccgcgcggcggaccaggacccaggggcacgcacttgggaggggtccttctacccgtcccctgcgctgcccagctgggacccccaggcccctctgggtccgcagcgtggccctcagtccccgtgcagcccgcacggggctcccagctcactgagctccccgactctgttcttggaagccagtcccccccttggacgcggattccggtcccggccgccgcgtcccggcgcggtgcgccccgaactgctctcttcggaacccagccccttcctctccaaggttcagcgaccccgaccttggtgagcgccggcgcggaccccagtgccgaacaccggctgtcccgcacggttcctgcccccggacccttccccggtcgtccccagcccctttctaaagagccccggacccccgtcatatgccccttacccgcctctcccaaagcgcccacccttcaccccttctccggagccccgcgccgcagaccccgccccccactcgcccagaccctcctccgccaggagctccgccccggcccctttccccgccgctctcggaccccggcccaggcgcgcccctcccccgcgcggcccccgccctgcccgccccggggctcagctcacctcgtgcccgccgcccgctcgttcctcgcttcgtagccgggagccggcgcccgcgggagccgcctgctggggtgcgggggctgcccacgcccccgcgatgcccctgccgccgccgcaacagttgtccgggttctgggggctgcggggacgcggggactccgggctccctgatcggcgctcggaaggcgcccgctcctaggcgcgccgggcgcggcgcggagctggggccggggccggggctggggctggggccggggctgcagctccggctcggcgtccggctcggggtccggctgggggtccggcggccggccgcatgccccgtcgccgcccgcggctactcggcggcccgcgccgcccggccgcccgccggccccgagccccgcgccgcgcccgccgccgccgccgccgcgctcatgctcgccgggccccgcgctcgccgccgccgccgccgccgccgccgctgcccacttcactctttggcgctcgctccgcgccgcgccctctgctgccccctcgcccgggctcgccgagctcccgccgccctgcccgccgcgtcctgcgccctcctctctctcccttcctctctcctcccttcctctctctctctccctctctctctcttgcgtcctcctctcattttttttttttctttcgcggtctcttttct

SEQ ID NO: 241769 - DNA, 642 bp, Homo sapiens; identical to SEQ ID NO: 206164
  chr22:44893741-44894383
  hyper

SEQ ID NO: 241770 - DNA, 122 bp, Homo sapiens
  chr22:45016386-45016508
  hyper
gcgccggctgcacacgtcctgtttgcgtggttgctaggaggttgccatggcgactaatcggggatgagggaagcctagcgcttaacacatccccctccgacggtcaaaattgggcctctctg

SEQ ID NO: 241771 - DNA, 189 bp, Homo sapiens
  chr22:45097773-45097962
  hyper
acatcgtgtgggcgcgaccgcagtgctgggcggggggcgggcgcttgggcttgggccctgcgtcctgtgcgtgttggtttcctgtgggcacgtggggccctcggaagaggggaggagggtgagcacgtcctcagagggcagacccagcgaggcgtcgtggcagctgcggccgcggagacgccggctccg

SEQ ID NO: 241772 - DNA, 629 bp, Homo sapiens
  chr22:45098382-45099011
  hyper
tgagttcgcccagcctcagtgacctgggcaagagagagccggccgccgccgcggacgagcggggcacgcagcagcgccgggcctgcgccaacgccacctggaacaggtaaggccgcgccctcccggccacccggaggccctggagccgggggaggggacccctgagccgtccgcgggctaggggccgccccgagccaggaacgctgccgaaggcggcgcggcgcttcacagtttgcaaagaacttgccccgccggagtggtgcgggcctggaggaaagttcagtgcagcgtggttccagaacccagggaagggagcgaggcccgccagcgcccggggctggcccagaagcgcccggcgggtgggcggcggggtgggccgggaagccgcgtgcccgcctcctacccggggtctttccacgtctccactgcggtgctcgtgacaacctgggaggctaacggagcaggaagtatttttcccattttgcggctgagcacgggagcctcggggctcagtgggtgggtcgcgcaggcttcctgtgtctctttaagctcccttcggctttcccttgagaggccccctgtcctccagctgtcagcagggggtgcggcagctgcgaggcattctttag

SEQ ID NO: 241773 - DNA, 836 bp, Homo sapiens
  chr22:45148203-45149039
  hyper
gcatgggtgccgtgcgggacggggacgcggcccagccgggaatcggggtgcccagggtgcgatgtgcgaggggctcctgagcgcgtgtgctccgcccgaccccgccctgtccccccgacacacaggtggacccagggtcagctcgtgcacctgggaaatggctcccgccgggtagcaggggcggaggggcggggctgggcggaggggcgggggggcggggcctgcccgggagccacgtccggggaggggccaggtgagcggcagacccggcacgcaggtgggggccggcggggtccgtggccaggtaaggcgggcggcggcgggagggagcgcgcagggaggaggccgtgctcggggtgggggggtgcgccgcgggggctcccagggcgtgtacggggacaaggggccgctggccgggtagggacgcccaggcgggcgcgacgccacgtgcggccggggggagaccctccggccggcgcgcagcctccgggtcccctgtgggttctagactccctctcccttcacctcctttctttcccgcccccccacactcccctcctctgctttttcccctgtcctgttccttctcaccccgcaccgccttccccgccctcgcctctctcagcctgcgttttggtctggtctggccggacggtgtcagctcaaatgttccttttttgcttccgtcctggggtctcaggttaggtcgggtcagcgcctgggggaggcacctcccccgcccccacacaccccaaacctacaaggtgggtgaggtcattcccgtttcatagatgagaaaacggaggccggggcaggtgctgcgctgattcaaactc

SEQ ID NO: 241774 - DNA, 232 bp, Homo sapiens
  chr22:45402268-45402500
  hyper
caaaaagatggaggtcagttcgcaagcaagcctccttcccggagttcaaatttaaaggcaaaggcagcccggagtcggagagctccttcccgaagctgccgcaaccttcaaacaggattttcaaatgtttctttcggcttatctaaattccggcatgacagataataaatagcgactcatttactatcatcataaaaatttaaacagcctcgaaatagttgctacaatacag

SEQ ID NO: 241775 - DNA, 1018 bp, Homo sapiens
  chr22:45402901-45403919
  hyper
gacttcgccggggccgcgcgccgggcccccctccggcgggaatggaagcttccactcccggacgggggcgcgcggccgggggcgggggggccgcggcaccaactgaaaagggttagcgcatttgtcccaagccttcggtccagcccggcggcccagaccaggcgcgggccgcggcactgccatcttcctttcagcaagcccggccccccccaaaacccgccactcgcgcacgccccctcccatcactttttaactttaaagactcgacacgaacgcccggcctccgaattctctctcgccagggtcaccggcagccgccccaacctcgtccacgtctctcccctacgccagaaaatcccccgggggagggggcgtccgatccggcggcccgggctggggtgggagcgcgggggcaggcccgggcgggggcgcgcgggggcgggcccggagctgtccaagtttggcgctggcggctgcggccggcattccgaaggaaacgcgatcgatggccgggggcgcggcgcgggcgggggcggggcgcgaaggagggagggagggggcagcggagggagggaggggcgccgccgcccccgtgcccgccacagcggtgcccccagcacgccattggctgcgccgctcaaagttctcggctcggggctgcgcggggaaggggcgggtgtgcgagcgcggggaaggggcgggtgtgcgagtgcggggagggggcgcggcgggggaggggcagcggaggaggggcgggagccagggggcgggggcgcgcggccggccgggctctggcggcggcatctgttcgtggtgctgaaaccccgagcgctgagctcagcgcaactaagtcacaatggacaacttttcctccccggagggggcccggaggggggggagcggtcgcgcctccgacgcgtgggagcttctcaggtgtccccaactacacctaacgcccggagcccaaagttggagcagaactggggagtcccgggggcgcgtttcttttgttccccgg

SEQ ID NO: 241776 - DNA, 121 bp, Homo sapiens
  chr22:45406439-45406560
  hyper
aactctcaacagatgtcactggacattttaagactcttgttaagagtcgtaaacaggcccggtcaatgcgacctaaaacaattataattacagctgcggaggtcgcgtttcagaaccccca

SEQ ID NO: 241777 - DNA, 112 bp, Homo sapiens
  chr22:45559225-45559337
  hyper
tgagtgcccaggacggatctcactggctgaaaaaaacagaagagaaggcacccaatgcaaaatcaaatgtcagcgaacgaggggtcctttaacaggcggcccacacggcccc

SEQ ID NO: 241778 - DNA, 43 bp, Homo sapiens
  chr22:45560664-45560707
  hyper
gcgtggtcttctccgtttccttcctagcgattcctctcgagct

SEQ ID NO: 241779 - DNA, 87 bp, Homo sapiens
  chr22:45664601-45664688
  hyper
gtccctgctgaaaggcgactccgggagcacaggcttctgccctctcctgatgtccctagcagcgccgggcacgcagcagtgctcgct

SEQ ID NO: 241780 - DNA, 685 bp, Homo sapiens
  chr22:45898544-45899229
  hyper
atccggcccgaaggcgccccctctgtgccccctccggggaagtctgggatccaggccctcgcccccagccgtgggcgcgcgcccctcgcagccggggtccggggagggagggtcccggcagggggcgccggggagggaggaccaggagacccgcggccccgcctccgccgcgccctcctcccgggcgggataattgaacggcgcggccctggcccagcgttggctgccgaggctcggccggagcgtggagcccgcgccgctgccccaggaccgcgcccgcgcctttgtccgccgccgcccaccgcccgtcgcccgccgcccatggagcgcgccgcgccgtcgcgccgggtcccgcttccgctgctgctgctcggcggccttgcgctgctggcggccggaggtaggggcgtcccgggtccgccgccccagcttagggtcccgaccccctcggcctcgcgctccctgcgagtttcggaaccacggggactcggagtccgtgcgttgccctgcgcggcgcccccggactgtcagcgccgaggcctcggcgacgcccccctcccccacggccagctccggtcctcatctcctccccggcctggggacttgtttcaaaaccggattcccccacccctcaaacacaccgtcctaccccagtcctagcaaatccagccggctccgggggccg

SEQ ID NO: 241781 - DNA, 149 bp, Homo sapiens
  chr22:45973979-45974128
  hyper
taggcgctggagtccgggaggtcctaaccagaacccacgagcgtgcagtgcgcacagagcagagcgttttggagcctggcctccaggtggcgctgttggaccttggacgctcagtctttgcgcctcaaacccgacggttgttaaaactg

SEQ ID NO: 241782 - DNA, 107 bp, Homo sapiens
  chr22:46067494-46067601
  hyper
aacctctggttcccgatacccgctcccaagaccgagaccctgttacggccacatcaacacaggtccccctccccccggcgtcccctcccctcggaggagccccgtct

SEQ ID NO: 241783 - DNA, 1333 bp, Homo sapiens
  chr22:46262413-46263746
  hyper
tgctggggaggtggagacagcgcgctcccgagccctggaccactccctctgccccgcgcggggccgagctccacggcacgtgctttggcttggaccgggaaggcccgcagtcccacagtgcccggggaggacggtccgcgccttccacgacttcgcgccgcccgcgtggctgcagcgccgtggcccggggacgcgaggccacagcccgggagcgaggagcgcgggaggaccggcctgcctgtgcccggcaaagggggcccttccgaggcgggctcccttccccgccgctcccgtaagcgcgggagccagaggaccccagacccgccgcggcccaccccaagccccgatcaagtcctgcagcgcgggagggacccctgcaggcgcggggccagacgggcgacaaagcggcggactgcgagggccctgaggaagccggcggcgcggggtcaggagcaacctgctattcgtagggtcaggagcccacgcgtccccactgcggagggcggggtcgcagccaggcctccccgtttctagctgtgcggcctggggcgaggtgcttgacctctcggggcctcagtttccttctctatgaagcggagctgatcggccgcgtcccggggctgctgtgacagtccaaggcgagaacagcagctccgcgccgcccctggtgctggagaaccgctggggcctcgggagagggcgcggcgcggcggagcggccctggcagccggagggcgcgtgtggccagggccgatcctgcactgccctctgcgggatggcccggcccagtcctcgacccccagcacctccgccgcccggcctggccaccacctccgctccacgcgcccaggccgctcccgtcgcgggtctcggagattctcccgcgcccaggggtgtcccgcagccccgggcctcagcacccagcgctcccttctccacgacgacaatgaggcggaccctccccagcgccctccagagctgtcgcatcccgggaggtcagggcgagtgttgtttgcatttcacagagcaggaagcttaggcacagacagcggctccccgaccctcgctcggcctctgctgagcagggaacggcctgaacgcgtccggccaagcgccgcctccggcctctgcccgcggcccggcgcgccctcctccccagcgcgcccctatcctgcacgcatccgcggccccgggccctttccgcagccccacgcggtctcctcccgggttaaatctatccactcgcgcgttccttggcagccgtgatcacaggcgtgaccacggtccccaagccctcgcgcctccgtccacgctattgcggccgcccctgcgc

SEQ ID NO: 241784 - DNA, 101 bp, Homo sapiens
  chr22:46274465-46274566
  hyper
gagtatgtccaacacgtttgaacagagtcgcttctcacagcccatcctcaaagccagcaccggggcccaacaccccgccccccacacgccgcccctctctc

SEQ ID NO: 241785 - DNA, 95 bp, Homo sapiens
  chr22:46276964-46277059
  hyper
ctgaaggaagtccccgggcacccgggccctgatgaatgcagccgcggttgagaatcgcccgcgtgaatccctattcagagcggagcccttgttct

SEQ ID NO: 241786 - DNA, 38 bp, Homo sapiens; identical to SEQ ID NO: 206173
  chr22:46302277-46302315
  hyper

SEQ ID NO: 241787 - DNA, 57 bp, Homo sapiens; identical to SEQ ID NO: 206174
  chr22:46363503-46363560
  hyper

SEQ ID NO: 241788 - DNA, 1934 bp, Homo sapiens
  chr22:46366558-46368492
  hyper
gcctaaggctgaaacgccaggattctggggagggggaggcttcctggcctccaaccgctagacgctgaaattccaaagtcccctggttgatccagttcctggaaaggacaccagaagcaggacccagggaccctggcactttatcagcctgggtccccactgctcaggcggtccccacccgcatgcgccctgctgccccgcccccctcaggcgatgcctccgcagccggggctgcccgccgggcctggagcgctctctgtgcccggaccttgtaattatgtcccacagcccgggaaaccgcgggcctcgcagcatctggctgcggttgcgaacttttgtttcaagatgcgcgactatttatagaaggaaaactggtaggatagtaatttcctaggagcaagaggagaaattggctgcgtctttattaaatgggggtgggggcgaggcgatgtattaggactgcaaccgcatggggggagggggtggcgcagggagcgggaaggcagcggctgccccctctggccgcgtcaggcgaccccggacgtggcccgcgtgtaaaggagggggagggggaagggaagagaaggggagggagagcaggctctgaggtttaatcagtagcatccagcttaaattcccccaaacggcggttccataaatgaaacttctttttaagtcagaggccagagcatatgcgtcccattaggaattcggcgaagccaccactgcgcgccccctgggctcactgggctggactcggccctgcccggagcttctcagagccccgtgggctctgccttgccgggcacacacacgcgcgcccacgctccgcgctctcccttggccgagacaactgggcgaacgcggccgccagcacgcaatgcgcgtcctcctcgcccccaggtgaggactcggcaggggcagggatcaggctacccagcgcggcaggaaggcgcgagaagccgcagcgacttcggggtacagtccgggcgctgtccggtgaagcgcggcgtgcacgtgcatgccggtgtttgcacgagggagcgggtgtgtgagtgcggctctcccaagtgtggcatggtattgcgcgccgcgtgggttaatatggggaggggtcccccgctggtccaggactctgctgggacgcgcagggaatctcggcgccgctcgcgtgcccgcgggccctcgcgctgggcgtgcacagcctgctctactcccgcagtcgagccgctctcaggccatcctttctttgaccccagagccaggacttctcactgccgtagctgcccgccaagtgctccacctcggcagcttaggctggcgaggcgacctaaagtcccccggctcccgcgcgcgacggtcacccggtgccccgcccaggggcctcgctgccgcgttccctgcccgcccggttccagcgctggaggcccggggggagcccacccgcccaccccgcacgccgcccgcggcactcacaagtagctgccgctggacaggaggagaaagatctgcgggcaatagacggagacgagcgcgctgcgcggcgacagtagaagcatggtgggccggcgtgcctggcggggctgaacaggctccgcgggccgggcgcctgggccagctgaggccggggtccccgcggagctccccgatgcagggcggcggcgctgggcgctaggggccgggtctcgtgggcccgggcgcagttgtcgcccgtgccccgccgctagggccgcgcatggcgctgggtctggggcagcggcgggagctggggctggagtgcggggcggggacccggccgggggcagcgggcgcgccttggctgcggtctggacctccgtccgtctgtcggtgcgaaccggctctgtcgctcgctctggctcacttctccaagtctcccgaggcgcgcagctgccattggacgggccgcccctaca

SEQ ID NO: 241789 - DNA, 1537 bp, Homo sapiens
  chr22:46371534-46373071
  hyper
acctgcccctcccgcgggtctgttcaccgccttgcctgtggcctggacggggctcgcctcggggcagccggcggcgcacagtaggcgcgcagggcgcggcggggcccgggtccccgcaggtgcgaggagcgcggggccagcagcgggcggtgggcgccccaggcgaggtgcaccgcaccccctctccgtcacgccgtttctccacccccacttcgagcgaagccgagacagattctgtctaaaggagatcgcggctcaacaggtaaggactcggctgggttcaggaatgtggaaatacgactcggagcagctaccgcagagagcagctagcgcggctcgccgggcgcccgcccgccgggccgcgccagggggagcgcggcgagagggggccgggcccagggcccagggccccgggcgggcggggcacgggccccggaccgagcccgaggcggcccggccggccccacggcccatcccgagccagccggacgagttgtcaaggtaatttcaacacgtctgggtgatggatagagacgaagggccgcggcgggtgccccggcctgcgcgctcgcggccgggtgcgcgccccccgccctcccgggcctccgcaggcgccggacgccccccgaccccgccccggcgcaccctccaggcggcgagcgctcggcccgggctcggcgcccagcgcagcccgggggagggaaggcgcgtcccacccccggggcctggagcccaaacaggtgaaagtacgcgccgggcacgctcgccgctacccgcgagcccggccggaccgcccgcgcgccccgctctctctcctcccgcgctgggctcggcgcctctcgggagctcagggggttgggctgcgtctctgctggcgtggggcgagggtctgacacacgggccagccccggagcccagagagctgcagtggccccctccagtccccacgtccccacggggacgccccggaggcagctccttcgtgctgtcttggcccctggctgctgccctcgcccacggggtactcacccgagcttcacgtacaggacgccaaagcagagaaacacgtagaaaatccacttgcgaaagtttctgtgcatgatccagggaggggggctgcgccatagacagcggcggccggaggggacgcgcgggcccggcagggccgggcaggggccagggggctgcgggcagactgcgctcagcccgcgctgcggctcgggcggccggcgacgcgcgggcactcggcgcgcgctgccaccatggtgagcccgggatgccgccgccgccaccgccgcgtgagcccggggaattgacccaggctgggggccgcgacctcgaagcccggttgagcgaccgtggacccctgcaagcgcgggccgggggcccgggcgcggctggcgggcgggtgcagcctgcactaggcgcagccgcctgaggccgtgagcgcctcgccgagcgccgcggcggccaatgtgtccgcacttgtcggccgccccaggtgactcgcggccccggcaagcgagccgcgagcgag

SEQ ID NO: 241790 - DNA, 165 bp, Homo sapiens
  chr22:46373380-46373545
  hyper
ctggtacaggtcgcggtgccacttggcttccagtttccggtgggggagggagagaccacccactcccattgcctctccgagtgcacttccctgacccccaaaaattatccgcatggggtactctggggccatccttttagtccaggcatcgctgccactccagca

SEQ ID NO: 241791 - DNA, 42 bp, Homo sapiens; identical to SEQ ID NO: 206178
  chr22:46512497-46512539
  hyper

SEQ ID NO: 241792 - DNA, 31 bp, Homo sapiens
  chr22:46646367-46646398
  hyper
tgctgaggggcgtcgcgtctggccgtgcgct

SEQ ID NO: 241793 - DNA, 201 bp, Homo sapiens
  chr22:46658918-46659119
  hyper
gttgggcgctgagcaggacgcgcaagtcgaggcagtaccagcgccgcccggtcccgccatgggggaagcagaggctgccgcggccgctcaggacagcgccgcccgcccgcaccgcgctgggccgcagactgaggagggcgcggccgccgcgcaccccgaggcccggggcgcccctgaggaggccaccgggcgccccggaga

SEQ ID NO: 241794 - DNA, 170 bp, Homo sapiens
  chr22:46663531-46663701
  hyper
cagagggagaagccgctactgcaggagacagagcgatttttccgctgcaaatccttgagaagggaggatggaggcggcgggacgacccagtgaagccggccccgaacgccaagtgagtgtgtgccgtgcgcgcgcgggtagctgccgaccgcaacgacataaacttgaaa

SEQ ID NO: 241795 - DNA, 179 bp, Homo sapiens
  chr22:46663946-46664125
  hyper
cctcgcctctgcgcgactgccaggtacacggaggctgcccccaaccaggtccccctcgggccccgggtcctgggggtggcccggtgctggcggaataacgggagacatggcccgggcgcggggcgtggggtgagccctgggcgcacgggcgcgtccgcggcaacgcctggaagggaccc

SEQ ID NO: 241796 - DNA, 1936 bp, Homo sapiens
  chr22:46932838-46934774
  hyper
gacgtcctgccagccgcccatcgcggcccacgtccagcagctcccgcggcgcccggggcgtgcaagcggcgcccaccgcgtaggtacagccgggccggagggcgaaggcgcgggtcccgccgggtacgcgcggctcccaggcggccgctcgcagccccatcgccggcagggcggcggcggcggccaggagcagcagcacgggcagcacgggcggcggcggcggcgccatggcccggagcccgagcccgagccgggcgcccgaacacaatccatgcacccggcgcgcctccgcatccacccggcgaggccggggagcggctcccgggcgcccggccctcggggcggtccgcgtcccgcctccccgggggccctggcggggactgtggggaccacgcgcccggcctcccccgcagcttccacttcgagagcactttgcgaaagtttgcgaagttggtttcaagatggctcctccgcgcgtcccgggagggcgccgcgcatcaacctgcggcggcggcggcggctccaggcggctccaggtggctccggcgcgggctcggccggacgggcgtgggaagcggggcgggcccggcgcggggcgggggctgagttcccggagcgggctgggcagctccgcgccgcgcagaccccggcggccggctgctgcctgggcggtgcgcttggcccgcgcccactccgcccgcgctctccccgcccccggcccggccccgccccgcccccggcccagcggcgtattgttcggccccggggggagccggctcggaggtgcgcgccgagaggatcgctatggagacgcgagggcgcggccgggacggggactggggccctactccccggaggcctccccacccagcctcccggtggggcggggccgaggcaacagggccgggaaaggtggggctggggcccccggtggccgctacccgtggggcggtggctccgcacctcgggctcggggccgcggctcagagcctggctccccaccccggcagaacagatccacggagaccgccgccaggagtgccgcgcgggtaggacccgggggcggaggactggggccgagaggccggggagcccccccccacccattaaggactgcggaggctgtcgaggagggttacccattttacagcaagacgcacggaggctaaaatgcttcaccccgactaaaactccctggactttgaagcccaataggcagctaccggatctgcgtcccacttggtttaaagcgcaacttttaaatgaaagaagaaaaccccggttgacataagggatttggagaggacggcggaggcgcgctcatctcccgcgtgcggcccgacccgagcgttcgcggacgcatcgcggaatccccgagcgtccggctcctcccgaagcgggttgcggggaaggcggggggctgcgggtcctggaagctgcctggggcaagcaagcacccgcagggatttagagctgtgccacagcccctgcccagcctcctacggaggacagcggggggcggggggcagagaccttagagctttcagaaaagtgacacacacccccgcctcctgcggggaaccacggggggccgggggcagctttaggtttgcgtgacgggtacacctgcctccggatggggcacagggataaagggggtggaggcttaggacttggcgaccccccgcatgggcggggctttgggactgtgccaccagcggctgggaagggcgcgcactcccttggtggcgctcggggcgccggagtccagtgcagcccttaggcctcccagtggtcggggacggtaggtgggggtcgcctcttctctcctagaagggcttctcctggggccggtcggagcggtgggggtgggagtaatgcgcagtcacccctagaacgggtctttttggcaagggagggtcggatcctgcagcca

SEQ ID NO: 241797 - DNA, 115 bp, Homo sapiens
  chr22:47158139-47158254
  hyper
cgtcactcagtgccgggtgacccagcttgaccagcacccgcagccgccctgccactgttgggccgggtatggtgtgtctggcttccctctgttctgggccggctccgaaacgcgc

SEQ ID NO: 241798 - DNA, 127 bp, Homo sapiens
  chr22:47158507-47158634
  hyper
acttccgggcgcgcgtaggcacaacttccggaaggaggcggaagagcttctcggctctaggctctggagtcccgggagcagtgaggggccacccggggcacaggaaagggccgctaggggagggccg

SEQ ID NO: 241799 - DNA, 252 bp, Homo sapiens
  chr22:47199282-47199534
  hyper
ggcctgaggaagggcggcggttttctctcctgtgggccttgttggagatctcgcttctgctgtgggagctggggcccggcccccaggagctgaggcggggagggcggttggttcttgcgacccggccgtcagcgttcagcgtcgccctctagtggccaggtgctgtctttgcagcctgggcttcatgaccacagcagggcacgttggccttgtgggtggggggtgcttacacttgcgcgtgtctgtgtgtgt

SEQ ID NO: 241800 - DNA, 518 bp, Homo sapiens
  chr22:48886293-48886811
  hyper
cgaggctccaggcgggtggaatgaggggtggttggagtcccgggtgcagactccagcctcggcgctggggagggtgctcagcatcccggggcacgttcgcggctggtggggtaagtgggggccgctcagcgtcccgggcacaggctctggccccagatggcgcgggctggtcggcttcagctccgggagctccgggcttcttgtcttcagcgggagaataggacgggtgctggggagcacctgtcatggagaattgccatgggcgcgggaggtgatggaaaaatatggattctttacaaaaaaaaaaaaaaaaggccagcaccgaacctccctccacagacaccacctcctccagagccccgggcctccaagctcccagtccgatctgatccttccgctgtcgccaaaatgagagcacagtggcccagggagacccgggcagccgcgggatcggcctccggagtcctgggacagcccagctcgccaggatcgcaagggaaacccggggaccagagcag

SEQ ID NO: 241801 - DNA, 1444 bp, Homo sapiens
  chr22:50242069-50243513
  hyper
tcagccccctccccggtcccccaggaaggggccagactccagctcagcacccagcgcttcctggtctttcccttctgggcgccctcccgacagttccctttagggaagttggcccgctgcgcgctcccacccccggccgccgcctggacagaggcgcgcaatccggagggcgcaggctccggcccggagaagggggtgccgccggcgttccgatttctcaggaatggggaaacagaggcacggtggatccggcggcggggctgggtctggggctggacgttgacctaggaccccgcccctgcccgccctgcgccgcgcccctcccgggccggccttgaccgagcagctccacgcgggcccggggctcgtccacccgacaggagcggggggctgcagcccacgagcccacgagcccgcagcgacgcacccggagtgtaacctcgcagagtcacggagacactttcccggtgtgggcgcctcgccgcgcttcctccccgcgggctgcggccaccccagggcaggacagagccgagatgcccgggtgggagcgatgcccgcgtgggggcgatgcaacgggggagatgcctggggggagggtggtaaggtgaaacctggtggagaacaatgggggtgggtgggcgattcctggggaggtgcccggtgtggggtgtttctggttcgcccggggacagtgcgcgtcccctcgcccgcggcgcccgccctgcccgtcccaccgaggtcccccgggagcgtctgggcccacggcttcggggggtttctccgagacctgggcgctgttctgggggagcaggggcccgggccaccaaggttcgtgcggaccgtggggtgtcccacgcccaggccgggggatcccagagccccgcttccctcaagggcgccgcgccccggactgcaggtggagacggggaccggccccgcggggtcgccgacaggcgcggggcgggacagggtgggaggcggcggggcgcagagtcctccggtcgccggcgcgatccgggcaccttcctggaggcggcgggagcgcggtcgcggcgcctccggggtggggtccaggttggaggctccggggcgcaccgccctagccccaccccggccgggtccccgcgctgcctctgcggagagggaggaaggaaggaaggcagggagggaggggacggccggcaggcgtggggtccgcggcgtcagggctccttcctcccgtccgctccatcctgcaacccgtagcccgggcggggtctcgctgccccctccccgaacacagccgccttttcctccctccccaaccccgagcgcctcccttcccgaatgcgggagtccatagtgcacgggaagcctcttcccctccccaccgaggctgcccgacgccccttccaccctccgaccccccgcaaccatccctcaaatgccccggcggccagcaggg

SEQ ID NO: 241802 - DNA, 98 bp, Homo sapiens
  chr22:50246776-50246874
  hyper
gcagagtttatttggtctgctcaaacatttgtgttaggaaataacacattaaaagtgcacatttccttcagaccctgagaagcgggcgagtcccgtgc

SEQ ID NO: 241803 - DNA, 221 bp, Homo sapiens
  chr22:50311963-50312184
  hyper
gcaggaagcaggacggcggaaacagaacagagcccgaatctaaagtccttgcccaaatctaaagtggctaccgcagccccggccgctacggccgcagagaccctctgtgccctgagtaaagatggccgccgcgggctgcgcgcgaggggcggggagcgggaggcggggtcggacctgcacgccccgcccccggactcctggcggccgctgatccggggcct

SEQ ID NO: 241804 - DNA, 404 bp, Homo sapiens
  chr22:50496979-50497383
  hyper
tgtggaggtcacactccatcccccaccaggtcacaaagacccgcgggtcacatcctgcccctccccctcgggccccccaggcccgccaggccttctcgccctccccggggccctcatgccgccctctgtccctgggcccttccccgacgcgaggctggagcggcggggtgaggaggccgcgggcgctgggctcctcccgggctgcgcgctgcgggtcctggcggatgggggcgacggggtgaccgtatcagcgccccccgtcctgcggcggaacttgggagggccttggtatccgcagaaccactcgtggggtcccacgccgctgccccccggggggttctgagcccacccaggtccacacggcccctgtcgtttccccccgcaccccgcggatcaccccgcca

SEQ ID NO: 241805 - DNA, 209 bp, Homo sapiens
  chr22:50623835-50624044
  hyper
gggccgacccccggaggacggactaggccgatccccagagggaagggggccaggccgaggccatggcagcgcgttccctgatcccgtgttctcggctcctcgcgtcccactatcggctgtccctttcgtgcgggactgacggctcacagaacagttacatttcaatatcattcgactgaaaaccatcctgtggacgccgtgcgagcatt

SEQ ID NO: 241806 - DNA, 282 bp, Homo sapiens
  chr22:50690037-50690319
  hyper
aaaggcgaggggggcgaggggtctgcagggcaaaggccacgaggcgggaggagcccgcggggaggcaggtggcgctgcggccggctcagggcggtggtcgtggctgcatggaggcgcagcaccgcccccgaggtttaaggagggagtgagtccggttctagctccaagaagacccctggcccaagagcagagtcaaggtcggtggaggtggggacactggaccggggttgcggtagcatggtgggggactgaggaagataggaggcacgggcacagccacgg

SEQ ID NO: 241807 - DNA, 189 bp, Homo sapiens
  chr22:50699694-50699883
  hyper
cttagcgccggtgcggccgtccacggccgagctgcggggcggaccgcttagcgggaaggccgggcaccccgcgcaggccccgcccgccccgccggccgccccgcccggcccgcgctcaccacaccgcgccgtaggcgcccgagcccacgggctgcaggtcccggtacacggcgcgcacctcccaggccg

SEQ ID NO: 241808 - DNA, 209 bp, Homo sapiens
  chr22:50708933-50709142
  hyper
tgcgcctcggaggcggtggcagagcggaaaccagccctccccttcccggggggggcgccgagggcggacacctccctccggctctcacctcttgggggccgcgcgcttctccagacttgcgcccgcgtctgggctcggcccgggcttccctaccccggcggcgccctccccaacgagggagaaccgtcaaaagcgaagaagccaggggt

SEQ ID NO: 241809 - DNA, 130 bp, Homo sapiens
  chr22:50781872-50782002
  hyper
gcccgcccgaggccgcccgggctttgcctccaccagcgccctggcctccgctcgggcctccacacgggcctccgaagagctgccgcgacgcccggcccgcagggcaggtgagtgcggccgcccgccgctc

SEQ ID NO: 241810 - DNA, 214 bp, Homo sapiens
  chr22:50919520-50919734
  hyper
ggggtcggcggcaccgcgtcagaggagagcggaatggccagcccgctgcggaatcccgcggacttgctggtcaggctggggggccggggtccaccgggtcagaccctggagggtgggaccgcccggactcgggaggtggttgacggggtgggccccgtcgggtccgagtccgccccagccgtgggatcagctcggacgacggttcgccccccag

SEQ ID NO: 241811 - DNA, 32 bp, Homo sapiens
  chr22:50946695-50946727
  hyper
ggcgggctgaggacgccgtacccctcggaagg

SEQ ID NO: 241812 - DNA, 265 bp, Homo sapiens; identical to SEQ ID NO: 206190
  chr22:50964979-50965244
  hyper

SEQ ID NO: 241813 - DNA, 45 bp, Homo sapiens
  chr22:50968298-50968343
  hyper
cttccccgcctcgcgacttgagccccgcccgtacctgcttagggc

SEQ ID NO: 241814 - DNA, 363 bp, Homo sapiens
  chr22:50982556-50982919
  hyper
tcggcctcccacctcgaggcgatccgacacctcggcccaggtcgcacttttttgcccgttttgatcccatcctccaactgcggccacagccggaaatgtagagaaattcgcgctcctggggccggcggggctggcgctggctcacccgctccccgggccctcccagtcgccaggtttgcgctcggagcccaggggctgcgggttcacagttcgcccgcgagtcgctgtcaaccctccaggcgcggcccgggggcgctcgcgcgcgctgccaacggagccatccctgacgcgttctcagtctacggcagaaaacgccagtcggcgccggaccgtgactccagggtttcgcggaaataaatttta

SEQ ID NO: 241815 - DNA, 109 bp, Homo sapiens
  chr22:51021397-51021506
  hyper
tctttccgaaggccgaattccgcagatctctgccgggccccgcccctatgggcaaggaccaatggtctctctctgggcggggctgctgttggacggcctgggccaatcc

SEQ ID NO: 241816 - DNA, 637 bp, Homo sapiens
  chr22:51042114-51042751
  hyper
gcgctatgctcacccgccccggaggccctcagaggtgaggggtggtgggcccgcggggcgcggggaagcgggggaggagggcagggaggatggactggctgctggaagaggcctgggtggtgcagagagggtgaccccacctccctgcccagcagagctcccgggccccctccctgccacggacaccgggcccggcggggcgcagtcgccagtgcgcccgggttgcgactgcgaagggaaccggcctgcggaaccccctgcgccaggggggacttcgccctcctcagatcccggcatcgaggctgacctgagaagccgctcgagcggcggccgcgggggacgtcgcagcagccaggagctgtcctcgcccggctccgactcggaggacgcgggcggcgccgcctggggcgcatgatctcgtccatctcggagacggagctggagctgagcagcgatggcggaagcagcagcagcggccgctcctcgcacctcaccaactccatcgaggaggcctcgtcgcccgcctcggagccggagcccccgcgcgaacccccgcgccgccccgccttcctgcccgtgggccccgacgacaccaacagcgagtacgagtcggggtcggagtcggagccggacctca

SEQ ID NO: 241817 - DNA, 234 bp, Homo sapiens
  chr22:51066542-51066776
  hyper
aggaggagccggtaccgggctgcgggcgcttccgcctcggccccgccccgtgacctgtgacccttgcggggcggggccgggggcggggccgggggcggggccgggggcgggccggggcgaggggcgttgctgcgcgtgctcgctccgaggccgccgtgtgcgcctgaggctgttggctgcggtcttgaaacgggctctgggagcttcctctgcgcggtcggccctggctgaggc

SEQ ID NO: 241818 - DNA, 53 bp, Homo sapiens
  chr22:51112346-51112399
  hyper
cctggggcgggggggggtccccgccatctcctccaggcccgaagctgggggtc

SEQ ID NO: 241819 - DNA, 343 bp, Homo sapiens
  chr22:51113372-51113715
  hyper
ccggactccttcggcgggggcccggggctcggcaccccgcatggggccggcggggcgggtccgcgctcccgggacctgagctcacgagcccgctccgctgcagaagtgcctgcgcctggacccggccgcgcccgtgtgggccgccaagcagcgcgtgctctgcgccctcaaccacagcctccaggacgcgctcaactatgggcttttccagccgccctcccggggccgcgccggcaagttcctggatgaggagcggctcctgcaggagtacccgcccaacctggacacgcccctgccctacctggaggtaagtggccggcgcgggggtgagctgaggagcgcg

SEQ ID NO: 241820 - DNA, 101 bp, Homo sapiens
  chrX:2747435-2747536
  hyper
cttggggaggggggcgcgggcccaaggcagaggctgcgggagcgcggggcaagggagaggtgcagagcgtggagggggctcgggggcgcttggggaggatg

SEQ ID NO: 241821 - DNA, 635 bp, Homo sapiens
  chrX:2815892-2816527
  hyper
aactgtaactagcgcgtcataaatcccagcccttatcttgaacaagagtcaaagaccggacttgaaggcatcccccaagataaaggtaggccctctgcagggcagctgtaagtcagctctcctccacccctctggctggccccctccttatccgagtcctgcttccttcctctttaaatctgcagacaatgctgcttctctgcaggtctctgcatattccctcagctcacagaccggctgcatacttggtattttcagggttaggtttgcaacacatgactggggaaatgcatgaaaaggaaatgatgcaagaattcaccgcggacacctttaggtgagaaggagatgtgacaaaaagtctctgcctggccaaaccgtagccaggctcctgaagcccctcccaggcccggtggtgcgtttccttatagaattagatttcagcaaagtaccggctaagtcagtttggcgagaagccaccattcttgatatcatgttcctcgtcgtccaccacccctggttgatgtttaacccccttggctggctttaacaagccaggttggtttagccaggacccgcttcacctctgatgtttccttttagtgctttgccatctgtacacccgctgcctgcccccg

SEQ ID NO: 241822 - DNA, 109 bp, Homo sapiens
  chrX:2847416-2847525
  hyper
ccgggcgcccgcccctccttcatccgcgtcatctcctggctctcgggacctccgggacctgcgcgtggaaacaggttttcccaggtcgtcacacgggaaggcctgggct

SEQ ID NO: 241823 - DNA, 282 bp, Homo sapiens
  chrX:3630855-3631137
  hyper
tgggggtggagggtggtctccgagaggagccgtcggcatttcaggttaggcacccggccggtcgggggtacttgcctgggctggggggctggggagtgcgctccacccgggaagacccggggcgcaggtgcagccccgcacggggactccgagccgaagtagcgggtcagggccctccccaggaggtcggcacccagggccctttgtcctactacaacgtcccggccacgccgcgcgcccctgtgggccgagtccccgcccgcactcactcacccacggtgg

SEQ ID NO: 241824 - DNA, 110 bp, Homo sapiens
  chrX:3631931-3632041
  hyper
gaggcgagggggcccggggacagggagggcgtagctcagcagaagtgaagttcaaaactaaaaagtgaaactggcgtttggtgaagagaggggctcggattagcccggct

SEQ ID NO: 241825 - DNA, 131 bp, Homo sapiens
  chrX:3632321-3632452
  hyper
ccaagaggggctgccgggtcttcgggatgagttcagcgtcctggttttgctgtaggactctggtgattctagatttctacttggaaggggcggggaagggcgggctcgaccctgtgcgtttctttgcagct

SEQ ID NO: 241826 - DNA, 2297 bp, Homo sapiens
  chrX:6143629-6145926
  hyper
tgttgcccgcagaacgcccacacaaactggcaattctgcttcgtcaggataacgaggtctccctaaactttttcttttccttttttttctttctttttttcttttttttttttttttttttttttttttttttgcttttgccttcctcacatcaccggaagggctgattctgagatgggagctcacgcacaccaccccctttcaagaaaatataatgcaacgcgctccgatgtaaaccctacgggcaacggatgccttcaaaaagcataagataagagcaacaacaacaacaacaaaccaccgccccccccaaaaaaaatgaccaaatagaaataaaataaaataaaaataaaaagaagccatactaccaccttgtggatccagctcgcaagaacatcacctgcttagttccaaaacccccacccaacccccaccccaaatttcttaagttgggtccaaatgacagatcgggatcctctgtcctcactccccgcagactcgcccaagccctaggctgaattcgtgacgcgcgcgcccagcacccgggcgagttgcaagccccggcgcaccgcaggggccaaaaccccgccggaacctcctaggaccccttcacgctgcctcctgcaccccctcccccgccatccccgagatagcagcagcacatacacaaaaagaggctgacacctgccgtaggttcagaggaagaaggcagagaaaaagaaacccgcagtccggaaaaaaaaaaagccttctggggaaggggaggggtatgatgcggaggacgtcctccggctgcccctcgctctccatgcagaacatccgttcccagggtggcccgggccaggcctcgggggtgcaagggttggcctgacccccctgctcccgcccccgccgctccgggaagaaagggcgctgtgtctggcggcgagcaggcgccggaatcgtgcgctcgggcccagggttgcacggagcactgggcccggataccgggggcgcaaagcttcgggtgcggcccaggagaaccccgccgagggaccccagcctaccggttctcggaggggcgaaagagccaggtcaggttgagggacaggaggaggaaggggtgtccaggagactgactgaaggatgagagtgtcctccggggtagcgaccggcctcttggaaaaccagaggcggagggagcagccgcggagtggagggcgcaggccgggacctgggcctctcctcccacagcaagccccccacccacgcatcatctgcagccgagcggcacctacctccctctccctacctcatccccgctcgcgcttccgcaggtcaggccacgcgggtgccagcgcgggctgtgggcgccccagccgcggccttggggaggggtcaggactgaagttcactctctctctgcgtggtctcgaagcccctcgcccaccccgcactgtctcctccgccgccggctgcgcgcttggcggatcttctccatcagttctgcccactggagtgggaaggggctgagccgagccgcgcgggaattgggaggcggggaagcggggaggcgggggaagagacgagatgaaatcggcccgggacagcagagaggcttgggatgggatggaagggaagagggggtggcggttgcgttttccagggctgtagaggtggtgcgcctattggaaccgactcctcagcctcctcccccgtccccacctcggggactggcggaccgtgcgccccgcaggcttaacactccccccgacaccctcgctccgagaaggggtgttctcagtgggcaccgactagggctccagatcccccgagacccagaccagggctccggtagtctgtcctcgcagcttccaacttttccgctccttcggaaaagcgggcagttcagagatggttcccagggcggcagctgcaagcccccccgcgcccccctcaaaggttcagactacactcaaaggctccgaaagaagcaaaaccaccagctctaccctccttctgcggcttgcctcacccttcccacccgcctcgaaacccacacacacgggaaaggggtgcatggagcccgctccccggtttacagaagcagcccggagctaccgtcatttcatcttcacgcggggtctccagcgcgcctggatcgttccctagccaagccaagccaggtctaatcaatcacgtgcgttatttcgtgcatcacccaagccgtcatcttatccgaggcccggagatgaaggagggaaaaaaaatcgcttaaatgcgaccccaaccaagccggttttccctttttctttctg

SEQ ID NO: 241827 - DNA, 327 bp, Homo sapiens; identical to SEQ ID NO: 206200
  chrX:7065514-7065841
  hyper

SEQ ID NO: 241828 - DNA, 373 bp, Homo sapiens; identical to SEQ ID NO: 206201
  chrX:7066303-7066676
  hyper

SEQ ID NO: 241829 - DNA, 139 bp, Homo sapiens
  chrX:7895483-7895622
  hyper
cgcaggtatgtgacgtcatcgcgccgacgaaggcgcccgctaggccccgcctgctctatttaaacttctggactcaacctggccgctagaccggagcgtcctccagcgcaggcaaggattcctcgtttagagtcatgtt

SEQ ID NO: 241830 - DNA, 1463 bp, Homo sapiens
  chrX:8699181-8700644
  hyper
ccccggcacttcttccctgacgctctacgctagtccagggcaagaccttgaatctttggggttccgaattgaggcgcgcacagccactcgcacccccaacacgcgcatacacgcaccctggaacacgacttggcacaagtaccctggctggggctccaagggtgggcagcgagctctgagccctcagagagtgaaaaccatctttcaaaagagacaaagtgtcggcccgcgggcacctgcggggctggggctcgaggtgaggtccccaggcgcagccggacgcgcctcccagactccctcccagtgccccggagcgcctgggactttgcgggagtcgccgcccgcccggagtctcgcgcactccaattcccgggaaaccgccacatccacacacccactcccagcatccacgactctccctccccagggaaatcgcctttggtttcctgctgggaaggagggagttggggcaagatgtctcgggcttctttttcttttcaggagccgggaagaggctggaaaggagagttccagcaccccgactgtaagatccacgcccaggggaagccaggatcagccggcggcgctggccgagaactttgcgagcccaggctgggaggcgcgcgccccggtgcgcccacgccgcggccgcagccccagaaagaacccgggcgggggcctccccgtacctggaagtgctggaagaaggcggagatgcgagtgatctgcaggctcaggcacctggaggcgcagcgagcgcgctggacgctcccggcagacagcgactcgtccagccgccgcgcagcagccgcgccggggccggccgccaggcagccgctggaggccgccagccagaggcagagggtcaggaccgcgccgggcaccccgggcaccatggctgcgggtcgagggcgagggcgagggcgccgggcgcgggccgaggctccctgctccgcgccggggctgcactgctgaggaccaggcagacgccgcgactgagccggaaagttcaatccttcaactccggccggaccctcctcgccgacctccctcccagctcgccctcgaggggtggggtgagggggacaggaggccgcaccattggctggaaggcgtgtgagtgacaggggggccgggcgcagggcccatgggccggtctcgtcagctgcgagcccgggcgctccgggggagggcgacgccgagcggctttccacgccgcgcaggtctcgaggggcccagctcccacgcaggcgcctctcccgttcgcaccaaccgcttcctgcccctcccaccttccccctccgtccaggtaaacgtcggtgtgagcaggtccaggcctgccaggaggggtgctcccttcagcaggagggaagaggcctcaggacccccaggggcgtcccacctgcctggggattgaccccgcgcccctaagtggcttgctttctccccgacctcccctgggt

SEQ ID NO: 241831 - DNA, 51 bp, Homo sapiens
  chrX:9310729-9310780
  hyper
tgtgccagcgccctacgtggactgggaaagaattaccgaggaccttagaag

SEQ ID NO: 241832 - DNA, 95 bp, Homo sapiens
  chrX:9432931-9433026
  hyper
gcagggccggagtccctaccctcgtaggggaggggctggttcgggacgcggctcccccggggcgcaggggcggggccgggtggtacgccgggtcc

SEQ ID NO: 241833 - DNA, 146 bp, Homo sapiens
  chrX:9433206-9433352
  hyper
actccgcgcttgggagcgaggagccgccagcgcccccgccccgccgccgccgcagcgccctcaggccgccattcgccaccgaaactttccagcgcccgcgctctctccgggactcggcggcggcggggcgggggcggcccgggggc

SEQ ID NO: 241834 - DNA, 649 bp, Homo sapiens
  chrX:9433772-9434421
  hyper
tggggagggggaagtggccggtaagtttagggaagcgctcggcttttcctccggtgcccctttgtctgccgattcaggggcttgctgggcaaacctgcgccaccgcgggctccggggaccggggtggagggcggtggcgggatttccccgctgttggggagaagagccccattcatacccgggacgcgggccggccctcccggacccgggtggaagcgcagcctcgcggagtggggcaagcggcgggcgaggtggcgcgggccccgtgtctgctcagtttctgacgcgcagaaactgtcaaggaagtcgggagccccagtcctccgcccatctccccggcctgagcgcacggctgggctgggggcacccttggcccgtcgagggtctgcagagcgccgcccggggagagcgcagacctgttgctgctcctgggctctgacggggcgggtggggtgggtctcgcagatcctgggccccggccttgctatccagggggaccttccctaacgatgggaccggtgctcggagtggagtatggggagtgcgccttcgggagtcggcgctggccggatatgtgacaactgtgggtcgctggaggcccgcctgcgctgggatagggcctggacttcacgtgcgtcgcctgtgttcc

SEQ ID NO: 241835 - DNA, 493 bp, Homo sapiens
  chrX:9753673-9754166
  hyper
agaggccggacccgcgcccggctcaggctgctggggggcgcccttcccggctctctaagtccagagtgtgagtgcgcgcagggccgcgcgggacgggcggtccctctgccccggggcagcggccacagcgcgggcaccagggcctcccgcggcgcttccgctctcacctgcgcggcagcccgcggtgcgcgagaacaaagtgtgggcgccggcgggccgcgcgccccgagacggaggaggccggagactcccgccacgccaccccgcgcccatctcacctgccgcctcacctgcccggtcctggcctccaaccggcgggcgggggcgcccagagcttcgaagcactgcagagctctggcgcgggaggaaaggcccgacctggcgccggggcctccgcccccgtcctcgcccgcgctggctccgccagccccggggcgcgcgctcctcgaccccgaccccgaacccgctgaacggcgcgcgcgcctgagcgccc

SEQ ID NO: 241836 - DNA, 183 bp, Homo sapiens
  chrX:10583971-10584154
  hyper
ttctttaatcacagcgtatttgatattctcttccttgaatgaactcattttcatagtagctttggtcacaagattaaagaatcgctaactaattgttccaaataagcagagcaattctctctgactctgcctcgggctccctgcagtgaagtccgctgcctgatcttccgaccacgggaactt

SEQ ID NO: 241837 - DNA, 1069 bp, Homo sapiens
  chrX:13706948-13708017
  hyper
ccgtttgactagtcgtttttatcattgtaatcacgacatcctgtgactgtgctcatgaggtctgtttatttccactttacgtaaacttttcaaaatgacagttatttcgtactcgctgtcgcccgaacgcagacgggaggacacttcaggagcaatcgacccgaaggaaaagcacgatccaggccccgcctgcctcggctccaccttccccgcgcccgtcccccagggtctcggccgcgggaccccgccttccaggccccgccccgctttttccctggccccgccccggcccgtcgccatgttgttccctccgcgctggacgggagcagctggagcgggagcctggctgcgctaccgcggctgcctcctgctgtgcaggtccccgaccctctctctgtcctcattgcgcccagacgggccggcccagagctcccgggtcgtctttcgtgtggccgcgaggtgagcgggactcgggactccttcgggaccgggcggagtgcgcgggtgtcggggtctgagggggcggctcgggcctcgggcagctggggcggggtgcggtgcgcgcggggctagcgcgggtcacaaggccgccccgggagagaggacggctggttgtctccctgcctcctctctgacgcaggaggaaagacggtccccacacccttggggagagggactcacagaaacacacacaaacactggagaaagggagatacaaaagcccggacacccgtgcacatacacacggagaaatacacccggtcacctgggaacacacgtacacgccagcctttcccccaaccactccgggacacacatccacagaccccaaaccaaatcctacacccgaatgattaatgtagggaaaacaaaggcgctcccatgacttgattttggcgacctctgaagttccacctagcagaacgtgtttgctcgatgtcttacgaccactcgggtgaggaattcggaaagtaaagccaatcttagaggctgcaggcgttttgggggcattatctgattcagacgctggctaacgtttcacaatcgcgttcccttttttcttccaact

SEQ ID NO: 241838 - DNA, 999 bp, Homo sapiens; identical to SEQ ID NO: 206211
  chrX:13752357-13753356
  hyper

SEQ ID NO: 241839 - DNA, 1084 bp, Homo sapiens
  chrX:13955972-13957056
  hyper
cccgctcagcacaccgcctccacctgcacccgggccgcattttaatagttggaacaagggacaaagaggagagactcagcctccgtcccatgctgtccagagtctctcctgtcactttcctggtttcaagggtcatggtttcgaaatgagctcccggaagaccccaggcttggggaaccgggtgtttgtttcgcgcgggcttaaggagaacagaagcacggcggggcggggcggggcaggactggactgggagctcgggcgacagggagagcgtcccgggaaacaggcaagaagcgactctctactggccccttaaaataaagcactagcccgggacgcgccgtctgttctctctgcaacccctcccgggtacccagctcttaggctcccgcgagccgcacgtgcgggggtgcagcctggccgcagccggagcggggaccaccccccccacaggatacaacagggaagcgcacctgggcgttccggacacctgcgccgcgcccctcccacctccagcgtcccggcttcgtcgcagaggtggccgaggaggcgccacctgagcgggggaggggcgggaccctcggaagggcgcgccctcccggggcgggggcgcgagaccgtggccgtggcgcgcagccagcgcgctcgcttacccatggctggagactggcgggaggggtgagggctgcggggcgttcgggctccccggggacgggcagagccggtggcacaagtttgcaggtctcgcgggcacgtgcgctgaccgggcttctgcgggctgcgctgcgctgcgcggggctggccgctggctcctagctcccggccggggtgggagcgcggcgcggctccgcctgcactgggggccggccgcgcggagaggggccctgacgtcagcgccgggggctttgtgcgcccggagctagggcccgattgggggcagcgggcgcgcggagtctgcaggcaaagctcgcggcttcctctgggacccccccgggcgagcgccgagggtcgcgggaaccggaaaagccagcgagggggatgggtagagaggggagtgggcttctaggatcgcggaggcggcgat

SEQ ID NO: 241840 - DNA, 166 bp, Homo sapiens
  chrX:14048163-14048329
  hyper
cggcaggcgtgggatggctgcgggtggcggggccggcggagagggagctgcaccgggcggggcactgggactgtggcgggcacccgcgccgggggtcggacggtgcttctgcaccggcgagataagggtcgcttctgcaccgcccgggtttccagcctttaacttt

SEQ ID NO: 241841 - DNA, 414 bp, Homo sapiens
  chrX:15511291-15511705
  hyper
gcaggagccccaggtactcacgctgcggtagcggcacctggagccttagcggcgggggtgacgcgaagagccgccgggagcgagtgcagggagggcaggttaagagagtgtgggtccagtagcctcaccgtgactcagcgcttcgcggccggcggcctagaggaggcgggaggcgggagtctacgggtctcggaggccctggggctccgccctcgggaatgtcactccactctcgctccgccctacgcctctcccaggccagcttggcggccctttggcctccctgcctctcgtgccgggaagagatgctcactcgggtaatttaggcggcacttgctgtgctccaggaggaaatgtgtggcccgggcaggtgctctgatcggcgctccggtcggtcttgtgggaaatctgttt

SEQ ID NO: 241842 - DNA, 713 bp, Homo sapiens
  chrX:15755974-15756687
  hyper
gagatgggaggaaccgagggaaagtcactttttagataaggctctgaagccccaggtctagtttcaatccactaatgcggccagcggcgagcaggaggagggaggattggtccggcgggggcggggccagagcagggctcagaggcgtggcccaggctagagggaagagcccagggggagcgcagaggcggggctaggagggagcaggggtgaatgggggcgtggcccgggcgagaggggcgtggctgtagctaaaggggtgtggccagggtggagggcagagactggcacagtttggttgggcgtgaccggggcaataagtacggacgtagtggggcgtggatctgccaggtgggggcgtggcctccattgaggggcgtggccctggtatgtggggcgtaacagggcacgagggggcgtagcttcgatggccggacgtgcaggctgcggatccccgtaggcgagcgagcggctaggttcgtgatctggagagacgctcaggtaaggacgggtggccgagaggagtggggggcgaccagggacaggccgatccagacagggccgtgattcttcccacgactctccgctctggcgcaccgggttccggagctaggagagctgttgatcctgcgagtattgtctgggtcccggcagggcgcccgggagtactgagtggggcctaatggggtgtcgaactcccccaccccagccct

SEQ ID NO: 241843 - DNA, 159 bp, Homo sapiens
  chrX:16729957-16730116
  hyper
gtacggggaaaacgcgggggtcgttgtttaaggggtgcactgggaccggggagaggacagaaaggccatgttaccggcgctgatcaccagcctcgcagacccccgctcggggcttcacttccgccaacgccatctcagggctctcctggctcccgaggg

SEQ ID NO: 241844 - DNA, 495 bp, Homo sapiens
  chrX:16730296-16730791
  hyper
agcgctgggcagggagccggcgccatcagagagcggacaaaggagcccggccccacaagtgcaccggggctgggggtgcagggcggagaggccctggggacgagggatggcccgggcgccgaggccctgggggtctgggacaggcccagaagggaagttacctgcgcggtggtggtagcaccggggagggtggccggtgggcacggcgggctccaccccgcggctggcctggcgctcacctgtcgggctggggaaggggtcgctgccggggctgtccaaagccgcccccgggatcttcccaccgcccacacgggcctcggggtgcgcggcgccctcctcgcccaccttcccctctcctccctgctgctggcccagctcactcacgctggtgagcttggggtttgcacccgggtttgtgcaatggtccaaaacaagcgcctaaaaagtgattcctccagcacaggcagctcccgtcaccctccgctctggacgcac

SEQ ID NO: 241845 - DNA, 233 bp, Homo sapiens
  chrX:16805210-16805443
  hyper
gcagtaagataaccgcgcgggagccggggtgtgcttggccccccttcccccgcccccctgcgctccccgccactgcgcgggcgggcaggcgagcgggtgagtgtcgcagggccggtgcgagcgggacgctcggcccccgggacctagaccccggggctccgagggcttggctgcacgtggggccggggatggatggggaggcgatgctggaggacctcggtcctgcagagttg

SEQ ID NO: 241846 - DNA, 726 bp, Homo sapiens
  chrX:16887884-16888610
  hyper
ggggccgagggcgccggagggagcgcagccgctggaggagggaagggaagaggggggcccagccctcggccccgcgcccggctccggaagtgctcggagccctcggcgcggcggtcccgtcccgcgcaggcccctcgaggcgcgcgcccagtctcgcgcccggccccgccccctgctccgcacgccaattcgcgcctttcgccggcgcgtgccgcggcctcgcgcgcccgccgccccccgcggccccggcgcgcgccgccccgcagggcctcttactctctttactcgccatcttgcgtcgggtcgttcgcccctcgccgccgcctcggactcctctcgttagccaagagcagcccgaccgctggcgctcctgcctttcccaagcgcgtcacactccccactgtcgaaagcccgggccccgtcttgctgcctgggtgctccccagacgccgcgtccttctttcctgcctcctccccgctcgcgggtaccgaggtctgaggcgctcttctctctctctccaaacttggaacgagacttttcaacccgcgcctcccagcccgcccaggcagctgagcgcaggcgcatccgccctgggaaaagtgagaggaggcggagaggcgggtctgggagccaacggctccggcgccgagaccaatgacgcgcggcgggcgggtttcacgcggcgttcggaggcgggcttctgggggtgggcggagcgtgccgcgg

SEQ ID NO: 241847 - DNA, 617 bp, Homo sapiens
  chrX:39680206-39680823
  hyper
cggcttggagcgggcgtataaattaaccgggggccgcagagtgaatacattgcacgcggtatttattatgcggccggacctccgaggggttctccggctcccggacgtggcaaatcttgtccggagcgccgctggccgcgctgccaagggctaggacgagaggacccgtggcggggggcggggggcttctcctccagtcctcgggagccccggggcagcccgcttacagcggcggcagcggggagggtttaggcgaggagagacgcggccccgggcgccgctcgggctaggggccgggcggggagggcggggcggtgggagcgggcggcgcgcccggccccttagcattccgccggcgcgcccgccatcgccgcgtgcgcccccgcgccccgctgtaattaccccgattaccaaatgaatctcgcgcttttgtgctcgccgggcggtgggtgcggggaggcagttctaatagttgtcattagggccgggggaggcggggcgccgggggctgagggtgggagcgcgggggtgggggaggcccgccattccctcgctggctcgcttgttcgctggcggtcccaggcggcgcgcaggccgctgctggctgctgagtaatg

SEQ ID NO: 241848 - DNA, 158 bp, Homo sapiens
  chrX:39868176-39868334
  hyper
ggctcccgctgccccgggcggcctcctcttcccggcctgccccaaagccaacactgtcacccggaacgtccccgccccccgccccgggtgcatgcatggtggaaactccggcttgcagcgaaacagagcgctgcgcgcgggcgcgcagggagcctcgc

SEQ ID NO: 241849 - DNA, 330 bp, Homo sapiens
  chrX:39871649-39871979
  hyper
ccccaggattagcgcggccaggaatccctctgcccgcagctgccgcggaggggttgagggttaaacagacaccgggcagaggagcgagcctgccggctgcggccggcgcggcgcggcgcggggagaggacgggagggaagagggcgcacgctacctagcctcccgacgagaagacgtctcctccccacgtcaggccgggctctcgcccactcggctggccgcctctgctccctggcctctcaagtctcagcggaaagaaacgtagcggctgccaaaagcaccccactccttttattgtccccataagcctatacacgtacactagccacc

SEQ ID NO: 241850 - DNA, 508 bp, Homo sapiens
  chrX:39873112-39873620
  hyper
ccgagctggcccacttggcacggaagggcaggcaggccaggcgacgcggcgcgagattccacagctcccgctccggaccgggggaaatcctggagtgccagagagcccggggagggggcgctccgggagcctctccttgaaaggcgggatgctttccccgttcctcccgcgcacgtgtcctcagcagagcaggcaagcgctgcgcgcctggggctgcgatcctcgggtgacagcgactgagagcgcgccctctccacccccacccccgccgtcgccgcctctcctggggagctccagtctccagggtgcgctcggggcaggccccaagagccagagaaacggaaaagtgccggggaggcgattaggaagagaagacattaaaaagcccagccctgaaagacaggcagccgagctgaaaaagacgcctgcgaacccccaccccgccgcccctcgcctactgcgcccagacggcccctccttgtcccggctgagcgcacccacccccggc

SEQ ID NO: 241851 - DNA, 807 bp, Homo sapiens
  chrX:39873680-39874487
  hyper
gcgcgcgcgcgcgcgctcgagtgccgggagggcagttgcgaaacgggctcttggctgcagcgcggcataatggaggtggctggaacaatgcgcgctttgtgcgcgcggggagttgttttccacccgcctcgccccccttgctcgggccgtatggcactttaatctccgccacgactcggcacaaatgcacttgtgtcctgcgggtcactgggggccgtgcggctggagccgcccccaccccgacccccgcggaacccaccgccggctgccccatcttccttcctgagcaccccccaccaccacctcaattcccggcgtgggccggtgagctggcgtggaagcttccgggcccgccggccacttttattttccgtgaagacggcccctcccccgctccacgagcgcgcgcgcgcacacacacacacacacacacacacacgccgcccgcaggccccacactcaccgccctctctcgcctagcctctcctcggcccgcctccgcccccgcccccgcccccgccccgcgctccggactcctgcgaacaatagtaaatgtcaacagattccgcgcggcgagtgtctgactcggccgagataagggtgcgcggttggccccgcgctcctcgtcgccgcggggggagcccaccctgaccccggctggaaggaaccggctgtgactaaacccgtgccgggagaggggggcgggagggcagggcaccagtcccagctcggtggggcagcctcgccaggagaccaggccctgccccgcccccaccccacttaacccgttgccgatgggggaaccta

SEQ ID NO: 241852 - DNA, 1038 bp, Homo sapiens
  chrX:39953599-39954637
  hyper
cccaggtcccccggcccgcacggttcacggcggacagaacccggggagcgtgacggtgcctgcggggtgggggtagggggcccacaggcactggccgctccgagcgcaccacgggtcctctccagctccggccccccgcgctcccaccagcccggctgccggggcacagtcacagctccgcgcgctgggcagtcctatttttatcttgtctaatcctaaactgggcggggagcacaggcgtcgtgcttagagaacaagagataggcgcgggaggcggggaggagcagccaggcagcgacgcgagcgggagcgagttaaagacacagtggaggcgaccgcgggcaggaagaaagagcgggctgcgcgggcctcgaggcgccgcacgcaacgcgccgccccgcgaagttacactcgcttccccgccgtccctcgctaccggcccctccccacttcccagcggcgctccccgcagcctggacagcgaggccccggcctgtgtgggaggcggaggccaggacggccctgcaaagggctggagagaatcgctaatgagctgtgcagcccattgatccggagaacacttcctaattaactctcagtcacctactggtgacagcgcctcaaaggacagcgctggggccagccgagccccagccgcgacttgccggccgggcgcctgctgcccaaaacccgcgcgctcccctaaacaccccaaggcaattggtgtgcgtggcggtgtatacccgcacactgaaggccagcctcggattaaacctggatggcatattaatcatcgccttccccccccactccgctctacgcgctgaaaccctgcccaaaataaacacgaaaaccaacactgcaaaacccacaccagataacaggtcgagagaggagtgggcagggtcaaggaacgagcgtattccctaagtgtccacgtacaggaatctttgaggctgacaattaaaatgccttccacgcaagcaattctgttggcaaaaccgaacccaacacttcgtaaggattgatttcggcccg

SEQ ID NO: 241853 - DNA, 1477 bp, Homo sapiens
  chrX:39954906-39956383
  hyper
acctatttgaagcgcgttggtttctttttaaggtttgtttctaaatacacataaccctcctccttccttcttcgctcttccattccccccacccccaccctccagacgccggcggcgcgcgccctggcgcgcgggcactcacagcctctagctggagatcgcggactttctggaaaagattcattaacagcaaattacgcctcgcccggccacggcctacacgctgccagactcgtccgtctccgggaccccgggaagggcccactcgagcgtgcgagcggcgggaagcccgccgggaccacgcgtgacttcggccgccctactccacacacggtgccccaaggctctctccgtaaacagcaggcgctcgtcaccgccgccgcgagcccccgagttggcggaggctctgcggcgcagccgcccgccggctccgagcgcgggccccgcggcgcctcgccctccccgccttggccgaggatcttgccccggtgcgcaagttcctcttcgcctacagcctccttgccacacgccctccgagtgggaccaacttcctccggccgcagactttcacacgcccatcagggctacccaccagactccccattgcccagcggagggcccaggtctcgcccgcccccgccctccctccacgacgctgcccccgcacaagcacattctacacccacccctgggggctcataacttaaaacctacgctgaacatcggggagggagaggagggggaaagcgggagggggatcgcagattataatcttaaaagaacatttacaaaacaaagcgtctgacctggctggcgggcgggccaagtcggaaccccttgctctgctcgatttcttagtagtttttttttttaatccacgtgattcgtgctttggggcaagccaagaaaaaacgggactcccctcccgagttgcgcggcagcggcggcaggtcgagctcggctcggcccgaggcactcgccacacaccctcgcgcacgcacacgccgacgttccacttggaggaacgaccggcccccggagaggcgagacgaggcggcggtggcggcggctgggggtttttacagttctttcccgagtcgaaaaagaaagcagacggcaacccgctgccctccccttcctgctcgcgagctaacgccgaacccagcttcccagcttccagcccacctcccccccctccgcccgactcgcggcgctcagcggcgaccgcgctcccgcgcacagacacacacaggctgcaaacttccactctgcgaactccctgctctcctcctggcccaccgggaggcgccaggcccccagccgcgccccctccctccctggtgcccacgcggggccgcttaggttggctgcattttaaataacatagctatgaaataaaaacgaaagcgagccaagcagccaaagggaagcgcgaggcaaaagcttcgcggggtacgctgcgggagggggccccggg

SEQ ID NO: 241854 - DNA, 1789 bp, Homo sapiens
  chrX:39956803-39958592
  hyper
ggctcggggcctccgggcaggtggcgacagccccgtgcgatcctccgggctcccgcagctggactgggcttggccgagctcagcagctcccgcgctgccgccgccgcccgcgctcgggcaggagccccagcgccatgttgacggttcgccgcgagcgcccgctcgggctgggtgtgtgtgagtgtgtgtgagtgttggccaagtcgtccctgcgcggcgacagcgcggcttgggctctccgcccggcggctcgcgggctccccctccgccgccgccgcccgcctagctcccgctctcggtcgcggtctgggctcctgcgcgtctcccccgcagccgccgagctcggcccgcgttcagcgaggagcgcagctctgcctcaccttgccgctgggagcccaggctccgtctgccgccgcacgccgcgatcccaacgcgtcccccctccctggttccctcctcttcctcctccccctccctccgcccgtcctccctcccgcccgccctacctccctccctcccaacagccgcctcccctccccccgcaggcgcagcgctcgggcgacagccgcccgcccgccgccgcctccagctctcgcaagtttgagctccgccagtctccgctcaccctccgctgcggcgcctccgcggcggggtttcgggaggggtgattccccaggaaaggtttgcccgagtttccccggccgtcatcgatgcacggcccggcacgttttggcctctctggatccgaaccccggaccacttgggtggcgccccccctcctcgtcccccggcctcccctccccagctcgggccgagttggctgcgcacgcccgacccgggcgcacgtcctgggcgagccggagaccgacttgggcggcggcggcggcgagggctgccggcagagccagagccgaagggatgggggcggcgggggcggctctcccagccgcgcgccgagactcccctcgctacccagaaggccagtggaggaccgcaattaccataaagcgcctcgcactccgctcagccaaagctgtcaaaccccagcggcagcagccgctgccgccgcctcttgccaccagcgctgcgctctcccggcctcgtcccctccgagacccagcggagcgtggcctgtgtgctcccgtgctcacccccaccccagtttgccccttcctcccagaggagccctttcccatttcggtgttaaaagctacctgaaaacaccaccccaggcaacggtggccgttccgcctgaactccgcgcccgagttccccggacgtttcaattgtgtgggaattgtttggaggtgggggaaggggggagcagcccgtggaggcaccgggaggcgtgtggggggcggtcggcgagcggagatccgcctgtatttctcccggttctcgagcattttcacggtctgtacctctgatggttggaggggctgcccaggcccctcgccccggcgttgggagattatctcccgcgttttattttccttgacagggagcaacttttggcttacaccgttcgccccataaatttccactcggtaacgtcgtgctgatcggtgcttggcggcggcgtacagcctgcgcccgcagcagttcaattcaattgacacgtattgagcttctccagcgcacccggcgcggctctgggcgcggggggagggcgggggcaggcgggagggagggggaagcggagaagcgaggttccggcctccccggagcgcaaagcctcaagggcgagccgagaagccctagttggtgaagctggcgggaaggggtagga

SEQ ID NO: 241855 - DNA, 972 bp, Homo sapiens
  chrX:39963955-39964927
  hyper
gttggggcctgccgcggacggattgtccctggggagctgaaaccgcccagcggggaaacccctcctctcgcccttccccgaaaagcttggccgcggtctaagctccgagcaagcgggtatccgctgacagccgggcctcacgtaaggcccacacgcgtcccattagtcagcccgagttcccctcgggcgagccgcctggcgcggccccaaggccgggctcaggcggggagagggtgcggggccgcagcgagctgcgggcggaggtgcgggctccgcggagcccggccaggctcggttccgcgttcctgggcccgcgggtaagctgagtcggcggggcaggccgctccctggctggcgccggggcgccaagctgcgcttcacgtgcccgccatatcagcagcagcggcggcggcggcgaggagggggtgctgggaggcgcgcggccgttcccgcggggtctccggaccccgcctccccgcccctccccgtgggggctgggccgagaccaccctgcggcccccatcccagcgcaagccgaaagcggcgctgccagacgcagagaggctcctggggcgccgttccgagagccgcgcggcggcagcagccaggggagggtgctcctcgcggccgccccgccgccgccgccgcagtcacggggaccggaagccctcgcgccgccccgagcggcctccgctggccccagggctgttccagacgagggctggccgcgcgtcacccctgatccctcctcgccccaggcgaccacccgggccctgcggtatcccggtgtaagccgagaggacccttcctgcggtccgatgagatgtccctgtccctctgctaccaccataagcacgcccccccgcaccgctcgcagctccgcagctgggaccggaggggcgcggagccgccactccggccgggcaggaacacctgctcccaggccctgcagctgggcgcgtgctgctgtga

SEQ ID NO: 241856 - DNA, 1324 bp, Homo sapiens
  chrX:39965257-39966581
  hyper
ggagtaggtcatggcggcaccggtactccacccgcccccctccacgtagggacgtagggtcggctgcggggctcggactttgccactccacctagggaagggccaatggacgctccccgtctcctccgtgtccggaggagatccggcggcggagctgacctgcaaggcttgccctgcctcacccaccccccacctccgtcccaccctccccgactctcctggcccagggcccggcccgggaaggcgttgttttgccagcgggagccgagcgagtgcacagagaaaagcctccctactctaatgagagtgcacacagcgctgcagcgaggaggatgattacccggcgggcggggggcgcgggctcgggccgcgggcggcgtgtgcggcggccccgcgggcccggagtccccgcctgtctggctgctaatcgcacgctttctgctgttacggaggcaggcgggagccggcggccgagcccagcgccgacgactcggcgggtgacacggaaacatggcgcagcgcccctcccccgcccgcgctcccgcctcccgccctccccgcgctcccgcctcccgcctcgcacttcctcccgcccgcgcggcttttgcagttttaatgctctgctttcggcctggcaccattacgctagcagccgcttctccgcggccccgcgcgtctctttcccctttgttttcggggtctatagaaaacgtttgcttttgtcccgagctctcgttaaaccaaacttgtggtggcaacggaaggcggtgcaggcggggaggggtccggggattttggcagtagccggccagagcgtggtggaaacttctctcgctgggttctccgctccctcccactccccctccccaacacagagccgccggcctcccgacgcttctcccttcgcccccgagaggccccagtgctccaggaaggtctgggccacagagactgtgaccaggggtgaagaactcagagtgcgtgtctgtgagccccgaggttttggcactcgatgaccttgctccctgcagccccgacttacctctttccctttggtcattcggggctttgtatcagtcggtgaagaaggggagggaagagaaagtgtttctttcgtgcgtgtggtttttattttaaggatttgttggaatctgtcacccccaactgcacagccccctcccgtataggatctagggcgaaagcggggaaacgtcggatttagggggaaagggtcgggtcagaaacctagccctggaggctggatcgtactctcctggcgggctcagccacacttggtcggcacgcggggcggggcgacccagca

SEQ ID NO: 241857 - DNA, 905 bp, Homo sapiens
  chrX:39968298-39969203
  hyper
ccgcacgattcgctcggcggagcgctgcgctgctgggctgggagggcggcggggaggaggagagacgagggggcgggaggcgaacccgggctgcgcgccaagaggcccggagccgcagattagtcaccgctcggctctgcgctcccgggtgcgcccgggaaccgggagggcaggcgtcggccccgctcagccgggctccccggtcctcggcgcgggtgcccccacccccacccccgcgcgctcctggcgcggctggctcgactctcggggacccgcgcagccgagatccacttgtcaggtcaagggcaggacagaaactctgcaagcggagtcttgcttgcgaacaggaaatttctccttgatgaggtgctgcccctcccccacgccgggcttcaaaacaaaactccagagcgggcggccaggtacccagcctcgctcgccatggccggcgacctccgctcctcggccccggccccgggcggcggagccaagccaacagagccggcggacggactcggcgccggccccgcggagggcgccaggctgccaccctccggggcccggacggggtcggcgggggtgcggagccccggagcccccgcgcctccccaggttctacagccaccgagcggttttgcggagctgcccgaggccgccgggtcagcggctccccggagggcgtggggggcggggaggccgcgcggcgccgccgactcggcgaatcccgctgcgggagcccgggagggctgcgagctcggcctggcaaagttcctgtggaaactccatgttttgaaactcctgcggcgtcgcagaaggagggggagaggggagcgcgggaagcgcgcgggggcggtctgcacccgcctctccccgccggggagtgggttccgcggccccccgggcct

SEQ ID NO: 241858 - DNA, 665 bp, Homo sapiens
  chrX:40005421-40006086
  hyper
gcccgctctccgcacggtagcctgatccatctcgtgggcgcggaggcggggcgcggggctccgctcccgcggaggcgcggagccggggctggggagcccggtgcctccccccacggccctgaggtcctccctgcgcccccactctgtttaacccccaggtggggagaggaccccgagactgcacacagcgcgcccggggccctgccggggcctgagcgggcgggggacagtgtccgggaggagggagggccgagaggctgatttaaaggttctcaccgggaagcgagcgaggcacagacctgagagccgccgcgcggtgaaatccgaggagctctcttggcgaggaggggctgtcagaggccatttatctctcgccagagtggaggctcagctcccacaccgcccgcgagtaacaatggcagcgatcagcagctctgcacgcgcttcagtgcatgaatggattgcggaagatgcctgcgtccgctccgctcaggaggctctaggagcgccccctccccgcccgccgcgcccgcccccgtggcctccctaggccctgcgggcgcctcggggttcgcaagctgggccctgcggcgcgatcactctcacccagaacccccgccgccgttcccagggccttggcacctcgccaccgagtgtcattgggg

SEQ ID NO: 241859 - DNA, 2885 bp, Homo sapiens
  chrX:40012143-40015028
  hyper
aaaagccgagagggcgggaggagacagggagacttccgcgggaggccgatggtcaaagtggggggtgaaaccgctcagggtgaccgggctggagacccaggaacccgattcggcgcgaaggtgccgcgcgagttccagcgagcagcctgcccggccaagtggcgcctgcccagccgtcggccgtgccagcttcctgccctgcccaggaccgcggagcagtcggggacgccgccgcaggctggcccggaatcgcaggacagcggcggggggagggggtagccaggccgcaagtaaactcgcactagagctttctgcacacctccgccctagagagggggcccggacccccggtctgtgaggcgtcggctttggccttccaaccttggggtgcgcgaggaagcaaagacccagggggcacccccaccctcgcccaaggcccgagggtgggggacagctgaaatgtctttggtcttgtttgatgaccgcttggcggatctgctcccatccgggttctgccgttccgagagtgccgggtcagtgatacccaggccggtctgagcaggcatgtggatgagcaaaagcaaatctgtcgctcctccgaccgccacccctcacttaacctttcctgcatccaaggaaggggagggcacccagactctgccccaccccccgcggggcgctccctctgcctcggaagctgagactaagagcgagggttttccccctttcccctgggctcgctgggtttctaacttcctctaaacctccctcctcgctccgaaaagccccgaggagaggagctgagaggaagcacgccgctagtgtgcaaaatgaagaccatgtgtgaggacggcggcatcagagtgcagccgcgggggttagggggtggcaaaggcccccgcgcggccggaggctcggggccgcagcagccagtgcctctgctctgcgttggggactcggagccgcagcgagaggcagtggagaggcagggctggcctcgtggcgggaggcgaggagggggtgcgagggctgccgcgccgtggggggcagggggcggggacgcagccccggcttcctgggccgcagctgcgaccgagggcgcaagagcagatcgtgctctgcggcggtggcggctcgggcccgccgctctagcagctgagaatcaacaaagggaggcggcgggggaggggcgccaccgagcgttcgctggctgctctggaataataaaaaataattaataatgataataagagaaaaatcccccggctttcatggctctgggtttccgtgtggctgcagcgggaagcgcgctgtccttgaggcggcctctctcgcctggcctgcccgcccctccccctcctcgccccctcccctccccaggaaccgggaagagaaaggtctgcagctgacaaatattatccattctccccatcgatcgcggagtgtacagatgtgagcgcttgatgtgcccgcggagcggcggatcctccctgctcgctcgctctcgcccaggctccgctcgccgtccccctcctccccctttgttctcctcccctttccctctctttaaatagatttcagggcgctgcctgttggagagcagctggcgatctctcccgagagagggagcgagcgaagcccgaggtgccctgtcaccagcctcccctcccccacctcggcttttctctacgtcccccccaccccacctttctccagtttccaaaatagaaaacaccgggaacacccacgtccactgcaccgcgagcccctgggagcctttggacccctcgtgctgttccttgtgtctgtgtctgtgcagaggaagggcagtgcagggaggggacccagggccgcggcagaagagccaagggtccggatctttccctggcagcagcagggacgcagcgtgggtcacgctaacagggtacagtttacccattagggaaagtcggcggagacggccctgttattcctcttttgcagatggcagattaatccggcagcacccggcctcaaagggaccggctgctcggcaaagggttaacccgtcggccggtaatcgtggacacgcgcgcacacacacacacgcacgcgcgcgcgcgtcctctccgcctgcccgagcgcccgccgcggcccgcagtgcgcccggggctgggggagtagctgcgggaggggagggggtcgggggaggggcggggcgggcttaaccaggccgctcgactgagccggggccacctcgccgtctgtcacttaaatgattgtcctccgctccgctcagtgcggtcagtacgggctgttaacaggcagttgcaatcagtttccgaaaggtcagccaaggtcctccggctctcgcagacggaaggcattacgaaaccgcttttgtatctgcaggcactttagaaaaagaggcgagaaggggcgcaccgcagtgccgcggctgctgcgaccgggggagagggtcgggggctgcggagcagaggagtccgcacccccgcggccagggtcaggcggcgtggatatcacccgcggagtgacccagggcctccgggtttcggtggggaagcaggaagggggtggggagcaggcggcaagggaaggaggagtgggaggaagtgggagaggcgtcctggctcctctcctcacccagccaacagcccacacccggacccagacgggagcgggcggccttggacgcgaggagaccccactcggactctcaggccctcctggcgcctggaagtagggagggggtgtgggggggggaaagaccctcgccgagcgagcgagtcccagcgcggtgtctgaagacgctgctgccgccgccgctagaagtcgtccatcagcaaccagtccaacctgccagtgataatgtgcgatcaacacca

SEQ ID NO: 241860 - DNA, 573 bp, Homo sapiens
  chrX:40017448-40018021
  hyper
gaagtggcaggactggccctcggggtccccgtgggtaaaggaggagcggcttcgcgccctgggacagcgcgcgccccggctgacacggggctgtcgccgcttctcccccggacgcgggcggctgcgcaccggccgccatcttggcccggctgcgcaggcggcgctgcccccggcggtaggaccgcggagccgcaggctgggccggggctgccgcgcgggcgttcccgggctgccggggggcgctccctcccgaggcccccctccccgctgcgggccacgctgacccaggtcggggacgatggggcggccgtccctggtgaaagcgtggcctgtagtgtcgcccctcctcgaaacgctggagcggattttaatcctgagaaacgacctctggttcccggactcccgcgatggtcaacgtgttatcgcttctcccgcgcaccccagaactctgtccccagaggcaacctgccgaggcagctgggggtggggggcgaggcctacccaccgttcacagggcgctgttgaggccagagaggatttgagagttaccacggtttagggctcctgattgga

SEQ ID NO: 241861 - DNA, 1271 bp, Homo sapiens
  chrX:40030832-40032103
  hyper
gagcggatggaaaccgaggcacgcagccctcgaccccggccaggcgtggagtaggggagcagggggtgccccgcgtgggcgcaccctaagaaaccagtgcggacatggcgagcgagaccagagcgcagttgtgtgtggtttttccccaggtttttattcttccagccctgtggaaaggaggagagccgcaacccggagagggagccggaaagaaacacttaatcaccggcgtctcgctgctcgtcacgcgaagatggcagcggctcccctgggtttcaaggttccgggaaaggcgtgtgttctgccttaaggcgcgcgggctgatgcgctctctccctcggctcggcggccggctccggctcacagagcctctctcaacgccggcaagtgcagccgggccgcccagcccccaggccagcctggccccctctgggcctggggttggcgagggcagctgggcgtctgcgctgcccagcccagccgcggatccatggggtttcgcgagctgaaagtaaaggcttgagggagtggggacacccacaccgacccgcggcacgcaggggagtcaagctgcggccaatgcaagacgagcagggtagactactactagcggtggccggaggctcagccaccttcgcgggagaggggatttaccgccaccctcatccacgcgcaggccccaccgcccggtcctctcctctgatccccgggccattgcgaaacacggagcgaacaggtcctcgccagcagccgtcatttcccgggaagatgggaacccacaagcctgactgtgcttcctaaggatactagcgtgcgcgcagaccttggggggaaagagggcagcgcggtctccccgacccggactcttccctggcgcagcacacaaccgccacgggcttccgaagcgcccgagcggggaggaggaaggaaaagcggaggcccgggaggcgggctgcgcgcttggaagccgtgtgtgtttatgtgtctgcgcgcgcgccctggccggacgggtgttgaggggagagtgatcgtgagcaacccggaaccagcagtcccaacctggactgacgaactgggctctccagtcctgggccgtggggctccatgcctcgggctggcgggacaagcggcggggagcccggagcttcggagccgccgccgggcatctagccagctccgcgggagaagcccgggggcgcgtcgggagccaggggactggtgtgaactagccgcccccgcaggcggacgtttagctccggcacccgggagca

SEQ ID NO: 241862 - DNA, 322 bp, Homo sapiens
  chrX:40033573-40033895
  hyper
ggcttccccttcacagcctccggcccctacaagacgctcccagccagcctccggaacaaacccgcagccctaaatcagaattccagttctcgagcgccacccggagagttcacatttcccctcctccgaggccgcgtggtgcgcaagaaagagcccgagggcggcggcagcacacgtctgggcagccccctccccgtacccagcagcgtgtacgcaggaaaagaaaaagccaagagaaaaacgtggactgtaaaagccaaaacgcagaaccatctactactaactaccgacaaccccaggcgggagtttgcaaggagtaagc

SEQ ID NO: 241863 - DNA, 354 bp, Homo sapiens
  chrX:40034219-40034573
  hyper
ctggtccctctgagaatccacgttttctagcccgagaaggggcaggcggccctcatggcgcctccttcggcggtttcctggcgaagcgcccatcctccccaagcaccaggaacggaggccgtccatattaatactcgcgggcagcctgttctgacctatactgtcattttttccatcggtcgggatcgggctgggggtggggtggggcgggggctctcctccgaggggctcagcacggatcgttgggttttccccggcgaacttaacacggaggcaaaaggggcagatggaaaccaggccccggctggccccgcgcgcgtaagcgcggcactcagcagctcgacgcaaagccag

SEQ ID NO: 241864 - DNA, 47 bp, Homo sapiens
  chrX:40035233-40035280
  hyper
agtacatttcgggccactgcggggggcggagggacaccaaagacagg

SEQ ID NO: 241865 - DNA, 721 bp, Homo sapiens
  chrX:40035460-40036181
  hyper
ggctcccacagtcctggggagcccccagagctagcccgcgtcttccctcgcccgctcttccgggggaaagggaggctgtttgtgtggtgtgtagccccgctccggcttgcacccccgcgagccacctcgcagccctccccggcctcggcctcacggatcccctcccggagtagccccgcgggcccccccgccatgcgtaatggggcgcccctgggacgcaggcggggatggcggttccggtcgttccgggatttgcgtgcaagaagaaaacaaggccggcgactacaagagcggcgactccattcttggggttcagacgccctcgcagcctccgcgtcggttccgctctcgccccgggagcccgcttccgtgtccctgcccccgccccccaacgattcctcgtccggcccgtgccgcaccacgcggagctccgcgcgccctggctcccacaccggtccctccataactcgcgctcctccctcgctccgggctcggggagccgctcgctcccagcgcccagagtcagccggttccaccttcggctgcgagagccgccgccccgcgccacccccgcccggcccggcccttgtcccagcccggctcccccgccagctgcgccgccaccgccgcacgtgacccgcccccgtcgcggcttccgctgagctgcctgttccggggcacaaacaatttttgctctgacgcggggtctctcgggggccct

SEQ ID NO: 241866 - DNA, 186 bp, Homo sapiens
  chrX:40126402-40126588
  hyper
ccgggacgcgcagccgcccggcgcagaggaagcccgggacgctggggacaccgcctggagcctccgcgcatagcaccggggcgttttttccttccagctggaggcttcccatttaacctctaaggtgccagaagatccggatccctcgcgggcaggcctttggctggctccgggctaggctgggac

SEQ ID NO: 241867 - DNA, 217 bp, Homo sapiens
  chrX:40506425-40506642
  hyper
agggagggacgtcgcggtgggccccgcatcgcggagggaacaggacacttgcgctctgggtctgggacaggaacggggatgaggaggggtggggtgggggcggtggtcaaggccccgagccaggtgctcacctggcgggcgcgagggctgcaccgtgagccgccgcggcagacggcgcggggccccaggccgggggctgcggcgagtaggccgcggt

SEQ ID NO: 241868 - DNA, 118 bp, Homo sapiens
  chrX:40506870-40506988
  hyper
ggcagcgacgcctgcgcctgcgcggcgcggtgccaccgatcccggggcggggcatcttgacttccggggcacgtcggctccaccccacttgggtgacgtctgacgtctgacgtctaac

SEQ ID NO: 241869 - DNA, 229 bp, Homo sapiens
  chrX:40595083-40595312
  hyper
gggggcgcgtgggagtgaggcggtacctgtgagcgcgcgggagagcggaaaagggagccgcgcgccgccggaaaccagggtgagggctgagccggagtcgtcaccgggaacgtcagcagttgccccgcccttaccctcgccgctctccctcccgcctccgccccctggcgttgtaaaggcgacaatttgcccagagaaatccaccatcgcttcctaagtggggcacaaa

SEQ ID NO: 241870 - DNA, 64 bp, Homo sapiens
  chrX:40944723-40944787
  hyper
ggacgggcatccgcggctgcggacgctagtctccgccgccgccggagccgcaacctctccgcac

SEQ ID NO: 241871 - DNA, 427 bp, Homo sapiens; identical to SEQ ID NO: 206262
  chrX:41135195-41135622
  hyper

SEQ ID NO: 241872 - DNA, 49 bp, Homo sapiens
  chrX:44202870-44202919
  hyper
gagggcccggcaggcagcggcgcctcccggccgtgttgtttggccccca

SEQ ID NO: 241873 - DNA, 80 bp, Homo sapiens
  chrX:44402318-44402398
  hyper
gggacttgtagtccgttgccttccgcaactaggaagggggagggaccgcccctcctagaatttccgtaacttgaatttga

SEQ ID NO: 241874 - DNA, 136 bp, Homo sapiens
  chrX:44732334-44732470
  hyper
aggtcacgtgaggcgtgcgggccgcgccgattggtggcgccagccgggcggggagggggggtcacggcggcggcgtggggttcgctgtgtgacacaattacaacaactttgtgctggtgccggggaagtttgtgtc

SEQ ID NO: 241875 - DNA, 175 bp, Homo sapiens; identical to SEQ ID NO: 206263
  chrX:44733192-44733367
  hyper

SEQ ID NO: 241876 - DNA, 37 bp, Homo sapiens; identical to SEQ ID NO: 206264
  chrX:54834568-54834605
  hyper

SEQ ID NO: 241877 - DNA, 218 bp, Homo sapiens
  chrX:68758220-68758438
  hyper
gagccctgactgctgttccccgacaccggccgctgggtggcgctgtggctcctcctacccaggctggaggcaccagggaggcggaggcgcagccgcggaactgggcctggcgctagggtccgtgggcgcctgcagagcgggttcttcctcgtcggttcctttctcccacttcgcgcgcttctcccgcgttcaggcccgttcccatccctaacccggcc

SEQ ID NO: 241878 - DNA, 32 bp, Homo sapiens
  chrX:71497207-71497239
  hyper
cgagttgaggaaccgccgcggaaagagggtgt

SEQ ID NO: 241879 - DNA, 230 bp, Homo sapiens
  chrX:71524762-71524992
  hyper
aatcgcatttccatcggcatccctggctctgcttccccggctttctgccctcctccaccaccctctagcccgttcgtgggcaaaacttggcaacgcggaaacgtcccagcccgctctccaagccgcgagctgaccactgcgaaacggctgcgacaggcggctgggaaacctagagcaacaagtgccttctcgccggctgatgcctggcggccccccggccaccagttccc

SEQ ID NO: 241880 - DNA, 1886 bp, Homo sapiens
  chrX:71525285-71527171
  hyper
gtttgcggacagctcggctgccctcctcgccgcatcccagatggagccgcggaaccgggggcggccgggagcatcccttgcacggcgggcgcgtgcacccaggccaccggggccctgagcgtccgttcccgcaagtgctgtatcaggaactgatcttagagacaggatggacaggcaggaaggggcacggggtgtcggcctccgcggcgagtccgcactccggcgccggctgctgccactctcgcgcctgatcaacacttactgagcgcccgctgagcatccgacgcggcagcaggctgagcctaccccctagccaagccgcctgcggtcagtgctaaaaccccgctaggagaagagtgagagaggctcggagaggtgcggtaacttgcccaaggtcacagcgctagaaagtggcggagccgggattcgcagccaggtctctctgactccaagtccggtgctctgcgaagcagggactcggcgcgcggctcgccagcccgcgtttatagggagaggggtgtgcgcgtgggtgtgtgtgtgtgggcgtgtgtcgggggaggggagggctgaggtcgactgggcagtagaggcaagttgcccaaattcgctaacttccatcccgcaattccgctgaactcggcccgaaaagccccctcttgcctcaattccccgaagtaaatctgagctttgtgcagctccggagccagagcgtccagatgcggtccgggagattagcaaagtcggtggaagccaagctggagaaagcgcgggcgcagggagaaaaggtgctgccgtctccccgggagaagcgggcacccggccccgctggccggcaggggggcgcgctggcaagcgaacccgagcgctggcgggcgggcgggcgggcggcccctcgcccccagcagagcagctttccaacagaaagcaagtctccccagaaccctccggcccgcctggcggccgcccactccccatacccgctccacgggagtcctcggccccgccgcccagcccggcgcccagcccggcggcccggcttacctctgagaagccgcctgccctggagagagggaagcgcggagctcggtgagccgcaagagaggcggcggagcccccagcccctggcacgcacgccgccgccaccgctaccgcgaaccggtcgcgctcagcgcccgcggccgcgccgttggccacccgaccccggggcgcctgggaaaagcccgcaccgcgccgcgccgccgctgcaccgcacagtgccgcgccaagcagcccctgaccgagctggtgcccgcccgcccgcccgcagcttcggcgccggactccggggcggtggcggtggcggccaccgcgctcccttcccggcgctggggacccggctctcaagcccccattgccgcccggagagccctgacgcacacgcacacggcagcagactggcctcggctaggaatcccaggaaggacagaccctttttttccctttttttttctcccctcaatttccacgtctttataaccggcttagggcattattagcacatgtcctggctcgtgggcgagttggtggcaaaatctgaactggatactcacggagggcccgcgcgggtgctgtgccgtccgctgctctcttcctcctcaccgagaactgcccctcgccggcggactacaagagggcagccgggcagagcgagcttcctctcggcagctcagcggtgccccttctgcagctttgccgccgggcacatttttatagcagcggctggcgtctgtggccctttaaaggcgctcgagctggtgcagtcaccgcggatcgtgtgaaagcaaagggccggctggggaacggagtccacgcggccacgcgagtccggcagccctgtggaccggcca

SEQ ID NO: 241881 - DNA, 203 bp, Homo sapiens
  chrX:73164342-73164545
  hyper
cgaggctacacactttgggatcgcgtggcctgagtcgggggagtaaccggcctgtattccatttttctctctccagtctcttcaaaatatcggagaataatttctttctcgctgatcgcctaacttctactgacgaagcttggaagttgcagaaggtagctcctaggagggatatatgggtcgttctttcctttttccttatt

SEQ ID NO: 241882 - DNA, 83 bp, Homo sapiens
  chrX:92928028-92928111
  hyper
aacggggcccgccgcgcccttctggaaggctcaggtaccctcttctttctatacaagcggctgcggctgctagtgctgccgct

SEQ ID NO: 241883 - DNA, 982 bp, Homo sapiens
  chrX:92928171-92929153
  hyper
gtcactagtgctgctgctagagctactgctgtcagattcttccccagaatcactagtcgagctagccatctcctcttcggcaaccccatgggcgacaggttccgagaccattttaaaatctgcttctgccatcttgcaagcctacaaactctaccagggagaccgcgcgaccagagatgggcagaaaatgactcacggatgcttgagtggcggcggcggaggcccgggctgcggaggtggcagcggcgatggcagcagcggcgcagagcggagctggagctggggatgcagaggccggcgctgaggtggcagcggcagtggaggcttgggcgacagcggtggcggcaaggcctctcccggctgcagctagagtgccgagatgtaccgcagccgaatggcgcagtatgagaccccgagatctcttctcgttttagatcgcgagccccctccccttgcagtcagacctcccgttaatttcgttcccagtgtgcctttagttcgctcctcatttgctggtccaccttaattgacaaactgtacgcccaacgaacggccaaacgccactactcctggctccgcccaccttcccagacgccgctcgctggctgaggtgcgaccccttggaaggtgtccccctgccccccaaaaagtctatatttatagttttataattaaaaaagaaaaaaaagcgtagacatgaggtaaaaataccagccatagttcctaacaagggcaaaagaggcgtgtcttccttctcccatccgcccaccctgaattcccgtttagtttgtcacgggtctcttgacaaaaagctgtaaaaaaaaaaaaaaaaaaaaaaaaaaattgaatgaaaatggtccaaatggcgtcattgggtagtgtgactatggacgatttaaaaacaaaacgattttctctaaatattctatgagcatgcatttttacactggataaaaaaggggagagtcggttattggcagag

SEQ ID NO: 241884 - DNA, 314 bp, Homo sapiens
  chrX:95940028-95940342
  hyper
cagggcacaggtgacagggccggagaaagatggagcagcccggggcggcggcgtcgggagcgggaggcggcagcgaggaacccggtgggggccggagcaacaagcggagcgcggggaaccgggccgccaatgaagaggaaacgaaaaacaaacccaaattggtgagtgctcccgcagcccccgccggccttagggacagggagagccccgggatcctcctgccattgaacacgggggcacccggggccccctcccaaggatgaccgcgacctcgctgtgcaactcggggagccgctaaaggagtggccacgccg

SEQ ID NO: 241885 - DNA, 434 bp, Homo sapiens
  chrX:102862894-102863328
  hyper
aaccagctgtctgagctgcccgggcagcgggggagcagcgagcgggcttccgcgagccggagaaggcacaggcctgtcccgggtcccggcaggtcagtgtgaaggtgggcgctgccggcggaaccacggaaggggtggaggtggctggcagtaggagtagggaggggcggagaaaggatccgggagactggtgaggagggggaagcggagcggtcggaggcaagggcgggggagcctggcccgccttctcgacgaccccctgcactgagccgtccatccattttagtactggaaatggagtacgggggggcaaccccgcagtgcaacagtgaaacgtagacatattctggaaataaccgcctctcacaatctgctcccatggaaacatctgacctccgcaaaaacggggtggcgctgggacaggttgcctccag

SEQ ID NO: 241886 - DNA, 41 bp, Homo sapiens; identical to SEQ ID NO: 206274
  chrX:107003164-107003205
  hyper

SEQ ID NO: 241887 - DNA, 115 bp, Homo sapiens
  chrX:110342113-110342228
  hyper
cgtacttaagcctccgctacgcgtcccccacccccacccccacctgccgggggctaggcgtttccctctgcagggcctggaatggactcgtctgccaagtcggcactacacagct

SEQ ID NO: 241888 - DNA, 296 bp, Homo sapiens
  chrX:110924332-110924628
  hyper
cctggcggccattacggatttccgcctccctcacagaaggcagtcactgcaacgtgcgtggcctcagttgcgtcatatccggcccttgcgatcagggcttgaggaacccgcgccatgaagtgcgtgtttgttaccgtagggaccaccagctttgacgacctcattgcgtgtgtgtcggcgcccgacagtctgcaagtgagtgagggaggcgagcaggcggcggcttggctcgccacccgccatctccggccatactgccagccgcgttagccttgcctgaccgtcgcgctcggaaa

SEQ ID NO: 241889 - DNA, 51 bp, Homo sapiens; identical to SEQ ID NO: 206322
  chrX:130110130-130110181
  hyper

SEQ ID NO: 241890 - DNA, 731 bp, Homo sapiens
  chrY:2655225-2655956
  hyper
ttcggcagcatcttcgccttccgacgaggtcgatacttataattcgggtatttctctctgtgcatggcctgtaatttctgtgcctcctggaagaatggccatttttcggcttcagtaagcattttccactggtatcccagctgcttgctgatctctgagtttcgcattctgggattctctagagccatcttgcgcctctgatcgcgagaccacacgatgaatgcgttcatgggtcgcttcactctatcctggacgttgcctttactgttttctcccgtttcacactgatacttagagttacagctttcagtgcaaaggaaggaagagcttctccggagagcgggaatattctcttgcacagctggactgtaatcatcgctgttgaatacgcttaacatagcagaagcatatgattgcattgtcaaaaacaaggagagtgcgacaaaattgaaaggtgccagagttcgaaacttattttactatccaaaactcacttctaccagattctttgttacgttaacttttgtaatgaaacttgcatttctccgccctcaacaccccctcaaccccgcccaaccagcctaccccctagtaccctgacaatgtattcattctcaagcaaaacatggtaattcagtaacgttgactacttgccctgctgatctgcctccctgactgctctactgctgtcctgaaaaatgcgaatttgacttaatcgccaattttttcat

SEQ ID NO: 241891 - DNA, 191 bp, Homo sapiens; identical to SEQ ID NO: 206333
  chrY:2802951-2803142
  hyper

SEQ ID NO: 241892 - DNA, 39 bp, Homo sapiens; identical to SEQ ID NO: 206334
  chrY:2804296-2804335
  hyper

SEQ ID NO: 241893 - DNA, 169 bp, Homo sapiens
  chrY:4869597-4869766
  hyper
gcgtagcgataaaacggctcttttttttttcgaggaaagtaatgtaccttttaaaagaggttcatcggaaaatgtgactttttaaaagcgagcagccgcaaacgggtgcattttttagactttagaagagcggagcggcagtccgcccgggttgcggctgggactcgca

SEQ ID NO: 241894 - DNA, 83 bp, Homo sapiens; identical to SEQ ID NO: 206335
  chrY:6778627-6778710
  hyper

SEQ ID NO: 241895 - DNA, 49 bp, Homo sapiens
  chrY:7140718-7140767
  hyper
gcatagagagcgggcgtcaccactagggggatatgctacccacaaaatg

SEQ ID NO: 241896 - DNA, 297 bp, Homo sapiens
  chrY:7140797-7141094
  hyper
ggggccagaaatccaaagcctgagccaggttcagacttcctgactcccactcccggttagctgtgcaaggatggctcggcctggtccccctaaaaatgtgtccgttctaacttagaggccgctttggctctcagaaagcccccctgacctgaggactgagggactggagaccgctttcagtcgcagaatcgctgagatccctcaaaacaaaggcgtttccagtttgaccccttgctgctcaatgtgtggttggccaaccgacagcctggggcgccctggttgcgggtcaggggagca

SEQ ID NO: 241897 - DNA, 265 bp, Homo sapiens; identical to SEQ ID NO: 206336
  chrY:14532892-14533157
  hyper

SEQ ID NO: 241898 - DNA, 90 bp, Homo sapiens
  chrY:14533187-14533277
  hyper
ccccagcctctgcctctgggttccgcccgcgccccgctgtacgccacccaccctcgagacctcctaggcgttcgggcagcctcagcgccc

SEQ ID NO: 241899 - DNA, 361 bp, Homo sapiens
  chrY:14533307-14533668
  hyper
cactgcatacgatcccctgcaccccgctgcagcccccgcacctcttccggcgccctggctgcctctgcccaaagccggcgctgggggcccggagggcagcgattggcctctgtcctgaagcccggccccgcctccgcccagccctggtaggcgcgggtcagctcctcagccctgcagcccctgcccgcaagcccgcgcgcctcctggtgtccagccccagctaccaaggagagagacccaggaaccgccagtggctgcgctccacgccggcgcccagcccctcgcccaccgcggcccccttggcagttggcggtttctaggtttggacatttaacctttaattggccggccccaaagtaaa

SEQ ID NO: 241900 - DNA, 34 bp, Homo sapiens; identical to SEQ ID NO: 206340
  chrY:14774179-14774213
  hyper

SEQ ID NO: 241901 - DNA, 113 bp, Homo sapiens; identical to SEQ ID NO: 206341
  chrY:15591519-15591632
  hyper

SEQ ID NO: 241902 - DNA, 229 bp, Homo sapiens; identical to SEQ ID NO: 206342
  chrY:15863195-15863424
  hyper

SEQ ID NO: 241903 - DNA, 460 bp, Homo sapiens
  chrY:15863656-15864116
  hyper
ccctcgcatccgatcggcagccatggtgcccgaggtgcccggcgcggtcctgaccctctgcctctggctggaggcctcggagggctgcctggcggccggccccggagcagctgctgctcagctgctggacgagtcgctgtctgccgggagcgtcctgcgcgcccgctgcgcctccaggtgcctaagcttgccaatcatacgcatctctgccttcttccagcacttccaggttagtggagactcccgcccgccccgggttctttctggtgctgcggccgcggcgggagtgcacccgggcgcgagagtgcacccgggcgcgcgccgaccagcctaggcgcgaaaagttttcggccagcgcagcgagctgacctggcttctcctgggcgtggatcttacagtcggggtgcttaaatcgtgttttccagcctcctcccggctcccgatacgaaaaagaagcccg

SEQ ID NO: 241904 - DNA, 512 bp, Homo sapiens
  chrY:16635744-16636256
  hyper
cgcgctggaaaccccgcgtgaagatgaaatgactgtagctccgtgctgctcctccaaactcgggagcggtatccatgcacccctttcccgtgtgtgtgggttacgacgtgggtgggagtggtgaggcaagccgcaaaagtggggtagagctggtggttttgcttcttcggaagcctttgagtgtggcctggaccttagatgggggtgcagggcggtttgccgctgccaccctcggcaccatctctgaactgcccgcttttccggaggagcggaaaagttggaagccgaaaagacaggcgcccggagccctggtctaggtatcaggtgatccggagccctagtcggtgcccactaagaacaccccttctcccatcgggggttcggaggagtgttaagcctgcgggtctgccagtccctaaggtagggatgggggaggggtctgaggaatccgttccaataggcacaccatccccacagccctagaaaaggcaaccaccacccgctccttcctc

SEQ ID NO: 241905 - DNA, 61 bp, Homo sapiens; identical to SEQ ID NO: 206346
  chrY:21729023-21729084
  hyper

SEQ ID NO: 241906 - DNA, 44 bp, Homo sapiens; identical to SEQ ID NO: 206347
  AC209420.3_23583-33864:1609-1653
  hyper

SEQ ID NO: 241907 - DNA, 625 bp, Homo sapiens
  AC211344.3_7702-13588:3923-4548
  hyper
cagaactgggacagtaaaggcgtcactgctgcaaccacagggcgccagcctcccgcatccctgagtgctggtgctggagatgccgcctccgccggccaagcgctgctgctgctgctgctgctgctgctcgcatgggccgtgcatgccgctttccgttccaagttgggcaggtgctgctgacagggaagctgagggcgtctgcctgcaccgccgttggcagcttctccaatgcaaggcagacccggcctcctaaggaggggtttctccaggaagttaaggtgcttagacggtgaagaacgaaacggcccacaacagtccttctatttcgctgctttgtacaaacaccgttctgcccacacctcaccttactgccctcatagtgcagctgagccttgtagaggtgaatccccactccctccagggcccagcccgcagcttatcagcaaccgccaggaggcggggaggcgtccactcttgctgcgtcgctttcctggttgtaaagctcgtgggtgaacattgcaaacttaaccagcaaaaaccaccggagataaaataggaaagacaaaggaaagaggaggaacacgcatttaacacacagcatctcgggaaggaagaaaagacagac

SEQ ID NO: 241908 - DNA, 540 bp, Homo sapiens
  AC241851.2_88-34049:15063-15603
  hyper
cttttggcccccggcgccgcggctttttgcggctttttgccgccgcgggtttttcctgccgcggcttcttgcccccaccgcccgggctttttgcgccgcggctttttgctgctatttgtccctgccaccgcggcgttttgcccccgcagccgcggctccttgccccctacgcggcttcctgcctccgccaccgtggctttttatcaccccagccgctttttgaaccccccgccgcgggtttttgccgccgcggcttcttgcccccctcgccgcggctttttacccccacagcggcggctttctgcccctgcctctgagggtttttgcggctttatgtccccgctgtcgtggctttttgccgccgcggcttttggccccctccgccgcggctttttgcggcttttggcacccaacgccgcggctttttggggcttttggtccccgccaccggggcttttttcccccaccgccgcaggtttttcccgcccctgctttttgcccccgccaccgcggcttcttacccccgccaccgcgactttt

SEQ ID NO: 241909 - DNA, 98 bp, Homo sapiens; identical to SEQ ID NO: 206351
  AC241851.2_88-34049:15843-15941
  hyper

SEQ ID NO: 241910 - DNA, 199 bp, Homo sapiens
  AEKP01168736.1_1-4752:1589-1788
  hyper
tggcattggaggggtgggaacgtggacggcggctgagcggggggcgcgtgcaggtcggagccggcaggtgaggagccagggtctaagctagggcccggggtccaaaggaaaggctttcagatctgagctccgcggctctggcggcggtggagctgggagcccgcggtggccggctggggacgggggcaggagcagaggg

SEQ ID NO: 241911 - DNA, 738 bp, Homo sapiens
  AEKP01168736.1_1-4752:1848-2586
  hyper
cctgggcgggctggccggcgcggctgcgctgaccggggcgctcagctttgtgctcctggcggccgccatcggcacggacttctggtatatcattgacaccgagcggctggagaggactggcccgggggcgcaggacctgctggggtccatcaatcgcagccagcccgagcctctgagctcccactccggcctctggcggacctgccggggtaagggtgcaccccgtggctgggagctgtggctgcgaacgccccctgcgcggtgccctgctcccttgggacctgttgcttggcgcgcactcctcccccaagtccctaaaatacaatgtctagggactcggggggaaggtgagcagaaggccgggactgcgaaaacccttccgagaggcacccggctgcgatcccaactgctctagctctccccgcgccctccccgggtggggcacttagggtgagcatgggggcaaagccgcagacgagggtgctgcacagaactccggggtcctgcacccatggattcctccgtcctatccagtgcagagcccgtgcacaccgctgatgaaccccttcaggctggagaacgtgacagtcagcgaatcgagccggcaacttctcagtgagtccggggagggtgaggatggagggagcgccccggtcctagccgtgagttctggagcctttcccaaaacagccgggcttcggggcctgcggagagggcggctggggtggcctctgacag

SEQ ID NO: 241912 - DNA, 45 bp, Homo sapiens; identical to SEQ ID NO: 206352
  FP325318.4_87426-89530:1058-1103
  hyper

SEQ ID NO: 241913 - DNA, 126 bp, Homo sapiens; identical to SEQ ID NO: 206353
  JH636052.4:789299-789425
  hyper

SEQ ID NO: 241914 - DNA, 466 bp, Homo sapiens
  JH636052.4:1361757-1362223
  hyper
ggggggggagggggggcctgcgaagcacaggaaaacttgtcttttcgttgtaacttccgcttcgttactacaagttacgcagctgagcttcccacgttagagaaaatgacagaacagcacacttgaaatgaaatagttgagtcgggtttaaaagccatttcagtaaccacaatatctgccctgccacataaataagattgcacctatctccgccccgccacagctccatacgcctcaccctttaaacgcacagtcacttgccccagcaccactccagccaatccccaaccaccccgagccctcctagccctaacacacagctgggactctcatgtccagccagtggtcctggacttgctcctacagcgcgggaaatccttcgtggcgaagcagcagcccctgcgctgcctcatctacatagaaacgccctatcggtgatgtcaccgacagtgcctttcccagtctc

SEQ ID NO: 241915 - DNA, 96 bp, Homo sapiens
  JH636052.4:1376242-1376338
  hyper
gagctcttgcacctccgccccgccacagcctcacacgcttcaccctttacacgcacggtcacttgccccgcgcagccccaccccccccagccctcc

SEQ ID NO: 241916 - DNA, 64 bp, Homo sapiens; identical to SEQ ID NO: 197231
  chr1:859736-859800
  hypo

SEQ ID NO: 241917 - DNA, 898 bp, Homo sapiens; identical to SEQ ID NO: 221173
  chr1:935362-936260
  hypo

SEQ ID NO: 241918 - DNA, 392 bp, Homo sapiens; identical to SEQ ID NO: 197235
  chr1:955508-955900
  hypo

SEQ ID NO: 241919 - DNA, 104 bp, Homo sapiens; identical to SEQ ID NO: 221175
  chr1:975838-975942
  hypo

SEQ ID NO: 241920 - DNA, 61 bp, Homo sapiens; identical to SEQ ID NO: 221176
  chr1:994999-995060
  hypo

SEQ ID NO: 241921 - DNA, 130 bp, Homo sapiens; identical to SEQ ID NO: 221177
  chr1:1052182-1052312
  hypo

SEQ ID NO: 241922 - DNA, 368 bp, Homo sapiens; identical to SEQ ID NO: 221178
  chr1:1181914-1182282
  hypo

SEQ ID NO: 241923 - DNA, 620 bp, Homo sapiens; identical to SEQ ID NO: 221179
  chr1:1713555-1714175
  hypo

SEQ ID NO: 241924 - DNA, 148 bp, Homo sapiens; identical to SEQ ID NO: 221180
  chr1:1737808-1737956
  hypo

SEQ ID NO: 241925 - DNA, 44 bp, Homo sapiens; identical to SEQ ID NO: 197244
  chr1:1747214-1747258
  hypo

SEQ ID NO: 241926 - DNA, 1455 bp, Homo sapiens; identical to SEQ ID NO: 221182
  chr1:1981169-1982624
  hypo

SEQ ID NO: 241927 - DNA, 317 bp, Homo sapiens; identical to SEQ ID NO: 221183
  chr1:2135930-2136247
  hypo

SEQ ID NO: 241928 - DNA, 480 bp, Homo sapiens; identical to SEQ ID NO: 221184
  chr1:2374855-2375335
  hypo

SEQ ID NO: 241929 - DNA, 180 bp, Homo sapiens; identical to SEQ ID NO: 221185
  chr1:2375376-2375556
  hypo

SEQ ID NO: 241930 - DNA, 180 bp, Homo sapiens; identical to SEQ ID NO: 221186
  chr1:2461364-2461544
  hypo

SEQ ID NO: 241931 - DNA, 480 bp, Homo sapiens; identical to SEQ ID NO: 221187
  chr1:2461605-2462085
  hypo

SEQ ID NO: 241932 - DNA, 71 bp, Homo sapiens; identical to SEQ ID NO: 197256
  chr1:2477791-2477862
  hypo

SEQ ID NO: 241933 - DNA, 105 bp, Homo sapiens; identical to SEQ ID NO: 221189
  chr1:2559942-2560047
  hypo

SEQ ID NO: 241934 - DNA, 753 bp, Homo sapiens; identical to SEQ ID NO: 221190
  chr1:2560142-2560895
  hypo

SEQ ID NO: 241935 - DNA, 420 bp, Homo sapiens; identical to SEQ ID NO: 221191
  chr1:2984607-2985027
  hypo

SEQ ID NO: 241936 - DNA, 240 bp, Homo sapiens; identical to SEQ ID NO: 221192
  chr1:2985131-2985371
  hypo

SEQ ID NO: 241937 - DNA, 180 bp, Homo sapiens; identical to SEQ ID NO: 221193
  chr1:2985548-2985728
  hypo

SEQ ID NO: 241938 - DNA, 180 bp, Homo sapiens; identical to SEQ ID NO: 221194
  chr1:2985791-2985971
  hypo

SEQ ID NO: 241939 - DNA, 604 bp, Homo sapiens; identical to SEQ ID NO: 221195
  chr1:3325182-3325786
  hypo

SEQ ID NO: 241940 - DNA, 341 bp, Homo sapiens; identical to SEQ ID NO: 221196
  chr1:3370921-3371262
  hypo

SEQ ID NO: 241941 - DNA, 180 bp, Homo sapiens; identical to SEQ ID NO: 221197
  chr1:3447539-3447719
  hypo

SEQ ID NO: 241942 - DNA, 212 bp, Homo sapiens; identical to SEQ ID NO: 221198
  chr1:3447772-3447984
  hypo

SEQ ID NO: 241943 - DNA, 470 bp, Homo sapiens; identical to SEQ ID NO: 221199
  chr1:3567217-3567687
  hypo

SEQ ID NO: 241944 - DNA, 360 bp, Homo sapiens; identical to SEQ ID NO: 221200
  chr1:3663383-3663743
  hypo

SEQ ID NO: 241945 - DNA, 177 bp, Homo sapiens; identical to SEQ ID NO: 221201
  chr1:3663922-3664099
  hypo

SEQ ID NO: 241946 - DNA, 212 bp, Homo sapiens; identical to SEQ ID NO: 221202
  chr1:3817882-3818094
  hypo

SEQ ID NO: 241947 - DNA, 1560 bp, Homo sapiens; identical to SEQ ID NO: 221203
  chr1:4714747-4716307
  hypo

SEQ ID NO: 241948 - DNA, 300 bp, Homo sapiens; identical to SEQ ID NO: 221204
  chr1:4716334-4716634
  hypo

SEQ ID NO: 241949 - DNA, 924 bp, Homo sapiens; identical to SEQ ID NO: 221205
  chr1:6052412-6053336
  hypo

SEQ ID NO: 241950 - DNA, 107 bp, Homo sapiens; identical to SEQ ID NO: 221206
  chr1:6053601-6053708
  hypo

SEQ ID NO: 241951 - DNA, 45 bp, Homo sapiens; identical to SEQ ID NO: 221207
  chr1:6137261-6137306
  hypo

SEQ ID NO: 241952 - DNA, 139 bp, Homo sapiens; identical to SEQ ID NO: 221208
  chr1:6296163-6296302
  hypo

SEQ ID NO: 241953 - DNA, 156 bp, Homo sapiens; identical to SEQ ID NO: 221209
  chr1:6321178-6321334
  hypo

SEQ ID NO: 241954 - DNA, 360 bp, Homo sapiens; identical to SEQ ID NO: 221210
  chr1:6484739-6485099
  hypo

SEQ ID NO: 241955 - DNA, 126 bp, Homo sapiens; identical to SEQ ID NO: 221211
  chr1:6485150-6485276
  hypo

SEQ ID NO: 241956 - DNA, 240 bp, Homo sapiens; identical to SEQ ID NO: 221212
  chr1:6507605-6507845
  hypo

SEQ ID NO: 241957 - DNA, 180 bp, Homo sapiens; identical to SEQ ID NO: 221213
  chr1:6526088-6526268
  hypo

SEQ ID NO: 241958 - DNA, 194 bp, Homo sapiens; identical to SEQ ID NO: 221214
  chr1:6659237-6659431
  hypo

SEQ ID NO: 241959 - DNA, 436 bp, Homo sapiens; identical to SEQ ID NO: 221215
  chr1:6675302-6675738
  hypo

SEQ ID NO: 241960 - DNA, 257 bp, Homo sapiens; identical to SEQ ID NO: 221216
  chr1:7764522-7764779
  hypo

SEQ ID NO: 241961 - DNA, 212 bp, Homo sapiens; identical to SEQ ID NO: 221217
  chr1:7764990-7765202
  hypo

SEQ ID NO: 241962 - DNA, 79 bp, Homo sapiens; identical to SEQ ID NO: 221218
  chr1:7843553-7843632
  hypo

SEQ ID NO: 241963 - DNA, 40 bp, Homo sapiens; identical to SEQ ID NO: 197291
  chr1:7843653-7843693
  hypo

SEQ ID NO: 241964 - DNA, 188 bp, Homo sapiens; identical to SEQ ID NO: 197292
  chr1:7844213-7844401
  hypo

SEQ ID NO: 241965 - DNA, 240 bp, Homo sapiens; identical to SEQ ID NO: 221221
  chr1:8086064-8086304
  hypo

SEQ ID NO: 241966 - DNA, 47 bp, Homo sapiens; identical to SEQ ID NO: 221222
  chr1:8762992-8763039
  hypo

SEQ ID NO: 241967 - DNA, 268 bp, Homo sapiens; identical to SEQ ID NO: 221223
  chr1:9188954-9189222
  hypo

SEQ ID NO: 241968 - DNA, 189 bp, Homo sapiens; identical to SEQ ID NO: 197299
  chr1:9352965-9353154
  hypo

SEQ ID NO: 241969 - DNA, 68 bp, Homo sapiens; identical to SEQ ID NO: 197300
  chr1:9353809-9353877
  hypo

SEQ ID NO: 241970 - DNA, 165 bp, Homo sapiens; identical to SEQ ID NO: 197301
  chr1:9489050-9489215
  hypo

SEQ ID NO: 241971 - DNA, 1196 bp, Homo sapiens; identical to SEQ ID NO: 221227
  chr1:9711818-9713014
  hypo

SEQ ID NO: 241972 - DNA, 175 bp, Homo sapiens; identical to SEQ ID NO: 197307
  chr1:10271266-10271441
  hypo

SEQ ID NO: 241973 - DNA, 540 bp, Homo sapiens; identical to SEQ ID NO: 221229
  chr1:10854866-10855406
  hypo

SEQ ID NO: 241974 - DNA, 240 bp, Homo sapiens; identical to SEQ ID NO: 221230
  chr1:10855534-10855774
  hypo

SEQ ID NO: 241975 - DNA, 635 bp, Homo sapiens; identical to SEQ ID NO: 221231
  chr1:10856315-10856950
  hypo

SEQ ID NO: 241976 - DNA, 180 bp, Homo sapiens; identical to SEQ ID NO: 221232
  chr1:11538709-11538889
  hypo

SEQ ID NO: 241977 - DNA, 1427 bp, Homo sapiens; identical to SEQ ID NO: 221233
  chr1:11538924-11540351
  hypo

SEQ ID NO: 241978 - DNA, 651 bp, Homo sapiens; identical to SEQ ID NO: 221234
  chr1:12123218-12123869
  hypo

SEQ ID NO: 241979 - DNA, 104 bp, Homo sapiens; identical to SEQ ID NO: 221235
  chr1:12123912-12124016
  hypo

SEQ ID NO: 241980 - DNA, 1058 bp, Homo sapiens; identical to SEQ ID NO: 221236
  chr1:12226890-12227948
  hypo

SEQ ID NO: 241981 - DNA, 180 bp, Homo sapiens; identical to SEQ ID NO: 221237
  chr1:13839617-13839797
  hypo

SEQ ID NO: 241982 - DNA, 300 bp, Homo sapiens; identical to SEQ ID NO: 221238
  chr1:13840000-13840300
  hypo

SEQ ID NO: 241983 - DNA, 714 bp, Homo sapiens; identical to SEQ ID NO: 221239
  chr1:14026482-14027196
  hypo

SEQ ID NO: 241984 - DNA, 960 bp, Homo sapiens; identical to SEQ ID NO: 221240
  chr1:14925094-14926054
  hypo

SEQ ID NO: 241985 - DNA, 104 bp, Homo sapiens; identical to SEQ ID NO: 221241
  chr1:15905420-15905524
  hypo

SEQ ID NO: 241986 - DNA, 167 bp, Homo sapiens; identical to SEQ ID NO: 221242
  chr1:15928927-15929094
  hypo

SEQ ID NO: 241987 - DNA, 736 bp, Homo sapiens; identical to SEQ ID NO: 221243
  chr1:16482059-16482795
  hypo

SEQ ID NO: 241988 - DNA, 127 bp, Homo sapiens; identical to SEQ ID NO: 221244
  chr1:16558626-16558753
  hypo

SEQ ID NO: 241989 - DNA, 208 bp, Homo sapiens; identical to SEQ ID NO: 197347
  chr1:17591036-17591244
  hypo

SEQ ID NO: 241990 - DNA, 240 bp, Homo sapiens; identical to SEQ ID NO: 221246
  chr1:17865959-17866199
  hypo

SEQ ID NO: 241991 - DNA, 656 bp, Homo sapiens; identical to SEQ ID NO: 221247
  chr1:18434194-18434850
  hypo

SEQ ID NO: 241992 - DNA, 420 bp, Homo sapiens; identical to SEQ ID NO: 221248
  chr1:18436786-18437206
  hypo

SEQ ID NO: 241993 - DNA, 360 bp, Homo sapiens; identical to SEQ ID NO: 221249
  chr1:18437320-18437680
  hypo

SEQ ID NO: 241994 - DNA, 360 bp, Homo sapiens; identical to SEQ ID NO: 221250
  chr1:18967312-18967672
  hypo

SEQ ID NO: 241995 - DNA, 240 bp, Homo sapiens; identical to SEQ ID NO: 221251
  chr1:18967852-18968092
  hypo

SEQ ID NO: 241996 - DNA, 291 bp, Homo sapiens; identical to SEQ ID NO: 221252
  chr1:19043557-19043848
  hypo

SEQ ID NO: 241997 - DNA, 325 bp, Homo sapiens; identical to SEQ ID NO: 197362
  chr1:19639187-19639512
  hypo

SEQ ID NO: 241998 - DNA, 284 bp, Homo sapiens; identical to SEQ ID NO: 221254
  chr1:19991372-19991656
  hypo

SEQ ID NO: 241999 - DNA, 138 bp, Homo sapiens; identical to SEQ ID NO: 221255
  chr1:20812696-20812834
  hypo

SEQ ID NO: 242000 - DNA, 480 bp, Homo sapiens; identical to SEQ ID NO: 221256
  chr1:20878791-20879271
  hypo

SEQ ID NO: 242001 - DNA, 1020 bp, Homo sapiens; identical to SEQ ID NO: 221257
  chr1:20879450-20880470
  hypo

SEQ ID NO: 242002 - DNA, 92 bp, Homo sapiens; identical to SEQ ID NO: 197376
  chr1:20959849-20959941
  hypo

SEQ ID NO: 242003 - DNA, 240 bp, Homo sapiens; identical to SEQ ID NO: 221259
  chr1:21058284-21058524
  hypo

SEQ ID NO: 242004 - DNA, 370 bp, Homo sapiens; identical to SEQ ID NO: 197378
  chr1:21563147-21563517
  hypo

SEQ ID NO: 242005 - DNA, 1080 bp, Homo sapiens; identical to SEQ ID NO: 221261
  chr1:23037200-23038280
  hypo

SEQ ID NO: 242006 - DNA, 248 bp, Homo sapiens; identical to SEQ ID NO: 221262
  chr1:23280132-23280380
  hypo

SEQ ID NO: 242007 - DNA, 105 bp, Homo sapiens; identical to SEQ ID NO: 221263
  chr1:23346265-23346370
  hypo

SEQ ID NO: 242008 - DNA, 143 bp, Homo sapiens; identical to SEQ ID NO: 221264
  chr1:23543645-23543788
  hypo

SEQ ID NO: 242009 - DNA, 105 bp, Homo sapiens; identical to SEQ ID NO: 221265
  chr1:23857853-23857958
  hypo

SEQ ID NO: 242010 - DNA, 105 bp, Homo sapiens; identical to SEQ ID NO: 221266
  chr1:24126604-24126709
  hypo

SEQ ID NO: 242011 - DNA, 307 bp, Homo sapiens; identical to SEQ ID NO: 221267
  chr1:24229167-24229474
  hypo

SEQ ID NO: 242012 - DNA, 105 bp, Homo sapiens; identical to SEQ ID NO: 221268
  chr1:25255277-25255382
  hypo

SEQ ID NO: 242013 - DNA, 1831 bp, Homo sapiens; identical to SEQ ID NO: 221269
  chr1:25255443-25257274
  hypo

SEQ ID NO: 242014 - DNA, 151 bp, Homo sapiens; identical to SEQ ID NO: 221270
  chr1:25870618-25870769
  hypo

SEQ ID NO: 242015 - DNA, 304 bp, Homo sapiens; identical to SEQ ID NO: 221271
  chr1:26663055-26663359
  hypo

SEQ ID NO: 242016 - DNA, 105 bp, Homo sapiens; identical to SEQ ID NO: 221272
  chr1:26735163-26735268
  hypo

SEQ ID NO: 242017 - DNA, 300 bp, Homo sapiens; identical to SEQ ID NO: 221273
  chr1:26737229-26737529
  hypo

SEQ ID NO: 242018 - DNA, 632 bp, Homo sapiens; identical to SEQ ID NO: 221274
  chr1:26737618-26738250
  hypo

SEQ ID NO: 242019 - DNA, 106 bp, Homo sapiens; identical to SEQ ID NO: 197405
  chr1:26855980-26856086
  hypo

SEQ ID NO: 242020 - DNA, 125 bp, Homo sapiens; identical to SEQ ID NO: 197408
  chr1:27286497-27286622
  hypo

SEQ ID NO: 242021 - DNA, 450 bp, Homo sapiens; identical to SEQ ID NO: 221277
  chr1:27332479-27332929
  hypo

SEQ ID NO: 242022 - DNA, 154 bp, Homo sapiens; identical to SEQ ID NO: 221278
  chr1:27719062-27719216
  hypo

SEQ ID NO: 242023 - DNA, 705 bp, Homo sapiens; identical to SEQ ID NO: 221279
  chr1:27901986-27902691
  hypo

SEQ ID NO: 242024 - DNA, 95 bp, Homo sapiens; identical to SEQ ID NO: 197415
  chr1:27928761-27928856
  hypo

SEQ ID NO: 242025 - DNA, 190 bp, Homo sapiens; identical to SEQ ID NO: 221281
  chr1:27929167-27929357
  hypo

SEQ ID NO: 242026 - DNA, 377 bp, Homo sapiens; identical to SEQ ID NO: 221282
  chr1:28586875-28587252
  hypo

SEQ ID NO: 242027 - DNA, 165 bp, Homo sapiens; identical to SEQ ID NO: 221283
  chr1:28879826-28879991
  hypo

SEQ ID NO: 242028 - DNA, 314 bp, Homo sapiens; identical to SEQ ID NO: 221284
  chr1:28919087-28919401
  hypo

SEQ ID NO: 242029 - DNA, 280 bp, Homo sapiens; identical to SEQ ID NO: 221285
  chr1:29062803-29063083
  hypo

SEQ ID NO: 242030 - DNA, 602 bp, Homo sapiens; identical to SEQ ID NO: 221286
  chr1:29138558-29139160
  hypo

SEQ ID NO: 242031 - DNA, 360 bp, Homo sapiens; identical to SEQ ID NO: 221287
  chr1:29448433-29448793
  hypo

SEQ ID NO: 242032 - DNA, 180 bp, Homo sapiens; identical to SEQ ID NO: 221288
  chr1:29448958-29449138
  hypo

SEQ ID NO: 242033 - DNA, 140 bp, Homo sapiens; identical to SEQ ID NO: 197428
  chr1:31192212-31192352
  hypo

SEQ ID NO: 242034 - DNA, 121 bp, Homo sapiens; identical to SEQ ID NO: 221290
  chr1:32666272-32666393
  hypo

SEQ ID NO: 242035 - DNA, 137 bp, Homo sapiens; identical to SEQ ID NO: 221291
  chr1:32757550-32757687
  hypo

SEQ ID NO: 242036 - DNA, 101 bp, Homo sapiens; identical to SEQ ID NO: 197438
  chr1:32852880-32852981
  hypo

SEQ ID NO: 242037 - DNA, 36 bp, Homo sapiens; identical to SEQ ID NO: 197442
  chr1:33005606-33005642
  hypo

SEQ ID NO: 242038 - DNA, 138 bp, Homo sapiens; identical to SEQ ID NO: 221294
  chr1:33207544-33207682
  hypo

SEQ ID NO: 242039 - DNA, 169 bp, Homo sapiens; identical to SEQ ID NO: 221295
  chr1:33438469-33438638
  hypo

SEQ ID NO: 242040 - DNA, 498 bp, Homo sapiens; identical to SEQ ID NO: 197450
  chr1:33721208-33721706
  hypo

SEQ ID NO: 242041 - DNA, 333 bp, Homo sapiens; identical to SEQ ID NO: 221297
  chr1:33772745-33773078
  hypo

SEQ ID NO: 242042 - DNA, 240 bp, Homo sapiens; identical to SEQ ID NO: 221298
  chr1:33896473-33896713
  hypo

SEQ ID NO: 242043 - DNA, 360 bp, Homo sapiens; identical to SEQ ID NO: 221299
  chr1:34629403-34629763
  hypo

SEQ ID NO: 242044 - DNA, 180 bp, Homo sapiens; identical to SEQ ID NO: 221300
  chr1:34629809-34629989
  hypo

SEQ ID NO: 242045 - DNA, 180 bp, Homo sapiens; identical to SEQ ID NO: 221301
  chr1:34630175-34630355
  hypo

SEQ ID NO: 242046 - DNA, 660 bp, Homo sapiens; identical to SEQ ID NO: 221302
  chr1:34630399-34631059
  hypo

SEQ ID NO: 242047 - DNA, 84 bp, Homo sapiens; identical to SEQ ID NO: 221303
  chr1:35260186-35260270
  hypo

SEQ ID NO: 242048 - DNA, 839 bp, Homo sapiens; identical to SEQ ID NO: 221304
  chr1:35394587-35395426
  hypo

SEQ ID NO: 242049 - DNA, 651 bp, Homo sapiens; identical to SEQ ID NO: 221305
  chr1:36173085-36173736
  hypo

SEQ ID NO: 242050 - DNA, 130 bp, Homo sapiens; identical to SEQ ID NO: 221306
  chr1:36788084-36788214
  hypo

SEQ ID NO: 242051 - DNA, 866 bp, Homo sapiens; identical to SEQ ID NO: 197462
  chr1:36931643-36932509
  hypo

SEQ ID NO: 242052 - DNA, 218 bp, Homo sapiens; identical to SEQ ID NO: 197463
  chr1:36933230-36933448
  hypo

SEQ ID NO: 242053 - DNA, 212 bp, Homo sapiens; identical to SEQ ID NO: 221309
  chr1:36937029-36937241
  hypo

SEQ ID NO: 242054 - DNA, 77 bp, Homo sapiens; identical to SEQ ID NO: 197465
  chr1:36937669-36937746
  hypo

SEQ ID NO: 242055 - DNA, 1020 bp, Homo sapiens; identical to SEQ ID NO: 221311
  chr1:37499421-37500441
  hypo

SEQ ID NO: 242056 - DNA, 240 bp, Homo sapiens; identical to SEQ ID NO: 221312
  chr1:37940547-37940787
  hypo

SEQ ID NO: 242057 - DNA, 240 bp, Homo sapiens; identical to SEQ ID NO: 221313
  chr1:38510526-38510766
  hypo

SEQ ID NO: 242058 - DNA, 1620 bp, Homo sapiens; identical to SEQ ID NO: 221314
  chr1:38510777-38512397
  hypo

SEQ ID NO: 242059 - DNA, 411 bp, Homo sapiens; identical to SEQ ID NO: 221315
  chr1:38512644-38513055
  hypo

SEQ ID NO: 242060 - DNA, 98 bp, Homo sapiens; identical to SEQ ID NO: 221316
  chr1:38580185-38580283
  hypo

SEQ ID NO: 242061 - DNA, 557 bp, Homo sapiens; identical to SEQ ID NO: 221317
  chr1:39043984-39044541
  hypo

SEQ ID NO: 242062 - DNA, 392 bp, Homo sapiens; identical to SEQ ID NO: 221318
  chr1:39269715-39270107
  hypo

SEQ ID NO: 242063 - DNA, 517 bp, Homo sapiens; identical to SEQ ID NO: 221319
  chr1:39284066-39284583
  hypo

SEQ ID NO: 242064 - DNA, 261 bp, Homo sapiens; identical to SEQ ID NO: 221320
  chr1:39874987-39875248
  hypo

SEQ ID NO: 242065 - DNA, 180 bp, Homo sapiens; identical to SEQ ID NO: 221321
  chr1:39956732-39956912
  hypo

SEQ ID NO: 242066 - DNA, 180 bp, Homo sapiens; identical to SEQ ID NO: 221322
  chr1:39956976-39957156
  hypo

SEQ ID NO: 242067 - DNA, 447 bp, Homo sapiens; identical to SEQ ID NO: 221323
  chr1:39957209-39957656
  hypo

SEQ ID NO: 242068 - DNA, 525 bp, Homo sapiens; identical to SEQ ID NO: 221324
  chr1:40105061-40105586
  hypo

SEQ ID NO: 242069 - DNA, 229 bp, Homo sapiens; identical to SEQ ID NO: 221325
  chr1:40149563-40149792
  hypo

SEQ ID NO: 242070 - DNA, 105 bp, Homo sapiens; identical to SEQ ID NO: 221326
  chr1:40254463-40254568
  hypo

SEQ ID NO: 242071 - DNA, 497 bp, Homo sapiens; identical to SEQ ID NO: 221327
  chr1:40254688-40255185
  hypo

SEQ ID NO: 242072 - DNA, 203 bp, Homo sapiens; identical to SEQ ID NO: 221328
  chr1:40368028-40368231
  hypo

SEQ ID NO: 242073 - DNA, 31 bp, Homo sapiens; identical to SEQ ID NO: 221329
  chr1:40420568-40420599
  hypo

SEQ ID NO: 242074 - DNA, 122 bp, Homo sapiens; identical to SEQ ID NO: 221330
  chr1:40420932-40421054
  hypo

SEQ ID NO: 242075 - DNA, 856 bp, Homo sapiens; identical to SEQ ID NO: 221331
  chr1:41326954-41327810
  hypo

SEQ ID NO: 242076 - DNA, 240 bp, Homo sapiens; identical to SEQ ID NO: 221332
  chr1:41832081-41832321
  hypo

SEQ ID NO: 242077 - DNA, 393 bp, Homo sapiens; identical to SEQ ID NO: 221333
  chr1:41981697-41982090
  hypo

SEQ ID NO: 242078 - DNA, 43 bp, Homo sapiens; identical to SEQ ID NO: 197492
  chr1:43803509-43803552
  hypo

SEQ ID NO: 242079 - DNA, 208 bp, Homo sapiens; identical to SEQ ID NO: 197493
  chr1:43805020-43805228
  hypo

SEQ ID NO: 242080 - DNA, 103 bp, Homo sapiens; identical to SEQ ID NO: 221336
  chr1:43814927-43815030
  hypo

SEQ ID NO: 242081 - DNA, 268 bp, Homo sapiens; identical to SEQ ID NO: 197495
  chr1:43818177-43818445
  hypo

SEQ ID NO: 242082 - DNA, 138 bp, Homo sapiens; identical to SEQ ID NO: 221338
  chr1:43919522-43919660
  hypo

SEQ ID NO: 242083 - DNA, 404 bp, Homo sapiens; identical to SEQ ID NO: 221339
  chr1:44401968-44402372
  hypo

SEQ ID NO: 242084 - DNA, 120 bp, Homo sapiens; identical to SEQ ID NO: 197500
  chr1:44444589-44444709
  hypo

SEQ ID NO: 242085 - DNA, 581 bp, Homo sapiens; identical to SEQ ID NO: 221341
  chr1:44873068-44873649
  hypo

SEQ ID NO: 242086 - DNA, 767 bp, Homo sapiens; identical to SEQ ID NO: 221342
  chr1:44883116-44883883
  hypo

SEQ ID NO: 242087 - DNA, 156 bp, Homo sapiens; identical to SEQ ID NO: 221343
  chr1:46632789-46632945
  hypo

SEQ ID NO: 242088 - DNA, 597 bp, Homo sapiens; identical to SEQ ID NO: 221344
  chr1:46913766-46914363
  hypo

SEQ ID NO: 242089 - DNA, 513 bp, Homo sapiens; identical to SEQ ID NO: 221345
  chr1:46932222-46932735
  hypo

SEQ ID NO: 242090 - DNA, 212 bp, Homo sapiens; identical to SEQ ID NO: 221346
  chr1:47078615-47078827
  hypo

SEQ ID NO: 242091 - DNA, 329 bp, Homo sapiens; identical to SEQ ID NO: 221347
  chr1:47903680-47904009
  hypo

SEQ ID NO: 242092 - DNA, 180 bp, Homo sapiens; identical to SEQ ID NO: 221348
  chr1:47910659-47910839
  hypo

SEQ ID NO: 242093 - DNA, 293 bp, Homo sapiens; identical to SEQ ID NO: 221349
  chr1:48190695-48190988
  hypo

SEQ ID NO: 242094 - DNA, 105 bp, Homo sapiens; identical to SEQ ID NO: 221350
  chr1:48463067-48463172
  hypo

SEQ ID NO: 242095 - DNA, 59 bp, Homo sapiens; identical to SEQ ID NO: 197523
  chr1:48463406-48463465
  hypo

SEQ ID NO: 242096 - DNA, 240 bp, Homo sapiens; identical to SEQ ID NO: 221352
  chr1:49242421-49242661
  hypo

SEQ ID NO: 242097 - DNA, 480 bp, Homo sapiens; identical to SEQ ID NO: 221353
  chr1:50798672-50799152
  hypo

SEQ ID NO: 242098 - DNA, 300 bp, Homo sapiens; identical to SEQ ID NO: 221354
  chr1:52195004-52195304
  hypo

SEQ ID NO: 242099 - DNA, 180 bp, Homo sapiens; identical to SEQ ID NO: 221355
  chr1:52608469-52608649
  hypo

SEQ ID NO: 242100 - DNA, 727 bp, Homo sapiens; identical to SEQ ID NO: 221356
  chr1:53067878-53068605
  hypo

SEQ ID NO: 242101 - DNA, 180 bp, Homo sapiens; identical to SEQ ID NO: 221357
  chr1:53098688-53098868
  hypo

SEQ ID NO: 242102 - DNA, 283 bp, Homo sapiens; identical to SEQ ID NO: 221358
  chr1:53098990-53099273
  hypo

SEQ ID NO: 242103 - DNA, 417 bp, Homo sapiens; identical to SEQ ID NO: 221359
  chr1:53308366-53308783
  hypo

SEQ ID NO: 242104 - DNA, 1080 bp, Homo sapiens; identical to SEQ ID NO: 221360
  chr1:54203899-54204979
  hypo

SEQ ID NO: 242105 - DNA, 236 bp, Homo sapiens; identical to SEQ ID NO: 197543
  chr1:55352448-55352684
  hypo

SEQ ID NO: 242106 - DNA, 244 bp, Homo sapiens; identical to SEQ ID NO: 221362
  chr1:55462664-55462908
  hypo

SEQ ID NO: 242107 - DNA, 331 bp, Homo sapiens; identical to SEQ ID NO: 221363
  chr1:56943370-56943701
  hypo

SEQ ID NO: 242108 - DNA, 747 bp, Homo sapiens; identical to SEQ ID NO: 221364
  chr1:57044295-57045042
  hypo

SEQ ID NO: 242109 - DNA, 780 bp, Homo sapiens; identical to SEQ ID NO: 221365
  chr1:57110641-57111421
  hypo

SEQ ID NO: 242110 - DNA, 300 bp, Homo sapiens; identical to SEQ ID NO: 221366
  chr1:58715449-58715749
  hypo

SEQ ID NO: 242111 - DNA, 180 bp, Homo sapiens; identical to SEQ ID NO: 221367
  chr1:58715804-58715984
  hypo

SEQ ID NO: 242112 - DNA, 121 bp, Homo sapiens; identical to SEQ ID NO: 197553
  chr1:59369443-59369564
  hypo

SEQ ID NO: 242113 - DNA, 171 bp, Homo sapiens; identical to SEQ ID NO: 221369
  chr1:59369797-59369968
  hypo

SEQ ID NO: 242114 - DNA, 190 bp, Homo sapiens; identical to SEQ ID NO: 197554
  chr1:59762030-59762220
  hypo

SEQ ID NO: 242115 - DNA, 105 bp, Homo sapiens; identical to SEQ ID NO: 221371
  chr1:60280122-60280227
  hypo

SEQ ID NO: 242116 - DNA, 615 bp, Homo sapiens; identical to SEQ ID NO: 221372
  chr1:60280476-60281091
  hypo

SEQ ID NO: 242117 - DNA, 522 bp, Homo sapiens; identical to SEQ ID NO: 221373
  chr1:61508554-61509076
  hypo

SEQ ID NO: 242118 - DNA, 40 bp, Homo sapiens; identical to SEQ ID NO: 197558
  chr1:61516034-61516074
  hypo

SEQ ID NO: 242119 - DNA, 359 bp, Homo sapiens; identical to SEQ ID NO: 197560
  chr1:61547845-61548204
  hypo

SEQ ID NO: 242120 - DNA, 1140 bp, Homo sapiens; identical to SEQ ID NO: 221376
  chr1:61548437-61549577
  hypo

SEQ ID NO: 242121 - DNA, 240 bp, Homo sapiens; identical to SEQ ID NO: 221377
  chr1:62207847-62208087
  hypo

SEQ ID NO: 242122 - DNA, 327 bp, Homo sapiens; identical to SEQ ID NO: 221378
  chr1:62208483-62208810
  hypo

SEQ ID NO: 242123 - DNA, 105 bp, Homo sapiens; identical to SEQ ID NO: 221379
  chr1:62784145-62784250
  hypo

SEQ ID NO: 242124 - DNA, 300 bp, Homo sapiens; identical to SEQ ID NO: 221380
  chr1:63539498-63539798
  hypo

SEQ ID NO: 242125 - DNA, 480 bp, Homo sapiens; identical to SEQ ID NO: 221381
  chr1:63788329-63788809
  hypo

SEQ ID NO: 242126 - DNA, 900 bp, Homo sapiens; identical to SEQ ID NO: 221382
  chr1:63789249-63790149
  hypo

SEQ ID NO: 242127 - DNA, 137 bp, Homo sapiens; identical to SEQ ID NO: 221383
  chr1:65210894-65211031
  hypo

SEQ ID NO: 242128 - DNA, 39 bp, Homo sapiens; identical to SEQ ID NO: 197579
  chr1:65720329-65720368
  hypo

SEQ ID NO: 242129 - DNA, 240 bp, Homo sapiens; identical to SEQ ID NO: 221385
  chr1:66258652-66258892
  hypo

SEQ ID NO: 242130 - DNA, 144 bp, Homo sapiens; identical to SEQ ID NO: 221386
  chr1:66259003-66259147
  hypo

SEQ ID NO: 242131 - DNA, 332 bp, Homo sapiens; identical to SEQ ID NO: 221387
  chr1:67773095-67773427
  hypo

SEQ ID NO: 242132 - DNA, 180 bp, Homo sapiens; identical to SEQ ID NO: 221388
  chr1:67773635-67773815
  hypo

SEQ ID NO: 242133 - DNA, 408 bp, Homo sapiens; identical to SEQ ID NO: 221389
  chr1:75601918-75602326
  hypo

SEQ ID NO: 242134 - DNA, 817 bp, Homo sapiens; identical to SEQ ID NO: 221390
  chr1:78511528-78512345
  hypo

SEQ ID NO: 242135 - DNA, 332 bp, Homo sapiens; identical to SEQ ID NO: 221391
  chr1:84544158-84544490
  hypo

SEQ ID NO: 242136 - DNA, 660 bp, Homo sapiens; identical to SEQ ID NO: 221392
  chr1:85358282-85358942
  hypo

SEQ ID NO: 242137 - DNA, 743 bp, Homo sapiens; identical to SEQ ID NO: 221393
  chr1:85462636-85463379
  hypo

SEQ ID NO: 242138 - DNA, 395 bp, Homo sapiens; identical to SEQ ID NO: 221394
  chr1:85666768-85667163
  hypo

SEQ ID NO: 242139 - DNA, 720 bp, Homo sapiens; identical to SEQ ID NO: 221395
  chr1:85930313-85931033
  hypo

SEQ ID NO: 242140 - DNA, 159 bp, Homo sapiens; identical to SEQ ID NO: 221396
  chr1:86042081-86042240
  hypo

SEQ ID NO: 242141 - DNA, 127 bp, Homo sapiens; identical to SEQ ID NO: 197623
  chr1:87793799-87793926
  hypo

SEQ ID NO: 242142 - DNA, 697 bp, Homo sapiens; identical to SEQ ID NO: 221398
  chr1:90098146-90098843
  hypo

SEQ ID NO: 242143 - DNA, 143 bp, Homo sapiens; identical to SEQ ID NO: 221399
  chr1:90228347-90228490
  hypo

SEQ ID NO: 242144 - DNA, 178 bp, Homo sapiens; identical to SEQ ID NO: 221400
  chr1:90228948-90229126
  hypo

SEQ ID NO: 242145 - DNA, 240 bp, Homo sapiens; identical to SEQ ID NO: 221401
  chr1:90309191-90309431
  hypo

SEQ ID NO: 242146 - DNA, 540 bp, Homo sapiens; identical to SEQ ID NO: 221402
  chr1:91183207-91183747
  hypo

SEQ ID NO: 242147 - DNA, 180 bp, Homo sapiens; identical to SEQ ID NO: 221403
  chr1:91184053-91184233
  hypo

SEQ ID NO: 242148 - DNA, 248 bp, Homo sapiens; identical to SEQ ID NO: 221404
  chr1:91195118-91195366
  hypo

SEQ ID NO: 242149 - DNA, 35 bp, Homo sapiens; identical to SEQ ID NO: 221405
  chr1:92946278-92946313
  hypo

SEQ ID NO: 242150 - DNA, 1087 bp, Homo sapiens; identical to SEQ ID NO: 221406
  chr1:92946605-92947692
  hypo

SEQ ID NO: 242151 - DNA, 360 bp, Homo sapiens; identical to SEQ ID NO: 221407
  chr1:92951331-92951691
  hypo

SEQ ID NO: 242152 - DNA, 689 bp, Homo sapiens; identical to SEQ ID NO: 221408
  chr1:92951927-92952616
  hypo

SEQ ID NO: 242153 - DNA, 300 bp, Homo sapiens; identical to SEQ ID NO: 221409
  chr1:93250632-93250932
  hypo

SEQ ID NO: 242154 - DNA, 149 bp, Homo sapiens; identical to SEQ ID NO: 221410
  chr1:93913410-93913559
  hypo

SEQ ID NO: 242155 - DNA, 240 bp, Homo sapiens; identical to SEQ ID NO: 221411
  chr1:93913750-93913990
  hypo

SEQ ID NO: 242156 - DNA, 300 bp, Homo sapiens; identical to SEQ ID NO: 221412
  chr1:93914141-93914441
  hypo

SEQ ID NO: 242157 - DNA, 458 bp, Homo sapiens; identical to SEQ ID NO: 221413
  chr1:94146398-94146856
  hypo

SEQ ID NO: 242158 - DNA, 720 bp, Homo sapiens; identical to SEQ ID NO: 221414
  chr1:94702652-94703372
  hypo

SEQ ID NO: 242159 - DNA, 240 bp, Homo sapiens; identical to SEQ ID NO: 221415
  chr1:95007280-95007520
  hypo

SEQ ID NO: 242160 - DNA, 105 bp, Homo sapiens; identical to SEQ ID NO: 221416
  chr1:95391395-95391500
  hypo

SEQ ID NO: 242161 - DNA, 600 bp, Homo sapiens; identical to SEQ ID NO: 221417
  chr1:95582790-95583390
  hypo

SEQ ID NO: 242162 - DNA, 475 bp, Homo sapiens; identical to SEQ ID NO: 221418
  chr1:98386195-98386670
  hypo

SEQ ID NO: 242163 - DNA, 152 bp, Homo sapiens; identical to SEQ ID NO: 221419
  chr1:98386776-98386928
  hypo

SEQ ID NO: 242164 - DNA, 1036 bp, Homo sapiens; identical to SEQ ID NO: 221420
  chr1:99126875-99127911
  hypo

SEQ ID NO: 242165 - DNA, 180 bp, Homo sapiens; identical to SEQ ID NO: 221421
  chr1:101004610-101004790
  hypo

SEQ ID NO: 242166 - DNA, 974 bp, Homo sapiens; identical to SEQ ID NO: 221422
  chr1:101004860-101005834
  hypo

SEQ ID NO: 242167 - DNA, 240 bp, Homo sapiens; identical to SEQ ID NO: 221423
  chr1:101701938-101702178
  hypo

SEQ ID NO: 242168 - DNA, 988 bp, Homo sapiens; identical to SEQ ID NO: 221424
  chr1:101702279-101703267
  hypo

SEQ ID NO: 242169 - DNA, 240 bp, Homo sapiens; identical to SEQ ID NO: 221425
  chr1:107600016-107600256
  hypo

SEQ ID NO: 242170 - DNA, 1260 bp, Homo sapiens; identical to SEQ ID NO: 221426
  chr1:107683249-107684509
  hypo

SEQ ID NO: 242171 - DNA, 1483 bp, Homo sapiens; identical to SEQ ID NO: 221427
  chr1:108507104-108508587
  hypo

SEQ ID NO: 242172 - DNA, 650 bp, Homo sapiens; identical to SEQ ID NO: 221428
  chr1:109203573-109204223
  hypo

SEQ ID NO: 242173 - DNA, 534 bp, Homo sapiens; identical to SEQ ID NO: 221429
  chr1:109940219-109940753
  hypo

SEQ ID NO: 242174 - DNA, 113 bp, Homo sapiens; identical to SEQ ID NO: 221430
  chr1:110025979-110026092
  hypo

SEQ ID NO: 242175 - DNA, 105 bp, Homo sapiens; identical to SEQ ID NO: 221431
  chr1:110052180-110052285
  hypo

SEQ ID NO: 242176 - DNA, 147 bp, Homo sapiens; identical to SEQ ID NO: 197694
  chr1:110453160-110453307
  hypo

SEQ ID NO: 242177 - DNA, 333 bp, Homo sapiens; identical to SEQ ID NO: 221433
  chr1:110453531-110453864
  hypo

SEQ ID NO: 242178 - DNA, 360 bp, Homo sapiens; identical to SEQ ID NO: 221434
  chr1:110626586-110626946
  hypo

SEQ ID NO: 242179 - DNA, 660 bp, Homo sapiens; identical to SEQ ID NO: 221435
  chr1:110626993-110627653
  hypo

SEQ ID NO: 242180 - DNA, 1069 bp, Homo sapiens; identical to SEQ ID NO: 221436
  chr1:110692968-110694037
  hypo

SEQ ID NO: 242181 - DNA, 180 bp, Homo sapiens; identical to SEQ ID NO: 221437
  chr1:110753627-110753807
  hypo

SEQ ID NO: 242182 - DNA, 660 bp, Homo sapiens; identical to SEQ ID NO: 221438
  chr1:110753909-110754569
  hypo

SEQ ID NO: 242183 - DNA, 280 bp, Homo sapiens; identical to SEQ ID NO: 221439
  chr1:111148988-111149268
  hypo

SEQ ID NO: 242184 - DNA, 240 bp, Homo sapiens; identical to SEQ ID NO: 221440
  chr1:111149371-111149611
  hypo

SEQ ID NO: 242185 - DNA, 1170 bp, Homo sapiens; identical to SEQ ID NO: 221441
  chr1:111216812-111217982
  hypo

SEQ ID NO: 242186 - DNA, 856 bp, Homo sapiens; identical to SEQ ID NO: 221442
  chr1:113051157-113052013
  hypo

SEQ ID NO: 242187 - DNA, 190 bp, Homo sapiens; identical to SEQ ID NO: 197708
  chr1:113249226-113249416
  hypo

SEQ ID NO: 242188 - DNA, 360 bp, Homo sapiens; identical to SEQ ID NO: 221444
  chr1:113498606-113498966
  hypo

SEQ ID NO: 242189 - DNA, 510 bp, Homo sapiens; identical to SEQ ID NO: 221445
  chr1:113499030-113499540
  hypo

SEQ ID NO: 242190 - DNA, 1510 bp, Homo sapiens; identical to SEQ ID NO: 221446
  chr1:113932573-113934083
  hypo

SEQ ID NO: 242191 - DNA, 203 bp, Homo sapiens; identical to SEQ ID NO: 221447
  chr1:114302510-114302713
  hypo

SEQ ID NO: 242192 - DNA, 149 bp, Homo sapiens; identical to SEQ ID NO: 221448
  chr1:114695147-114695296
  hypo

SEQ ID NO: 242193 - DNA, 180 bp, Homo sapiens; identical to SEQ ID NO: 221449
  chr1:114695413-114695593
  hypo

SEQ ID NO: 242194 - DNA, 300 bp, Homo sapiens; identical to SEQ ID NO: 221450
  chr1:114695706-114696006
  hypo

SEQ ID NO: 242195 - DNA, 105 bp, Homo sapiens; identical to SEQ ID NO: 221451
  chr1:114697920-114698025
  hypo

SEQ ID NO: 242196 - DNA, 71 bp, Homo sapiens; identical to SEQ ID NO: 221452
  chr1:115256506-115256577
  hypo

SEQ ID NO: 242197 - DNA, 94 bp, Homo sapiens; identical to SEQ ID NO: 221453
  chr1:115258668-115258762
  hypo

SEQ ID NO: 242198 - DNA, 326 bp, Homo sapiens; identical to SEQ ID NO: 221454
  chr1:115880147-115880473
  hypo

SEQ ID NO: 242199 - DNA, 180 bp, Homo sapiens; identical to SEQ ID NO: 221455
  chr1:115880640-115880820
  hypo

SEQ ID NO: 242200 - DNA, 1114 bp, Homo sapiens; identical to SEQ ID NO: 221456
  chr1:116184427-116185541
  hypo

SEQ ID NO: 242201 - DNA, 280 bp, Homo sapiens; identical to SEQ ID NO: 221457
  chr1:116380295-116380575
  hypo

SEQ ID NO: 242202 - DNA, 360 bp, Homo sapiens; identical to SEQ ID NO: 221458
  chr1:116380632-116380992
  hypo

SEQ ID NO: 242203 - DNA, 180 bp, Homo sapiens; identical to SEQ ID NO: 221459
  chr1:116381108-116381288
  hypo

SEQ ID NO: 242204 - DNA, 147 bp, Homo sapiens; identical to SEQ ID NO: 221460
  chr1:117210000-117210147
  hypo

SEQ ID NO: 242205 - DNA, 504 bp, Homo sapiens; identical to SEQ ID NO: 221461
  chr1:117664751-117665255
  hypo

SEQ ID NO: 242206 - DNA, 360 bp, Homo sapiens; identical to SEQ ID NO: 221462
  chr1:120190433-120190793
  hypo

SEQ ID NO: 242207 - DNA, 567 bp, Homo sapiens; identical to SEQ ID NO: 221463
  chr1:151693822-151694389
  hypo

SEQ ID NO: 242208 - DNA, 256 bp, Homo sapiens; identical to SEQ ID NO: 221464
  chr1:151763859-151764115
  hypo

SEQ ID NO: 242209 - DNA, 390 bp, Homo sapiens; identical to SEQ ID NO: 221465
  chr1:152083936-152084326
  hypo

SEQ ID NO: 242210 - DNA, 143 bp, Homo sapiens; identical to SEQ ID NO: 221466
  chr1:152084599-152084742
  hypo

SEQ ID NO: 242211 - DNA, 240 bp, Homo sapiens; identical to SEQ ID NO: 221467
  chr1:153651265-153651505
  hypo

SEQ ID NO: 242212 - DNA, 780 bp, Homo sapiens; identical to SEQ ID NO: 221468
  chr1:153651645-153652425
  hypo

SEQ ID NO: 242213 - DNA, 176 bp, Homo sapiens; identical to SEQ ID NO: 197756
  chr1:153936615-153936791
  hypo

SEQ ID NO: 242214 - DNA, 330 bp, Homo sapiens; identical to SEQ ID NO: 197758
  chr1:153958647-153958977
  hypo

SEQ ID NO: 242215 - DNA, 105 bp, Homo sapiens; identical to SEQ ID NO: 221471
  chr1:153963225-153963330
  hypo

SEQ ID NO: 242216 - DNA, 660 bp, Homo sapiens; identical to SEQ ID NO: 221472
  chr1:154297774-154298434
  hypo

SEQ ID NO: 242217 - DNA, 499 bp, Homo sapiens; identical to SEQ ID NO: 221473
  chr1:154474301-154474800
  hypo

SEQ ID NO: 242218 - DNA, 636 bp, Homo sapiens; identical to SEQ ID NO: 221474
  chr1:154474802-154475438
  hypo

SEQ ID NO: 242219 - DNA, 180 bp, Homo sapiens; identical to SEQ ID NO: 221475
  chr1:155099753-155099933
  hypo

SEQ ID NO: 242220 - DNA, 180 bp, Homo sapiens; identical to SEQ ID NO: 221476
  chr1:155152251-155152431
  hypo

SEQ ID NO: 242221 - DNA, 897 bp, Homo sapiens; identical to SEQ ID NO: 221477
  chr1:155164155-155165052
  hypo

SEQ ID NO: 242222 - DNA, 457 bp, Homo sapiens; identical to SEQ ID NO: 221478
  chr1:155294652-155295109
  hypo

SEQ ID NO: 242223 - DNA, 419 bp, Homo sapiens; identical to SEQ ID NO: 221479
  chr1:155830090-155830509
  hypo

SEQ ID NO: 242224 - DNA, 105 bp, Homo sapiens; identical to SEQ ID NO: 221480
  chr1:156084256-156084361
  hypo

SEQ ID NO: 242225 - DNA, 331 bp, Homo sapiens; identical to SEQ ID NO: 221481
  chr1:156084629-156084960
  hypo

SEQ ID NO: 242226 - DNA, 690 bp, Homo sapiens; identical to SEQ ID NO: 221482
  chr1:156357856-156358546
  hypo

SEQ ID NO: 242227 - DNA, 480 bp, Homo sapiens; identical to SEQ ID NO: 221483
  chr1:156390359-156390839
  hypo

SEQ ID NO: 242228 - DNA, 360 bp, Homo sapiens; identical to SEQ ID NO: 221484
  chr1:156391189-156391549
  hypo

SEQ ID NO: 242229 - DNA, 1080 bp, Homo sapiens; identical to SEQ ID NO: 221485
  chr1:156405350-156406430
  hypo

SEQ ID NO: 242230 - DNA, 220 bp, Homo sapiens; identical to SEQ ID NO: 221486
  chr1:156406488-156406708
  hypo

SEQ ID NO: 242231 - DNA, 240 bp, Homo sapiens; identical to SEQ ID NO: 221487
  chr1:156541982-156542222
  hypo

SEQ ID NO: 242232 - DNA, 113 bp, Homo sapiens; identical to SEQ ID NO: 221488
  chr1:156542391-156542504
  hypo

SEQ ID NO: 242233 - DNA, 991 bp, Homo sapiens; identical to SEQ ID NO: 221489
  chr1:156594312-156595303
  hypo

SEQ ID NO: 242234 - DNA, 180 bp, Homo sapiens; identical to SEQ ID NO: 221490
  chr1:156675967-156676147
  hypo

SEQ ID NO: 242235 - DNA, 418 bp, Homo sapiens; identical to SEQ ID NO: 221491
  chr1:156676256-156676674
  hypo

SEQ ID NO: 242236 - DNA, 429 bp, Homo sapiens; identical to SEQ ID NO: 221492
  chr1:156897224-156897653
  hypo

SEQ ID NO: 242237 - DNA, 441 bp, Homo sapiens; identical to SEQ ID NO: 221493
  chr1:158150551-158150992
  hypo

SEQ ID NO: 242238 - DNA, 113 bp, Homo sapiens; identical to SEQ ID NO: 221494
  chr1:158151025-158151138
  hypo

SEQ ID NO: 242239 - DNA, 818 bp, Homo sapiens; identical to SEQ ID NO: 221495
  chr1:159141372-159142190
  hypo

SEQ ID NO: 242240 - DNA, 570 bp, Homo sapiens; identical to SEQ ID NO: 221496
  chr1:159750347-159750917
  hypo

SEQ ID NO: 242241 - DNA, 518 bp, Homo sapiens; identical to SEQ ID NO: 221497
  chr1:159824506-159825024
  hypo

SEQ ID NO: 242242 - DNA, 199 bp, Homo sapiens; identical to SEQ ID NO: 221498
  chr1:160370125-160370324
  hypo

SEQ ID NO: 242243 - DNA, 360 bp, Homo sapiens; identical to SEQ ID NO: 221499
  chr1:160370387-160370747
  hypo

SEQ ID NO: 242244 - DNA, 177 bp, Homo sapiens; identical to SEQ ID NO: 221500
  chr1:160526926-160527103
  hypo

SEQ ID NO: 242245 - DNA, 284 bp, Homo sapiens; identical to SEQ ID NO: 221501
  chr1:161068442-161068726
  hypo

SEQ ID NO: 242246 - DNA, 405 bp, Homo sapiens; identical to SEQ ID NO: 221502
  chr1:161369853-161370258
  hypo

SEQ ID NO: 242247 - DNA, 139 bp, Homo sapiens; identical to SEQ ID NO: 221503
  chr1:161410565-161410704
  hypo

SEQ ID NO: 242248 - DNA, 840 bp, Homo sapiens; identical to SEQ ID NO: 221504
  chr1:162039213-162040053
  hypo

SEQ ID NO: 242249 - DNA, 57 bp, Homo sapiens; identical to SEQ ID NO: 221505
  chr1:163378383-163378440
  hypo

SEQ ID NO: 242250 - DNA, 485 bp, Homo sapiens; identical to SEQ ID NO: 221506
  chr1:165204497-165204982
  hypo

SEQ ID NO: 242251 - DNA, 360 bp, Homo sapiens; identical to SEQ ID NO: 221507
  chr1:165325157-165325517
  hypo

SEQ ID NO: 242252 - DNA, 540 bp, Homo sapiens; identical to SEQ ID NO: 221508
  chr1:165325554-165326094
  hypo

SEQ ID NO: 242253 - DNA, 225 bp, Homo sapiens; identical to SEQ ID NO: 221509
  chr1:165345284-165345509
  hypo

SEQ ID NO: 242254 - DNA, 1532 bp, Homo sapiens; identical to SEQ ID NO: 221510
  chr1:166134697-166136229
  hypo

SEQ ID NO: 242255 - DNA, 238 bp, Homo sapiens; identical to SEQ ID NO: 221511
  chr1:167090627-167090865
  hypo

SEQ ID NO: 242256 - DNA, 141 bp, Homo sapiens; identical to SEQ ID NO: 221512
  chr1:167190260-167190401
  hypo

SEQ ID NO: 242257 - DNA, 150 bp, Homo sapiens; identical to SEQ ID NO: 221513
  chr1:167423964-167424114
  hypo

SEQ ID NO: 242258 - DNA, 720 bp, Homo sapiens; identical to SEQ ID NO: 221514
  chr1:167599158-167599878
  hypo

SEQ ID NO: 242259 - DNA, 332 bp, Homo sapiens; identical to SEQ ID NO: 197845
  chr1:169076042-169076374
  hypo

SEQ ID NO: 242260 - DNA, 1440 bp, Homo sapiens; identical to SEQ ID NO: 221516
  chr1:171810202-171811642
  hypo

SEQ ID NO: 242261 - DNA, 222 bp, Homo sapiens; identical to SEQ ID NO: 221517
  chr1:175048456-175048678
  hypo

SEQ ID NO: 242262 - DNA, 720 bp, Homo sapiens; identical to SEQ ID NO: 221518
  chr1:178062572-178063292
  hypo

SEQ ID NO: 242263 - DNA, 519 bp, Homo sapiens; identical to SEQ ID NO: 221519
  chr1:178063324-178063843
  hypo

SEQ ID NO: 242264 - DNA, 212 bp, Homo sapiens; identical to SEQ ID NO: 221520
  chr1:178693954-178694166
  hypo

SEQ ID NO: 242265 - DNA, 632 bp, Homo sapiens; identical to SEQ ID NO: 221521
  chr1:179544700-179545332
  hypo

SEQ ID NO: 242266 - DNA, 1117 bp, Homo sapiens; identical to SEQ ID NO: 221522
  chr1:180123473-180124590
  hypo

SEQ ID NO: 242267 - DNA, 480 bp, Homo sapiens; identical to SEQ ID NO: 221523
  chr1:180202541-180203021
  hypo

SEQ ID NO: 242268 - DNA, 638 bp, Homo sapiens; identical to SEQ ID NO: 221524
  chr1:180881296-180881934
  hypo

SEQ ID NO: 242269 - DNA, 180 bp, Homo sapiens; identical to SEQ ID NO: 221525
  chr1:182359608-182359788
  hypo

SEQ ID NO: 242270 - DNA, 132 bp, Homo sapiens; identical to SEQ ID NO: 221526
  chr1:182361439-182361571
  hypo

SEQ ID NO: 242271 - DNA, 826 bp, Homo sapiens; identical to SEQ ID NO: 221527
  chr1:182583797-182584623
  hypo

SEQ ID NO: 242272 - DNA, 289 bp, Homo sapiens; identical to SEQ ID NO: 221528
  chr1:182992844-182993133
  hypo

SEQ ID NO: 242273 - DNA, 291 bp, Homo sapiens; identical to SEQ ID NO: 221529
  chr1:183155179-183155470
  hypo

SEQ ID NO: 242274 - DNA, 600 bp, Homo sapiens; identical to SEQ ID NO: 221530
  chr1:184005634-184006234
  hypo

SEQ ID NO: 242275 - DNA, 180 bp, Homo sapiens; identical to SEQ ID NO: 221531
  chr1:184006276-184006456
  hypo

SEQ ID NO: 242276 - DNA, 266 bp, Homo sapiens; identical to SEQ ID NO: 221532
  chr1:184355948-184356214
  hypo

SEQ ID NO: 242277 - DNA, 146 bp, Homo sapiens; identical to SEQ ID NO: 197880
  chr1:184356541-184356687
  hypo

SEQ ID NO: 242278 - DNA, 225 bp, Homo sapiens; identical to SEQ ID NO: 197881
  chr1:184722805-184723030
  hypo

SEQ ID NO: 242279 - DNA, 418 bp, Homo sapiens; identical to SEQ ID NO: 221535
  chr1:197886902-197887320
  hypo

SEQ ID NO: 242280 - DNA, 254 bp, Homo sapiens; identical to SEQ ID NO: 221536
  chr1:200379703-200379957
  hypo

SEQ ID NO: 242281 - DNA, 235 bp, Homo sapiens; identical to SEQ ID NO: 197899
  chr1:200708632-200708867
  hypo

SEQ ID NO: 242282 - DNA, 691 bp, Homo sapiens; identical to SEQ ID NO: 221538
  chr1:201083391-201084082
  hypo

SEQ ID NO: 242283 - DNA, 101 bp, Homo sapiens; identical to SEQ ID NO: 221539
  chr1:201977862-201977963
  hypo

SEQ ID NO: 242284 - DNA, 549 bp, Homo sapiens; identical to SEQ ID NO: 221540
  chr1:202162904-202163453
  hypo

SEQ ID NO: 242285 - DNA, 606 bp, Homo sapiens; identical to SEQ ID NO: 221541
  chr1:202611678-202612284
  hypo

SEQ ID NO: 242286 - DNA, 190 bp, Homo sapiens; identical to SEQ ID NO: 221542
  chr1:202612832-202613022
  hypo

SEQ ID NO: 242287 - DNA, 297 bp, Homo sapiens; identical to SEQ ID NO: 221543
  chr1:202830569-202830866
  hypo

SEQ ID NO: 242288 - DNA, 291 bp, Homo sapiens; identical to SEQ ID NO: 221544
  chr1:203598469-203598760
  hypo

SEQ ID NO: 242289 - DNA, 240 bp, Homo sapiens; identical to SEQ ID NO: 221545
  chr1:204043425-204043665
  hypo

SEQ ID NO: 242290 - DNA, 380 bp, Homo sapiens; identical to SEQ ID NO: 221546
  chr1:204347106-204347486
  hypo

SEQ ID NO: 242291 - DNA, 94 bp, Homo sapiens; identical to SEQ ID NO: 221547
  chr1:204487763-204487857
  hypo

SEQ ID NO: 242292 - DNA, 104 bp, Homo sapiens; identical to SEQ ID NO: 221548
  chr1:204518752-204518856
  hypo

SEQ ID NO: 242293 - DNA, 420 bp, Homo sapiens; identical to SEQ ID NO: 221549
  chr1:205312651-205313071
  hypo

SEQ ID NO: 242294 - DNA, 180 bp, Homo sapiens; identical to SEQ ID NO: 221550
  chr1:205313104-205313284
  hypo

SEQ ID NO: 242295 - DNA, 360 bp, Homo sapiens; identical to SEQ ID NO: 221551
  chr1:205399716-205400076
  hypo

SEQ ID NO: 242296 - DNA, 360 bp, Homo sapiens; identical to SEQ ID NO: 221552
  chr1:205425118-205425478
  hypo

SEQ ID NO: 242297 - DNA, 300 bp, Homo sapiens; identical to SEQ ID NO: 221553
  chr1:205425541-205425841
  hypo

SEQ ID NO: 242298 - DNA, 120 bp, Homo sapiens; identical to SEQ ID NO: 221554
  chr1:205425901-205426021
  hypo

SEQ ID NO: 242299 - DNA, 180 bp, Homo sapiens; identical to SEQ ID NO: 221555
  chr1:205426108-205426288
  hypo

SEQ ID NO: 242300 - DNA, 104 bp, Homo sapiens; identical to SEQ ID NO: 221556
  chr1:205426347-205426451
  hypo

SEQ ID NO: 242301 - DNA, 105 bp, Homo sapiens; identical to SEQ ID NO: 221557
  chr1:205721778-205721883
  hypo

SEQ ID NO: 242302 - DNA, 772 bp, Homo sapiens; identical to SEQ ID NO: 221558
  chr1:207669309-207670081
  hypo

SEQ ID NO: 242303 - DNA, 105 bp, Homo sapiens; identical to SEQ ID NO: 197930
  chr1:207995292-207995397
  hypo

SEQ ID NO: 242304 - DNA, 632 bp, Homo sapiens; identical to SEQ ID NO: 221560
  chr1:208084078-208084710
  hypo

SEQ ID NO: 242305 - DNA, 257 bp, Homo sapiens; identical to SEQ ID NO: 221561
  chr1:208416772-208417029
  hypo

SEQ ID NO: 242306 - DNA, 140 bp, Homo sapiens; identical to SEQ ID NO: 221562
  chr1:208417162-208417302
  hypo

SEQ ID NO: 242307 - DNA, 55 bp, Homo sapiens; identical to SEQ ID NO: 221563
  chr1:208418731-208418786
  hypo

SEQ ID NO: 242308 - DNA, 923 bp, Homo sapiens; identical to SEQ ID NO: 221564
  chr1:210111151-210112074
  hypo

SEQ ID NO: 242309 - DNA, 240 bp, Homo sapiens; identical to SEQ ID NO: 221565
  chr1:210465778-210466018
  hypo

SEQ ID NO: 242310 - DNA, 735 bp, Homo sapiens; identical to SEQ ID NO: 221566
  chr1:212003416-212004151
  hypo

SEQ ID NO: 242311 - DNA, 480 bp, Homo sapiens; identical to SEQ ID NO: 221567
  chr1:212873622-212874102
  hypo

SEQ ID NO: 242312 - DNA, 295 bp, Homo sapiens; identical to SEQ ID NO: 221568
  chr1:214453830-214454125
  hypo

SEQ ID NO: 242313 - DNA, 205 bp, Homo sapiens; identical to SEQ ID NO: 221569
  chr1:215740833-215741038
  hypo

SEQ ID NO: 242314 - DNA, 180 bp, Homo sapiens; identical to SEQ ID NO: 221570
  chr1:216774334-216774514
  hypo

SEQ ID NO: 242315 - DNA, 227 bp, Homo sapiens; identical to SEQ ID NO: 221571
  chr1:216774586-216774813
  hypo

SEQ ID NO: 242316 - DNA, 237 bp, Homo sapiens; identical to SEQ ID NO: 221572
  chr1:219347355-219347592
  hypo

SEQ ID NO: 242317 - DNA, 1123 bp, Homo sapiens; identical to SEQ ID NO: 221573
  chr1:220101044-220102167
  hypo

SEQ ID NO: 242318 - DNA, 679 bp, Homo sapiens; identical to SEQ ID NO: 221574
  chr1:220701813-220702492
  hypo

SEQ ID NO: 242319 - DNA, 536 bp, Homo sapiens; identical to SEQ ID NO: 221575
  chr1:220921312-220921848
  hypo

SEQ ID NO: 242320 - DNA, 780 bp, Homo sapiens; identical to SEQ ID NO: 221576
  chr1:221052090-221052870
  hypo

SEQ ID NO: 242321 - DNA, 180 bp, Homo sapiens; identical to SEQ ID NO: 221577
  chr1:221052914-221053094
  hypo

SEQ ID NO: 242322 - DNA, 592 bp, Homo sapiens; identical to SEQ ID NO: 221578
  chr1:221053166-221053758
  hypo

SEQ ID NO: 242323 - DNA, 198 bp, Homo sapiens; identical to SEQ ID NO: 197968
  chr1:223307128-223307326
  hypo

SEQ ID NO: 242324 - DNA, 720 bp, Homo sapiens; identical to SEQ ID NO: 221580
  chr1:223537982-223538702
  hypo

SEQ ID NO: 242325 - DNA, 420 bp, Homo sapiens; identical to SEQ ID NO: 221581
  chr1:223899995-223900415
  hypo

SEQ ID NO: 242326 - DNA, 540 bp, Homo sapiens; identical to SEQ ID NO: 221582
  chr1:223936605-223937145
  hypo

SEQ ID NO: 242327 - DNA, 85 bp, Homo sapiens; identical to SEQ ID NO: 221583
  chr1:224481061-224481146
  hypo

SEQ ID NO: 242328 - DNA, 34 bp, Homo sapiens; identical to SEQ ID NO: 197974
  chr1:224622766-224622800
  hypo

SEQ ID NO: 242329 - DNA, 198 bp, Homo sapiens; identical to SEQ ID NO: 221585
  chr1:224691180-224691378
  hypo

SEQ ID NO: 242330 - DNA, 960 bp, Homo sapiens; identical to SEQ ID NO: 221586
  chr1:224803726-224804686
  hypo

SEQ ID NO: 242331 - DNA, 341 bp, Homo sapiens; identical to SEQ ID NO: 221587
  chr1:225117497-225117838
  hypo

SEQ ID NO: 242332 - DNA, 338 bp, Homo sapiens; identical to SEQ ID NO: 221588
  chr1:225614954-225615292
  hypo

SEQ ID NO: 242333 - DNA, 50 bp, Homo sapiens; identical to SEQ ID NO: 221589
  chr1:225998107-225998157
  hypo

SEQ ID NO: 242334 - DNA, 171 bp, Homo sapiens; identical to SEQ ID NO: 197982
  chr1:226297380-226297551
  hypo

SEQ ID NO: 242335 - DNA, 415 bp, Homo sapiens; identical to SEQ ID NO: 221591
  chr1:226411104-226411519
  hypo

SEQ ID NO: 242336 - DNA, 420 bp, Homo sapiens; identical to SEQ ID NO: 221592
  chr1:226411561-226411981
  hypo

SEQ ID NO: 242337 - DNA, 62 bp, Homo sapiens; identical to SEQ ID NO: 221593
  chr1:226497312-226497374
  hypo

SEQ ID NO: 242338 - DNA, 56 bp, Homo sapiens; identical to SEQ ID NO: 221594
  chr1:226497394-226497450
  hypo

SEQ ID NO: 242339 - DNA, 764 bp, Homo sapiens; identical to SEQ ID NO: 221595
  chr1:226736766-226737530
  hypo

SEQ ID NO: 242340 - DNA, 43 bp, Homo sapiens; identical to SEQ ID NO: 221596
  chr1:226737790-226737833
  hypo

SEQ ID NO: 242341 - DNA, 897 bp, Homo sapiens; identical to SEQ ID NO: 221597
  chr1:226926124-226927021
  hypo

SEQ ID NO: 242342 - DNA, 71 bp, Homo sapiens; identical to SEQ ID NO: 221598
  chr1:227058816-227058887
  hypo

SEQ ID NO: 242343 - DNA, 205 bp, Homo sapiens; identical to SEQ ID NO: 197990
  chr1:227652539-227652744
  hypo

SEQ ID NO: 242344 - DNA, 360 bp, Homo sapiens; identical to SEQ ID NO: 221600
  chr1:227729783-227730143
  hypo

SEQ ID NO: 242345 - DNA, 323 bp, Homo sapiens; identical to SEQ ID NO: 221601
  chr1:227730173-227730496
  hypo

SEQ ID NO: 242346 - DNA, 300 bp, Homo sapiens; identical to SEQ ID NO: 221602
  chr1:228134738-228135038
  hypo

SEQ ID NO: 242347 - DNA, 1179 bp, Homo sapiens; identical to SEQ ID NO: 221603
  chr1:228135092-228136271
  hypo

SEQ ID NO: 242348 - DNA, 557 bp, Homo sapiens; identical to SEQ ID NO: 221604
  chr1:228193977-228194534
  hypo

SEQ ID NO: 242349 - DNA, 180 bp, Homo sapiens; identical to SEQ ID NO: 221605
  chr1:228194738-228194918
  hypo

SEQ ID NO: 242350 - DNA, 300 bp, Homo sapiens; identical to SEQ ID NO: 221606
  chr1:228195243-228195543
  hypo

SEQ ID NO: 242351 - DNA, 35 bp, Homo sapiens; identical to SEQ ID NO: 221607
  chr1:228238539-228238574
  hypo

SEQ ID NO: 242352 - DNA, 105 bp, Homo sapiens; identical to SEQ ID NO: 221608
  chr1:228444665-228444770
  hypo

SEQ ID NO: 242353 - DNA, 359 bp, Homo sapiens; identical to SEQ ID NO: 221609
  chr1:228566697-228567056
  hypo

SEQ ID NO: 242354 - DNA, 300 bp, Homo sapiens; identical to SEQ ID NO: 221610
  chr1:228644943-228645243
  hypo

SEQ ID NO: 242355 - DNA, 597 bp, Homo sapiens; identical to SEQ ID NO: 221611
  chr1:228645306-228645903
  hypo

SEQ ID NO: 242356 - DNA, 180 bp, Homo sapiens; identical to SEQ ID NO: 221612
  chr1:228647148-228647328
  hypo

SEQ ID NO: 242357 - DNA, 180 bp, Homo sapiens; identical to SEQ ID NO: 221613
  chr1:228871074-228871254
  hypo

SEQ ID NO: 242358 - DNA, 219 bp, Homo sapiens; identical to SEQ ID NO: 198009
  chr1:230223230-230223449
  hypo

SEQ ID NO: 242359 - DNA, 1334 bp, Homo sapiens; identical to SEQ ID NO: 221615
  chr1:231175065-231176399
  hypo

SEQ ID NO: 242360 - DNA, 1020 bp, Homo sapiens; identical to SEQ ID NO: 221616
  chr1:231297739-231298759
  hypo

SEQ ID NO: 242361 - DNA, 240 bp, Homo sapiens; identical to SEQ ID NO: 221617
  chr1:232765857-232766097
  hypo

SEQ ID NO: 242362 - DNA, 180 bp, Homo sapiens; identical to SEQ ID NO: 221618
  chr1:232766241-232766421
  hypo

SEQ ID NO: 242363 - DNA, 180 bp, Homo sapiens; identical to SEQ ID NO: 221619
  chr1:233749754-233749934
  hypo

SEQ ID NO: 242364 - DNA, 180 bp, Homo sapiens; identical to SEQ ID NO: 221620
  chr1:234040448-234040628
  hypo

SEQ ID NO: 242365 - DNA, 480 bp, Homo sapiens; identical to SEQ ID NO: 221621
  chr1:234040788-234041268
  hypo

SEQ ID NO: 242366 - DNA, 159 bp, Homo sapiens; identical to SEQ ID NO: 221622
  chr1:234736279-234736438
  hypo

SEQ ID NO: 242367 - DNA, 640 bp, Homo sapiens; identical to SEQ ID NO: 221623
  chr1:235812705-235813345
  hypo

SEQ ID NO: 242368 - DNA, 248 bp, Homo sapiens; identical to SEQ ID NO: 221624
  chr1:235813668-235813916
  hypo

SEQ ID NO: 242369 - DNA, 660 bp, Homo sapiens; identical to SEQ ID NO: 221625
  chr1:236444239-236444899
  hypo

SEQ ID NO: 242370 - DNA, 300 bp, Homo sapiens; identical to SEQ ID NO: 221626
  chr1:236445200-236445500
  hypo

SEQ ID NO: 242371 - DNA, 1006 bp, Homo sapiens; identical to SEQ ID NO: 221627
  chr1:236558369-236559375
  hypo

SEQ ID NO: 242372 - DNA, 794 bp, Homo sapiens; identical to SEQ ID NO: 221628
  chr1:236849524-236850318
  hypo

SEQ ID NO: 242373 - DNA, 1522 bp, Homo sapiens; identical to SEQ ID NO: 221629
  chr1:237205142-237206664
  hypo

SEQ ID NO: 242374 - DNA, 897 bp, Homo sapiens; identical to SEQ ID NO: 221630
  chr1:240254939-240255836
  hypo

SEQ ID NO: 242375 - DNA, 720 bp, Homo sapiens; identical to SEQ ID NO: 221631
  chr1:241520124-241520844
  hypo

SEQ ID NO: 242376 - DNA, 404 bp, Homo sapiens; identical to SEQ ID NO: 221632
  chr1:241587450-241587854
  hypo

SEQ ID NO: 242377 - DNA, 33 bp, Homo sapiens; identical to SEQ ID NO: 221633
  chr1:241588237-241588270
  hypo

SEQ ID NO: 242378 - DNA, 900 bp, Homo sapiens; identical to SEQ ID NO: 221634
  chr1:242687470-242688370
  hypo

SEQ ID NO: 242379 - DNA, 360 bp, Homo sapiens; identical to SEQ ID NO: 221635
  chr1:244012286-244012646
  hypo

SEQ ID NO: 242380 - DNA, 396 bp, Homo sapiens; identical to SEQ ID NO: 221636
  chr1:244012739-244013135
  hypo

SEQ ID NO: 242381 - DNA, 645 bp, Homo sapiens; identical to SEQ ID NO: 221637
  chr1:244080520-244081165
  hypo

SEQ ID NO: 242382 - DNA, 83 bp, Homo sapiens; identical to SEQ ID NO: 221638
  chr1:244893209-244893292
  hypo

SEQ ID NO: 242383 - DNA, 396 bp, Homo sapiens; identical to SEQ ID NO: 221639
  chr1:244893352-244893748
  hypo

SEQ ID NO: 242384 - DNA, 411 bp, Homo sapiens; identical to SEQ ID NO: 221640
  chr1:244893804-244894215
  hypo

SEQ ID NO: 242385 - DNA, 330 bp, Homo sapiens; identical to SEQ ID NO: 221641
  chr1:246887311-246887641
  hypo

SEQ ID NO: 242386 - DNA, 420 bp, Homo sapiens; identical to SEQ ID NO: 221642
  chr1:247170818-247171238
  hypo

SEQ ID NO: 242387 - DNA, 510 bp, Homo sapiens; identical to SEQ ID NO: 221643
  chr1:247495329-247495839
  hypo

SEQ ID NO: 242388 - DNA, 1012 bp, Homo sapiens; identical to SEQ ID NO: 221644
  chr1:248020310-248021322
  hypo

SEQ ID NO: 242389 - DNA, 111 bp, Homo sapiens; identical to SEQ ID NO: 221645
  chr1:249167777-249167888
  hypo

SEQ ID NO: 242390 - DNA, 269 bp, Homo sapiens; identical to SEQ ID NO: 221646
  chr2:264202-264471
  hypo

SEQ ID NO: 242391 - DNA, 105 bp, Homo sapiens; identical to SEQ ID NO: 221647
  chr2:288757-288862
  hypo

SEQ ID NO: 242392 - DNA, 660 bp, Homo sapiens; identical to SEQ ID NO: 221648
  chr2:945675-946335
  hypo

SEQ ID NO: 242393 - DNA, 283 bp, Homo sapiens; identical to SEQ ID NO: 221649
  chr2:946391-946674
  hypo

SEQ ID NO: 242394 - DNA, 922 bp, Homo sapiens; identical to SEQ ID NO: 221650
  chr2:1747628-1748550
  hypo

SEQ ID NO: 242395 - DNA, 161 bp, Homo sapiens; identical to SEQ ID NO: 221651
  chr2:3465103-3465264
  hypo

SEQ ID NO: 242396 - DNA, 119 bp, Homo sapiens; identical to SEQ ID NO: 221652
  chr2:3751274-3751393
  hypo

SEQ ID NO: 242397 - DNA, 947 bp, Homo sapiens; identical to SEQ ID NO: 221653
  chr2:7005251-7006198
  hypo

SEQ ID NO: 242398 - DNA, 563 bp, Homo sapiens; identical to SEQ ID NO: 221654
  chr2:7057876-7058439
  hypo

SEQ ID NO: 242399 - DNA, 571 bp, Homo sapiens; identical to SEQ ID NO: 221655
  chr2:7571091-7571662
  hypo

SEQ ID NO: 242400 - DNA, 302 bp, Homo sapiens; identical to SEQ ID NO: 221656
  chr2:8818278-8818580
  hypo

SEQ ID NO: 242401 - DNA, 665 bp, Homo sapiens; identical to SEQ ID NO: 221657
  chr2:8818829-8819494
  hypo

SEQ ID NO: 242402 - DNA, 169 bp, Homo sapiens; identical to SEQ ID NO: 198061
  chr2:8821592-8821761
  hypo

SEQ ID NO: 242403 - DNA, 709 bp, Homo sapiens; identical to SEQ ID NO: 198062
  chr2:8821976-8822685
  hypo

SEQ ID NO: 242404 - DNA, 141 bp, Homo sapiens; identical to SEQ ID NO: 221660
  chr2:8825702-8825843
  hypo

SEQ ID NO: 242405 - DNA, 202 bp, Homo sapiens; identical to SEQ ID NO: 221661
  chr2:9143666-9143868
  hypo

SEQ ID NO: 242406 - DNA, 459 bp, Homo sapiens; identical to SEQ ID NO: 221662
  chr2:9144090-9144549
  hypo

SEQ ID NO: 242407 - DNA, 1260 bp, Homo sapiens; identical to SEQ ID NO: 221663
  chr2:9346435-9347695
  hypo

SEQ ID NO: 242408 - DNA, 175 bp, Homo sapiens; identical to SEQ ID NO: 221664
  chr2:10151695-10151870
  hypo

SEQ ID NO: 242409 - DNA, 175 bp, Homo sapiens; identical to SEQ ID NO: 221665
  chr2:10152415-10152590
  hypo

SEQ ID NO: 242410 - DNA, 516 bp, Homo sapiens; identical to SEQ ID NO: 221666
  chr2:10183604-10184120
  hypo

SEQ ID NO: 242411 - DNA, 180 bp, Homo sapiens; identical to SEQ ID NO: 221667
  chr2:10443826-10444006
  hypo

SEQ ID NO: 242412 - DNA, 360 bp, Homo sapiens; identical to SEQ ID NO: 221668
  chr2:10444228-10444588
  hypo

SEQ ID NO: 242413 - DNA, 226 bp, Homo sapiens; identical to SEQ ID NO: 221669
  chr2:10587833-10588059
  hypo

SEQ ID NO: 242414 - DNA, 240 bp, Homo sapiens; identical to SEQ ID NO: 221670
  chr2:10588915-10589155
  hypo

SEQ ID NO: 242415 - DNA, 345 bp, Homo sapiens; identical to SEQ ID NO: 221671
  chr2:10862070-10862415
  hypo

SEQ ID NO: 242416 - DNA, 57 bp, Homo sapiens; identical to SEQ ID NO: 221672
  chr2:10953251-10953308
  hypo

SEQ ID NO: 242417 - DNA, 51 bp, Homo sapiens; identical to SEQ ID NO: 221673
  chr2:10953334-10953385
  hypo

SEQ ID NO: 242418 - DNA, 325 bp, Homo sapiens; identical to SEQ ID NO: 221674
  chr2:11622660-11622985
  hypo

SEQ ID NO: 242419 - DNA, 460 bp, Homo sapiens; identical to SEQ ID NO: 221675
  chr2:12858142-12858602
  hypo

SEQ ID NO: 242420 - DNA, 180 bp, Homo sapiens; identical to SEQ ID NO: 221676
  chr2:14774569-14774749
  hypo

SEQ ID NO: 242421 - DNA, 178 bp, Homo sapiens; identical to SEQ ID NO: 221677
  chr2:16079905-16080083
  hypo

SEQ ID NO: 242422 - DNA, 101 bp, Homo sapiens; identical to SEQ ID NO: 221678
  chr2:16080290-16080391
  hypo

SEQ ID NO: 242423 - DNA, 152 bp, Homo sapiens; identical to SEQ ID NO: 221679
  chr2:16080622-16080774
  hypo

SEQ ID NO: 242424 - DNA, 420 bp, Homo sapiens; identical to SEQ ID NO: 221680
  chr2:16081991-16082411
  hypo

SEQ ID NO: 242425 - DNA, 104 bp, Homo sapiens; identical to SEQ ID NO: 221681
  chr2:16082831-16082935
  hypo

SEQ ID NO: 242426 - DNA, 667 bp, Homo sapiens; identical to SEQ ID NO: 221682
  chr2:17719770-17720437
  hypo

SEQ ID NO: 242427 - DNA, 119 bp, Homo sapiens; identical to SEQ ID NO: 198102
  chr2:20101402-20101521
  hypo

SEQ ID NO: 242428 - DNA, 140 bp, Homo sapiens; identical to SEQ ID NO: 221684
  chr2:20424156-20424296
  hypo

SEQ ID NO: 242429 - DNA, 399 bp, Homo sapiens; identical to SEQ ID NO: 221685
  chr2:20646413-20646812
  hypo

SEQ ID NO: 242430 - DNA, 240 bp, Homo sapiens; identical to SEQ ID NO: 221686
  chr2:20646936-20647176
  hypo

SEQ ID NO: 242431 - DNA, 660 bp, Homo sapiens; identical to SEQ ID NO: 221687
  chr2:20865715-20866375
  hypo

SEQ ID NO: 242432 - DNA, 207 bp, Homo sapiens; identical to SEQ ID NO: 221688
  chr2:21022856-21023063
  hypo

SEQ ID NO: 242433 - DNA, 256 bp, Homo sapiens; identical to SEQ ID NO: 221689
  chr2:24714925-24715181
  hypo

SEQ ID NO: 242434 - DNA, 79 bp, Homo sapiens; identical to SEQ ID NO: 198120
  chr2:25265055-25265134
  hypo

SEQ ID NO: 242435 - DNA, 713 bp, Homo sapiens; identical to SEQ ID NO: 221691
  chr2:25391043-25391756
  hypo

SEQ ID NO: 242436 - DNA, 455 bp, Homo sapiens; identical to SEQ ID NO: 221692
  chr2:25438912-25439367
  hypo

SEQ ID NO: 242437 - DNA, 149 bp, Homo sapiens; identical to SEQ ID NO: 198122
  chr2:25457152-25457301
  hypo

SEQ ID NO: 242438 - DNA, 139 bp, Homo sapiens; identical to SEQ ID NO: 198123
  chr2:25458563-25458702
  hypo

SEQ ID NO: 242439 - DNA, 95 bp, Homo sapiens; identical to SEQ ID NO: 198124
  chr2:25459791-25459886
  hypo

SEQ ID NO: 242440 - DNA, 108 bp, Homo sapiens; identical to SEQ ID NO: 198125
  chr2:25461984-25462092
  hypo

SEQ ID NO: 242441 - DNA, 448 bp, Homo sapiens; identical to SEQ ID NO: 198126
  chr2:25463164-25463612
  hypo

SEQ ID NO: 242442 - DNA, 172 bp, Homo sapiens; identical to SEQ ID NO: 198127
  chr2:25464417-25464589
  hypo

SEQ ID NO: 242443 - DNA, 774 bp, Homo sapiens; identical to SEQ ID NO: 198128
  chr2:25466755-25467529
  hypo

SEQ ID NO: 242444 - DNA, 98 bp, Homo sapiens; identical to SEQ ID NO: 198129
  chr2:25468111-25468209
  hypo

SEQ ID NO: 242445 - DNA, 310 bp, Homo sapiens; identical to SEQ ID NO: 198130
  chr2:25468877-25469187
  hypo

SEQ ID NO: 242446 - DNA, 173 bp, Homo sapiens; identical to SEQ ID NO: 198131
  chr2:25469474-25469647
  hypo

SEQ ID NO: 242447 - DNA, 123 bp, Homo sapiens; identical to SEQ ID NO: 198132
  chr2:25469906-25470029
  hypo

SEQ ID NO: 242448 - DNA, 162 bp, Homo sapiens; identical to SEQ ID NO: 198133
  chr2:25470449-25470611
  hypo

SEQ ID NO: 242449 - DNA, 192 bp, Homo sapiens; identical to SEQ ID NO: 198134
  chr2:25470892-25471084
  hypo

SEQ ID NO: 242450 - DNA, 90 bp, Homo sapiens; identical to SEQ ID NO: 198135
  chr2:25497816-25497906
  hypo

SEQ ID NO: 242451 - DNA, 237 bp, Homo sapiens; identical to SEQ ID NO: 198136
  chr2:25505304-25505541
  hypo

SEQ ID NO: 242452 - DNA, 160 bp, Homo sapiens; identical to SEQ ID NO: 221708
  chr2:26395433-26395593
  hypo

SEQ ID NO: 242453 - DNA, 330 bp, Homo sapiens; identical to SEQ ID NO: 221709
  chr2:26395999-26396329
  hypo

SEQ ID NO: 242454 - DNA, 1357 bp, Homo sapiens; identical to SEQ ID NO: 221710
  chr2:27070261-27071618
  hypo

SEQ ID NO: 242455 - DNA, 180 bp, Homo sapiens; identical to SEQ ID NO: 221711
  chr2:27071675-27071855
  hypo

SEQ ID NO: 242456 - DNA, 932 bp, Homo sapiens; identical to SEQ ID NO: 221712
  chr2:27072010-27072942
  hypo

SEQ ID NO: 242457 - DNA, 214 bp, Homo sapiens; identical to SEQ ID NO: 221713
  chr2:27309103-27309317
  hypo

SEQ ID NO: 242458 - DNA, 1078 bp, Homo sapiens; identical to SEQ ID NO: 221714
  chr2:27484881-27485959
  hypo

SEQ ID NO: 242459 - DNA, 91 bp, Homo sapiens; identical to SEQ ID NO: 221715
  chr2:27937851-27937942
  hypo

SEQ ID NO: 242460 - DNA, 276 bp, Homo sapiens; identical to SEQ ID NO: 221716
  chr2:27938253-27938529
  hypo

SEQ ID NO: 242461 - DNA, 121 bp, Homo sapiens; identical to SEQ ID NO: 221717
  chr2:29033265-29033386
  hypo

SEQ ID NO: 242462 - DNA, 1117 bp, Homo sapiens; identical to SEQ ID NO: 221718
  chr2:29337889-29339006
  hypo

SEQ ID NO: 242463 - DNA, 300 bp, Homo sapiens; identical to SEQ ID NO: 221719
  chr2:30144244-30144544
  hypo

SEQ ID NO: 242464 - DNA, 180 bp, Homo sapiens; identical to SEQ ID NO: 198152
  chr2:30369411-30369591
  hypo

SEQ ID NO: 242465 - DNA, 1020 bp, Homo sapiens; identical to SEQ ID NO: 221721
  chr2:30453559-30454579
  hypo

SEQ ID NO: 242466 - DNA, 180 bp, Homo sapiens; identical to SEQ ID NO: 221722
  chr2:30454635-30454815
  hypo

SEQ ID NO: 242467 - DNA, 1523 bp, Homo sapiens; identical to SEQ ID NO: 221723
  chr2:31360251-31361774
  hypo

SEQ ID NO: 242468 - DNA, 720 bp, Homo sapiens; identical to SEQ ID NO: 221724
  chr2:37899014-37899734
  hypo

SEQ ID NO: 242469 - DNA, 48 bp, Homo sapiens; identical to SEQ ID NO: 221725
  chr2:38152927-38152975
  hypo

SEQ ID NO: 242470 - DNA, 227 bp, Homo sapiens; identical to SEQ ID NO: 221726
  chr2:39663571-39663798
  hypo

SEQ ID NO: 242471 - DNA, 995 bp, Homo sapiens; identical to SEQ ID NO: 221727
  chr2:39893064-39894059
  hypo

SEQ ID NO: 242472 - DNA, 573 bp, Homo sapiens; identical to SEQ ID NO: 221728
  chr2:40679145-40679718
  hypo

SEQ ID NO: 242473 - DNA, 240 bp, Homo sapiens; identical to SEQ ID NO: 221729
  chr2:42274761-42275001
  hypo

SEQ ID NO: 242474 - DNA, 240 bp, Homo sapiens; identical to SEQ ID NO: 221730
  chr2:42275215-42275455
  hypo

SEQ ID NO: 242475 - DNA, 162 bp, Homo sapiens; identical to SEQ ID NO: 221731
  chr2:42396181-42396343
  hypo

SEQ ID NO: 242476 - DNA, 720 bp, Homo sapiens; identical to SEQ ID NO: 221732
  chr2:42720571-42721291
  hypo

SEQ ID NO: 242477 - DNA, 900 bp, Homo sapiens; identical to SEQ ID NO: 221733
  chr2:43451684-43452584
  hypo

SEQ ID NO: 242478 - DNA, 354 bp, Homo sapiens; identical to SEQ ID NO: 221734
  chr2:45029730-45030084
  hypo

SEQ ID NO: 242479 - DNA, 180 bp, Homo sapiens; identical to SEQ ID NO: 221735
  chr2:45231905-45232085
  hypo

SEQ ID NO: 242480 - DNA, 420 bp, Homo sapiens; identical to SEQ ID NO: 221736
  chr2:45232136-45232556
  hypo

SEQ ID NO: 242481 - DNA, 420 bp, Homo sapiens; identical to SEQ ID NO: 221737
  chr2:45240425-45240845
  hypo

SEQ ID NO: 242482 - DNA, 559 bp, Homo sapiens; identical to SEQ ID NO: 198187
  chr2:46524134-46524693
  hypo

SEQ ID NO: 242483 - DNA, 240 bp, Homo sapiens; identical to SEQ ID NO: 221739
  chr2:46524986-46525226
  hypo

SEQ ID NO: 242484 - DNA, 323 bp, Homo sapiens; identical to SEQ ID NO: 221740
  chr2:46770636-46770959
  hypo

SEQ ID NO: 242485 - DNA, 81 bp, Homo sapiens; identical to SEQ ID NO: 198192
  chr2:47167906-47167987
  hypo

SEQ ID NO: 242486 - DNA, 806 bp, Homo sapiens; identical to SEQ ID NO: 221742
  chr2:47596176-47596982
  hypo

SEQ ID NO: 242487 - DNA, 438 bp, Homo sapiens; identical to SEQ ID NO: 221743
  chr2:47630103-47630541
  hypo

SEQ ID NO: 242488 - DNA, 155 bp, Homo sapiens; identical to SEQ ID NO: 221744
  chr2:47635539-47635694
  hypo

SEQ ID NO: 242489 - DNA, 279 bp, Homo sapiens; identical to SEQ ID NO: 221745
  chr2:47637232-47637511
  hypo

SEQ ID NO: 242490 - DNA, 147 bp, Homo sapiens; identical to SEQ ID NO: 221746
  chr2:47639552-47639699
  hypo

SEQ ID NO: 242491 - DNA, 150 bp, Homo sapiens; identical to SEQ ID NO: 221747
  chr2:47641407-47641557
  hypo

SEQ ID NO: 242492 - DNA, 134 bp, Homo sapiens; identical to SEQ ID NO: 221748
  chr2:47643434-47643568
  hypo

SEQ ID NO: 242493 - DNA, 200 bp, Homo sapiens; identical to SEQ ID NO: 221749
  chr2:47656880-47657080
  hypo

SEQ ID NO: 242494 - DNA, 110 bp, Homo sapiens; identical to SEQ ID NO: 221750
  chr2:47672686-47672796
  hypo

SEQ ID NO: 242495 - DNA, 124 bp, Homo sapiens; identical to SEQ ID NO: 221751
  chr2:47690169-47690293
  hypo

SEQ ID NO: 242496 - DNA, 151 bp, Homo sapiens; identical to SEQ ID NO: 221752
  chr2:47693796-47693947
  hypo

SEQ ID NO: 242497 - DNA, 98 bp, Homo sapiens; identical to SEQ ID NO: 221753
  chr2:47698103-47698201
  hypo

SEQ ID NO: 242498 - DNA, 246 bp, Homo sapiens; identical to SEQ ID NO: 221754
  chr2:47702163-47702409
  hypo

SEQ ID NO: 242499 - DNA, 205 bp, Homo sapiens; identical to SEQ ID NO: 221755
  chr2:47703505-47703710
  hypo

SEQ ID NO: 242500 - DNA, 248 bp, Homo sapiens; identical to SEQ ID NO: 221756
  chr2:47705410-47705658
  hypo

SEQ ID NO: 242501 - DNA, 176 bp, Homo sapiens; identical to SEQ ID NO: 221757
  chr2:47707834-47708010
  hypo

SEQ ID NO: 242502 - DNA, 450 bp, Homo sapiens; identical to SEQ ID NO: 221758
  chr2:47709917-47710367
  hypo

SEQ ID NO: 242503 - DNA, 735 bp, Homo sapiens; identical to SEQ ID NO: 221759
  chr2:47748015-47748750
  hypo

SEQ ID NO: 242504 - DNA, 2266 bp, Homo sapiens; identical to SEQ ID NO: 221760
  chr2:47796745-47799011
  hypo

SEQ ID NO: 242505 - DNA, 412 bp, Homo sapiens; identical to SEQ ID NO: 221761
  chr2:48010220-48010632
  hypo

SEQ ID NO: 242506 - DNA, 197 bp, Homo sapiens; identical to SEQ ID NO: 221762
  chr2:48018065-48018262
  hypo

SEQ ID NO: 242507 - DNA, 170 bp, Homo sapiens; identical to SEQ ID NO: 221763
  chr2:48023032-48023202
  hypo

SEQ ID NO: 242508 - DNA, 2545 bp, Homo sapiens; identical to SEQ ID NO: 221764
  chr2:48025749-48028294
  hypo

SEQ ID NO: 242509 - DNA, 266 bp, Homo sapiens; identical to SEQ ID NO: 221765
  chr2:48030558-48030824
  hypo

SEQ ID NO: 242510 - DNA, 118 bp, Homo sapiens; identical to SEQ ID NO: 221766
  chr2:48032048-48032166
  hypo

SEQ ID NO: 242511 - DNA, 90 bp, Homo sapiens; identical to SEQ ID NO: 221767
  chr2:48032756-48032846
  hypo

SEQ ID NO: 242512 - DNA, 750 bp, Homo sapiens; identical to SEQ ID NO: 221768
  chr2:48033342-48034092
  hypo

SEQ ID NO: 242513 - DNA, 140 bp, Homo sapiens; identical to SEQ ID NO: 221769
  chr2:54683032-54683172
  hypo

SEQ ID NO: 242514 - DNA, 209 bp, Homo sapiens; identical to SEQ ID NO: 221770
  chr2:55646327-55646536
  hypo

SEQ ID NO: 242515 - DNA, 180 bp, Homo sapiens; identical to SEQ ID NO: 221771
  chr2:58655408-58655588
  hypo

SEQ ID NO: 242516 - DNA, 231 bp, Homo sapiens; identical to SEQ ID NO: 221772
  chr2:58655901-58656132
  hypo

SEQ ID NO: 242517 - DNA, 101 bp, Homo sapiens; identical to SEQ ID NO: 198220
  chr2:58776940-58777041
  hypo

SEQ ID NO: 242518 - DNA, 300 bp, Homo sapiens; identical to SEQ ID NO: 221774
  chr2:60784483-60784783
  hypo

SEQ ID NO: 242519 - DNA, 319 bp, Homo sapiens; identical to SEQ ID NO: 221775
  chr2:61175661-61175980
  hypo

SEQ ID NO: 242520 - DNA, 95 bp, Homo sapiens; identical to SEQ ID NO: 221776
  chr2:61921788-61921883
  hypo

SEQ ID NO: 242521 - DNA, 342 bp, Homo sapiens; identical to SEQ ID NO: 221777
  chr2:61990960-61991302
  hypo

SEQ ID NO: 242522 - DNA, 240 bp, Homo sapiens; identical to SEQ ID NO: 221778
  chr2:61991468-61991708
  hypo

SEQ ID NO: 242523 - DNA, 582 bp, Homo sapiens; identical to SEQ ID NO: 221779
  chr2:64836250-64836832
  hypo

SEQ ID NO: 242524 - DNA, 142 bp, Homo sapiens; identical to SEQ ID NO: 221780
  chr2:64872367-64872509
  hypo

SEQ ID NO: 242525 - DNA, 357 bp, Homo sapiens; identical to SEQ ID NO: 221781
  chr2:65086836-65087193
  hypo

SEQ ID NO: 242526 - DNA, 482 bp, Homo sapiens; identical to SEQ ID NO: 221782
  chr2:65215348-65215830
  hypo

SEQ ID NO: 242527 - DNA, 180 bp, Homo sapiens; identical to SEQ ID NO: 198249
  chr2:66661524-66661704
  hypo

SEQ ID NO: 242528 - DNA, 650 bp, Homo sapiens; identical to SEQ ID NO: 221784
  chr2:68546319-68546969
  hypo

SEQ ID NO: 242529 - DNA, 180 bp, Homo sapiens; identical to SEQ ID NO: 221785
  chr2:68546998-68547178
  hypo

SEQ ID NO: 242530 - DNA, 161 bp, Homo sapiens; identical to SEQ ID NO: 221786
  chr2:69240028-69240189
  hypo

SEQ ID NO: 242531 - DNA, 420 bp, Homo sapiens; identical to SEQ ID NO: 221787
  chr2:69240245-69240665
  hypo

SEQ ID NO: 242532 - DNA, 180 bp, Homo sapiens; identical to SEQ ID NO: 221788
  chr2:69240736-69240916
  hypo

SEQ ID NO: 242533 - DNA, 142 bp, Homo sapiens; identical to SEQ ID NO: 221789
  chr2:69968661-69968803
  hypo

SEQ ID NO: 242534 - DNA, 360 bp, Homo sapiens; identical to SEQ ID NO: 221790
  chr2:70351201-70351561
  hypo

SEQ ID NO: 242535 - DNA, 105 bp, Homo sapiens; identical to SEQ ID NO: 221791
  chr2:70369226-70369331
  hypo

SEQ ID NO: 242536 - DNA, 180 bp, Homo sapiens; identical to SEQ ID NO: 198265
  chr2:70418116-70418296
  hypo

SEQ ID NO: 242537 - DNA, 53 bp, Homo sapiens; identical to SEQ ID NO: 221793
  chr2:71502836-71502889
  hypo

SEQ ID NO: 242538 - DNA, 180 bp, Homo sapiens; identical to SEQ ID NO: 221794
  chr2:71503490-71503670
  hypo

SEQ ID NO: 242539 - DNA, 600 bp, Homo sapiens; identical to SEQ ID NO: 221795
  chr2:71503734-71504334
  hypo

SEQ ID NO: 242540 - DNA, 720 bp, Homo sapiens; identical to SEQ ID NO: 221796
  chr2:72374294-72375014
  hypo

SEQ ID NO: 242541 - DNA, 240 bp, Homo sapiens; identical to SEQ ID NO: 221797
  chr2:72375575-72375815
  hypo

SEQ ID NO: 242542 - DNA, 240 bp, Homo sapiens; identical to SEQ ID NO: 221798
  chr2:73052815-73053055
  hypo

SEQ ID NO: 242543 - DNA, 198 bp, Homo sapiens; identical to SEQ ID NO: 221799
  chr2:73114304-73114502
  hypo

SEQ ID NO: 242544 - DNA, 720 bp, Homo sapiens; identical to SEQ ID NO: 221800
  chr2:73143409-73144129
  hypo

SEQ ID NO: 242545 - DNA, 946 bp, Homo sapiens; identical to SEQ ID NO: 221801
  chr2:73520105-73521051
  hypo

SEQ ID NO: 242546 - DNA, 252 bp, Homo sapiens; identical to SEQ ID NO: 221802
  chr2:74211285-74211537
  hypo

SEQ ID NO: 242547 - DNA, 240 bp, Homo sapiens; identical to SEQ ID NO: 221803
  chr2:74405791-74406031
  hypo

SEQ ID NO: 242548 - DNA, 840 bp, Homo sapiens; identical to SEQ ID NO: 221804
  chr2:74425591-74426431
  hypo

SEQ ID NO: 242549 - DNA, 540 bp, Homo sapiens; identical to SEQ ID NO: 221805
  chr2:74740950-74741490
  hypo

SEQ ID NO: 242550 - DNA, 660 bp, Homo sapiens; identical to SEQ ID NO: 221806
  chr2:74741711-74742371
  hypo

SEQ ID NO: 242551 - DNA, 36 bp, Homo sapiens; identical to SEQ ID NO: 198305
  chr2:74776040-74776076
  hypo

SEQ ID NO: 242552 - DNA, 635 bp, Homo sapiens; identical to SEQ ID NO: 221808
  chr2:74781686-74782321
  hypo

SEQ ID NO: 242553 - DNA, 1360 bp, Homo sapiens; identical to SEQ ID NO: 221809
  chr2:75060918-75062278
  hypo

SEQ ID NO: 242554 - DNA, 180 bp, Homo sapiens; identical to SEQ ID NO: 221810
  chr2:85107380-85107560
  hypo

SEQ ID NO: 242555 - DNA, 275 bp, Homo sapiens; identical to SEQ ID NO: 221811
  chr2:85107659-85107934
  hypo

SEQ ID NO: 242556 - DNA, 511 bp, Homo sapiens; identical to SEQ ID NO: 221812
  chr2:85361137-85361648
  hypo

SEQ ID NO: 242557 - DNA, 224 bp, Homo sapiens; identical to SEQ ID NO: 221813
  chr2:85829251-85829475
  hypo

SEQ ID NO: 242558 - DNA, 973 bp, Homo sapiens; identical to SEQ ID NO: 221814
  chr2:85980727-85981700
  hypo

SEQ ID NO: 242559 - DNA, 53 bp, Homo sapiens; identical to SEQ ID NO: 198319
  chr2:86850368-86850421
  hypo

SEQ ID NO: 242560 - DNA, 367 bp, Homo sapiens; identical to SEQ ID NO: 221816
  chr2:87016717-87017084
  hypo

SEQ ID NO: 242561 - DNA, 788 bp, Homo sapiens; identical to SEQ ID NO: 221817
  chr2:87017491-87018279
  hypo

SEQ ID NO: 242562 - DNA, 198 bp, Homo sapiens; identical to SEQ ID NO: 221818
  chr2:87018365-87018563
  hypo

SEQ ID NO: 242563 - DNA, 1014 bp, Homo sapiens; identical to SEQ ID NO: 221819
  chr2:88751266-88752280
  hypo

SEQ ID NO: 242564 - DNA, 180 bp, Homo sapiens; identical to SEQ ID NO: 221820
  chr2:88752398-88752578
  hypo

SEQ ID NO: 242565 - DNA, 311 bp, Homo sapiens; identical to SEQ ID NO: 221821
  chr2:89065111-89065422
  hypo

SEQ ID NO: 242566 - DNA, 392 bp, Homo sapiens; identical to SEQ ID NO: 221822
  chr2:95690867-95691259
  hypo

SEQ ID NO: 242567 - DNA, 420 bp, Homo sapiens; identical to SEQ ID NO: 221823
  chr2:95691398-95691818
  hypo

SEQ ID NO: 242568 - DNA, 420 bp, Homo sapiens; identical to SEQ ID NO: 221824
  chr2:95691853-95692273
  hypo

SEQ ID NO: 242569 - DNA, 324 bp, Homo sapiens; identical to SEQ ID NO: 221825
  chr2:95825283-95825607
  hypo

SEQ ID NO: 242570 - DNA, 863 bp, Homo sapiens; identical to SEQ ID NO: 221826
  chr2:96011867-96012730
  hypo

SEQ ID NO: 242571 - DNA, 360 bp, Homo sapiens; identical to SEQ ID NO: 221827
  chr2:96987063-96987423
  hypo

SEQ ID NO: 242572 - DNA, 319 bp, Homo sapiens; identical to SEQ ID NO: 221828
  chr2:96987527-96987846
  hypo

SEQ ID NO: 242573 - DNA, 210 bp, Homo sapiens; identical to SEQ ID NO: 198323
  chr2:97171202-97171412
  hypo

SEQ ID NO: 242574 - DNA, 226 bp, Homo sapiens; identical to SEQ ID NO: 198325
  chr2:97175214-97175440
  hypo

SEQ ID NO: 242575 - DNA, 268 bp, Homo sapiens; identical to SEQ ID NO: 221831
  chr2:97203314-97203582
  hypo

SEQ ID NO: 242576 - DNA, 105 bp, Homo sapiens; identical to SEQ ID NO: 221832
  chr2:97304096-97304201
  hypo

SEQ ID NO: 242577 - DNA, 156 bp, Homo sapiens; identical to SEQ ID NO: 221833
  chr2:97482863-97483019
  hypo

SEQ ID NO: 242578 - DNA, 156 bp, Homo sapiens; identical to SEQ ID NO: 198330
  chr2:97535760-97535916
  hypo

SEQ ID NO: 242579 - DNA, 103 bp, Homo sapiens; identical to SEQ ID NO: 198331
  chr2:97779476-97779579
  hypo

SEQ ID NO: 242580 - DNA, 937 bp, Homo sapiens; identical to SEQ ID NO: 221836
  chr2:100720968-100721905
  hypo

SEQ ID NO: 242581 - DNA, 391 bp, Homo sapiens; identical to SEQ ID NO: 221837
  chr2:100898414-100898805
  hypo

SEQ ID NO: 242582 - DNA, 779 bp, Homo sapiens; identical to SEQ ID NO: 221838
  chr2:101033518-101034297
  hypo

SEQ ID NO: 242583 - DNA, 365 bp, Homo sapiens; identical to SEQ ID NO: 221839
  chr2:101767478-101767843
  hypo

SEQ ID NO: 242584 - DNA, 720 bp, Homo sapiens; identical to SEQ ID NO: 221840
  chr2:101924734-101925454
  hypo

SEQ ID NO: 242585 - DNA, 494 bp, Homo sapiens; identical to SEQ ID NO: 221841
  chr2:102313750-102314244
  hypo

SEQ ID NO: 242586 - DNA, 344 bp, Homo sapiens; identical to SEQ ID NO: 221842
  chr2:102759154-102759498
  hypo

SEQ ID NO: 242587 - DNA, 1140 bp, Homo sapiens; identical to SEQ ID NO: 221843
  chr2:105459064-105460204
  hypo

SEQ ID NO: 242588 - DNA, 180 bp, Homo sapiens; identical to SEQ ID NO: 221844
  chr2:105461092-105461272
  hypo

SEQ ID NO: 242589 - DNA, 540 bp, Homo sapiens; identical to SEQ ID NO: 221845
  chr2:105461314-105461854
  hypo

SEQ ID NO: 242590 - DNA, 720 bp, Homo sapiens; identical to SEQ ID NO: 221846
  chr2:105468539-105469259
  hypo

SEQ ID NO: 242591 - DNA, 540 bp, Homo sapiens; identical to SEQ ID NO: 221847
  chr2:105471153-105471693
  hypo

SEQ ID NO: 242592 - DNA, 360 bp, Homo sapiens; identical to SEQ ID NO: 221848
  chr2:105478550-105478910
  hypo

SEQ ID NO: 242593 - DNA, 180 bp, Homo sapiens; identical to SEQ ID NO: 221849
  chr2:105479044-105479224
  hypo

SEQ ID NO: 242594 - DNA, 898 bp, Homo sapiens; identical to SEQ ID NO: 221850
  chr2:105760095-105760993
  hypo

SEQ ID NO: 242595 - DNA, 162 bp, Homo sapiens; identical to SEQ ID NO: 221851
  chr2:106362018-106362180
  hypo

SEQ ID NO: 242596 - DNA, 170 bp, Homo sapiens; identical to SEQ ID NO: 221852
  chr2:109335510-109335680
  hypo

SEQ ID NO: 242597 - DNA, 336 bp, Homo sapiens; identical to SEQ ID NO: 221853
  chr2:109647969-109648305
  hypo

SEQ ID NO: 242598 - DNA, 180 bp, Homo sapiens; identical to SEQ ID NO: 221854
  chr2:111490277-111490457
  hypo

SEQ ID NO: 242599 - DNA, 258 bp, Homo sapiens; identical to SEQ ID NO: 221855
  chr2:111490601-111490859
  hypo

SEQ ID NO: 242600 - DNA, 85 bp, Homo sapiens; identical to SEQ ID NO: 221856
  chr2:111880646-111880731
  hypo

SEQ ID NO: 242601 - DNA, 635 bp, Homo sapiens; identical to SEQ ID NO: 221857
  chr2:112656487-112657122
  hypo

SEQ ID NO: 242602 - DNA, 420 bp, Homo sapiens; identical to SEQ ID NO: 221858
  chr2:115918841-115919261
  hypo

SEQ ID NO: 242603 - DNA, 180 bp, Homo sapiens; identical to SEQ ID NO: 221859
  chr2:115919439-115919619
  hypo

SEQ ID NO: 242604 - DNA, 252 bp, Homo sapiens; identical to SEQ ID NO: 221860
  chr2:119613017-119613269
  hypo

SEQ ID NO: 242605 - DNA, 180 bp, Homo sapiens; identical to SEQ ID NO: 221861
  chr2:119613353-119613533
  hypo

SEQ ID NO: 242606 - DNA, 276 bp, Homo sapiens; identical to SEQ ID NO: 221862
  chr2:119769120-119769396
  hypo

SEQ ID NO: 242607 - DNA, 929 bp, Homo sapiens; identical to SEQ ID NO: 221863
  chr2:119915696-119916625
  hypo

SEQ ID NO: 242608 - DNA, 342 bp, Homo sapiens; identical to SEQ ID NO: 221864
  chr2:120770809-120771151
  hypo

SEQ ID NO: 242609 - DNA, 660 bp, Homo sapiens; identical to SEQ ID NO: 221865
  chr2:127413624-127414284
  hypo

SEQ ID NO: 242610 - DNA, 769 bp, Homo sapiens; identical to SEQ ID NO: 221866
  chr2:127534437-127535206
  hypo

SEQ ID NO: 242611 - DNA, 753 bp, Homo sapiens; identical to SEQ ID NO: 221867
  chr2:127863362-127864115
  hypo

SEQ ID NO: 242612 - DNA, 105 bp, Homo sapiens; identical to SEQ ID NO: 198431
  chr2:128459399-128459504
  hypo

SEQ ID NO: 242613 - DNA, 429 bp, Homo sapiens; identical to SEQ ID NO: 221869
  chr2:130737208-130737637
  hypo

SEQ ID NO: 242614 - DNA, 209 bp, Homo sapiens; identical to SEQ ID NO: 221870
  chr2:131113001-131113210
  hypo

SEQ ID NO: 242615 - DNA, 213 bp, Homo sapiens; identical to SEQ ID NO: 221871
  chr2:131114254-131114467
  hypo

SEQ ID NO: 242616 - DNA, 514 bp, Homo sapiens; identical to SEQ ID NO: 221872
  chr2:131513377-131513891
  hypo

SEQ ID NO: 242617 - DNA, 300 bp, Homo sapiens; identical to SEQ ID NO: 221873
  chr2:131720734-131721034
  hypo

SEQ ID NO: 242618 - DNA, 105 bp, Homo sapiens; identical to SEQ ID NO: 221874
  chr2:132088694-132088799
  hypo

SEQ ID NO: 242619 - DNA, 239 bp, Homo sapiens; identical to SEQ ID NO: 221875
  chr2:132182876-132183115
  hypo

SEQ ID NO: 242620 - DNA, 269 bp, Homo sapiens; identical to SEQ ID NO: 221876
  chr2:132767360-132767629
  hypo

SEQ ID NO: 242621 - DNA, 234 bp, Homo sapiens; identical to SEQ ID NO: 221877
  chr2:132767695-132767929
  hypo

SEQ ID NO: 242622 - DNA, 82 bp, Homo sapiens; identical to SEQ ID NO: 221878
  chr2:132795884-132795966
  hypo

SEQ ID NO: 242623 - DNA, 98 bp, Homo sapiens; identical to SEQ ID NO: 221879
  chr2:132796086-132796184
  hypo

SEQ ID NO: 242624 - DNA, 100 bp, Homo sapiens; identical to SEQ ID NO: 198436
  chr2:132796304-132796404
  hypo

SEQ ID NO: 242625 - DNA, 821 bp, Homo sapiens; identical to SEQ ID NO: 221881
  chr2:135475591-135476412
  hypo

SEQ ID NO: 242626 - DNA, 88 bp, Homo sapiens; identical to SEQ ID NO: 198446
  chr2:136288366-136288454
  hypo

SEQ ID NO: 242627 - DNA, 360 bp, Homo sapiens; identical to SEQ ID NO: 221883
  chr2:136873992-136874352
  hypo

SEQ ID NO: 242628 - DNA, 1680 bp, Homo sapiens; identical to SEQ ID NO: 221884
  chr2:136874441-136876121
  hypo

SEQ ID NO: 242629 - DNA, 240 bp, Homo sapiens; identical to SEQ ID NO: 221885
  chr2:136876822-136877062
  hypo

SEQ ID NO: 242630 - DNA, 420 bp, Homo sapiens; identical to SEQ ID NO: 221886
  chr2:137522444-137522864
  hypo

SEQ ID NO: 242631 - DNA, 180 bp, Homo sapiens; identical to SEQ ID NO: 221887
  chr2:137522920-137523100
  hypo

SEQ ID NO: 242632 - DNA, 360 bp, Homo sapiens; identical to SEQ ID NO: 221888
  chr2:137523130-137523490
  hypo

SEQ ID NO: 242633 - DNA, 600 bp, Homo sapiens; identical to SEQ ID NO: 221889
  chr2:139537456-139538056
  hypo

SEQ ID NO: 242634 - DNA, 149 bp, Homo sapiens; identical to SEQ ID NO: 221890
  chr2:139538087-139538236
  hypo

SEQ ID NO: 242635 - DNA, 1039 bp, Homo sapiens; identical to SEQ ID NO: 221891
  chr2:144694286-144695325
  hypo

SEQ ID NO: 242636 - DNA, 33 bp, Homo sapiens; identical to SEQ ID NO: 198457
  chr2:145090080-145090113
  hypo

SEQ ID NO: 242637 - DNA, 515 bp, Homo sapiens; identical to SEQ ID NO: 221893
  chr2:145273318-145273833
  hypo

SEQ ID NO: 242638 - DNA, 1380 bp, Homo sapiens; identical to SEQ ID NO: 221894
  chr2:145274038-145275418
  hypo

SEQ ID NO: 242639 - DNA, 180 bp, Homo sapiens; identical to SEQ ID NO: 221895
  chr2:145275510-145275690
  hypo

SEQ ID NO: 242640 - DNA, 240 bp, Homo sapiens; identical to SEQ ID NO: 221896
  chr2:145281791-145282031
  hypo

SEQ ID NO: 242641 - DNA, 900 bp, Homo sapiens; identical to SEQ ID NO: 221897
  chr2:148601601-148602501
  hypo

SEQ ID NO: 242642 - DNA, 215 bp, Homo sapiens; identical to SEQ ID NO: 198460
  chr2:148602728-148602943
  hypo

SEQ ID NO: 242643 - DNA, 1439 bp, Homo sapiens; identical to SEQ ID NO: 221899
  chr2:149632585-149634024
  hypo

SEQ ID NO: 242644 - DNA, 720 bp, Homo sapiens; identical to SEQ ID NO: 221900
  chr2:150186614-150187334
  hypo

SEQ ID NO: 242645 - DNA, 131 bp, Homo sapiens; identical to SEQ ID NO: 221901
  chr2:152955667-152955798
  hypo

SEQ ID NO: 242646 - DNA, 130 bp, Homo sapiens; identical to SEQ ID NO: 221902
  chr2:152956020-152956150
  hypo

SEQ ID NO: 242647 - DNA, 180 bp, Homo sapiens; identical to SEQ ID NO: 221903
  chr2:153192268-153192448
  hypo

SEQ ID NO: 242648 - DNA, 720 bp, Homo sapiens; identical to SEQ ID NO: 221904
  chr2:155553998-155554718
  hypo

SEQ ID NO: 242649 - DNA, 180 bp, Homo sapiens; identical to SEQ ID NO: 221905
  chr2:155555061-155555241
  hypo

SEQ ID NO: 242650 - DNA, 148 bp, Homo sapiens; identical to SEQ ID NO: 221906
  chr2:157189365-157189513
  hypo

SEQ ID NO: 242651 - DNA, 459 bp, Homo sapiens; identical to SEQ ID NO: 221907
  chr2:157292163-157292622
  hypo

SEQ ID NO: 242652 - DNA, 206 bp, Homo sapiens; identical to SEQ ID NO: 221908
  chr2:158485092-158485298
  hypo

SEQ ID NO: 242653 - DNA, 1713 bp, Homo sapiens; identical to SEQ ID NO: 221909
  chr2:159313066-159314779
  hypo

SEQ ID NO: 242654 - DNA, 506 bp, Homo sapiens; identical to SEQ ID NO: 198493
  chr2:160142449-160142955
  hypo

SEQ ID NO: 242655 - DNA, 503 bp, Homo sapiens; identical to SEQ ID NO: 221911
  chr2:160654215-160654718
  hypo

SEQ ID NO: 242656 - DNA, 104 bp, Homo sapiens; identical to SEQ ID NO: 221912
  chr2:160654789-160654893
  hypo

SEQ ID NO: 242657 - DNA, 759 bp, Homo sapiens; identical to SEQ ID NO: 221913
  chr2:160760623-160761382
  hypo

SEQ ID NO: 242658 - DNA, 228 bp, Homo sapiens; identical to SEQ ID NO: 221914
  chr2:161126710-161126938
  hypo

SEQ ID NO: 242659 - DNA, 747 bp, Homo sapiens; identical to SEQ ID NO: 221915
  chr2:161263704-161264451
  hypo

SEQ ID NO: 242660 - DNA, 287 bp, Homo sapiens; identical to SEQ ID NO: 221916
  chr2:162271679-162271966
  hypo

SEQ ID NO: 242661 - DNA, 480 bp, Homo sapiens; identical to SEQ ID NO: 221917
  chr2:162275161-162275641
  hypo

SEQ ID NO: 242662 - DNA, 448 bp, Homo sapiens; identical to SEQ ID NO: 221918
  chr2:162279833-162280281
  hypo

SEQ ID NO: 242663 - DNA, 540 bp, Homo sapiens; identical to SEQ ID NO: 221919
  chr2:162930215-162930755
  hypo

SEQ ID NO: 242664 - DNA, 130 bp, Homo sapiens; identical to SEQ ID NO: 221920
  chr2:162930847-162930977
  hypo

SEQ ID NO: 242665 - DNA, 480 bp, Homo sapiens; identical to SEQ ID NO: 221921
  chr2:165477548-165478028
  hypo

SEQ ID NO: 242666 - DNA, 180 bp, Homo sapiens; identical to SEQ ID NO: 221922
  chr2:165478091-165478271
  hypo

SEQ ID NO: 242667 - DNA, 1225 bp, Homo sapiens; identical to SEQ ID NO: 221923
  chr2:165697145-165698370
  hypo

SEQ ID NO: 242668 - DNA, 269 bp, Homo sapiens; identical to SEQ ID NO: 221924
  chr2:165698400-165698669
  hypo

SEQ ID NO: 242669 - DNA, 1080 bp, Homo sapiens; identical to SEQ ID NO: 221925
  chr2:166650131-166651211
  hypo

SEQ ID NO: 242670 - DNA, 1580 bp, Homo sapiens; identical to SEQ ID NO: 221926
  chr2:168148857-168150437
  hypo

SEQ ID NO: 242671 - DNA, 300 bp, Homo sapiens; identical to SEQ ID NO: 221927
  chr2:168150565-168150865
  hypo

SEQ ID NO: 242672 - DNA, 240 bp, Homo sapiens; identical to SEQ ID NO: 221928
  chr2:169312731-169312971
  hypo

SEQ ID NO: 242673 - DNA, 1080 bp, Homo sapiens; identical to SEQ ID NO: 221929
  chr2:170218392-170219472
  hypo

SEQ ID NO: 242674 - DNA, 105 bp, Homo sapiens; identical to SEQ ID NO: 221930
  chr2:170430355-170430460
  hypo

SEQ ID NO: 242675 - DNA, 682 bp, Homo sapiens; identical to SEQ ID NO: 221931
  chr2:171627264-171627946
  hypo

SEQ ID NO: 242676 - DNA, 171 bp, Homo sapiens; identical to SEQ ID NO: 221932
  chr2:172378955-172379126
  hypo

SEQ ID NO: 242677 - DNA, 439 bp, Homo sapiens; identical to SEQ ID NO: 221933
  chr2:172379339-172379778
  hypo

SEQ ID NO: 242678 - DNA, 240 bp, Homo sapiens; identical to SEQ ID NO: 221934
  chr2:172379834-172380074
  hypo

SEQ ID NO: 242679 - DNA, 319 bp, Homo sapiens; identical to SEQ ID NO: 198551
  chr2:173940416-173940735
  hypo

SEQ ID NO: 242680 - DNA, 103 bp, Homo sapiens; identical to SEQ ID NO: 221936
  chr2:174147823-174147926
  hypo

SEQ ID NO: 242681 - DNA, 217 bp, Homo sapiens; identical to SEQ ID NO: 198553
  chr2:174349951-174350168
  hypo

SEQ ID NO: 242682 - DNA, 1440 bp, Homo sapiens; identical to SEQ ID NO: 221938
  chr2:175200381-175201821
  hypo

SEQ ID NO: 242683 - DNA, 240 bp, Homo sapiens; identical to SEQ ID NO: 221939
  chr2:175546811-175547051
  hypo

SEQ ID NO: 242684 - DNA, 236 bp, Homo sapiens; identical to SEQ ID NO: 221940
  chr2:176936543-176936779
  hypo

SEQ ID NO: 242685 - DNA, 960 bp, Homo sapiens; identical to SEQ ID NO: 221941
  chr2:176944605-176945565
  hypo

SEQ ID NO: 242686 - DNA, 780 bp, Homo sapiens; identical to SEQ ID NO: 221942
  chr2:176957464-176958244
  hypo

SEQ ID NO: 242687 - DNA, 138 bp, Homo sapiens; identical to SEQ ID NO: 221943
  chr2:177022459-177022597
  hypo

SEQ ID NO: 242688 - DNA, 180 bp, Homo sapiens; identical to SEQ ID NO: 221944
  chr2:177042543-177042723
  hypo

SEQ ID NO: 242689 - DNA, 180 bp, Homo sapiens; identical to SEQ ID NO: 221945
  chr2:177043136-177043316
  hypo

SEQ ID NO: 242690 - DNA, 900 bp, Homo sapiens; identical to SEQ ID NO: 221946
  chr2:177052895-177053795
  hypo

SEQ ID NO: 242691 - DNA, 1011 bp, Homo sapiens; identical to SEQ ID NO: 221947
  chr2:177502175-177503186
  hypo

SEQ ID NO: 242692 - DNA, 816 bp, Homo sapiens; identical to SEQ ID NO: 221948
  chr2:178257219-178258035
  hypo

SEQ ID NO: 242693 - DNA, 640 bp, Homo sapiens; identical to SEQ ID NO: 221949
  chr2:179316084-179316724
  hypo

SEQ ID NO: 242694 - DNA, 85 bp, Homo sapiens; identical to SEQ ID NO: 198592
  chr2:180129611-180129696
  hypo

SEQ ID NO: 242695 - DNA, 1500 bp, Homo sapiens; identical to SEQ ID NO: 221951
  chr2:182321530-182323030
  hypo

SEQ ID NO: 242696 - DNA, 1280 bp, Homo sapiens; identical to SEQ ID NO: 221952
  chr2:183902358-183903638
  hypo

SEQ ID NO: 242697 - DNA, 960 bp, Homo sapiens; identical to SEQ ID NO: 221953
  chr2:185462785-185463745
  hypo

SEQ ID NO: 242698 - DNA, 284 bp, Homo sapiens; identical to SEQ ID NO: 198604
  chr2:187454990-187455274
  hypo

SEQ ID NO: 242699 - DNA, 1029 bp, Homo sapiens; identical to SEQ ID NO: 221955
  chr2:191044992-191046021
  hypo

SEQ ID NO: 242700 - DNA, 139 bp, Homo sapiens; identical to SEQ ID NO: 198615
  chr2:191512982-191513121
  hypo

SEQ ID NO: 242701 - DNA, 900 bp, Homo sapiens; identical to SEQ ID NO: 221957
  chr2:192109726-192110626
  hypo

SEQ ID NO: 242702 - DNA, 756 bp, Homo sapiens; identical to SEQ ID NO: 221958
  chr2:193058975-193059731
  hypo

SEQ ID NO: 242703 - DNA, 171 bp, Homo sapiens; identical to SEQ ID NO: 221959
  chr2:197035576-197035747
  hypo

SEQ ID NO: 242704 - DNA, 1177 bp, Homo sapiens; identical to SEQ ID NO: 221960
  chr2:197457184-197458361
  hypo

SEQ ID NO: 242705 - DNA, 121 bp, Homo sapiens; identical to SEQ ID NO: 198631
  chr2:198257786-198257907
  hypo

SEQ ID NO: 242706 - DNA, 106 bp, Homo sapiens; identical to SEQ ID NO: 198632
  chr2:198262740-198262846
  hypo

SEQ ID NO: 242707 - DNA, 148 bp, Homo sapiens; identical to SEQ ID NO: 198633
  chr2:198265015-198265163
  hypo

SEQ ID NO: 242708 - DNA, 178 bp, Homo sapiens; identical to SEQ ID NO: 198634
  chr2:198265429-198265607
  hypo

SEQ ID NO: 242709 - DNA, 370 bp, Homo sapiens; identical to SEQ ID NO: 221965
  chr2:198266479-198266849
  hypo

SEQ ID NO: 242710 - DNA, 432 bp, Homo sapiens; identical to SEQ ID NO: 221966
  chr2:198267318-198267750
  hypo

SEQ ID NO: 242711 - DNA, 70 bp, Homo sapiens; identical to SEQ ID NO: 198637
  chr2:198268366-198268436
  hypo

SEQ ID NO: 242712 - DNA, 93 bp, Homo sapiens; identical to SEQ ID NO: 198638
  chr2:198269812-198269905
  hypo

SEQ ID NO: 242713 - DNA, 81 bp, Homo sapiens; identical to SEQ ID NO: 198639
  chr2:198272718-198272799
  hypo

SEQ ID NO: 242714 - DNA, 147 bp, Homo sapiens; identical to SEQ ID NO: 198640
  chr2:198273117-198273264
  hypo

SEQ ID NO: 242715 - DNA, 1113 bp, Homo sapiens; identical to SEQ ID NO: 221971
  chr2:198669064-198670177
  hypo

SEQ ID NO: 242716 - DNA, 180 bp, Homo sapiens; identical to SEQ ID NO: 221972
  chr2:200321178-200321358
  hypo

SEQ ID NO: 242717 - DNA, 342 bp, Homo sapiens; identical to SEQ ID NO: 221973
  chr2:200321708-200322050
  hypo

SEQ ID NO: 242718 - DNA, 104 bp, Homo sapiens; identical to SEQ ID NO: 221974
  chr2:200322566-200322670
  hypo

SEQ ID NO: 242719 - DNA, 781 bp, Homo sapiens; identical to SEQ ID NO: 221975
  chr2:200323016-200323797
  hypo

SEQ ID NO: 242720 - DNA, 582 bp, Homo sapiens; identical to SEQ ID NO: 221976
  chr2:200324029-200324611
  hypo

SEQ ID NO: 242721 - DNA, 1449 bp, Homo sapiens; identical to SEQ ID NO: 221977
  chr2:201171150-201172599
  hypo

SEQ ID NO: 242722 - DNA, 204 bp, Homo sapiens; identical to SEQ ID NO: 221978
  chr2:202644945-202645149
  hypo

SEQ ID NO: 242723 - DNA, 830 bp, Homo sapiens; identical to SEQ ID NO: 221979
  chr2:202899281-202900111
  hypo

SEQ ID NO: 242724 - DNA, 104 bp, Homo sapiens; identical to SEQ ID NO: 221980
  chr2:203242328-203242432
  hypo

SEQ ID NO: 242725 - DNA, 160 bp, Homo sapiens; identical to SEQ ID NO: 221981
  chr2:204399803-204399963
  hypo

SEQ ID NO: 242726 - DNA, 362 bp, Homo sapiens; identical to SEQ ID NO: 221982
  chr2:206546583-206546945
  hypo

SEQ ID NO: 242727 - DNA, 840 bp, Homo sapiens; identical to SEQ ID NO: 221983
  chr2:207139278-207140118
  hypo

SEQ ID NO: 242728 - DNA, 1837 bp, Homo sapiens; identical to SEQ ID NO: 221984
  chr2:207307398-207309235
  hypo

SEQ ID NO: 242729 - DNA, 78 bp, Homo sapiens; identical to SEQ ID NO: 198673
  chr2:209108240-209108318
  hypo

SEQ ID NO: 242730 - DNA, 308 bp, Homo sapiens; identical to SEQ ID NO: 221986
  chr2:209113081-209113389
  hypo

SEQ ID NO: 242731 - DNA, 211 bp, Homo sapiens; identical to SEQ ID NO: 198675
  chr2:209118761-209118972
  hypo

SEQ ID NO: 242732 - DNA, 33 bp, Homo sapiens; identical to SEQ ID NO: 221988
  chr2:217008385-217008418
  hypo

SEQ ID NO: 242733 - DNA, 408 bp, Homo sapiens; identical to SEQ ID NO: 221989
  chr2:217236005-217236413
  hypo

SEQ ID NO: 242734 - DNA, 660 bp, Homo sapiens; identical to SEQ ID NO: 221990
  chr2:217558911-217559571
  hypo

SEQ ID NO: 242735 - DNA, 582 bp, Homo sapiens; identical to SEQ ID NO: 221991
  chr2:219232308-219232890
  hypo

SEQ ID NO: 242736 - DNA, 241 bp, Homo sapiens; identical to SEQ ID NO: 221992
  chr2:219262922-219263163
  hypo

SEQ ID NO: 242737 - DNA, 537 bp, Homo sapiens; identical to SEQ ID NO: 221993
  chr2:219263453-219263990
  hypo

SEQ ID NO: 242738 - DNA, 328 bp, Homo sapiens; identical to SEQ ID NO: 221994
  chr2:219264114-219264442
  hypo

SEQ ID NO: 242739 - DNA, 180 bp, Homo sapiens; identical to SEQ ID NO: 221995
  chr2:219735819-219735999
  hypo

SEQ ID NO: 242740 - DNA, 600 bp, Homo sapiens; identical to SEQ ID NO: 221996
  chr2:219736056-219736656
  hypo

SEQ ID NO: 242741 - DNA, 320 bp, Homo sapiens; identical to SEQ ID NO: 221997
  chr2:219748456-219748776
  hypo

SEQ ID NO: 242742 - DNA, 300 bp, Homo sapiens; identical to SEQ ID NO: 221998
  chr2:219757678-219757978
  hypo

SEQ ID NO: 242743 - DNA, 1200 bp, Homo sapiens; identical to SEQ ID NO: 221999
  chr2:219824741-219825941
  hypo

SEQ ID NO: 242744 - DNA, 780 bp, Homo sapiens; identical to SEQ ID NO: 222000
  chr2:219846201-219846981
  hypo

SEQ ID NO: 242745 - DNA, 180 bp, Homo sapiens; identical to SEQ ID NO: 222001
  chr2:219847085-219847265
  hypo

SEQ ID NO: 242746 - DNA, 321 bp, Homo sapiens; identical to SEQ ID NO: 222002
  chr2:219857662-219857983
  hypo

SEQ ID NO: 242747 - DNA, 260 bp, Homo sapiens; identical to SEQ ID NO: 222003
  chr2:219866310-219866570
  hypo

SEQ ID NO: 242748 - DNA, 366 bp, Homo sapiens; identical to SEQ ID NO: 222004
  chr2:220173937-220174303
  hypo

SEQ ID NO: 242749 - DNA, 552 bp, Homo sapiens; identical to SEQ ID NO: 222005
  chr2:220349252-220349804
  hypo

SEQ ID NO: 242750 - DNA, 293 bp, Homo sapiens; identical to SEQ ID NO: 222006
  chr2:220378982-220379275
  hypo

SEQ ID NO: 242751 - DNA, 105 bp, Homo sapiens; identical to SEQ ID NO: 222007
  chr2:220408079-220408184
  hypo

SEQ ID NO: 242752 - DNA, 56 bp, Homo sapiens; identical to SEQ ID NO: 198719
  chr2:220408723-220408779
  hypo

SEQ ID NO: 242753 - DNA, 681 bp, Homo sapiens; identical to SEQ ID NO: 222009
  chr2:220435309-220435990
  hypo

SEQ ID NO: 242754 - DNA, 180 bp, Homo sapiens; identical to SEQ ID NO: 222010
  chr2:220436056-220436236
  hypo

SEQ ID NO: 242755 - DNA, 141 bp, Homo sapiens; identical to SEQ ID NO: 222011
  chr2:220492470-220492611
  hypo

SEQ ID NO: 242756 - DNA, 1440 bp, Homo sapiens; identical to SEQ ID NO: 222012
  chr2:222436048-222437488
  hypo

SEQ ID NO: 242757 - DNA, 480 bp, Homo sapiens; identical to SEQ ID NO: 222013
  chr2:223170494-223170974
  hypo

SEQ ID NO: 242758 - DNA, 180 bp, Homo sapiens; identical to SEQ ID NO: 222014
  chr2:223171047-223171227
  hypo

SEQ ID NO: 242759 - DNA, 540 bp, Homo sapiens; identical to SEQ ID NO: 222015
  chr2:223183677-223184217
  hypo

SEQ ID NO: 242760 - DNA, 560 bp, Homo sapiens; identical to SEQ ID NO: 222016
  chr2:223184224-223184784
  hypo

SEQ ID NO: 242761 - DNA, 131 bp, Homo sapiens; identical to SEQ ID NO: 222017
  chr2:223185035-223185166
  hypo

SEQ ID NO: 242762 - DNA, 383 bp, Homo sapiens; identical to SEQ ID NO: 222018
  chr2:224808915-224809298
  hypo

SEQ ID NO: 242763 - DNA, 180 bp, Homo sapiens; identical to SEQ ID NO: 222019
  chr2:224904144-224904324
  hypo

SEQ ID NO: 242764 - DNA, 265 bp, Homo sapiens; identical to SEQ ID NO: 222020
  chr2:224904376-224904641
  hypo

SEQ ID NO: 242765 - DNA, 1235 bp, Homo sapiens; identical to SEQ ID NO: 222021
  chr2:225906386-225907621
  hypo

SEQ ID NO: 242766 - DNA, 956 bp, Homo sapiens; identical to SEQ ID NO: 222022
  chr2:230578042-230578998
  hypo

SEQ ID NO: 242767 - DNA, 493 bp, Homo sapiens; identical to SEQ ID NO: 222023
  chr2:231692871-231693364
  hypo

SEQ ID NO: 242768 - DNA, 158 bp, Homo sapiens; identical to SEQ ID NO: 222024
  chr2:231902381-231902539
  hypo

SEQ ID NO: 242769 - DNA, 454 bp, Homo sapiens; identical to SEQ ID NO: 222025
  chr2:232479236-232479690
  hypo

SEQ ID NO: 242770 - DNA, 626 bp, Homo sapiens; identical to SEQ ID NO: 222026
  chr2:232526742-232527368
  hypo

SEQ ID NO: 242771 - DNA, 551 bp, Homo sapiens; identical to SEQ ID NO: 222027
  chr2:232545577-232546128
  hypo

SEQ ID NO: 242772 - DNA, 105 bp, Homo sapiens; identical to SEQ ID NO: 222028
  chr2:232790016-232790121
  hypo

SEQ ID NO: 242773 - DNA, 420 bp, Homo sapiens; identical to SEQ ID NO: 222029
  chr2:232790399-232790819
  hypo

SEQ ID NO: 242774 - DNA, 78 bp, Homo sapiens; identical to SEQ ID NO: 222030
  chr2:233251508-233251586
  hypo

SEQ ID NO: 242775 - DNA, 105 bp, Homo sapiens; identical to SEQ ID NO: 222031
  chr2:233283250-233283355
  hypo

SEQ ID NO: 242776 - DNA, 142 bp, Homo sapiens; identical to SEQ ID NO: 222032
  chr2:233284017-233284159
  hypo

SEQ ID NO: 242777 - DNA, 82 bp, Homo sapiens; identical to SEQ ID NO: 222033
  chr2:233284387-233284469
  hypo

SEQ ID NO: 242778 - DNA, 565 bp, Homo sapiens; identical to SEQ ID NO: 222034
  chr2:233284687-233285252
  hypo

SEQ ID NO: 242779 - DNA, 279 bp, Homo sapiens; identical to SEQ ID NO: 222035
  chr2:233285964-233286243
  hypo

SEQ ID NO: 242780 - DNA, 900 bp, Homo sapiens; identical to SEQ ID NO: 222036
  chr2:233350480-233351380
  hypo

SEQ ID NO: 242781 - DNA, 240 bp, Homo sapiens; identical to SEQ ID NO: 222037
  chr2:233351837-233352077
  hypo

SEQ ID NO: 242782 - DNA, 582 bp, Homo sapiens; identical to SEQ ID NO: 222038
  chr2:233352208-233352790
  hypo

SEQ ID NO: 242783 - DNA, 1020 bp, Homo sapiens; identical to SEQ ID NO: 222039
  chr2:233498044-233499064
  hypo

SEQ ID NO: 242784 - DNA, 180 bp, Homo sapiens; identical to SEQ ID NO: 222040
  chr2:233499104-233499284
  hypo

SEQ ID NO: 242785 - DNA, 360 bp, Homo sapiens; identical to SEQ ID NO: 222041
  chr2:235860379-235860739
  hypo

SEQ ID NO: 242786 - DNA, 180 bp, Homo sapiens; identical to SEQ ID NO: 222042
  chr2:236402573-236402753
  hypo

SEQ ID NO: 242787 - DNA, 1020 bp, Homo sapiens; identical to SEQ ID NO: 222043
  chr2:237076286-237077306
  hypo

SEQ ID NO: 242788 - DNA, 180 bp, Homo sapiens; identical to SEQ ID NO: 222044
  chr2:237077454-237077634
  hypo

SEQ ID NO: 242789 - DNA, 421 bp, Homo sapiens; identical to SEQ ID NO: 222045
  chr2:237476438-237476859
  hypo

SEQ ID NO: 242790 - DNA, 145 bp, Homo sapiens; identical to SEQ ID NO: 222046
  chr2:238384223-238384368
  hypo

SEQ ID NO: 242791 - DNA, 736 bp, Homo sapiens; identical to SEQ ID NO: 222047
  chr2:238536148-238536884
  hypo

SEQ ID NO: 242792 - DNA, 176 bp, Homo sapiens; identical to SEQ ID NO: 222048
  chr2:238599864-238600040
  hypo

SEQ ID NO: 242793 - DNA, 244 bp, Homo sapiens; identical to SEQ ID NO: 222049
  chr2:238617174-238617418
  hypo

SEQ ID NO: 242794 - DNA, 694 bp, Homo sapiens; identical to SEQ ID NO: 222050
  chr2:238864559-238865253
  hypo

SEQ ID NO: 242795 - DNA, 146 bp, Homo sapiens; identical to SEQ ID NO: 222051
  chr2:238876150-238876296
  hypo

SEQ ID NO: 242796 - DNA, 708 bp, Homo sapiens; identical to SEQ ID NO: 222052
  chr2:239148240-239148948
  hypo

SEQ ID NO: 242797 - DNA, 210 bp, Homo sapiens; identical to SEQ ID NO: 222053
  chr2:240294231-240294441
  hypo

SEQ ID NO: 242798 - DNA, 120 bp, Homo sapiens; identical to SEQ ID NO: 222054
  chr2:241306336-241306456
  hypo

SEQ ID NO: 242799 - DNA, 138 bp, Homo sapiens; identical to SEQ ID NO: 222055
  chr2:241374477-241374615
  hypo

SEQ ID NO: 242800 - DNA, 264 bp, Homo sapiens; identical to SEQ ID NO: 222056
  chr2:241375298-241375562
  hypo

SEQ ID NO: 242801 - DNA, 443 bp, Homo sapiens; identical to SEQ ID NO: 222057
  chr2:241393136-241393579
  hypo

SEQ ID NO: 242802 - DNA, 92 bp, Homo sapiens; identical to SEQ ID NO: 222058
  chr2:242269473-242269565
  hypo

SEQ ID NO: 242803 - DNA, 240 bp, Homo sapiens; identical to SEQ ID NO: 222059
  chr2:242498382-242498622
  hypo

SEQ ID NO: 242804 - DNA, 180 bp, Homo sapiens; identical to SEQ ID NO: 222060
  chr3:3840463-3840643
  hypo

SEQ ID NO: 242805 - DNA, 960 bp, Homo sapiens; identical to SEQ ID NO: 222061
  chr3:3840760-3841720
  hypo

SEQ ID NO: 242806 - DNA, 420 bp, Homo sapiens; identical to SEQ ID NO: 222062
  chr3:4910277-4910697
  hypo

SEQ ID NO: 242807 - DNA, 105 bp, Homo sapiens; identical to SEQ ID NO: 222063
  chr3:5018751-5018856
  hypo

SEQ ID NO: 242808 - DNA, 180 bp, Homo sapiens; identical to SEQ ID NO: 222064
  chr3:5019028-5019208
  hypo

SEQ ID NO: 242809 - DNA, 420 bp, Homo sapiens; identical to SEQ ID NO: 222065
  chr3:6903108-6903528
  hypo

SEQ ID NO: 242810 - DNA, 735 bp, Homo sapiens; identical to SEQ ID NO: 222066
  chr3:9956773-9957508
  hypo

SEQ ID NO: 242811 - DNA, 240 bp, Homo sapiens; identical to SEQ ID NO: 222067
  chr3:9993830-9994070
  hypo

SEQ ID NO: 242812 - DNA, 442 bp, Homo sapiens; identical to SEQ ID NO: 222068
  chr3:10749300-10749742
  hypo

SEQ ID NO: 242813 - DNA, 427 bp, Homo sapiens; identical to SEQ ID NO: 222069
  chr3:13008720-13009147
  hypo

SEQ ID NO: 242814 - DNA, 360 bp, Homo sapiens; identical to SEQ ID NO: 222070
  chr3:13323690-13324050
  hypo

SEQ ID NO: 242815 - DNA, 720 bp, Homo sapiens; identical to SEQ ID NO: 222071
  chr3:13324084-13324804
  hypo

SEQ ID NO: 242816 - DNA, 341 bp, Homo sapiens; identical to SEQ ID NO: 222072
  chr3:13590643-13590984
  hypo

SEQ ID NO: 242817 - DNA, 642 bp, Homo sapiens; identical to SEQ ID NO: 222073
  chr3:13936738-13937380
  hypo

SEQ ID NO: 242818 - DNA, 105 bp, Homo sapiens; identical to SEQ ID NO: 222074
  chr3:14443833-14443938
  hypo

SEQ ID NO: 242819 - DNA, 600 bp, Homo sapiens; identical to SEQ ID NO: 222075
  chr3:14443998-14444598
  hypo

SEQ ID NO: 242820 - DNA, 105 bp, Homo sapiens; identical to SEQ ID NO: 222076
  chr3:14444658-14444763
  hypo

SEQ ID NO: 242821 - DNA, 180 bp, Homo sapiens; identical to SEQ ID NO: 222077
  chr3:14851975-14852155
  hypo

SEQ ID NO: 242822 - DNA, 442 bp, Homo sapiens; identical to SEQ ID NO: 222078
  chr3:14852211-14852653
  hypo

SEQ ID NO: 242823 - DNA, 1289 bp, Homo sapiens; identical to SEQ ID NO: 222079
  chr3:16554229-16555518
  hypo

SEQ ID NO: 242824 - DNA, 34 bp, Homo sapiens; identical to SEQ ID NO: 222080
  chr3:16860036-16860070
  hypo

SEQ ID NO: 242825 - DNA, 808 bp, Homo sapiens; identical to SEQ ID NO: 222081
  chr3:16925426-16926234
  hypo

SEQ ID NO: 242826 - DNA, 240 bp, Homo sapiens; identical to SEQ ID NO: 222082
  chr3:16926711-16926951
  hypo

SEQ ID NO: 242827 - DNA, 840 bp, Homo sapiens; identical to SEQ ID NO: 222083
  chr3:18485472-18486312
  hypo

SEQ ID NO: 242828 - DNA, 284 bp, Homo sapiens; identical to SEQ ID NO: 222084
  chr3:23957824-23958108
  hypo

SEQ ID NO: 242829 - DNA, 152 bp, Homo sapiens; identical to SEQ ID NO: 222085
  chr3:23986746-23986898
  hypo

SEQ ID NO: 242830 - DNA, 180 bp, Homo sapiens; identical to SEQ ID NO: 222086
  chr3:24535501-24535681
  hypo

SEQ ID NO: 242831 - DNA, 540 bp, Homo sapiens; identical to SEQ ID NO: 222087
  chr3:24535814-24536354
  hypo

SEQ ID NO: 242832 - DNA, 978 bp, Homo sapiens; identical to SEQ ID NO: 222088
  chr3:24536374-24537352
  hypo

SEQ ID NO: 242833 - DNA, 813 bp, Homo sapiens; identical to SEQ ID NO: 222089
  chr3:24562965-24563778
  hypo

SEQ ID NO: 242834 - DNA, 998 bp, Homo sapiens; identical to SEQ ID NO: 222090
  chr3:27763017-27764015
  hypo

SEQ ID NO: 242835 - DNA, 261 bp, Homo sapiens; identical to SEQ ID NO: 222091
  chr3:30648804-30649065
  hypo

SEQ ID NO: 242836 - DNA, 255 bp, Homo sapiens; identical to SEQ ID NO: 222092
  chr3:32279485-32279740
  hypo

SEQ ID NO: 242837 - DNA, 206 bp, Homo sapiens; identical to SEQ ID NO: 222093
  chr3:32433047-32433253
  hypo

SEQ ID NO: 242838 - DNA, 782 bp, Homo sapiens; identical to SEQ ID NO: 222094
  chr3:32433368-32434150
  hypo

SEQ ID NO: 242839 - DNA, 137 bp, Homo sapiens; identical to SEQ ID NO: 222095
  chr3:32612639-32612776
  hypo

SEQ ID NO: 242840 - DNA, 429 bp, Homo sapiens; identical to SEQ ID NO: 222096
  chr3:33259728-33260157
  hypo

SEQ ID NO: 242841 - DNA, 540 bp, Homo sapiens; identical to SEQ ID NO: 222097
  chr3:33260195-33260735
  hypo

SEQ ID NO: 242842 - DNA, 340 bp, Homo sapiens; identical to SEQ ID NO: 222098
  chr3:36985557-36985897
  hypo

SEQ ID NO: 242843 - DNA, 180 bp, Homo sapiens; identical to SEQ ID NO: 222099
  chr3:36985953-36986133
  hypo

SEQ ID NO: 242844 - DNA, 420 bp, Homo sapiens; identical to SEQ ID NO: 222100
  chr3:37034197-37034617
  hypo

SEQ ID NO: 242845 - DNA, 480 bp, Homo sapiens; identical to SEQ ID NO: 222101
  chr3:37034757-37035237
  hypo

SEQ ID NO: 242846 - DNA, 91 bp, Homo sapiens; identical to SEQ ID NO: 222102
  chr3:37038109-37038200
  hypo

SEQ ID NO: 242847 - DNA, 99 bp, Homo sapiens; identical to SEQ ID NO: 222103
  chr3:37042445-37042544
  hypo

SEQ ID NO: 242848 - DNA, 74 bp, Homo sapiens; identical to SEQ ID NO: 222104
  chr3:37045891-37045965
  hypo

SEQ ID NO: 242849 - DNA, 73 bp, Homo sapiens; identical to SEQ ID NO: 222105
  chr3:37048481-37048554
  hypo

SEQ ID NO: 242850 - DNA, 92 bp, Homo sapiens; identical to SEQ ID NO: 222106
  chr3:37050304-37050396
  hypo

SEQ ID NO: 242851 - DNA, 280 bp, Homo sapiens; identical to SEQ ID NO: 222107
  chr3:37053310-37053590
  hypo

SEQ ID NO: 242852 - DNA, 113 bp, Homo sapiens; identical to SEQ ID NO: 222108
  chr3:37055922-37056035
  hypo

SEQ ID NO: 242853 - DNA, 94 bp, Homo sapiens; identical to SEQ ID NO: 222109
  chr3:37058996-37059090
  hypo

SEQ ID NO: 242854 - DNA, 154 bp, Homo sapiens; identical to SEQ ID NO: 222110
  chr3:37061800-37061954
  hypo

SEQ ID NO: 242855 - DNA, 371 bp, Homo sapiens; identical to SEQ ID NO: 222111
  chr3:37067127-37067498
  hypo

SEQ ID NO: 242856 - DNA, 149 bp, Homo sapiens; identical to SEQ ID NO: 222112
  chr3:37070274-37070423
  hypo

SEQ ID NO: 242857 - DNA, 109 bp, Homo sapiens; identical to SEQ ID NO: 222113
  chr3:37081676-37081785
  hypo

SEQ ID NO: 242858 - DNA, 64 bp, Homo sapiens; identical to SEQ ID NO: 222114
  chr3:37083758-37083822
  hypo

SEQ ID NO: 242859 - DNA, 165 bp, Homo sapiens; identical to SEQ ID NO: 222115
  chr3:37089009-37089174
  hypo

SEQ ID NO: 242860 - DNA, 93 bp, Homo sapiens; identical to SEQ ID NO: 222116
  chr3:37090007-37090100
  hypo

SEQ ID NO: 242861 - DNA, 114 bp, Homo sapiens; identical to SEQ ID NO: 222117
  chr3:37090394-37090508
  hypo

SEQ ID NO: 242862 - DNA, 361 bp, Homo sapiens; identical to SEQ ID NO: 222118
  chr3:37091976-37092337
  hypo

SEQ ID NO: 242863 - DNA, 300 bp, Homo sapiens; identical to SEQ ID NO: 222119
  chr3:37494024-37494324
  hypo

SEQ ID NO: 242864 - DNA, 622 bp, Homo sapiens; identical to SEQ ID NO: 222120
  chr3:38080609-38081231
  hypo

SEQ ID NO: 242865 - DNA, 54 bp, Homo sapiens; identical to SEQ ID NO: 222121
  chr3:38182282-38182336
  hypo

SEQ ID NO: 242866 - DNA, 158 bp, Homo sapiens; identical to SEQ ID NO: 222122
  chr3:38182626-38182784
  hypo

SEQ ID NO: 242867 - DNA, 168 bp, Homo sapiens; identical to SEQ ID NO: 222123
  chr3:38495097-38495265
  hypo

SEQ ID NO: 242868 - DNA, 101 bp, Homo sapiens; identical to SEQ ID NO: 198886
  chr3:38495679-38495780
  hypo

SEQ ID NO: 242869 - DNA, 105 bp, Homo sapiens; identical to SEQ ID NO: 222125
  chr3:38496021-38496126
  hypo

SEQ ID NO: 242870 - DNA, 240 bp, Homo sapiens; identical to SEQ ID NO: 222126
  chr3:38496442-38496682
  hypo

SEQ ID NO: 242871 - DNA, 360 bp, Homo sapiens; identical to SEQ ID NO: 222127
  chr3:38496763-38497123
  hypo

SEQ ID NO: 242872 - DNA, 277 bp, Homo sapiens; identical to SEQ ID NO: 222128
  chr3:39148232-39148509
  hypo

SEQ ID NO: 242873 - DNA, 182 bp, Homo sapiens; identical to SEQ ID NO: 222129
  chr3:41240161-41240343
  hypo

SEQ ID NO: 242874 - DNA, 41 bp, Homo sapiens; identical to SEQ ID NO: 222130
  chr3:41266110-41266151
  hypo

SEQ ID NO: 242875 - DNA, 384 bp, Homo sapiens; identical to SEQ ID NO: 222131
  chr3:42696177-42696561
  hypo

SEQ ID NO: 242876 - DNA, 600 bp, Homo sapiens; identical to SEQ ID NO: 222132
  chr3:42814311-42814911
  hypo

SEQ ID NO: 242877 - DNA, 240 bp, Homo sapiens; identical to SEQ ID NO: 222133
  chr3:43147025-43147265
  hypo

SEQ ID NO: 242878 - DNA, 300 bp, Homo sapiens; identical to SEQ ID NO: 222134
  chr3:43147369-43147669
  hypo

SEQ ID NO: 242879 - DNA, 214 bp, Homo sapiens; identical to SEQ ID NO: 198903
  chr3:43663334-43663548
  hypo

SEQ ID NO: 242880 - DNA, 2268 bp, Homo sapiens; identical to SEQ ID NO: 222136
  chr3:44036214-44038482
  hypo

SEQ ID NO: 242881 - DNA, 50 bp, Homo sapiens; identical to SEQ ID NO: 198908
  chr3:44379864-44379914
  hypo

SEQ ID NO: 242882 - DNA, 141 bp, Homo sapiens; identical to SEQ ID NO: 222138
  chr3:44518642-44518783
  hypo

SEQ ID NO: 242883 - DNA, 805 bp, Homo sapiens; identical to SEQ ID NO: 222139
  chr3:44802848-44803653
  hypo

SEQ ID NO: 242884 - DNA, 406 bp, Homo sapiens; identical to SEQ ID NO: 222140
  chr3:45187749-45188155
  hypo

SEQ ID NO: 242885 - DNA, 712 bp, Homo sapiens; identical to SEQ ID NO: 222141
  chr3:45837557-45838269
  hypo

SEQ ID NO: 242886 - DNA, 78 bp, Homo sapiens; identical to SEQ ID NO: 222142
  chr3:47050739-47050817
  hypo

SEQ ID NO: 242887 - DNA, 104 bp, Homo sapiens; identical to SEQ ID NO: 222143
  chr3:47051127-47051231
  hypo

SEQ ID NO: 242888 - DNA, 220 bp, Homo sapiens; identical to SEQ ID NO: 222144
  chr3:47891162-47891382
  hypo

SEQ ID NO: 242889 - DNA, 630 bp, Homo sapiens; identical to SEQ ID NO: 222145
  chr3:48693500-48694130
  hypo

SEQ ID NO: 242890 - DNA, 884 bp, Homo sapiens; identical to SEQ ID NO: 222146
  chr3:48698890-48699774
  hypo

SEQ ID NO: 242891 - DNA, 796 bp, Homo sapiens; identical to SEQ ID NO: 222147
  chr3:48699788-48700584
  hypo

SEQ ID NO: 242892 - DNA, 105 bp, Homo sapiens; identical to SEQ ID NO: 222148
  chr3:48700956-48701061
  hypo

SEQ ID NO: 242893 - DNA, 437 bp, Homo sapiens; identical to SEQ ID NO: 222149
  chr3:49592075-49592512
  hypo

SEQ ID NO: 242894 - DNA, 624 bp, Homo sapiens; identical to SEQ ID NO: 222150
  chr3:49906809-49907433
  hypo

SEQ ID NO: 242895 - DNA, 114 bp, Homo sapiens; identical to SEQ ID NO: 198941
  chr3:50192966-50193080
  hypo

SEQ ID NO: 242896 - DNA, 180 bp, Homo sapiens; identical to SEQ ID NO: 222152
  chr3:50374389-50374569
  hypo

SEQ ID NO: 242897 - DNA, 327 bp, Homo sapiens; identical to SEQ ID NO: 222153
  chr3:50375233-50375560
  hypo

SEQ ID NO: 242898 - DNA, 180 bp, Homo sapiens; identical to SEQ ID NO: 222154
  chr3:50605148-50605328
  hypo

SEQ ID NO: 242899 - DNA, 330 bp, Homo sapiens; identical to SEQ ID NO: 222155
  chr3:51990320-51990650
  hypo

SEQ ID NO: 242900 - DNA, 140 bp, Homo sapiens; identical to SEQ ID NO: 222156
  chr3:52001297-52001437
  hypo

SEQ ID NO: 242901 - DNA, 282 bp, Homo sapiens; identical to SEQ ID NO: 222157
  chr3:52009896-52010178
  hypo

SEQ ID NO: 242902 - DNA, 147 bp, Homo sapiens; identical to SEQ ID NO: 222158
  chr3:53190592-53190739
  hypo

SEQ ID NO: 242903 - DNA, 140 bp, Homo sapiens; identical to SEQ ID NO: 222159
  chr3:53195774-53195914
  hypo

SEQ ID NO: 242904 - DNA, 445 bp, Homo sapiens; identical to SEQ ID NO: 222160
  chr3:53527819-53528264
  hypo

SEQ ID NO: 242905 - DNA, 154 bp, Homo sapiens; identical to SEQ ID NO: 222161
  chr3:53528643-53528797
  hypo

SEQ ID NO: 242906 - DNA, 180 bp, Homo sapiens; identical to SEQ ID NO: 222162
  chr3:57113275-57113455
  hypo

SEQ ID NO: 242907 - DNA, 105 bp, Homo sapiens; identical to SEQ ID NO: 222163
  chr3:57261348-57261453
  hypo

SEQ ID NO: 242908 - DNA, 360 bp, Homo sapiens; identical to SEQ ID NO: 222164
  chr3:61546628-61546988
  hypo

SEQ ID NO: 242909 - DNA, 600 bp, Homo sapiens; identical to SEQ ID NO: 222165
  chr3:61547030-61547630
  hypo

SEQ ID NO: 242910 - DNA, 90 bp, Homo sapiens; identical to SEQ ID NO: 198973
  chr3:61656126-61656216
  hypo

SEQ ID NO: 242911 - DNA, 813 bp, Homo sapiens; identical to SEQ ID NO: 222167
  chr3:64673125-64673938
  hypo

SEQ ID NO: 242912 - DNA, 180 bp, Homo sapiens; identical to SEQ ID NO: 222168
  chr3:66024483-66024663
  hypo

SEQ ID NO: 242913 - DNA, 360 bp, Homo sapiens; identical to SEQ ID NO: 222169
  chr3:66024846-66025206
  hypo

SEQ ID NO: 242914 - DNA, 180 bp, Homo sapiens; identical to SEQ ID NO: 222170
  chr3:66025366-66025546
  hypo

SEQ ID NO: 242915 - DNA, 1536 bp, Homo sapiens; identical to SEQ ID NO: 222171
  chr3:66550298-66551834
  hypo

SEQ ID NO: 242916 - DNA, 994 bp, Homo sapiens; identical to SEQ ID NO: 222172
  chr3:67048376-67049370
  hypo

SEQ ID NO: 242917 - DNA, 156 bp, Homo sapiens; identical to SEQ ID NO: 222173
  chr3:69062098-69062254
  hypo

SEQ ID NO: 242918 - DNA, 619 bp, Homo sapiens; identical to SEQ ID NO: 222174
  chr3:69435017-69435636
  hypo

SEQ ID NO: 242919 - DNA, 941 bp, Homo sapiens; identical to SEQ ID NO: 222175
  chr3:69590941-69591882
  hypo

SEQ ID NO: 242920 - DNA, 800 bp, Homo sapiens; identical to SEQ ID NO: 222176
  chr3:69788414-69789214
  hypo

SEQ ID NO: 242921 - DNA, 1020 bp, Homo sapiens; identical to SEQ ID NO: 222177
  chr3:71113726-71114746
  hypo

SEQ ID NO: 242922 - DNA, 420 bp, Homo sapiens; identical to SEQ ID NO: 222178
  chr3:71631173-71631593
  hypo

SEQ ID NO: 242923 - DNA, 184 bp, Homo sapiens; identical to SEQ ID NO: 222179
  chr3:71631715-71631899
  hypo

SEQ ID NO: 242924 - DNA, 219 bp, Homo sapiens; identical to SEQ ID NO: 222180
  chr3:71833528-71833747
  hypo

SEQ ID NO: 242925 - DNA, 180 bp, Homo sapiens; identical to SEQ ID NO: 222181
  chr3:71833819-71833999
  hypo

SEQ ID NO: 242926 - DNA, 900 bp, Homo sapiens; identical to SEQ ID NO: 222182
  chr3:71834033-71834933
  hypo

SEQ ID NO: 242927 - DNA, 272 bp, Homo sapiens; identical to SEQ ID NO: 222183
  chr3:72496511-72496783
  hypo

SEQ ID NO: 242928 - DNA, 391 bp, Homo sapiens; identical to SEQ ID NO: 222184
  chr3:73673262-73673653
  hypo

SEQ ID NO: 242929 - DNA, 761 bp, Homo sapiens; identical to SEQ ID NO: 222185
  chr3:74663366-74664127
  hypo

SEQ ID NO: 242930 - DNA, 271 bp, Homo sapiens; identical to SEQ ID NO: 222186
  chr3:97690771-97691042
  hypo

SEQ ID NO: 242931 - DNA, 1410 bp, Homo sapiens; identical to SEQ ID NO: 222187
  chr3:98619762-98621172
  hypo

SEQ ID NO: 242932 - DNA, 518 bp, Homo sapiens; identical to SEQ ID NO: 222188
  chr3:99594803-99595321
  hypo

SEQ ID NO: 242933 - DNA, 454 bp, Homo sapiens; identical to SEQ ID NO: 222189
  chr3:101231926-101232380
  hypo

SEQ ID NO: 242934 - DNA, 464 bp, Homo sapiens; identical to SEQ ID NO: 222190
  chr3:101497830-101498294
  hypo

SEQ ID NO: 242935 - DNA, 103 bp, Homo sapiens; identical to SEQ ID NO: 199031
  chr3:101498504-101498607
  hypo

SEQ ID NO: 242936 - DNA, 397 bp, Homo sapiens; identical to SEQ ID NO: 222192
  chr3:105088164-105088561
  hypo

SEQ ID NO: 242937 - DNA, 325 bp, Homo sapiens; identical to SEQ ID NO: 222193
  chr3:107244654-107244979
  hypo

SEQ ID NO: 242938 - DNA, 123 bp, Homo sapiens; identical to SEQ ID NO: 199038
  chr3:111393432-111393555
  hypo

SEQ ID NO: 242939 - DNA, 954 bp, Homo sapiens; identical to SEQ ID NO: 222195
  chr3:112930688-112931642
  hypo

SEQ ID NO: 242940 - DNA, 180 bp, Homo sapiens; identical to SEQ ID NO: 222196
  chr3:113251565-113251745
  hypo

SEQ ID NO: 242941 - DNA, 577 bp, Homo sapiens; identical to SEQ ID NO: 222197
  chr3:113251787-113252364
  hypo

SEQ ID NO: 242942 - DNA, 702 bp, Homo sapiens; identical to SEQ ID NO: 222198
  chr3:115377288-115377990
  hypo

SEQ ID NO: 242943 - DNA, 240 bp, Homo sapiens; identical to SEQ ID NO: 222199
  chr3:120627018-120627258
  hypo

SEQ ID NO: 242944 - DNA, 360 bp, Homo sapiens; identical to SEQ ID NO: 222200
  chr3:120627318-120627678
  hypo

SEQ ID NO: 242945 - DNA, 247 bp, Homo sapiens; identical to SEQ ID NO: 222201
  chr3:122296549-122296796
  hypo

SEQ ID NO: 242946 - DNA, 386 bp, Homo sapiens; identical to SEQ ID NO: 222202
  chr3:122514169-122514555
  hypo

SEQ ID NO: 242947 - DNA, 155 bp, Homo sapiens; identical to SEQ ID NO: 222203
  chr3:122785820-122785975
  hypo

SEQ ID NO: 242948 - DNA, 480 bp, Homo sapiens; identical to SEQ ID NO: 222204
  chr3:123167524-123168004
  hypo

SEQ ID NO: 242949 - DNA, 300 bp, Homo sapiens; identical to SEQ ID NO: 222205
  chr3:123168151-123168451
  hypo

SEQ ID NO: 242950 - DNA, 180 bp, Homo sapiens; identical to SEQ ID NO: 222206
  chr3:123751953-123752133
  hypo

SEQ ID NO: 242951 - DNA, 261 bp, Homo sapiens; identical to SEQ ID NO: 222207
  chr3:124605642-124605903
  hypo

SEQ ID NO: 242952 - DNA, 576 bp, Homo sapiens; identical to SEQ ID NO: 222208
  chr3:124773769-124774345
  hypo

SEQ ID NO: 242953 - DNA, 792 bp, Homo sapiens; identical to SEQ ID NO: 222209
  chr3:126074822-126075614
  hypo

SEQ ID NO: 242954 - DNA, 140 bp, Homo sapiens; identical to SEQ ID NO: 222210
  chr3:126195083-126195223
  hypo

SEQ ID NO: 242955 - DNA, 468 bp, Homo sapiens; identical to SEQ ID NO: 222211
  chr3:127347862-127348330
  hypo

SEQ ID NO: 242956 - DNA, 166 bp, Homo sapiens; identical to SEQ ID NO: 222212
  chr3:127633987-127634153
  hypo

SEQ ID NO: 242957 - DNA, 281 bp, Homo sapiens; identical to SEQ ID NO: 222213
  chr3:127794264-127794545
  hypo

SEQ ID NO: 242958 - DNA, 438 bp, Homo sapiens; identical to SEQ ID NO: 222214
  chr3:127795664-127796102
  hypo

SEQ ID NO: 242959 - DNA, 540 bp, Homo sapiens; identical to SEQ ID NO: 222215
  chr3:128273915-128274455
  hypo

SEQ ID NO: 242960 - DNA, 104 bp, Homo sapiens; identical to SEQ ID NO: 222216
  chr3:128274562-128274666
  hypo

SEQ ID NO: 242961 - DNA, 1002 bp, Homo sapiens; identical to SEQ ID NO: 222217
  chr3:128720263-128721265
  hypo

SEQ ID NO: 242962 - DNA, 984 bp, Homo sapiens; identical to SEQ ID NO: 222218
  chr3:129324048-129325032
  hypo

SEQ ID NO: 242963 - DNA, 815 bp, Homo sapiens; identical to SEQ ID NO: 222219
  chr3:129693119-129693934
  hypo

SEQ ID NO: 242964 - DNA, 384 bp, Homo sapiens; identical to SEQ ID NO: 222220
  chr3:130064515-130064899
  hypo

SEQ ID NO: 242965 - DNA, 540 bp, Homo sapiens; identical to SEQ ID NO: 222221
  chr3:130235723-130236263
  hypo

SEQ ID NO: 242966 - DNA, 105 bp, Homo sapiens; identical to SEQ ID NO: 222222
  chr3:132756102-132756207
  hypo

SEQ ID NO: 242967 - DNA, 164 bp, Homo sapiens; identical to SEQ ID NO: 222223
  chr3:132756373-132756537
  hypo

SEQ ID NO: 242968 - DNA, 420 bp, Homo sapiens; identical to SEQ ID NO: 222224
  chr3:132756999-132757419
  hypo

SEQ ID NO: 242969 - DNA, 180 bp, Homo sapiens; identical to SEQ ID NO: 222225
  chr3:132757649-132757829
  hypo

SEQ ID NO: 242970 - DNA, 49 bp, Homo sapiens; identical to SEQ ID NO: 199099
  chr3:133276458-133276507
  hypo

SEQ ID NO: 242971 - DNA, 560 bp, Homo sapiens; identical to SEQ ID NO: 222227
  chr3:133646157-133646717
  hypo

SEQ ID NO: 242972 - DNA, 99 bp, Homo sapiens; identical to SEQ ID NO: 222228
  chr3:133748217-133748316
  hypo

SEQ ID NO: 242973 - DNA, 240 bp, Homo sapiens; identical to SEQ ID NO: 222229
  chr3:133748397-133748637
  hypo

SEQ ID NO: 242974 - DNA, 52 bp, Homo sapiens; identical to SEQ ID NO: 199100
  chr3:133969907-133969959
  hypo

SEQ ID NO: 242975 - DNA, 840 bp, Homo sapiens; identical to SEQ ID NO: 222231
  chr3:134092917-134093757
  hypo

SEQ ID NO: 242976 - DNA, 593 bp, Homo sapiens; identical to SEQ ID NO: 222232
  chr3:134369513-134370106
  hypo

SEQ ID NO: 242977 - DNA, 1419 bp, Homo sapiens; identical to SEQ ID NO: 222233
  chr3:134513742-134515161
  hypo

SEQ ID NO: 242978 - DNA, 420 bp, Homo sapiens; identical to SEQ ID NO: 222234
  chr3:135684647-135685067
  hypo

SEQ ID NO: 242979 - DNA, 275 bp, Homo sapiens; identical to SEQ ID NO: 222235
  chr3:135685168-135685443
  hypo

SEQ ID NO: 242980 - DNA, 916 bp, Homo sapiens; identical to SEQ ID NO: 222236
  chr3:138066946-138067862
  hypo

SEQ ID NO: 242981 - DNA, 563 bp, Homo sapiens; identical to SEQ ID NO: 222237
  chr3:138153949-138154512
  hypo

SEQ ID NO: 242982 - DNA, 161 bp, Homo sapiens; identical to SEQ ID NO: 222238
  chr3:138327435-138327596
  hypo

SEQ ID NO: 242983 - DNA, 457 bp, Homo sapiens; identical to SEQ ID NO: 222239
  chr3:138654715-138655172
  hypo

SEQ ID NO: 242984 - DNA, 253 bp, Homo sapiens; identical to SEQ ID NO: 222240
  chr3:138679339-138679592
  hypo

SEQ ID NO: 242985 - DNA, 370 bp, Homo sapiens; identical to SEQ ID NO: 222241
  chr3:139258145-139258515
  hypo

SEQ ID NO: 242986 - DNA, 395 bp, Homo sapiens; identical to SEQ ID NO: 222242
  chr3:139258547-139258942
  hypo

SEQ ID NO: 242987 - DNA, 1140 bp, Homo sapiens; identical to SEQ ID NO: 222243
  chr3:139653518-139654658
  hypo

SEQ ID NO: 242988 - DNA, 1320 bp, Homo sapiens; identical to SEQ ID NO: 222244
  chr3:140660241-140661561
  hypo

SEQ ID NO: 242989 - DNA, 540 bp, Homo sapiens; identical to SEQ ID NO: 222245
  chr3:140769702-140770242
  hypo

SEQ ID NO: 242990 - DNA, 900 bp, Homo sapiens; identical to SEQ ID NO: 222246
  chr3:140770298-140771198
  hypo

SEQ ID NO: 242991 - DNA, 957 bp, Homo sapiens; identical to SEQ ID NO: 222247
  chr3:142682100-142683057
  hypo

SEQ ID NO: 242992 - DNA, 2390 bp, Homo sapiens; identical to SEQ ID NO: 222248
  chr3:142837797-142840187
  hypo

SEQ ID NO: 242993 - DNA, 420 bp, Homo sapiens; identical to SEQ ID NO: 222249
  chr3:145878769-145879189
  hypo

SEQ ID NO: 242994 - DNA, 214 bp, Homo sapiens; identical to SEQ ID NO: 199133
  chr3:148709993-148710207
  hypo

SEQ ID NO: 242995 - DNA, 580 bp, Homo sapiens; identical to SEQ ID NO: 222251
  chr3:148803984-148804564
  hypo

SEQ ID NO: 242996 - DNA, 210 bp, Homo sapiens; identical to SEQ ID NO: 222252
  chr3:150320966-150321176
  hypo

SEQ ID NO: 242997 - DNA, 105 bp, Homo sapiens; identical to SEQ ID NO: 222253
  chr3:150802803-150802908
  hypo

SEQ ID NO: 242998 - DNA, 451 bp, Homo sapiens; identical to SEQ ID NO: 222254
  chr3:150804737-150805188
  hypo

SEQ ID NO: 242999 - DNA, 41 bp, Homo sapiens; identical to SEQ ID NO: 199149
  chr3:155722292-155722333
  hypo

SEQ ID NO: 243000 - DNA, 167 bp, Homo sapiens; identical to SEQ ID NO: 199152
  chr3:156799361-156799528
  hypo

SEQ ID NO: 243001 - DNA, 211 bp, Homo sapiens; identical to SEQ ID NO: 222257
  chr3:159706814-159707025
  hypo

SEQ ID NO: 243002 - DNA, 336 bp, Homo sapiens; identical to SEQ ID NO: 222258
  chr3:160167655-160167991
  hypo

SEQ ID NO: 243003 - DNA, 1581 bp, Homo sapiens; identical to SEQ ID NO: 199171
  chr3:160472497-160474078
  hypo

SEQ ID NO: 243004 - DNA, 53 bp, Homo sapiens; identical to SEQ ID NO: 222260
  chr3:169380561-169380614
  hypo

SEQ ID NO: 243005 - DNA, 87 bp, Homo sapiens; identical to SEQ ID NO: 222261
  chr3:169380983-169381070
  hypo

SEQ ID NO: 243006 - DNA, 163 bp, Homo sapiens; identical to SEQ ID NO: 222262
  chr3:169381408-169381571
  hypo

SEQ ID NO: 243007 - DNA, 240 bp, Homo sapiens; identical to SEQ ID NO: 222263
  chr3:169482522-169482762
  hypo

SEQ ID NO: 243008 - DNA, 732 bp, Homo sapiens; identical to SEQ ID NO: 222264
  chr3:169529939-169530671
  hypo

SEQ ID NO: 243009 - DNA, 849 bp, Homo sapiens; identical to SEQ ID NO: 222265
  chr3:170626303-170627152
  hypo

SEQ ID NO: 243010 - DNA, 154 bp, Homo sapiens; identical to SEQ ID NO: 199199
  chr3:171758579-171758733
  hypo

SEQ ID NO: 243011 - DNA, 105 bp, Homo sapiens; identical to SEQ ID NO: 222267
  chr3:174158358-174158463
  hypo

SEQ ID NO: 243012 - DNA, 720 bp, Homo sapiens; identical to SEQ ID NO: 222268
  chr3:174158664-174159384
  hypo

SEQ ID NO: 243013 - DNA, 90 bp, Homo sapiens; identical to SEQ ID NO: 199207
  chr3:176915778-176915868
  hypo

SEQ ID NO: 243014 - DNA, 38 bp, Homo sapiens; identical to SEQ ID NO: 222270
  chr3:178936068-178936106
  hypo

SEQ ID NO: 243015 - DNA, 40 bp, Homo sapiens; identical to SEQ ID NO: 199210
  chr3:179064154-179064194
  hypo

SEQ ID NO: 243016 - DNA, 840 bp, Homo sapiens; identical to SEQ ID NO: 222272
  chr3:179168753-179169593
  hypo

SEQ ID NO: 243017 - DNA, 780 bp, Homo sapiens; identical to SEQ ID NO: 222273
  chr3:179754456-179755236
  hypo

SEQ ID NO: 243018 - DNA, 53 bp, Homo sapiens; identical to SEQ ID NO: 222274
  chr3:180396751-180396804
  hypo

SEQ ID NO: 243019 - DNA, 540 bp, Homo sapiens; identical to SEQ ID NO: 222275
  chr3:180397131-180397671
  hypo

SEQ ID NO: 243020 - DNA, 1020 bp, Homo sapiens; identical to SEQ ID NO: 222276
  chr3:181430084-181431104
  hypo

SEQ ID NO: 243021 - DNA, 300 bp, Homo sapiens; identical to SEQ ID NO: 222277
  chr3:181444364-181444664
  hypo

SEQ ID NO: 243022 - DNA, 207 bp, Homo sapiens; identical to SEQ ID NO: 222278
  chr3:182510952-182511159
  hypo

SEQ ID NO: 243023 - DNA, 170 bp, Homo sapiens; identical to SEQ ID NO: 199225
  chr3:182511623-182511793
  hypo

SEQ ID NO: 243024 - DNA, 240 bp, Homo sapiens; identical to SEQ ID NO: 222280
  chr3:183165185-183165425
  hypo

SEQ ID NO: 243025 - DNA, 231 bp, Homo sapiens; identical to SEQ ID NO: 222281
  chr3:183602814-183603045
  hypo

SEQ ID NO: 243026 - DNA, 86 bp, Homo sapiens; identical to SEQ ID NO: 199238
  chr3:183851915-183852001
  hypo

SEQ ID NO: 243027 - DNA, 105 bp, Homo sapiens; identical to SEQ ID NO: 222283
  chr3:184097688-184097793
  hypo

SEQ ID NO: 243028 - DNA, 280 bp, Homo sapiens; identical to SEQ ID NO: 222284
  chr3:184098372-184098652
  hypo

SEQ ID NO: 243029 - DNA, 209 bp, Homo sapiens; identical to SEQ ID NO: 222285
  chr3:184099271-184099480
  hypo

SEQ ID NO: 243030 - DNA, 180 bp, Homo sapiens; identical to SEQ ID NO: 222286
  chr3:184279170-184279350
  hypo

SEQ ID NO: 243031 - DNA, 405 bp, Homo sapiens; identical to SEQ ID NO: 222287
  chr3:184319506-184319911
  hypo

SEQ ID NO: 243032 - DNA, 260 bp, Homo sapiens; identical to SEQ ID NO: 222288
  chr3:184319971-184320231
  hypo

SEQ ID NO: 243033 - DNA, 420 bp, Homo sapiens; identical to SEQ ID NO: 222289
  chr3:184321856-184322276
  hypo

SEQ ID NO: 243034 - DNA, 783 bp, Homo sapiens; identical to SEQ ID NO: 222290
  chr3:184870165-184870948
  hypo

SEQ ID NO: 243035 - DNA, 240 bp, Homo sapiens; identical to SEQ ID NO: 222291
  chr3:185825761-185826001
  hypo

SEQ ID NO: 243036 - DNA, 212 bp, Homo sapiens; identical to SEQ ID NO: 222292
  chr3:185826425-185826637
  hypo

SEQ ID NO: 243037 - DNA, 300 bp, Homo sapiens; identical to SEQ ID NO: 222293
  chr3:185826674-185826974
  hypo

SEQ ID NO: 243038 - DNA, 240 bp, Homo sapiens; identical to SEQ ID NO: 222294
  chr3:185827079-185827319
  hypo

SEQ ID NO: 243039 - DNA, 600 bp, Homo sapiens; identical to SEQ ID NO: 222295
  chr3:186078790-186079390
  hypo

SEQ ID NO: 243040 - DNA, 780 bp, Homo sapiens; identical to SEQ ID NO: 222296
  chr3:186079503-186080283
  hypo

SEQ ID NO: 243041 - DNA, 47 bp, Homo sapiens; identical to SEQ ID NO: 199254
  chr3:186544979-186545026
  hypo

SEQ ID NO: 243042 - DNA, 262 bp, Homo sapiens; identical to SEQ ID NO: 222298
  chr3:187455277-187455539
  hypo

SEQ ID NO: 243043 - DNA, 240 bp, Homo sapiens; identical to SEQ ID NO: 222299
  chr3:187456684-187456924
  hypo

SEQ ID NO: 243044 - DNA, 144 bp, Homo sapiens; identical to SEQ ID NO: 222300
  chr3:187462668-187462812
  hypo

SEQ ID NO: 243045 - DNA, 155 bp, Homo sapiens; identical to SEQ ID NO: 222301
  chr3:187463100-187463255
  hypo

SEQ ID NO: 243046 - DNA, 537 bp, Homo sapiens; identical to SEQ ID NO: 222302
  chr3:191046935-191047472
  hypo

SEQ ID NO: 243047 - DNA, 360 bp, Homo sapiens; identical to SEQ ID NO: 222303
  chr3:192127148-192127508
  hypo

SEQ ID NO: 243048 - DNA, 540 bp, Homo sapiens; identical to SEQ ID NO: 222304
  chr3:192127544-192128084
  hypo

SEQ ID NO: 243049 - DNA, 753 bp, Homo sapiens; identical to SEQ ID NO: 222305
  chr3:192232533-192233286
  hypo

SEQ ID NO: 243050 - DNA, 234 bp, Homo sapiens; identical to SEQ ID NO: 222306
  chr3:192635622-192635856
  hypo

SEQ ID NO: 243051 - DNA, 441 bp, Homo sapiens; identical to SEQ ID NO: 222307
  chr3:193721033-193721474
  hypo

SEQ ID NO: 243052 - DNA, 104 bp, Homo sapiens; identical to SEQ ID NO: 222308
  chr3:193721577-193721681
  hypo

SEQ ID NO: 243053 - DNA, 155 bp, Homo sapiens; identical to SEQ ID NO: 222309
  chr3:193852644-193852799
  hypo

SEQ ID NO: 243054 - DNA, 180 bp, Homo sapiens; identical to SEQ ID NO: 222310
  chr3:193853887-193854067
  hypo

SEQ ID NO: 243055 - DNA, 503 bp, Homo sapiens; identical to SEQ ID NO: 222311
  chr3:193858570-193859073
  hypo

SEQ ID NO: 243056 - DNA, 121 bp, Homo sapiens; identical to SEQ ID NO: 222312
  chr3:193859656-193859777
  hypo

SEQ ID NO: 243057 - DNA, 161 bp, Homo sapiens; identical to SEQ ID NO: 222313
  chr3:193987504-193987665
  hypo

SEQ ID NO: 243058 - DNA, 456 bp, Homo sapiens; identical to SEQ ID NO: 222314
  chr3:194208088-194208544
  hypo

SEQ ID NO: 243059 - DNA, 115 bp, Homo sapiens; identical to SEQ ID NO: 199273
  chr3:194278585-194278700
  hypo

SEQ ID NO: 243060 - DNA, 571 bp, Homo sapiens; identical to SEQ ID NO: 222316
  chr3:194353932-194354503
  hypo

SEQ ID NO: 243061 - DNA, 258 bp, Homo sapiens; identical to SEQ ID NO: 222317
  chr3:194980253-194980511
  hypo

SEQ ID NO: 243062 - DNA, 559 bp, Homo sapiens; identical to SEQ ID NO: 222318
  chr3:195599090-195599649
  hypo

SEQ ID NO: 243063 - DNA, 104 bp, Homo sapiens; identical to SEQ ID NO: 222319
  chr3:195610143-195610247
  hypo

SEQ ID NO: 243064 - DNA, 33 bp, Homo sapiens; identical to SEQ ID NO: 199281
  chr3:195636198-195636231
  hypo

SEQ ID NO: 243065 - DNA, 180 bp, Homo sapiens; identical to SEQ ID NO: 222321
  chr3:195809007-195809187
  hypo

SEQ ID NO: 243066 - DNA, 391 bp, Homo sapiens; identical to SEQ ID NO: 222322
  chr3:196255599-196255990
  hypo

SEQ ID NO: 243067 - DNA, 223 bp, Homo sapiens; identical to SEQ ID NO: 222323
  chr3:196695305-196695528
  hypo

SEQ ID NO: 243068 - DNA, 96 bp, Homo sapiens; identical to SEQ ID NO: 199284
  chr3:197222652-197222748
  hypo

SEQ ID NO: 243069 - DNA, 456 bp, Homo sapiens; identical to SEQ ID NO: 222325
  chr3:197281702-197282158
  hypo

SEQ ID NO: 243070 - DNA, 180 bp, Homo sapiens; identical to SEQ ID NO: 222326
  chr4:569172-569352
  hypo

SEQ ID NO: 243071 - DNA, 642 bp, Homo sapiens; identical to SEQ ID NO: 222327
  chr4:569435-570077
  hypo

SEQ ID NO: 243072 - DNA, 508 bp, Homo sapiens; identical to SEQ ID NO: 222328
  chr4:657349-657857
  hypo

SEQ ID NO: 243073 - DNA, 147 bp, Homo sapiens; identical to SEQ ID NO: 222329
  chr4:667619-667766
  hypo

SEQ ID NO: 243074 - DNA, 142 bp, Homo sapiens; identical to SEQ ID NO: 222330
  chr4:819592-819734
  hypo

SEQ ID NO: 243075 - DNA, 309 bp, Homo sapiens; identical to SEQ ID NO: 222331
  chr4:966933-967242
  hypo

SEQ ID NO: 243076 - DNA, 300 bp, Homo sapiens; identical to SEQ ID NO: 222332
  chr4:996070-996370
  hypo

SEQ ID NO: 243077 - DNA, 600 bp, Homo sapiens; identical to SEQ ID NO: 222333
  chr4:996393-996993
  hypo

SEQ ID NO: 243078 - DNA, 104 bp, Homo sapiens; identical to SEQ ID NO: 222334
  chr4:997116-997220
  hypo

SEQ ID NO: 243079 - DNA, 105 bp, Homo sapiens; identical to SEQ ID NO: 222335
  chr4:1004393-1004498
  hypo

SEQ ID NO: 243080 - DNA, 105 bp, Homo sapiens; identical to SEQ ID NO: 222336
  chr4:1036517-1036622
  hypo

SEQ ID NO: 243081 - DNA, 140 bp, Homo sapiens; identical to SEQ ID NO: 199293
  chr4:1243421-1243561
  hypo

SEQ ID NO: 243082 - DNA, 240 bp, Homo sapiens; identical to SEQ ID NO: 222338
  chr4:1332425-1332665
  hypo

SEQ ID NO: 243083 - DNA, 300 bp, Homo sapiens; identical to SEQ ID NO: 222339
  chr4:1399573-1399873
  hypo

SEQ ID NO: 243084 - DNA, 420 bp, Homo sapiens; identical to SEQ ID NO: 222340
  chr4:1399931-1400351
  hypo

SEQ ID NO: 243085 - DNA, 105 bp, Homo sapiens; identical to SEQ ID NO: 222341
  chr4:1404048-1404153
  hypo

SEQ ID NO: 243086 - DNA, 510 bp, Homo sapiens; identical to SEQ ID NO: 222342
  chr4:1404219-1404729
  hypo

SEQ ID NO: 243087 - DNA, 256 bp, Homo sapiens; identical to SEQ ID NO: 222343
  chr4:1407532-1407788
  hypo

SEQ ID NO: 243088 - DNA, 210 bp, Homo sapiens; identical to SEQ ID NO: 222344
  chr4:1794936-1795146
  hypo

SEQ ID NO: 243089 - DNA, 1260 bp, Homo sapiens; identical to SEQ ID NO: 222345
  chr4:1795182-1796442
  hypo

SEQ ID NO: 243090 - DNA, 104 bp, Homo sapiens; identical to SEQ ID NO: 222346
  chr4:1828625-1828729
  hypo

SEQ ID NO: 243091 - DNA, 392 bp, Homo sapiens; identical to SEQ ID NO: 222347
  chr4:2042167-2042559
  hypo

SEQ ID NO: 243092 - DNA, 646 bp, Homo sapiens; identical to SEQ ID NO: 222348
  chr4:2061447-2062093
  hypo

SEQ ID NO: 243093 - DNA, 1064 bp, Homo sapiens; identical to SEQ ID NO: 222349
  chr4:3767426-3768490
  hypo

SEQ ID NO: 243094 - DNA, 105 bp, Homo sapiens; identical to SEQ ID NO: 222350
  chr4:3873084-3873189
  hypo

SEQ ID NO: 243095 - DNA, 360 bp, Homo sapiens; identical to SEQ ID NO: 222351
  chr4:3873222-3873582
  hypo

SEQ ID NO: 243096 - DNA, 180 bp, Homo sapiens; identical to SEQ ID NO: 222352
  chr4:4388457-4388637
  hypo

SEQ ID NO: 243097 - DNA, 1020 bp, Homo sapiens; identical to SEQ ID NO: 222353
  chr4:4388721-4389741
  hypo

SEQ ID NO: 243098 - DNA, 118 bp, Homo sapiens; identical to SEQ ID NO: 222354
  chr4:4389815-4389933
  hypo

SEQ ID NO: 243099 - DNA, 900 bp, Homo sapiens; identical to SEQ ID NO: 222355
  chr4:4861657-4862557
  hypo

SEQ ID NO: 243100 - DNA, 332 bp, Homo sapiens; identical to SEQ ID NO: 222356
  chr4:5052365-5052697
  hypo

SEQ ID NO: 243101 - DNA, 1020 bp, Homo sapiens; identical to SEQ ID NO: 222357
  chr4:5052789-5053809
  hypo

SEQ ID NO: 243102 - DNA, 400 bp, Homo sapiens; identical to SEQ ID NO: 222358
  chr4:5889213-5889613
  hypo

SEQ ID NO: 243103 - DNA, 300 bp, Homo sapiens; identical to SEQ ID NO: 222359
  chr4:5890189-5890489
  hypo

SEQ ID NO: 243104 - DNA, 180 bp, Homo sapiens; identical to SEQ ID NO: 222360
  chr4:5890543-5890723
  hypo

SEQ ID NO: 243105 - DNA, 396 bp, Homo sapiens; identical to SEQ ID NO: 222361
  chr4:6271359-6271755
  hypo

SEQ ID NO: 243106 - DNA, 122 bp, Homo sapiens; identical to SEQ ID NO: 222362
  chr4:6717792-6717914
  hypo

SEQ ID NO: 243107 - DNA, 162 bp, Homo sapiens; identical to SEQ ID NO: 222363
  chr4:8160408-8160570
  hypo

SEQ ID NO: 243108 - DNA, 42 bp, Homo sapiens; identical to SEQ ID NO: 199340
  chr4:8594310-8594352
  hypo

SEQ ID NO: 243109 - DNA, 131 bp, Homo sapiens; identical to SEQ ID NO: 199341
  chr4:8609443-8609574
  hypo

SEQ ID NO: 243110 - DNA, 420 bp, Homo sapiens; identical to SEQ ID NO: 222366
  chr4:8861808-8862228
  hypo

SEQ ID NO: 243111 - DNA, 180 bp, Homo sapiens; identical to SEQ ID NO: 222367
  chr4:8862295-8862475
  hypo

SEQ ID NO: 243112 - DNA, 464 bp, Homo sapiens; identical to SEQ ID NO: 222368
  chr4:8863431-8863895
  hypo

SEQ ID NO: 243113 - DNA, 669 bp, Homo sapiens; identical to SEQ ID NO: 222369
  chr4:8872917-8873586
  hypo

SEQ ID NO: 243114 - DNA, 390 bp, Homo sapiens; identical to SEQ ID NO: 222370
  chr4:8873641-8874031
  hypo

SEQ ID NO: 243115 - DNA, 209 bp, Homo sapiens; identical to SEQ ID NO: 199346
  chr4:9684933-9685142
  hypo

SEQ ID NO: 243116 - DNA, 58 bp, Homo sapiens; identical to SEQ ID NO: 199347
  chr4:10089890-10089948
  hypo

SEQ ID NO: 243117 - DNA, 236 bp, Homo sapiens; identical to SEQ ID NO: 199348
  chr4:10090133-10090369
  hypo

SEQ ID NO: 243118 - DNA, 420 bp, Homo sapiens; identical to SEQ ID NO: 222374
  chr4:10458401-10458821
  hypo

SEQ ID NO: 243119 - DNA, 512 bp, Homo sapiens; identical to SEQ ID NO: 222375
  chr4:10458854-10459366
  hypo

SEQ ID NO: 243120 - DNA, 600 bp, Homo sapiens; identical to SEQ ID NO: 222376
  chr4:13545414-13546014
  hypo

SEQ ID NO: 243121 - DNA, 206 bp, Homo sapiens; identical to SEQ ID NO: 222377
  chr4:16228976-16229182
  hypo

SEQ ID NO: 243122 - DNA, 272 bp, Homo sapiens; identical to SEQ ID NO: 222378
  chr4:16229205-16229477
  hypo

SEQ ID NO: 243123 - DNA, 106 bp, Homo sapiens; identical to SEQ ID NO: 199361
  chr4:18024246-18024352
  hypo

SEQ ID NO: 243124 - DNA, 915 bp, Homo sapiens; identical to SEQ ID NO: 222380
  chr4:22517139-22518054
  hypo

SEQ ID NO: 243125 - DNA, 560 bp, Homo sapiens; identical to SEQ ID NO: 222381
  chr4:24914314-24914874
  hypo

SEQ ID NO: 243126 - DNA, 623 bp, Homo sapiens; identical to SEQ ID NO: 222382
  chr4:25863667-25864290
  hypo

SEQ ID NO: 243127 - DNA, 993 bp, Homo sapiens; identical to SEQ ID NO: 222383
  chr4:36245409-36246402
  hypo

SEQ ID NO: 243128 - DNA, 1140 bp, Homo sapiens; identical to SEQ ID NO: 222384
  chr4:37245589-37246729
  hypo

SEQ ID NO: 243129 - DNA, 86 bp, Homo sapiens; identical to SEQ ID NO: 199386
  chr4:37688564-37688650
  hypo

SEQ ID NO: 243130 - DNA, 300 bp, Homo sapiens; identical to SEQ ID NO: 222386
  chr4:37891998-37892298
  hypo

SEQ ID NO: 243131 - DNA, 740 bp, Homo sapiens; identical to SEQ ID NO: 199390
  chr4:38868924-38869664
  hypo

SEQ ID NO: 243132 - DNA, 189 bp, Homo sapiens; identical to SEQ ID NO: 222388
  chr4:39183810-39183999
  hypo

SEQ ID NO: 243133 - DNA, 248 bp, Homo sapiens; identical to SEQ ID NO: 199394
  chr4:39529737-39529985
  hypo

SEQ ID NO: 243134 - DNA, 704 bp, Homo sapiens; identical to SEQ ID NO: 222390
  chr4:40751829-40752533
  hypo

SEQ ID NO: 243135 - DNA, 138 bp, Homo sapiens; identical to SEQ ID NO: 199395
  chr4:41216265-41216403
  hypo

SEQ ID NO: 243136 - DNA, 209 bp, Homo sapiens; identical to SEQ ID NO: 222392
  chr4:41218383-41218592
  hypo

SEQ ID NO: 243137 - DNA, 738 bp, Homo sapiens; identical to SEQ ID NO: 222393
  chr4:41259135-41259873
  hypo

SEQ ID NO: 243138 - DNA, 1174 bp, Homo sapiens; identical to SEQ ID NO: 222394
  chr4:41362244-41363418
  hypo

SEQ ID NO: 243139 - DNA, 714 bp, Homo sapiens; identical to SEQ ID NO: 222395
  chr4:41883807-41884521
  hypo

SEQ ID NO: 243140 - DNA, 1566 bp, Homo sapiens; identical to SEQ ID NO: 222396
  chr4:42152842-42154408
  hypo

SEQ ID NO: 243141 - DNA, 180 bp, Homo sapiens; identical to SEQ ID NO: 222397
  chr4:42154471-42154651
  hypo

SEQ ID NO: 243142 - DNA, 1620 bp, Homo sapiens; identical to SEQ ID NO: 222398
  chr4:42399071-42400691
  hypo

SEQ ID NO: 243143 - DNA, 420 bp, Homo sapiens; identical to SEQ ID NO: 222399
  chr4:42657975-42658395
  hypo

SEQ ID NO: 243144 - DNA, 180 bp, Homo sapiens; identical to SEQ ID NO: 222400
  chr4:42658520-42658700
  hypo

SEQ ID NO: 243145 - DNA, 137 bp, Homo sapiens; identical to SEQ ID NO: 222401
  chr4:42659536-42659673
  hypo

SEQ ID NO: 243146 - DNA, 105 bp, Homo sapiens; identical to SEQ ID NO: 222402
  chr4:47487073-47487178
  hypo

SEQ ID NO: 243147 - DNA, 240 bp, Homo sapiens; identical to SEQ ID NO: 222403
  chr4:55524088-55524328
  hypo

SEQ ID NO: 243148 - DNA, 229 bp, Homo sapiens; identical to SEQ ID NO: 199420
  chr4:55561714-55561943
  hypo

SEQ ID NO: 243149 - DNA, 91 bp, Homo sapiens; identical to SEQ ID NO: 199421
  chr4:55564469-55564560
  hypo

SEQ ID NO: 243150 - DNA, 75 bp, Homo sapiens; identical to SEQ ID NO: 199422
  chr4:55569950-55570025
  hypo

SEQ ID NO: 243151 - DNA, 45 bp, Homo sapiens; identical to SEQ ID NO: 199423
  chr4:55592094-55592139
  hypo

SEQ ID NO: 243152 - DNA, 302 bp, Homo sapiens; identical to SEQ ID NO: 222408
  chr4:55593416-55593718
  hypo

SEQ ID NO: 243153 - DNA, 62 bp, Homo sapiens; identical to SEQ ID NO: 222409
  chr4:55595497-55595559
  hypo

SEQ ID NO: 243154 - DNA, 34 bp, Homo sapiens; identical to SEQ ID NO: 199425
  chr4:55598031-55598065
  hypo

SEQ ID NO: 243155 - DNA, 42 bp, Homo sapiens; identical to SEQ ID NO: 222411
  chr4:55599306-55599348
  hypo

SEQ ID NO: 243156 - DNA, 96 bp, Homo sapiens; identical to SEQ ID NO: 199426
  chr4:55602683-55602779
  hypo

SEQ ID NO: 243157 - DNA, 34 bp, Homo sapiens; identical to SEQ ID NO: 199431
  chr4:56412390-56412424
  hypo

SEQ ID NO: 243158 - DNA, 180 bp, Homo sapiens; identical to SEQ ID NO: 222414
  chr4:56501628-56501808
  hypo

SEQ ID NO: 243159 - DNA, 180 bp, Homo sapiens; identical to SEQ ID NO: 222415
  chr4:56501899-56502079
  hypo

SEQ ID NO: 243160 - DNA, 420 bp, Homo sapiens; identical to SEQ ID NO: 222416
  chr4:56502143-56502563
  hypo

SEQ ID NO: 243161 - DNA, 980 bp, Homo sapiens; identical to SEQ ID NO: 222417
  chr4:56914935-56915915
  hypo

SEQ ID NO: 243162 - DNA, 597 bp, Homo sapiens; identical to SEQ ID NO: 222418
  chr4:57396531-57397128
  hypo

SEQ ID NO: 243163 - DNA, 180 bp, Homo sapiens; identical to SEQ ID NO: 222419
  chr4:57521635-57521815
  hypo

SEQ ID NO: 243164 - DNA, 900 bp, Homo sapiens; identical to SEQ ID NO: 222420
  chr4:57521866-57522766
  hypo

SEQ ID NO: 243165 - DNA, 300 bp, Homo sapiens; identical to SEQ ID NO: 222421
  chr4:57687556-57687856
  hypo

SEQ ID NO: 243166 - DNA, 600 bp, Homo sapiens; identical to SEQ ID NO: 222422
  chr4:57976405-57977005
  hypo

SEQ ID NO: 243167 - DNA, 300 bp, Homo sapiens; identical to SEQ ID NO: 222423
  chr4:57977057-57977357
  hypo

SEQ ID NO: 243168 - DNA, 180 bp, Homo sapiens; identical to SEQ ID NO: 222424
  chr4:66535565-66535745
  hypo

SEQ ID NO: 243169 - DNA, 180 bp, Homo sapiens; identical to SEQ ID NO: 222425
  chr4:66536056-66536236
  hypo

SEQ ID NO: 243170 - DNA, 367 bp, Homo sapiens; identical to SEQ ID NO: 222426
  chr4:66536313-66536680
  hypo

SEQ ID NO: 243171 - DNA, 300 bp, Homo sapiens; identical to SEQ ID NO: 222427
  chr4:71768019-71768319
  hypo

SEQ ID NO: 243172 - DNA, 146 bp, Homo sapiens; identical to SEQ ID NO: 222428
  chr4:74702603-74702749
  hypo

SEQ ID NO: 243173 - DNA, 180 bp, Homo sapiens; identical to SEQ ID NO: 222429
  chr4:77227975-77228155
  hypo

SEQ ID NO: 243174 - DNA, 330 bp, Homo sapiens; identical to SEQ ID NO: 222430
  chr4:77228214-77228544
  hypo

SEQ ID NO: 243175 - DNA, 206 bp, Homo sapiens; identical to SEQ ID NO: 222431
  chr4:78980370-78980576
  hypo

SEQ ID NO: 243176 - DNA, 300 bp, Homo sapiens; identical to SEQ ID NO: 222432
  chr4:81106094-81106394
  hypo

SEQ ID NO: 243177 - DNA, 960 bp, Homo sapiens; identical to SEQ ID NO: 222433
  chr4:81123807-81124767
  hypo

SEQ ID NO: 243178 - DNA, 480 bp, Homo sapiens; identical to SEQ ID NO: 222434
  chr4:82135897-82136377
  hypo

SEQ ID NO: 243179 - DNA, 85 bp, Homo sapiens; identical to SEQ ID NO: 222435
  chr4:84292570-84292655
  hypo

SEQ ID NO: 243180 - DNA, 180 bp, Homo sapiens; identical to SEQ ID NO: 222436
  chr4:85503877-85504057
  hypo

SEQ ID NO: 243181 - DNA, 955 bp, Homo sapiens; identical to SEQ ID NO: 222437
  chr4:85886793-85887748
  hypo

SEQ ID NO: 243182 - DNA, 360 bp, Homo sapiens; identical to SEQ ID NO: 222438
  chr4:85887857-85888217
  hypo

SEQ ID NO: 243183 - DNA, 180 bp, Homo sapiens; identical to SEQ ID NO: 222439
  chr4:85888272-85888452
  hypo

SEQ ID NO: 243184 - DNA, 101 bp, Homo sapiens; identical to SEQ ID NO: 222440
  chr4:86396088-86396189
  hypo

SEQ ID NO: 243185 - DNA, 543 bp, Homo sapiens; identical to SEQ ID NO: 222441
  chr4:86396422-86396965
  hypo

SEQ ID NO: 243186 - DNA, 570 bp, Homo sapiens; identical to SEQ ID NO: 222442
  chr4:89378391-89378961
  hypo

SEQ ID NO: 243187 - DNA, 105 bp, Homo sapiens; identical to SEQ ID NO: 222443
  chr4:91760071-91760176
  hypo

SEQ ID NO: 243188 - DNA, 233 bp, Homo sapiens; identical to SEQ ID NO: 222444
  chr4:95373794-95374027
  hypo

SEQ ID NO: 243189 - DNA, 215 bp, Homo sapiens; identical to SEQ ID NO: 222445
  chr4:100867919-100868134
  hypo

SEQ ID NO: 243190 - DNA, 220 bp, Homo sapiens; identical to SEQ ID NO: 222446
  chr4:103266878-103267098
  hypo

SEQ ID NO: 243191 - DNA, 979 bp, Homo sapiens; identical to SEQ ID NO: 222447
  chr4:103997159-103998138
  hypo

SEQ ID NO: 243192 - DNA, 387 bp, Homo sapiens; identical to SEQ ID NO: 222448
  chr4:106067031-106067418
  hypo

SEQ ID NO: 243193 - DNA, 295 bp, Homo sapiens; identical to SEQ ID NO: 199518
  chr4:106067841-106068136
  hypo

SEQ ID NO: 243194 - DNA, 105 bp, Homo sapiens; identical to SEQ ID NO: 222450
  chr4:106068588-106068693
  hypo

SEQ ID NO: 243195 - DNA, 146 bp, Homo sapiens; identical to SEQ ID NO: 199520
  chr4:106111516-106111662
  hypo

SEQ ID NO: 243196 - DNA, 4461 bp, Homo sapiens; identical to SEQ ID NO: 199521
  chr4:106155053-106159514
  hypo

SEQ ID NO: 243197 - DNA, 240 bp, Homo sapiens; identical to SEQ ID NO: 199522
  chr4:106159634-106159874
  hypo

SEQ ID NO: 243198 - DNA, 180 bp, Homo sapiens; identical to SEQ ID NO: 199523
  chr4:106160114-106160294
  hypo

SEQ ID NO: 243199 - DNA, 120 bp, Homo sapiens; identical to SEQ ID NO: 199524
  chr4:106161134-106161254
  hypo

SEQ ID NO: 243200 - DNA, 2721 bp, Homo sapiens; identical to SEQ ID NO: 199525
  chr4:106161374-106164095
  hypo

SEQ ID NO: 243201 - DNA, 230 bp, Homo sapiens; identical to SEQ ID NO: 199526
  chr4:106164712-106164942
  hypo

SEQ ID NO: 243202 - DNA, 177 bp, Homo sapiens; identical to SEQ ID NO: 199527
  chr4:106180762-106180939
  hypo

SEQ ID NO: 243203 - DNA, 107 bp, Homo sapiens; identical to SEQ ID NO: 199528
  chr4:106182911-106183018
  hypo

SEQ ID NO: 243204 - DNA, 161 bp, Homo sapiens; identical to SEQ ID NO: 199529
  chr4:106190752-106190913
  hypo

SEQ ID NO: 243205 - DNA, 376 bp, Homo sapiens; identical to SEQ ID NO: 199530
  chr4:106193708-106194084
  hypo

SEQ ID NO: 243206 - DNA, 3101 bp, Homo sapiens; identical to SEQ ID NO: 199531
  chr4:106196198-106199299
  hypo

SEQ ID NO: 243207 - DNA, 1601 bp, Homo sapiens; identical to SEQ ID NO: 199532
  chr4:106199359-106200960
  hypo

SEQ ID NO: 243208 - DNA, 281 bp, Homo sapiens; identical to SEQ ID NO: 222464
  chr4:108853113-108853394
  hypo

SEQ ID NO: 243209 - DNA, 104 bp, Homo sapiens; identical to SEQ ID NO: 222465
  chr4:109089919-109090023
  hypo

SEQ ID NO: 243210 - DNA, 1164 bp, Homo sapiens; identical to SEQ ID NO: 222466
  chr4:109093421-109094585
  hypo

SEQ ID NO: 243211 - DNA, 211 bp, Homo sapiens; identical to SEQ ID NO: 199548
  chr4:110651657-110651868
  hypo

SEQ ID NO: 243212 - DNA, 156 bp, Homo sapiens; identical to SEQ ID NO: 222468
  chr4:111117165-111117321
  hypo

SEQ ID NO: 243213 - DNA, 411 bp, Homo sapiens; identical to SEQ ID NO: 222469
  chr4:111119823-111120234
  hypo

SEQ ID NO: 243214 - DNA, 105 bp, Homo sapiens; identical to SEQ ID NO: 222470
  chr4:111539229-111539334
  hypo

SEQ ID NO: 243215 - DNA, 180 bp, Homo sapiens; identical to SEQ ID NO: 222471
  chr4:111543609-111543789
  hypo

SEQ ID NO: 243216 - DNA, 480 bp, Homo sapiens; identical to SEQ ID NO: 222472
  chr4:111543919-111544399
  hypo

SEQ ID NO: 243217 - DNA, 1020 bp, Homo sapiens; identical to SEQ ID NO: 222473
  chr4:113435806-113436826
  hypo

SEQ ID NO: 243218 - DNA, 434 bp, Homo sapiens; identical to SEQ ID NO: 222474
  chr4:113437617-113438051
  hypo

SEQ ID NO: 243219 - DNA, 180 bp, Homo sapiens; identical to SEQ ID NO: 222475
  chr4:113438123-113438303
  hypo

SEQ ID NO: 243220 - DNA, 180 bp, Homo sapiens; identical to SEQ ID NO: 222476
  chr4:113438463-113438643
  hypo

SEQ ID NO: 243221 - DNA, 557 bp, Homo sapiens; identical to SEQ ID NO: 222477
  chr4:115520617-115521174
  hypo

SEQ ID NO: 243222 - DNA, 265 bp, Homo sapiens; identical to SEQ ID NO: 222478
  chr4:120549978-120550243
  hypo

SEQ ID NO: 243223 - DNA, 300 bp, Homo sapiens; identical to SEQ ID NO: 222479
  chr4:121843987-121844287
  hypo

SEQ ID NO: 243224 - DNA, 660 bp, Homo sapiens; identical to SEQ ID NO: 222480
  chr4:122685855-122686515
  hypo

SEQ ID NO: 243225 - DNA, 360 bp, Homo sapiens; identical to SEQ ID NO: 222481
  chr4:122871322-122871682
  hypo

SEQ ID NO: 243226 - DNA, 300 bp, Homo sapiens; identical to SEQ ID NO: 222482
  chr4:122871782-122872082
  hypo

SEQ ID NO: 243227 - DNA, 360 bp, Homo sapiens; identical to SEQ ID NO: 222483
  chr4:122872331-122872691
  hypo

SEQ ID NO: 243228 - DNA, 180 bp, Homo sapiens; identical to SEQ ID NO: 222484
  chr4:123748425-123748605
  hypo

SEQ ID NO: 243229 - DNA, 300 bp, Homo sapiens; identical to SEQ ID NO: 222485
  chr4:124318510-124318810
  hypo

SEQ ID NO: 243230 - DNA, 539 bp, Homo sapiens; identical to SEQ ID NO: 222486
  chr4:124426677-124427216
  hypo

SEQ ID NO: 243231 - DNA, 932 bp, Homo sapiens; identical to SEQ ID NO: 222487
  chr4:125633097-125634029
  hypo

SEQ ID NO: 243232 - DNA, 372 bp, Homo sapiens; identical to SEQ ID NO: 222488
  chr4:126237753-126238125
  hypo

SEQ ID NO: 243233 - DNA, 104 bp, Homo sapiens; identical to SEQ ID NO: 222489
  chr4:126238450-126238554
  hypo

SEQ ID NO: 243234 - DNA, 137 bp, Homo sapiens; identical to SEQ ID NO: 199594
  chr4:128703235-128703372
  hypo

SEQ ID NO: 243235 - DNA, 102 bp, Homo sapiens; identical to SEQ ID NO: 199600
  chr4:140097254-140097356
  hypo

SEQ ID NO: 243236 - DNA, 180 bp, Homo sapiens; identical to SEQ ID NO: 222492
  chr4:140587058-140587238
  hypo

SEQ ID NO: 243237 - DNA, 862 bp, Homo sapiens; identical to SEQ ID NO: 222493
  chr4:141071945-141072807
  hypo

SEQ ID NO: 243238 - DNA, 619 bp, Homo sapiens; identical to SEQ ID NO: 222494
  chr4:141073109-141073728
  hypo

SEQ ID NO: 243239 - DNA, 469 bp, Homo sapiens; identical to SEQ ID NO: 222495
  chr4:141074043-141074512
  hypo

SEQ ID NO: 243240 - DNA, 865 bp, Homo sapiens; identical to SEQ ID NO: 222496
  chr4:141074526-141075391
  hypo

SEQ ID NO: 243241 - DNA, 458 bp, Homo sapiens; identical to SEQ ID NO: 222497
  chr4:141348029-141348487
  hypo

SEQ ID NO: 243242 - DNA, 1308 bp, Homo sapiens; identical to SEQ ID NO: 222498
  chr4:141676913-141678221
  hypo

SEQ ID NO: 243243 - DNA, 720 bp, Homo sapiens; identical to SEQ ID NO: 222499
  chr4:142053866-142054586
  hypo

SEQ ID NO: 243244 - DNA, 174 bp, Homo sapiens; identical to SEQ ID NO: 222500
  chr4:142054759-142054933
  hypo

SEQ ID NO: 243245 - DNA, 180 bp, Homo sapiens; identical to SEQ ID NO: 222501
  chr4:142557401-142557581
  hypo

SEQ ID NO: 243246 - DNA, 300 bp, Homo sapiens; identical to SEQ ID NO: 222502
  chr4:142557663-142557963
  hypo

SEQ ID NO: 243247 - DNA, 157 bp, Homo sapiens; identical to SEQ ID NO: 222503
  chr4:144257342-144257499
  hypo

SEQ ID NO: 243248 - DNA, 189 bp, Homo sapiens; identical to SEQ ID NO: 199620
  chr4:144257937-144258126
  hypo

SEQ ID NO: 243249 - DNA, 153 bp, Homo sapiens; identical to SEQ ID NO: 222505
  chr4:144258375-144258528
  hypo

SEQ ID NO: 243250 - DNA, 180 bp, Homo sapiens; identical to SEQ ID NO: 222506
  chr4:146402831-146403011
  hypo

SEQ ID NO: 243251 - DNA, 383 bp, Homo sapiens; identical to SEQ ID NO: 222507
  chr4:146403506-146403889
  hypo

SEQ ID NO: 243252 - DNA, 180 bp, Homo sapiens; identical to SEQ ID NO: 222508
  chr4:147559836-147560016
  hypo

SEQ ID NO: 243253 - DNA, 180 bp, Homo sapiens; identical to SEQ ID NO: 222509
  chr4:147560155-147560335
  hypo

SEQ ID NO: 243254 - DNA, 640 bp, Homo sapiens; identical to SEQ ID NO: 222510
  chr4:147576124-147576764
  hypo

SEQ ID NO: 243255 - DNA, 33 bp, Homo sapiens; identical to SEQ ID NO: 199629
  chr4:148538935-148538968
  hypo

SEQ ID NO: 243256 - DNA, 93 bp, Homo sapiens; identical to SEQ ID NO: 199632
  chr4:149364560-149364653
  hypo

SEQ ID NO: 243257 - DNA, 78 bp, Homo sapiens; identical to SEQ ID NO: 199633
  chr4:149364662-149364740
  hypo

SEQ ID NO: 243258 - DNA, 288 bp, Homo sapiens; identical to SEQ ID NO: 222514
  chr4:149365970-149366258
  hypo

SEQ ID NO: 243259 - DNA, 360 bp, Homo sapiens; identical to SEQ ID NO: 222515
  chr4:152330029-152330389
  hypo

SEQ ID NO: 243260 - DNA, 239 bp, Homo sapiens; identical to SEQ ID NO: 222516
  chr4:154387495-154387734
  hypo

SEQ ID NO: 243261 - DNA, 143 bp, Homo sapiens; identical to SEQ ID NO: 222517
  chr4:154388053-154388196
  hypo

SEQ ID NO: 243262 - DNA, 720 bp, Homo sapiens; identical to SEQ ID NO: 222518
  chr4:154709517-154710237
  hypo

SEQ ID NO: 243263 - DNA, 360 bp, Homo sapiens; identical to SEQ ID NO: 222519
  chr4:154710294-154710654
  hypo

SEQ ID NO: 243264 - DNA, 120 bp, Homo sapiens; identical to SEQ ID NO: 222520
  chr4:154710714-154710834
  hypo

SEQ ID NO: 243265 - DNA, 179 bp, Homo sapiens; identical to SEQ ID NO: 222521
  chr4:154713481-154713660
  hypo

SEQ ID NO: 243266 - DNA, 180 bp, Homo sapiens; identical to SEQ ID NO: 222522
  chr4:154713821-154714001
  hypo

SEQ ID NO: 243267 - DNA, 137 bp, Homo sapiens; identical to SEQ ID NO: 222523
  chr4:154714077-154714214
  hypo

SEQ ID NO: 243268 - DNA, 459 bp, Homo sapiens; identical to SEQ ID NO: 222524
  chr4:155254134-155254593
  hypo

SEQ ID NO: 243269 - DNA, 746 bp, Homo sapiens; identical to SEQ ID NO: 222525
  chr4:156297388-156298134
  hypo

SEQ ID NO: 243270 - DNA, 631 bp, Homo sapiens; identical to SEQ ID NO: 222526
  chr4:157892596-157893227
  hypo

SEQ ID NO: 243271 - DNA, 597 bp, Homo sapiens; identical to SEQ ID NO: 222527
  chr4:159690017-159690614
  hypo

SEQ ID NO: 243272 - DNA, 73 bp, Homo sapiens; identical to SEQ ID NO: 199677
  chr4:170192274-170192347
  hypo

SEQ ID NO: 243273 - DNA, 1080 bp, Homo sapiens; identical to SEQ ID NO: 222529
  chr4:174089819-174090899
  hypo

SEQ ID NO: 243274 - DNA, 360 bp, Homo sapiens; identical to SEQ ID NO: 222530
  chr4:174450234-174450594
  hypo

SEQ ID NO: 243275 - DNA, 420 bp, Homo sapiens; identical to SEQ ID NO: 222531
  chr4:174450638-174451058
  hypo

SEQ ID NO: 243276 - DNA, 180 bp, Homo sapiens; identical to SEQ ID NO: 222532
  chr4:174451168-174451348
  hypo

SEQ ID NO: 243277 - DNA, 99 bp, Homo sapiens; identical to SEQ ID NO: 199694
  chr4:177240753-177240852
  hypo

SEQ ID NO: 243278 - DNA, 48 bp, Homo sapiens; identical to SEQ ID NO: 222534
  chr4:179699960-179700008
  hypo

SEQ ID NO: 243279 - DNA, 1620 bp, Homo sapiens; identical to SEQ ID NO: 222535
  chr4:184019342-184020962
  hypo

SEQ ID NO: 243280 - DNA, 203 bp, Homo sapiens; identical to SEQ ID NO: 222536
  chr4:184328290-184328493
  hypo

SEQ ID NO: 243281 - DNA, 381 bp, Homo sapiens; identical to SEQ ID NO: 222537
  chr4:185747618-185747999
  hypo

SEQ ID NO: 243282 - DNA, 660 bp, Homo sapiens; identical to SEQ ID NO: 222538
  chr4:185939166-185939826
  hypo

SEQ ID NO: 243283 - DNA, 68 bp, Homo sapiens; identical to SEQ ID NO: 199713
  chr4:186130483-186130551
  hypo

SEQ ID NO: 243284 - DNA, 232 bp, Homo sapiens; identical to SEQ ID NO: 222540
  chr4:186455983-186456215
  hypo

SEQ ID NO: 243285 - DNA, 180 bp, Homo sapiens; identical to SEQ ID NO: 222541
  chr4:186456293-186456473
  hypo

SEQ ID NO: 243286 - DNA, 252 bp, Homo sapiens; identical to SEQ ID NO: 222542
  chr4:187026641-187026893
  hypo

SEQ ID NO: 243287 - DNA, 660 bp, Homo sapiens; identical to SEQ ID NO: 222543
  chr4:187647687-187648347
  hypo

SEQ ID NO: 243288 - DNA, 533 bp, Homo sapiens; identical to SEQ ID NO: 222544
  chr5:343971-344504
  hypo

SEQ ID NO: 243289 - DNA, 82 bp, Homo sapiens; identical to SEQ ID NO: 199724
  chr5:368381-368463
  hypo

SEQ ID NO: 243290 - DNA, 265 bp, Homo sapiens; identical to SEQ ID NO: 222546
  chr5:373104-373369
  hypo

SEQ ID NO: 243291 - DNA, 285 bp, Homo sapiens; identical to SEQ ID NO: 199726
  chr5:374579-374864
  hypo

SEQ ID NO: 243292 - DNA, 267 bp, Homo sapiens; identical to SEQ ID NO: 222548
  chr5:377105-377372
  hypo

SEQ ID NO: 243293 - DNA, 584 bp, Homo sapiens; identical to SEQ ID NO: 222549
  chr5:472580-473164
  hypo

SEQ ID NO: 243294 - DNA, 180 bp, Homo sapiens; identical to SEQ ID NO: 222550
  chr5:473259-473439
  hypo

SEQ ID NO: 243295 - DNA, 180 bp, Homo sapiens; identical to SEQ ID NO: 222551
  chr5:490958-491138
  hypo

SEQ ID NO: 243296 - DNA, 1054 bp, Homo sapiens; identical to SEQ ID NO: 222552
  chr5:523800-524854
  hypo

SEQ ID NO: 243297 - DNA, 398 bp, Homo sapiens; identical to SEQ ID NO: 222553
  chr5:528494-528892
  hypo

SEQ ID NO: 243298 - DNA, 51 bp, Homo sapiens; identical to SEQ ID NO: 222554
  chr5:612241-612292
  hypo

SEQ ID NO: 243299 - DNA, 105 bp, Homo sapiens; identical to SEQ ID NO: 222555
  chr5:676505-676610
  hypo

SEQ ID NO: 243300 - DNA, 420 bp, Homo sapiens; identical to SEQ ID NO: 222556
  chr5:676655-677075
  hypo

SEQ ID NO: 243301 - DNA, 180 bp, Homo sapiens; identical to SEQ ID NO: 222557
  chr5:677110-677290
  hypo

SEQ ID NO: 243302 - DNA, 35 bp, Homo sapiens; identical to SEQ ID NO: 199731
  chr5:693798-693833
  hypo

SEQ ID NO: 243303 - DNA, 105 bp, Homo sapiens; identical to SEQ ID NO: 222559
  chr5:1061582-1061687
  hypo

SEQ ID NO: 243304 - DNA, 1076 bp, Homo sapiens; identical to SEQ ID NO: 222560
  chr5:1064042-1065118
  hypo

SEQ ID NO: 243305 - DNA, 1020 bp, Homo sapiens; identical to SEQ ID NO: 222561
  chr5:1111381-1112401
  hypo

SEQ ID NO: 243306 - DNA, 104 bp, Homo sapiens; identical to SEQ ID NO: 222562
  chr5:1279700-1279804
  hypo

SEQ ID NO: 243307 - DNA, 105 bp, Homo sapiens; identical to SEQ ID NO: 222563
  chr5:1294071-1294176
  hypo

SEQ ID NO: 243308 - DNA, 360 bp, Homo sapiens; identical to SEQ ID NO: 222564
  chr5:1295121-1295481
  hypo

SEQ ID NO: 243309 - DNA, 180 bp, Homo sapiens; identical to SEQ ID NO: 222565
  chr5:1875796-1875976
  hypo

SEQ ID NO: 243310 - DNA, 360 bp, Homo sapiens; identical to SEQ ID NO: 222566
  chr5:1876179-1876539
  hypo

SEQ ID NO: 243311 - DNA, 180 bp, Homo sapiens; identical to SEQ ID NO: 222567
  chr5:1876601-1876781
  hypo

SEQ ID NO: 243312 - DNA, 180 bp, Homo sapiens; identical to SEQ ID NO: 222568
  chr5:1882276-1882456
  hypo

SEQ ID NO: 243313 - DNA, 1140 bp, Homo sapiens; identical to SEQ ID NO: 222569
  chr5:1882712-1883852
  hypo

SEQ ID NO: 243314 - DNA, 180 bp, Homo sapiens; identical to SEQ ID NO: 222570
  chr5:1884193-1884373
  hypo

SEQ ID NO: 243315 - DNA, 180 bp, Homo sapiens; identical to SEQ ID NO: 222571
  chr5:1886078-1886258
  hypo

SEQ ID NO: 243316 - DNA, 1380 bp, Homo sapiens; identical to SEQ ID NO: 222572
  chr5:1886457-1887837
  hypo

SEQ ID NO: 243317 - DNA, 1178 bp, Homo sapiens; identical to SEQ ID NO: 222573
  chr5:1930821-1931999
  hypo

SEQ ID NO: 243318 - DNA, 286 bp, Homo sapiens; identical to SEQ ID NO: 222574
  chr5:2038651-2038937
  hypo

SEQ ID NO: 243319 - DNA, 360 bp, Homo sapiens; identical to SEQ ID NO: 222575
  chr5:3590627-3590987
  hypo

SEQ ID NO: 243320 - DNA, 360 bp, Homo sapiens; identical to SEQ ID NO: 222576
  chr5:3591221-3591581
  hypo

SEQ ID NO: 243321 - DNA, 660 bp, Homo sapiens; identical to SEQ ID NO: 222577
  chr5:3595151-3595811
  hypo

SEQ ID NO: 243322 - DNA, 360 bp, Homo sapiens; identical to SEQ ID NO: 222578
  chr5:3595885-3596245
  hypo

SEQ ID NO: 243323 - DNA, 180 bp, Homo sapiens; identical to SEQ ID NO: 222579
  chr5:5139678-5139858
  hypo

SEQ ID NO: 243324 - DNA, 773 bp, Homo sapiens; identical to SEQ ID NO: 222580
  chr5:5140218-5140991
  hypo

SEQ ID NO: 243325 - DNA, 775 bp, Homo sapiens; identical to SEQ ID NO: 222581
  chr5:6448769-6449544
  hypo

SEQ ID NO: 243326 - DNA, 273 bp, Homo sapiens; identical to SEQ ID NO: 222582
  chr5:10441403-10441676
  hypo

SEQ ID NO: 243327 - DNA, 166 bp, Homo sapiens; identical to SEQ ID NO: 222583
  chr5:10442349-10442515
  hypo

SEQ ID NO: 243328 - DNA, 960 bp, Homo sapiens; identical to SEQ ID NO: 222584
  chr5:10564404-10565364
  hypo

SEQ ID NO: 243329 - DNA, 1483 bp, Homo sapiens; identical to SEQ ID NO: 222585
  chr5:14142926-14144409
  hypo

SEQ ID NO: 243330 - DNA, 871 bp, Homo sapiens; identical to SEQ ID NO: 222586
  chr5:15499745-15500616
  hypo

SEQ ID NO: 243331 - DNA, 180 bp, Homo sapiens; identical to SEQ ID NO: 222587
  chr5:15500667-15500847
  hypo

SEQ ID NO: 243332 - DNA, 535 bp, Homo sapiens; identical to SEQ ID NO: 222588
  chr5:16178991-16179526
  hypo

SEQ ID NO: 243333 - DNA, 214 bp, Homo sapiens; identical to SEQ ID NO: 222589
  chr5:16616869-16617083
  hypo

SEQ ID NO: 243334 - DNA, 1161 bp, Homo sapiens; identical to SEQ ID NO: 222590
  chr5:16935458-16936619
  hypo

SEQ ID NO: 243335 - DNA, 780 bp, Homo sapiens; identical to SEQ ID NO: 222591
  chr5:17217660-17218440
  hypo

SEQ ID NO: 243336 - DNA, 76 bp, Homo sapiens; identical to SEQ ID NO: 199779
  chr5:17987028-17987104
  hypo

SEQ ID NO: 243337 - DNA, 119 bp, Homo sapiens; identical to SEQ ID NO: 222593
  chr5:29296855-29296974
  hypo

SEQ ID NO: 243338 - DNA, 202 bp, Homo sapiens; identical to SEQ ID NO: 222594
  chr5:31639682-31639884
  hypo

SEQ ID NO: 243339 - DNA, 720 bp, Homo sapiens; identical to SEQ ID NO: 222595
  chr5:31854778-31855498
  hypo

SEQ ID NO: 243340 - DNA, 124 bp, Homo sapiens; identical to SEQ ID NO: 222596
  chr5:31855574-31855698
  hypo

SEQ ID NO: 243341 - DNA, 445 bp, Homo sapiens; identical to SEQ ID NO: 222597
  chr5:32709813-32710258
  hypo

SEQ ID NO: 243342 - DNA, 780 bp, Homo sapiens; identical to SEQ ID NO: 222598
  chr5:32711740-32712520
  hypo

SEQ ID NO: 243343 - DNA, 240 bp, Homo sapiens; identical to SEQ ID NO: 222599
  chr5:32712650-32712890
  hypo

SEQ ID NO: 243344 - DNA, 104 bp, Homo sapiens; identical to SEQ ID NO: 222600
  chr5:32712997-32713101
  hypo

SEQ ID NO: 243345 - DNA, 150 bp, Homo sapiens; identical to SEQ ID NO: 222601
  chr5:32713505-32713655
  hypo

SEQ ID NO: 243346 - DNA, 197 bp, Homo sapiens; identical to SEQ ID NO: 222602
  chr5:33936115-33936312
  hypo

SEQ ID NO: 243347 - DNA, 180 bp, Homo sapiens; identical to SEQ ID NO: 222603
  chr5:37840011-37840191
  hypo

SEQ ID NO: 243348 - DNA, 540 bp, Homo sapiens; identical to SEQ ID NO: 222604
  chr5:37840253-37840793
  hypo

SEQ ID NO: 243349 - DNA, 699 bp, Homo sapiens; identical to SEQ ID NO: 222605
  chr5:41870078-41870777
  hypo

SEQ ID NO: 243350 - DNA, 372 bp, Homo sapiens; identical to SEQ ID NO: 222606
  chr5:42424337-42424709
  hypo

SEQ ID NO: 243351 - DNA, 180 bp, Homo sapiens; identical to SEQ ID NO: 222607
  chr5:42424831-42425011
  hypo

SEQ ID NO: 243352 - DNA, 340 bp, Homo sapiens; identical to SEQ ID NO: 222608
  chr5:43557425-43557765
  hypo

SEQ ID NO: 243353 - DNA, 237 bp, Homo sapiens; identical to SEQ ID NO: 222609
  chr5:43603563-43603800
  hypo

SEQ ID NO: 243354 - DNA, 763 bp, Homo sapiens; identical to SEQ ID NO: 222610
  chr5:49736587-49737350
  hypo

SEQ ID NO: 243355 - DNA, 107 bp, Homo sapiens; identical to SEQ ID NO: 199844
  chr5:54469036-54469143
  hypo

SEQ ID NO: 243356 - DNA, 453 bp, Homo sapiens; identical to SEQ ID NO: 222612
  chr5:56112740-56113193
  hypo

SEQ ID NO: 243357 - DNA, 480 bp, Homo sapiens; identical to SEQ ID NO: 222613
  chr5:57755480-57755960
  hypo

SEQ ID NO: 243358 - DNA, 619 bp, Homo sapiens; identical to SEQ ID NO: 222614
  chr5:57755985-57756604
  hypo

SEQ ID NO: 243359 - DNA, 203 bp, Homo sapiens; identical to SEQ ID NO: 199868
  chr5:60626141-60626344
  hypo

SEQ ID NO: 243360 - DNA, 105 bp, Homo sapiens; identical to SEQ ID NO: 222616
  chr5:60626723-60626828
  hypo

SEQ ID NO: 243361 - DNA, 180 bp, Homo sapiens; identical to SEQ ID NO: 222617
  chr5:63255163-63255343
  hypo

SEQ ID NO: 243362 - DNA, 133 bp, Homo sapiens; identical to SEQ ID NO: 222618
  chr5:63255569-63255702
  hypo

SEQ ID NO: 243363 - DNA, 760 bp, Homo sapiens; identical to SEQ ID NO: 222619
  chr5:63461428-63462188
  hypo

SEQ ID NO: 243364 - DNA, 686 bp, Homo sapiens; identical to SEQ ID NO: 222620
  chr5:72732465-72733151
  hypo

SEQ ID NO: 243365 - DNA, 1740 bp, Homo sapiens; identical to SEQ ID NO: 222621
  chr5:72743192-72744932
  hypo

SEQ ID NO: 243366 - DNA, 300 bp, Homo sapiens; identical to SEQ ID NO: 222622
  chr5:72921762-72922062
  hypo

SEQ ID NO: 243367 - DNA, 193 bp, Homo sapiens; identical to SEQ ID NO: 199892
  chr5:73843885-73844078
  hypo

SEQ ID NO: 243368 - DNA, 762 bp, Homo sapiens; identical to SEQ ID NO: 222624
  chr5:73935786-73936548
  hypo

SEQ ID NO: 243369 - DNA, 123 bp, Homo sapiens; identical to SEQ ID NO: 222625
  chr5:73936774-73936897
  hypo

SEQ ID NO: 243370 - DNA, 203 bp, Homo sapiens; identical to SEQ ID NO: 222626
  chr5:74162516-74162719
  hypo

SEQ ID NO: 243371 - DNA, 180 bp, Homo sapiens; identical to SEQ ID NO: 222627
  chr5:74348694-74348874
  hypo

SEQ ID NO: 243372 - DNA, 180 bp, Homo sapiens; identical to SEQ ID NO: 222628
  chr5:74349123-74349303
  hypo

SEQ ID NO: 243373 - DNA, 407 bp, Homo sapiens; identical to SEQ ID NO: 222629
  chr5:75377822-75378229
  hypo

SEQ ID NO: 243374 - DNA, 480 bp, Homo sapiens; identical to SEQ ID NO: 222630
  chr5:75379897-75380377
  hypo

SEQ ID NO: 243375 - DNA, 549 bp, Homo sapiens; identical to SEQ ID NO: 222631
  chr5:75380462-75381011
  hypo

SEQ ID NO: 243376 - DNA, 239 bp, Homo sapiens; identical to SEQ ID NO: 222632
  chr5:75698195-75698434
  hypo

SEQ ID NO: 243377 - DNA, 180 bp, Homo sapiens; identical to SEQ ID NO: 222633
  chr5:75698672-75698852
  hypo

SEQ ID NO: 243378 - DNA, 804 bp, Homo sapiens; identical to SEQ ID NO: 222634
  chr5:75699409-75700213
  hypo

SEQ ID NO: 243379 - DNA, 436 bp, Homo sapiens; identical to SEQ ID NO: 222635
  chr5:76249916-76250352
  hypo

SEQ ID NO: 243380 - DNA, 212 bp, Homo sapiens; identical to SEQ ID NO: 222636
  chr5:76506030-76506242
  hypo

SEQ ID NO: 243381 - DNA, 840 bp, Homo sapiens; identical to SEQ ID NO: 222637
  chr5:76506414-76507254
  hypo

SEQ ID NO: 243382 - DNA, 651 bp, Homo sapiens; identical to SEQ ID NO: 222638
  chr5:77268310-77268961
  hypo

SEQ ID NO: 243383 - DNA, 107 bp, Homo sapiens; identical to SEQ ID NO: 222639
  chr5:77269196-77269303
  hypo

SEQ ID NO: 243384 - DNA, 145 bp, Homo sapiens; identical to SEQ ID NO: 222640
  chr5:79551298-79551443
  hypo

SEQ ID NO: 243385 - DNA, 284 bp, Homo sapiens; identical to SEQ ID NO: 222641
  chr5:79864945-79865229
  hypo

SEQ ID NO: 243386 - DNA, 1130 bp, Homo sapiens; identical to SEQ ID NO: 222642
  chr5:79865330-79866460
  hypo

SEQ ID NO: 243387 - DNA, 240 bp, Homo sapiens; identical to SEQ ID NO: 222643
  chr5:87437123-87437363
  hypo

SEQ ID NO: 243388 - DNA, 172 bp, Homo sapiens; identical to SEQ ID NO: 222644
  chr5:88178956-88179128
  hypo

SEQ ID NO: 243389 - DNA, 480 bp, Homo sapiens; identical to SEQ ID NO: 222645
  chr5:94956289-94956769
  hypo

SEQ ID NO: 243390 - DNA, 277 bp, Homo sapiens; identical to SEQ ID NO: 222646
  chr5:95066554-95066831
  hypo

SEQ ID NO: 243391 - DNA, 368 bp, Homo sapiens; identical to SEQ ID NO: 222647
  chr5:98109213-98109581
  hypo

SEQ ID NO: 243392 - DNA, 263 bp, Homo sapiens; identical to SEQ ID NO: 222648
  chr5:98109927-98110190
  hypo

SEQ ID NO: 243393 - DNA, 300 bp, Homo sapiens; identical to SEQ ID NO: 222649
  chr5:100238886-100239186
  hypo

SEQ ID NO: 243394 - DNA, 240 bp, Homo sapiens; identical to SEQ ID NO: 222650
  chr5:100239330-100239570
  hypo

SEQ ID NO: 243395 - DNA, 518 bp, Homo sapiens; identical to SEQ ID NO: 222651
  chr5:102201407-102201925
  hypo

SEQ ID NO: 243396 - DNA, 540 bp, Homo sapiens; identical to SEQ ID NO: 222652
  chr5:107005929-107006469
  hypo

SEQ ID NO: 243397 - DNA, 900 bp, Homo sapiens; identical to SEQ ID NO: 222653
  chr5:107006501-107007401
  hypo

SEQ ID NO: 243398 - DNA, 102 bp, Homo sapiens; identical to SEQ ID NO: 199971
  chr5:107007963-107008065
  hypo

SEQ ID NO: 243399 - DNA, 206 bp, Homo sapiens; identical to SEQ ID NO: 199973
  chr5:107359033-107359239
  hypo

SEQ ID NO: 243400 - DNA, 325 bp, Homo sapiens; identical to SEQ ID NO: 222656
  chr5:109024684-109025009
  hypo

SEQ ID NO: 243401 - DNA, 960 bp, Homo sapiens; identical to SEQ ID NO: 222657
  chr5:110074328-110075288
  hypo

SEQ ID NO: 243402 - DNA, 291 bp, Homo sapiens; identical to SEQ ID NO: 222658
  chr5:110559549-110559840
  hypo

SEQ ID NO: 243403 - DNA, 600 bp, Homo sapiens; identical to SEQ ID NO: 222659
  chr5:110559897-110560497
  hypo

SEQ ID NO: 243404 - DNA, 418 bp, Homo sapiens; identical to SEQ ID NO: 222660
  chr5:110847625-110848043
  hypo

SEQ ID NO: 243405 - DNA, 420 bp, Homo sapiens; identical to SEQ ID NO: 222661
  chr5:110848066-110848486
  hypo

SEQ ID NO: 243406 - DNA, 74 bp, Homo sapiens; identical to SEQ ID NO: 199977
  chr5:111093930-111094004
  hypo

SEQ ID NO: 243407 - DNA, 291 bp, Homo sapiens; identical to SEQ ID NO: 222663
  chr5:114506295-114506586
  hypo

SEQ ID NO: 243408 - DNA, 163 bp, Homo sapiens; identical to SEQ ID NO: 222664
  chr5:114938164-114938327
  hypo

SEQ ID NO: 243409 - DNA, 480 bp, Homo sapiens; identical to SEQ ID NO: 222665
  chr5:121647564-121648044
  hypo

SEQ ID NO: 243410 - DNA, 180 bp, Homo sapiens; identical to SEQ ID NO: 222666
  chr5:121648256-121648436
  hypo

SEQ ID NO: 243411 - DNA, 881 bp, Homo sapiens; identical to SEQ ID NO: 222667
  chr5:122425930-122426811
  hypo

SEQ ID NO: 243412 - DNA, 298 bp, Homo sapiens; identical to SEQ ID NO: 222668
  chr5:123987437-123987735
  hypo

SEQ ID NO: 243413 - DNA, 169 bp, Homo sapiens; identical to SEQ ID NO: 222669
  chr5:124084138-124084307
  hypo

SEQ ID NO: 243414 - DNA, 372 bp, Homo sapiens; identical to SEQ ID NO: 222670
  chr5:124084690-124085062
  hypo

SEQ ID NO: 243415 - DNA, 360 bp, Homo sapiens; identical to SEQ ID NO: 222671
  chr5:127873305-127873665
  hypo

SEQ ID NO: 243416 - DNA, 300 bp, Homo sapiens; identical to SEQ ID NO: 222672
  chr5:127873759-127874059
  hypo

SEQ ID NO: 243417 - DNA, 600 bp, Homo sapiens; identical to SEQ ID NO: 222673
  chr5:128796604-128797204
  hypo

SEQ ID NO: 243418 - DNA, 180 bp, Homo sapiens; identical to SEQ ID NO: 222674
  chr5:128797270-128797450
  hypo

SEQ ID NO: 243419 - DNA, 128 bp, Homo sapiens; identical to SEQ ID NO: 222675
  chr5:129239558-129239686
  hypo

SEQ ID NO: 243420 - DNA, 1020 bp, Homo sapiens; identical to SEQ ID NO: 222676
  chr5:129240272-129241292
  hypo

SEQ ID NO: 243421 - DNA, 55 bp, Homo sapiens; identical to SEQ ID NO: 200023
  chr5:130970375-130970430
  hypo

SEQ ID NO: 243422 - DNA, 166 bp, Homo sapiens; identical to SEQ ID NO: 222678
  chr5:131133198-131133364
  hypo

SEQ ID NO: 243423 - DNA, 161 bp, Homo sapiens; identical to SEQ ID NO: 222679
  chr5:131563675-131563836
  hypo

SEQ ID NO: 243424 - DNA, 140 bp, Homo sapiens; identical to SEQ ID NO: 222680
  chr5:131831620-131831760
  hypo

SEQ ID NO: 243425 - DNA, 420 bp, Homo sapiens; identical to SEQ ID NO: 222681
  chr5:132387246-132387666
  hypo

SEQ ID NO: 243426 - DNA, 278 bp, Homo sapiens; identical to SEQ ID NO: 222682
  chr5:133450702-133450980
  hypo

SEQ ID NO: 243427 - DNA, 104 bp, Homo sapiens; identical to SEQ ID NO: 222683
  chr5:133451147-133451251
  hypo

SEQ ID NO: 243428 - DNA, 240 bp, Homo sapiens; identical to SEQ ID NO: 222684
  chr5:133862724-133862964
  hypo

SEQ ID NO: 243429 - DNA, 240 bp, Homo sapiens; identical to SEQ ID NO: 222685
  chr5:133863255-133863495
  hypo

SEQ ID NO: 243430 - DNA, 276 bp, Homo sapiens; identical to SEQ ID NO: 222686
  chr5:134370268-134370544
  hypo

SEQ ID NO: 243431 - DNA, 216 bp, Homo sapiens; identical to SEQ ID NO: 222687
  chr5:134463608-134463824
  hypo

SEQ ID NO: 243432 - DNA, 217 bp, Homo sapiens; identical to SEQ ID NO: 222688
  chr5:135468349-135468566
  hypo

SEQ ID NO: 243433 - DNA, 324 bp, Homo sapiens; identical to SEQ ID NO: 222689
  chr5:135527798-135528122
  hypo

SEQ ID NO: 243434 - DNA, 180 bp, Homo sapiens; identical to SEQ ID NO: 222690
  chr5:136834348-136834528
  hypo

SEQ ID NO: 243435 - DNA, 514 bp, Homo sapiens; identical to SEQ ID NO: 222691
  chr5:136834652-136835166
  hypo

SEQ ID NO: 243436 - DNA, 135 bp, Homo sapiens; identical to SEQ ID NO: 222692
  chr5:137774519-137774654
  hypo

SEQ ID NO: 243437 - DNA, 192 bp, Homo sapiens; identical to SEQ ID NO: 222693
  chr5:137774864-137775056
  hypo

SEQ ID NO: 243438 - DNA, 95 bp, Homo sapiens; identical to SEQ ID NO: 222694
  chr5:137801267-137801362
  hypo

SEQ ID NO: 243439 - DNA, 81 bp, Homo sapiens; identical to SEQ ID NO: 200054
  chr5:138088596-138088677
  hypo

SEQ ID NO: 243440 - DNA, 252 bp, Homo sapiens; identical to SEQ ID NO: 222696
  chr5:138089667-138089919
  hypo

SEQ ID NO: 243441 - DNA, 780 bp, Homo sapiens; identical to SEQ ID NO: 222697
  chr5:139016945-139017725
  hypo

SEQ ID NO: 243442 - DNA, 64 bp, Homo sapiens; identical to SEQ ID NO: 200058
  chr5:139039951-139040015
  hypo

SEQ ID NO: 243443 - DNA, 498 bp, Homo sapiens; identical to SEQ ID NO: 222699
  chr5:139088832-139089330
  hypo

SEQ ID NO: 243444 - DNA, 205 bp, Homo sapiens; identical to SEQ ID NO: 222700
  chr5:139089534-139089739
  hypo

SEQ ID NO: 243445 - DNA, 393 bp, Homo sapiens; identical to SEQ ID NO: 222701
  chr5:139143822-139144215
  hypo

SEQ ID NO: 243446 - DNA, 171 bp, Homo sapiens; identical to SEQ ID NO: 222702
  chr5:139283459-139283630
  hypo

SEQ ID NO: 243447 - DNA, 360 bp, Homo sapiens; identical to SEQ ID NO: 222703
  chr5:139283738-139284098
  hypo

SEQ ID NO: 243448 - DNA, 420 bp, Homo sapiens; identical to SEQ ID NO: 222704
  chr5:139284138-139284558
  hypo

SEQ ID NO: 243449 - DNA, 290 bp, Homo sapiens; identical to SEQ ID NO: 222705
  chr5:139554293-139554583
  hypo

SEQ ID NO: 243450 - DNA, 63 bp, Homo sapiens; identical to SEQ ID NO: 222706
  chr5:139725675-139725738
  hypo

SEQ ID NO: 243451 - DNA, 151 bp, Homo sapiens; identical to SEQ ID NO: 200068
  chr5:139725997-139726148
  hypo

SEQ ID NO: 243452 - DNA, 105 bp, Homo sapiens; identical to SEQ ID NO: 222708
  chr5:139726430-139726535
  hypo

SEQ ID NO: 243453 - DNA, 180 bp, Homo sapiens; identical to SEQ ID NO: 222709
  chr5:141030758-141030938
  hypo

SEQ ID NO: 243454 - DNA, 264 bp, Homo sapiens; identical to SEQ ID NO: 222710
  chr5:141030966-141031230
  hypo

SEQ ID NO: 243455 - DNA, 136 bp, Homo sapiens; identical to SEQ ID NO: 222711
  chr5:141257894-141258030
  hypo

SEQ ID NO: 243456 - DNA, 265 bp, Homo sapiens; identical to SEQ ID NO: 200082
  chr5:141704448-141704713
  hypo

SEQ ID NO: 243457 - DNA, 341 bp, Homo sapiens; identical to SEQ ID NO: 200084
  chr5:141736299-141736640
  hypo

SEQ ID NO: 243458 - DNA, 1338 bp, Homo sapiens; identical to SEQ ID NO: 222714
  chr5:142781865-142783203
  hypo

SEQ ID NO: 243459 - DNA, 180 bp, Homo sapiens; identical to SEQ ID NO: 222715
  chr5:142783939-142784119
  hypo

SEQ ID NO: 243460 - DNA, 660 bp, Homo sapiens; identical to SEQ ID NO: 222716
  chr5:142784474-142785134
  hypo

SEQ ID NO: 243461 - DNA, 180 bp, Homo sapiens; identical to SEQ ID NO: 222717
  chr5:145717909-145718089
  hypo

SEQ ID NO: 243462 - DNA, 300 bp, Homo sapiens; identical to SEQ ID NO: 222718
  chr5:145718291-145718591
  hypo

SEQ ID NO: 243463 - DNA, 600 bp, Homo sapiens; identical to SEQ ID NO: 222719
  chr5:145725257-145725857
  hypo

SEQ ID NO: 243464 - DNA, 394 bp, Homo sapiens; identical to SEQ ID NO: 222720
  chr5:148206080-148206474
  hypo

SEQ ID NO: 243465 - DNA, 398 bp, Homo sapiens; identical to SEQ ID NO: 222721
  chr5:148650951-148651349
  hypo

SEQ ID NO: 243466 - DNA, 480 bp, Homo sapiens; identical to SEQ ID NO: 222722
  chr5:148651373-148651853
  hypo

SEQ ID NO: 243467 - DNA, 180 bp, Homo sapiens; identical to SEQ ID NO: 222723
  chr5:148651918-148652098
  hypo

SEQ ID NO: 243468 - DNA, 105 bp, Homo sapiens; identical to SEQ ID NO: 222724
  chr5:148724798-148724903
  hypo

SEQ ID NO: 243469 - DNA, 626 bp, Homo sapiens; identical to SEQ ID NO: 222725
  chr5:151150205-151150831
  hypo

SEQ ID NO: 243470 - DNA, 39 bp, Homo sapiens; identical to SEQ ID NO: 222726
  chr5:153569200-153569239
  hypo

SEQ ID NO: 243471 - DNA, 720 bp, Homo sapiens; identical to SEQ ID NO: 222727
  chr5:153857135-153857855
  hypo

SEQ ID NO: 243472 - DNA, 489 bp, Homo sapiens; identical to SEQ ID NO: 222728
  chr5:156887016-156887505
  hypo

SEQ ID NO: 243473 - DNA, 300 bp, Homo sapiens; identical to SEQ ID NO: 222729
  chr5:157002546-157002846
  hypo

SEQ ID NO: 243474 - DNA, 222 bp, Homo sapiens; identical to SEQ ID NO: 222730
  chr5:158526150-158526372
  hypo

SEQ ID NO: 243475 - DNA, 642 bp, Homo sapiens; identical to SEQ ID NO: 222731
  chr5:158527354-158527996
  hypo

SEQ ID NO: 243476 - DNA, 420 bp, Homo sapiens; identical to SEQ ID NO: 222732
  chr5:158635122-158635542
  hypo

SEQ ID NO: 243477 - DNA, 105 bp, Homo sapiens; identical to SEQ ID NO: 222733
  chr5:158635907-158636012
  hypo

SEQ ID NO: 243478 - DNA, 523 bp, Homo sapiens; identical to SEQ ID NO: 222734
  chr5:159343216-159343739
  hypo

SEQ ID NO: 243479 - DNA, 173 bp, Homo sapiens; identical to SEQ ID NO: 200134
  chr5:159826416-159826589
  hypo

SEQ ID NO: 243480 - DNA, 180 bp, Homo sapiens; identical to SEQ ID NO: 222736
  chr5:160974611-160974791
  hypo

SEQ ID NO: 243481 - DNA, 360 bp, Homo sapiens; identical to SEQ ID NO: 222737
  chr5:160974834-160975194
  hypo

SEQ ID NO: 243482 - DNA, 160 bp, Homo sapiens; identical to SEQ ID NO: 222738
  chr5:160975237-160975397
  hypo

SEQ ID NO: 243483 - DNA, 223 bp, Homo sapiens; identical to SEQ ID NO: 200143
  chr5:167718508-167718731
  hypo

SEQ ID NO: 243484 - DNA, 236 bp, Homo sapiens; identical to SEQ ID NO: 222740
  chr5:167718952-167719188
  hypo

SEQ ID NO: 243485 - DNA, 180 bp, Homo sapiens; identical to SEQ ID NO: 222741
  chr5:169064108-169064288
  hypo

SEQ ID NO: 243486 - DNA, 420 bp, Homo sapiens; identical to SEQ ID NO: 222742
  chr5:169064334-169064754
  hypo

SEQ ID NO: 243487 - DNA, 505 bp, Homo sapiens; identical to SEQ ID NO: 222743
  chr5:169931015-169931520
  hypo

SEQ ID NO: 243488 - DNA, 477 bp, Homo sapiens; identical to SEQ ID NO: 222744
  chr5:170171109-170171586
  hypo

SEQ ID NO: 243489 - DNA, 122 bp, Homo sapiens; identical to SEQ ID NO: 222745
  chr5:170171693-170171815
  hypo

SEQ ID NO: 243490 - DNA, 85 bp, Homo sapiens; identical to SEQ ID NO: 200154
  chr5:171541758-171541843
  hypo

SEQ ID NO: 243491 - DNA, 443 bp, Homo sapiens; identical to SEQ ID NO: 222747
  chr5:172385502-172385945
  hypo

SEQ ID NO: 243492 - DNA, 142 bp, Homo sapiens; identical to SEQ ID NO: 222748
  chr5:172386283-172386425
  hypo

SEQ ID NO: 243493 - DNA, 92 bp, Homo sapiens; identical to SEQ ID NO: 222749
  chr5:172444179-172444271
  hypo

SEQ ID NO: 243494 - DNA, 180 bp, Homo sapiens; identical to SEQ ID NO: 222750
  chr5:172659571-172659751
  hypo

SEQ ID NO: 243495 - DNA, 300 bp, Homo sapiens; identical to SEQ ID NO: 222751
  chr5:172659852-172660152
  hypo

SEQ ID NO: 243496 - DNA, 768 bp, Homo sapiens; identical to SEQ ID NO: 222752
  chr5:172665286-172666054
  hypo

SEQ ID NO: 243497 - DNA, 268 bp, Homo sapiens; identical to SEQ ID NO: 222753
  chr5:174220728-174220996
  hypo

SEQ ID NO: 243498 - DNA, 900 bp, Homo sapiens; identical to SEQ ID NO: 222754
  chr5:175084737-175085637
  hypo

SEQ ID NO: 243499 - DNA, 900 bp, Homo sapiens; identical to SEQ ID NO: 222755
  chr5:175298906-175299806
  hypo

SEQ ID NO: 243500 - DNA, 360 bp, Homo sapiens; identical to SEQ ID NO: 222756
  chr5:175299904-175300264
  hypo

SEQ ID NO: 243501 - DNA, 143 bp, Homo sapiens; identical to SEQ ID NO: 222757
  chr5:175792171-175792314
  hypo

SEQ ID NO: 243502 - DNA, 688 bp, Homo sapiens; identical to SEQ ID NO: 222758
  chr5:175792468-175793156
  hypo

SEQ ID NO: 243503 - DNA, 1280 bp, Homo sapiens; identical to SEQ ID NO: 222759
  chr5:176056554-176057834
  hypo

SEQ ID NO: 243504 - DNA, 619 bp, Homo sapiens; identical to SEQ ID NO: 222760
  chr5:176559986-176560605
  hypo

SEQ ID NO: 243505 - DNA, 90 bp, Homo sapiens; identical to SEQ ID NO: 222761
  chr5:176827093-176827183
  hypo

SEQ ID NO: 243506 - DNA, 288 bp, Homo sapiens; identical to SEQ ID NO: 222762
  chr5:176830417-176830705
  hypo

SEQ ID NO: 243507 - DNA, 147 bp, Homo sapiens; identical to SEQ ID NO: 222763
  chr5:176830933-176831080
  hypo

SEQ ID NO: 243508 - DNA, 105 bp, Homo sapiens; identical to SEQ ID NO: 222764
  chr5:178003711-178003816
  hypo

SEQ ID NO: 243509 - DNA, 462 bp, Homo sapiens; identical to SEQ ID NO: 222765
  chr5:178287138-178287600
  hypo

SEQ ID NO: 243510 - DNA, 214 bp, Homo sapiens; identical to SEQ ID NO: 200197
  chr5:178423619-178423833
  hypo

SEQ ID NO: 243511 - DNA, 591 bp, Homo sapiens; identical to SEQ ID NO: 222767
  chr5:178450571-178451162
  hypo

SEQ ID NO: 243512 - DNA, 596 bp, Homo sapiens; identical to SEQ ID NO: 222768
  chr5:178594073-178594669
  hypo

SEQ ID NO: 243513 - DNA, 1740 bp, Homo sapiens; identical to SEQ ID NO: 222769
  chr5:178770731-178772471
  hypo

SEQ ID NO: 243514 - DNA, 282 bp, Homo sapiens; identical to SEQ ID NO: 222770
  chr5:178772526-178772808
  hypo

SEQ ID NO: 243515 - DNA, 281 bp, Homo sapiens; identical to SEQ ID NO: 222771
  chr5:179223442-179223723
  hypo

SEQ ID NO: 243516 - DNA, 147 bp, Homo sapiens; identical to SEQ ID NO: 222772
  chr5:179234473-179234620
  hypo

SEQ ID NO: 243517 - DNA, 197 bp, Homo sapiens; identical to SEQ ID NO: 222773
  chr5:179246392-179246589
  hypo

SEQ ID NO: 243518 - DNA, 403 bp, Homo sapiens; identical to SEQ ID NO: 222774
  chr5:179498002-179498405
  hypo

SEQ ID NO: 243519 - DNA, 300 bp, Homo sapiens; identical to SEQ ID NO: 222775
  chr5:179780025-179780325
  hypo

SEQ ID NO: 243520 - DNA, 780 bp, Homo sapiens; identical to SEQ ID NO: 222776
  chr5:179780486-179781266
  hypo

SEQ ID NO: 243521 - DNA, 180 bp, Homo sapiens; identical to SEQ ID NO: 222777
  chr5:180017814-180017994
  hypo

SEQ ID NO: 243522 - DNA, 770 bp, Homo sapiens; identical to SEQ ID NO: 222778
  chr5:180018050-180018820
  hypo

SEQ ID NO: 243523 - DNA, 341 bp, Homo sapiens; identical to SEQ ID NO: 222779
  chr5:180046791-180047132
  hypo

SEQ ID NO: 243524 - DNA, 565 bp, Homo sapiens; identical to SEQ ID NO: 222780
  chr5:180075844-180076409
  hypo

SEQ ID NO: 243525 - DNA, 639 bp, Homo sapiens; identical to SEQ ID NO: 222781
  chr5:180076434-180077073
  hypo

SEQ ID NO: 243526 - DNA, 363 bp, Homo sapiens; identical to SEQ ID NO: 222782
  chr5:180100915-180101278
  hypo

SEQ ID NO: 243527 - DNA, 683 bp, Homo sapiens; identical to SEQ ID NO: 222783
  chr5:180479642-180480325
  hypo

SEQ ID NO: 243528 - DNA, 180 bp, Homo sapiens; identical to SEQ ID NO: 222784
  chr5:180480417-180480597
  hypo

SEQ ID NO: 243529 - DNA, 300 bp, Homo sapiens; identical to SEQ ID NO: 222785
  chr5:180480641-180480941
  hypo

SEQ ID NO: 243530 - DNA, 354 bp, Homo sapiens; identical to SEQ ID NO: 222786
  chr5:180527466-180527820
  hypo

SEQ ID NO: 243531 - DNA, 326 bp, Homo sapiens; identical to SEQ ID NO: 222787
  chr5:180673932-180674258
  hypo

SEQ ID NO: 243532 - DNA, 300 bp, Homo sapiens; identical to SEQ ID NO: 222788
  chr6:391517-391817
  hypo

SEQ ID NO: 243533 - DNA, 1920 bp, Homo sapiens; identical to SEQ ID NO: 222789
  chr6:391867-393787
  hypo

SEQ ID NO: 243534 - DNA, 240 bp, Homo sapiens; identical to SEQ ID NO: 222790
  chr6:711022-711262
  hypo

SEQ ID NO: 243535 - DNA, 180 bp, Homo sapiens; identical to SEQ ID NO: 222791
  chr6:1379291-1379471
  hypo

SEQ ID NO: 243536 - DNA, 360 bp, Homo sapiens; identical to SEQ ID NO: 222792
  chr6:1379630-1379990
  hypo

SEQ ID NO: 243537 - DNA, 480 bp, Homo sapiens; identical to SEQ ID NO: 222793
  chr6:1390692-1391172
  hypo

SEQ ID NO: 243538 - DNA, 180 bp, Homo sapiens; identical to SEQ ID NO: 222794
  chr6:1391248-1391428
  hypo

SEQ ID NO: 243539 - DNA, 285 bp, Homo sapiens; identical to SEQ ID NO: 222795
  chr6:1393800-1394085
  hypo

SEQ ID NO: 243540 - DNA, 618 bp, Homo sapiens; identical to SEQ ID NO: 222796
  chr6:1604913-1605531
  hypo

SEQ ID NO: 243541 - DNA, 1140 bp, Homo sapiens; identical to SEQ ID NO: 222797
  chr6:1610664-1611804
  hypo

SEQ ID NO: 243542 - DNA, 480 bp, Homo sapiens; identical to SEQ ID NO: 222798
  chr6:1611823-1612303
  hypo

SEQ ID NO: 243543 - DNA, 209 bp, Homo sapiens; identical to SEQ ID NO: 222799
  chr6:2999193-2999402
  hypo

SEQ ID NO: 243544 - DNA, 254 bp, Homo sapiens; identical to SEQ ID NO: 200241
  chr6:3162842-3163096
  hypo

SEQ ID NO: 243545 - DNA, 600 bp, Homo sapiens; identical to SEQ ID NO: 222801
  chr6:3456661-3457261
  hypo

SEQ ID NO: 243546 - DNA, 706 bp, Homo sapiens; identical to SEQ ID NO: 200247
  chr6:3457537-3458243
  hypo

SEQ ID NO: 243547 - DNA, 715 bp, Homo sapiens; identical to SEQ ID NO: 222803
  chr6:3750700-3751415
  hypo

SEQ ID NO: 243548 - DNA, 180 bp, Homo sapiens; identical to SEQ ID NO: 222804
  chr6:4775348-4775528
  hypo

SEQ ID NO: 243549 - DNA, 660 bp, Homo sapiens; identical to SEQ ID NO: 222805
  chr6:4775604-4776264
  hypo

SEQ ID NO: 243550 - DNA, 54 bp, Homo sapiens; identical to SEQ ID NO: 222806
  chr6:4949428-4949482
  hypo

SEQ ID NO: 243551 - DNA, 797 bp, Homo sapiens; identical to SEQ ID NO: 222807
  chr6:5085648-5086445
  hypo

SEQ ID NO: 243552 - DNA, 501 bp, Homo sapiens; identical to SEQ ID NO: 222808
  chr6:5999559-6000060
  hypo

SEQ ID NO: 243553 - DNA, 245 bp, Homo sapiens; identical to SEQ ID NO: 222809
  chr6:6009408-6009653
  hypo

SEQ ID NO: 243554 - DNA, 678 bp, Homo sapiens; identical to SEQ ID NO: 222810
  chr6:6546387-6547065
  hypo

SEQ ID NO: 243555 - DNA, 180 bp, Homo sapiens; identical to SEQ ID NO: 222811
  chr6:6547096-6547276
  hypo

SEQ ID NO: 243556 - DNA, 1010 bp, Homo sapiens; identical to SEQ ID NO: 222812
  chr6:7051650-7052660
  hypo

SEQ ID NO: 243557 - DNA, 240 bp, Homo sapiens; identical to SEQ ID NO: 222813
  chr6:7541551-7541791
  hypo

SEQ ID NO: 243558 - DNA, 1200 bp, Homo sapiens; identical to SEQ ID NO: 222814
  chr6:7726874-7728074
  hypo

SEQ ID NO: 243559 - DNA, 1222 bp, Homo sapiens; identical to SEQ ID NO: 222815
  chr6:11043633-11044855
  hypo

SEQ ID NO: 243560 - DNA, 326 bp, Homo sapiens; identical to SEQ ID NO: 222816
  chr6:11538581-11538907
  hypo

SEQ ID NO: 243561 - DNA, 180 bp, Homo sapiens; identical to SEQ ID NO: 222817
  chr6:13488394-13488574
  hypo

SEQ ID NO: 243562 - DNA, 146 bp, Homo sapiens; identical to SEQ ID NO: 200285
  chr6:13574018-13574164
  hypo

SEQ ID NO: 243563 - DNA, 142 bp, Homo sapiens; identical to SEQ ID NO: 222819
  chr6:14117536-14117678
  hypo

SEQ ID NO: 243564 - DNA, 128 bp, Homo sapiens; identical to SEQ ID NO: 200288
  chr6:14211103-14211231
  hypo

SEQ ID NO: 243565 - DNA, 576 bp, Homo sapiens; identical to SEQ ID NO: 222821
  chr6:17281020-17281596
  hypo

SEQ ID NO: 243566 - DNA, 156 bp, Homo sapiens; identical to SEQ ID NO: 222822
  chr6:18263766-18263922
  hypo

SEQ ID NO: 243567 - DNA, 1239 bp, Homo sapiens; identical to SEQ ID NO: 222823
  chr6:18264001-18265240
  hypo

SEQ ID NO: 243568 - DNA, 647 bp, Homo sapiens; identical to SEQ ID NO: 222824
  chr6:18277435-18278082
  hypo

SEQ ID NO: 243569 - DNA, 600 bp, Homo sapiens; identical to SEQ ID NO: 222825
  chr6:20212384-20212984
  hypo

SEQ ID NO: 243570 - DNA, 1131 bp, Homo sapiens; identical to SEQ ID NO: 200308
  chr6:21594475-21595606
  hypo

SEQ ID NO: 243571 - DNA, 263 bp, Homo sapiens; identical to SEQ ID NO: 200314
  chr6:22146853-22147116
  hypo

SEQ ID NO: 243572 - DNA, 105 bp, Homo sapiens; identical to SEQ ID NO: 222828
  chr6:26027558-26027663
  hypo

SEQ ID NO: 243573 - DNA, 316 bp, Homo sapiens; identical to SEQ ID NO: 222829
  chr6:26189135-26189451
  hypo

SEQ ID NO: 243574 - DNA, 102 bp, Homo sapiens; identical to SEQ ID NO: 222830
  chr6:26189980-26190082
  hypo

SEQ ID NO: 243575 - DNA, 600 bp, Homo sapiens; identical to SEQ ID NO: 222831
  chr6:26199088-26199688
  hypo

SEQ ID NO: 243576 - DNA, 155 bp, Homo sapiens; identical to SEQ ID NO: 222832
  chr6:26199717-26199872
  hypo

SEQ ID NO: 243577 - DNA, 180 bp, Homo sapiens; identical to SEQ ID NO: 222833
  chr6:26241165-26241345
  hypo

SEQ ID NO: 243578 - DNA, 391 bp, Homo sapiens; identical to SEQ ID NO: 222834
  chr6:27219436-27219827
  hypo

SEQ ID NO: 243579 - DNA, 556 bp, Homo sapiens; identical to SEQ ID NO: 222835
  chr6:27279796-27280352
  hypo

SEQ ID NO: 243580 - DNA, 180 bp, Homo sapiens; identical to SEQ ID NO: 222836
  chr6:27280457-27280637
  hypo

SEQ ID NO: 243581 - DNA, 120 bp, Homo sapiens; identical to SEQ ID NO: 222837
  chr6:27440466-27440586
  hypo

SEQ ID NO: 243582 - DNA, 157 bp, Homo sapiens; identical to SEQ ID NO: 222838
  chr6:27447416-27447573
  hypo

SEQ ID NO: 243583 - DNA, 540 bp, Homo sapiens; identical to SEQ ID NO: 222839
  chr6:27805765-27806305
  hypo

SEQ ID NO: 243584 - DNA, 251 bp, Homo sapiens; identical to SEQ ID NO: 222840
  chr6:28414855-28415106
  hypo

SEQ ID NO: 243585 - DNA, 480 bp, Homo sapiens; identical to SEQ ID NO: 222841
  chr6:34112086-34112566
  hypo

SEQ ID NO: 243586 - DNA, 300 bp, Homo sapiens; identical to SEQ ID NO: 222842
  chr6:34112610-34112910
  hypo

SEQ ID NO: 243587 - DNA, 215 bp, Homo sapiens; identical to SEQ ID NO: 222843
  chr6:34359521-34359736
  hypo

SEQ ID NO: 243588 - DNA, 1093 bp, Homo sapiens; identical to SEQ ID NO: 222844
  chr6:35655680-35656773
  hypo

SEQ ID NO: 243589 - DNA, 157 bp, Homo sapiens; identical to SEQ ID NO: 222845
  chr6:37138570-37138727
  hypo

SEQ ID NO: 243590 - DNA, 180 bp, Homo sapiens; identical to SEQ ID NO: 222846
  chr6:37138876-37139056
  hypo

SEQ ID NO: 243591 - DNA, 660 bp, Homo sapiens; identical to SEQ ID NO: 222847
  chr6:37664811-37665471
  hypo

SEQ ID NO: 243592 - DNA, 105 bp, Homo sapiens; identical to SEQ ID NO: 222848
  chr6:37665602-37665707
  hypo

SEQ ID NO: 243593 - DNA, 512 bp, Homo sapiens; identical to SEQ ID NO: 222849
  chr6:37666575-37667087
  hypo

SEQ ID NO: 243594 - DNA, 394 bp, Homo sapiens; identical to SEQ ID NO: 222850
  chr6:39281096-39281490
  hypo

SEQ ID NO: 243595 - DNA, 113 bp, Homo sapiens; identical to SEQ ID NO: 222851
  chr6:39692723-39692836
  hypo

SEQ ID NO: 243596 - DNA, 462 bp, Homo sapiens; identical to SEQ ID NO: 222852
  chr6:39901937-39902399
  hypo

SEQ ID NO: 243597 - DNA, 873 bp, Homo sapiens; identical to SEQ ID NO: 222853
  chr6:40554350-40555223
  hypo

SEQ ID NO: 243598 - DNA, 1080 bp, Homo sapiens; identical to SEQ ID NO: 222854
  chr6:41339160-41340240
  hypo

SEQ ID NO: 243599 - DNA, 600 bp, Homo sapiens; identical to SEQ ID NO: 222855
  chr6:41340475-41341075
  hypo

SEQ ID NO: 243600 - DNA, 420 bp, Homo sapiens; identical to SEQ ID NO: 222856
  chr6:42072215-42072635
  hypo

SEQ ID NO: 243601 - DNA, 125 bp, Homo sapiens; identical to SEQ ID NO: 222857
  chr6:43081636-43081761
  hypo

SEQ ID NO: 243602 - DNA, 92 bp, Homo sapiens; identical to SEQ ID NO: 222858
  chr6:43477369-43477461
  hypo

SEQ ID NO: 243603 - DNA, 98 bp, Homo sapiens; identical to SEQ ID NO: 200449
  chr6:43596713-43596811
  hypo

SEQ ID NO: 243604 - DNA, 300 bp, Homo sapiens; identical to SEQ ID NO: 222860
  chr6:44044264-44044564
  hypo

SEQ ID NO: 243605 - DNA, 270 bp, Homo sapiens; identical to SEQ ID NO: 200451
  chr6:44095871-44096141
  hypo

SEQ ID NO: 243606 - DNA, 600 bp, Homo sapiens; identical to SEQ ID NO: 222862
  chr6:45390776-45391376
  hypo

SEQ ID NO: 243607 - DNA, 526 bp, Homo sapiens; identical to SEQ ID NO: 222863
  chr6:45631099-45631625
  hypo

SEQ ID NO: 243608 - DNA, 980 bp, Homo sapiens; identical to SEQ ID NO: 222864
  chr6:46097249-46098229
  hypo

SEQ ID NO: 243609 - DNA, 87 bp, Homo sapiens; identical to SEQ ID NO: 200463
  chr6:46816765-46816852
  hypo

SEQ ID NO: 243610 - DNA, 45 bp, Homo sapiens; identical to SEQ ID NO: 222866
  chr6:52156896-52156941
  hypo

SEQ ID NO: 243611 - DNA, 722 bp, Homo sapiens; identical to SEQ ID NO: 222867
  chr6:52226692-52227414
  hypo

SEQ ID NO: 243612 - DNA, 140 bp, Homo sapiens; identical to SEQ ID NO: 222868
  chr6:52859558-52859698
  hypo

SEQ ID NO: 243613 - DNA, 360 bp, Homo sapiens; identical to SEQ ID NO: 222869
  chr6:53212498-53212858
  hypo

SEQ ID NO: 243614 - DNA, 1080 bp, Homo sapiens; identical to SEQ ID NO: 222870
  chr6:53212887-53213967
  hypo

SEQ ID NO: 243615 - DNA, 282 bp, Homo sapiens; identical to SEQ ID NO: 222871
  chr6:53409809-53410091
  hypo

SEQ ID NO: 243616 - DNA, 518 bp, Homo sapiens; identical to SEQ ID NO: 222872
  chr6:53660452-53660970
  hypo

SEQ ID NO: 243617 - DNA, 1525 bp, Homo sapiens; identical to SEQ ID NO: 222873
  chr6:56818890-56820415
  hypo

SEQ ID NO: 243618 - DNA, 600 bp, Homo sapiens; identical to SEQ ID NO: 222874
  chr6:62995519-62996119
  hypo

SEQ ID NO: 243619 - DNA, 52 bp, Homo sapiens; identical to SEQ ID NO: 200489
  chr6:64283088-64283140
  hypo

SEQ ID NO: 243620 - DNA, 840 bp, Homo sapiens; identical to SEQ ID NO: 222876
  chr6:69344727-69345567
  hypo

SEQ ID NO: 243621 - DNA, 152 bp, Homo sapiens; identical to SEQ ID NO: 222877
  chr6:71123138-71123290
  hypo

SEQ ID NO: 243622 - DNA, 240 bp, Homo sapiens; identical to SEQ ID NO: 222878
  chr6:71123551-71123791
  hypo

SEQ ID NO: 243623 - DNA, 240 bp, Homo sapiens; identical to SEQ ID NO: 222879
  chr6:71665917-71666157
  hypo

SEQ ID NO: 243624 - DNA, 637 bp, Homo sapiens; identical to SEQ ID NO: 222880
  chr6:72129568-72130205
  hypo

SEQ ID NO: 243625 - DNA, 1080 bp, Homo sapiens; identical to SEQ ID NO: 222881
  chr6:73330809-73331889
  hypo

SEQ ID NO: 243626 - DNA, 780 bp, Homo sapiens; identical to SEQ ID NO: 222882
  chr6:73331929-73332709
  hypo

SEQ ID NO: 243627 - DNA, 384 bp, Homo sapiens; identical to SEQ ID NO: 222883
  chr6:73332737-73333121
  hypo

SEQ ID NO: 243628 - DNA, 240 bp, Homo sapiens; identical to SEQ ID NO: 222884
  chr6:73972771-73973011
  hypo

SEQ ID NO: 243629 - DNA, 820 bp, Homo sapiens; identical to SEQ ID NO: 222885
  chr6:74019390-74020210
  hypo

SEQ ID NO: 243630 - DNA, 801 bp, Homo sapiens; identical to SEQ ID NO: 222886
  chr6:74161264-74162065
  hypo

SEQ ID NO: 243631 - DNA, 588 bp, Homo sapiens; identical to SEQ ID NO: 222887
  chr6:74405594-74406182
  hypo

SEQ ID NO: 243632 - DNA, 86 bp, Homo sapiens; identical to SEQ ID NO: 200513
  chr6:76458864-76458950
  hypo

SEQ ID NO: 243633 - DNA, 1020 bp, Homo sapiens; identical to SEQ ID NO: 222889
  chr6:80656656-80657676
  hypo

SEQ ID NO: 243634 - DNA, 300 bp, Homo sapiens; identical to SEQ ID NO: 222890
  chr6:84418036-84418336
  hypo

SEQ ID NO: 243635 - DNA, 540 bp, Homo sapiens; identical to SEQ ID NO: 222891
  chr6:84418378-84418918
  hypo

SEQ ID NO: 243636 - DNA, 145 bp, Homo sapiens; identical to SEQ ID NO: 222892
  chr6:87832386-87832531
  hypo

SEQ ID NO: 243637 - DNA, 1560 bp, Homo sapiens; identical to SEQ ID NO: 222893
  chr6:88875443-88877003
  hypo

SEQ ID NO: 243638 - DNA, 337 bp, Homo sapiens; identical to SEQ ID NO: 222894
  chr6:89827121-89827458
  hypo

SEQ ID NO: 243639 - DNA, 420 bp, Homo sapiens; identical to SEQ ID NO: 222895
  chr6:89827528-89827948
  hypo

SEQ ID NO: 243640 - DNA, 319 bp, Homo sapiens; identical to SEQ ID NO: 222896
  chr6:90062632-90062951
  hypo

SEQ ID NO: 243641 - DNA, 180 bp, Homo sapiens; identical to SEQ ID NO: 222897
  chr6:90121327-90121507
  hypo

SEQ ID NO: 243642 - DNA, 105 bp, Homo sapiens; identical to SEQ ID NO: 222898
  chr6:90142635-90142740
  hypo

SEQ ID NO: 243643 - DNA, 780 bp, Homo sapiens; identical to SEQ ID NO: 222899
  chr6:90142835-90143615
  hypo

SEQ ID NO: 243644 - DNA, 1155 bp, Homo sapiens; identical to SEQ ID NO: 222900
  chr6:91004756-91005911
  hypo

SEQ ID NO: 243645 - DNA, 780 bp, Homo sapiens; identical to SEQ ID NO: 222901
  chr6:91320348-91321128
  hypo

SEQ ID NO: 243646 - DNA, 66 bp, Homo sapiens; identical to SEQ ID NO: 200588
  chr6:99962859-99962925
  hypo

SEQ ID NO: 243647 - DNA, 394 bp, Homo sapiens; identical to SEQ ID NO: 222903
  chr6:100054672-100055066
  hypo

SEQ ID NO: 243648 - DNA, 1577 bp, Homo sapiens; identical to SEQ ID NO: 222904
  chr6:100061166-100062743
  hypo

SEQ ID NO: 243649 - DNA, 780 bp, Homo sapiens; identical to SEQ ID NO: 222905
  chr6:101841367-101842147
  hypo

SEQ ID NO: 243650 - DNA, 59 bp, Homo sapiens; identical to SEQ ID NO: 222906
  chr6:105307082-105307141
  hypo

SEQ ID NO: 243651 - DNA, 1031 bp, Homo sapiens; identical to SEQ ID NO: 222907
  chr6:105584128-105585159
  hypo

SEQ ID NO: 243652 - DNA, 660 bp, Homo sapiens; identical to SEQ ID NO: 222908
  chr6:105627462-105628122
  hypo

SEQ ID NO: 243653 - DNA, 352 bp, Homo sapiens; identical to SEQ ID NO: 222909
  chr6:106533694-106534046
  hypo

SEQ ID NO: 243654 - DNA, 738 bp, Homo sapiens; identical to SEQ ID NO: 222910
  chr6:106960441-106961179
  hypo

SEQ ID NO: 243655 - DNA, 340 bp, Homo sapiens; identical to SEQ ID NO: 222911
  chr6:107810018-107810358
  hypo

SEQ ID NO: 243656 - DNA, 180 bp, Homo sapiens; identical to SEQ ID NO: 222912
  chr6:107810488-107810668
  hypo

SEQ ID NO: 243657 - DNA, 178 bp, Homo sapiens; identical to SEQ ID NO: 222913
  chr6:108455183-108455361
  hypo

SEQ ID NO: 243658 - DNA, 183 bp, Homo sapiens; identical to SEQ ID NO: 200616
  chr6:108882164-108882347
  hypo

SEQ ID NO: 243659 - DNA, 373 bp, Homo sapiens; identical to SEQ ID NO: 222915
  chr6:109777233-109777606
  hypo

SEQ ID NO: 243660 - DNA, 938 bp, Homo sapiens; identical to SEQ ID NO: 222916
  chr6:111408934-111409872
  hypo

SEQ ID NO: 243661 - DNA, 480 bp, Homo sapiens; identical to SEQ ID NO: 222917
  chr6:117591884-117592364
  hypo

SEQ ID NO: 243662 - DNA, 703 bp, Homo sapiens; identical to SEQ ID NO: 222918
  chr6:117803613-117804316
  hypo

SEQ ID NO: 243663 - DNA, 1500 bp, Homo sapiens; identical to SEQ ID NO: 222919
  chr6:118228006-118229506
  hypo

SEQ ID NO: 243664 - DNA, 55 bp, Homo sapiens; identical to SEQ ID NO: 222920
  chr6:118971584-118971639
  hypo

SEQ ID NO: 243665 - DNA, 40 bp, Homo sapiens; identical to SEQ ID NO: 222921
  chr6:119762016-119762056
  hypo

SEQ ID NO: 243666 - DNA, 105 bp, Homo sapiens; identical to SEQ ID NO: 222922
  chr6:123110275-123110380
  hypo

SEQ ID NO: 243667 - DNA, 420 bp, Homo sapiens; identical to SEQ ID NO: 222923
  chr6:123110438-123110858
  hypo

SEQ ID NO: 243668 - DNA, 540 bp, Homo sapiens; identical to SEQ ID NO: 222924
  chr6:124124157-124124697
  hypo

SEQ ID NO: 243669 - DNA, 900 bp, Homo sapiens; identical to SEQ ID NO: 222925
  chr6:125283035-125283935
  hypo

SEQ ID NO: 243670 - DNA, 418 bp, Homo sapiens; identical to SEQ ID NO: 222926
  chr6:125420731-125421149
  hypo

SEQ ID NO: 243671 - DNA, 840 bp, Homo sapiens; identical to SEQ ID NO: 222927
  chr6:127440313-127441153
  hypo

SEQ ID NO: 243672 - DNA, 420 bp, Homo sapiens; identical to SEQ ID NO: 222928
  chr6:127441295-127441715
  hypo

SEQ ID NO: 243673 - DNA, 1173 bp, Homo sapiens; identical to SEQ ID NO: 222929
  chr6:127836628-127837801
  hypo

SEQ ID NO: 243674 - DNA, 1080 bp, Homo sapiens; identical to SEQ ID NO: 222930
  chr6:130686372-130687452
  hypo

SEQ ID NO: 243675 - DNA, 271 bp, Homo sapiens; identical to SEQ ID NO: 222931
  chr6:130687478-130687749
  hypo

SEQ ID NO: 243676 - DNA, 380 bp, Homo sapiens; identical to SEQ ID NO: 43472
  chr6:131383361-131383741
  hypo

SEQ ID NO: 243677 - DNA, 193 bp, Homo sapiens; identical to SEQ ID NO: 222933
  chr6:133146628-133146821
  hypo

SEQ ID NO: 243678 - DNA, 1560 bp, Homo sapiens; identical to SEQ ID NO: 222934
  chr6:133561747-133563307
  hypo

SEQ ID NO: 243679 - DNA, 288 bp, Homo sapiens; identical to SEQ ID NO: 222935
  chr6:134212294-134212582
  hypo

SEQ ID NO: 243680 - DNA, 44 bp, Homo sapiens; identical to SEQ ID NO: 200662
  chr6:135503608-135503652
  hypo

SEQ ID NO: 243681 - DNA, 535 bp, Homo sapiens; identical to SEQ ID NO: 222937
  chr6:136870742-136871277
  hypo

SEQ ID NO: 243682 - DNA, 1440 bp, Homo sapiens; identical to SEQ ID NO: 222938
  chr6:137242908-137244348
  hypo

SEQ ID NO: 243683 - DNA, 141 bp, Homo sapiens; identical to SEQ ID NO: 222939
  chr6:138428449-138428590
  hypo

SEQ ID NO: 243684 - DNA, 138 bp, Homo sapiens; identical to SEQ ID NO: 222940
  chr6:138724644-138724782
  hypo

SEQ ID NO: 243685 - DNA, 240 bp, Homo sapiens; identical to SEQ ID NO: 222941
  chr6:139013523-139013763
  hypo

SEQ ID NO: 243686 - DNA, 240 bp, Homo sapiens; identical to SEQ ID NO: 222942
  chr6:139695068-139695308
  hypo

SEQ ID NO: 243687 - DNA, 313 bp, Homo sapiens; identical to SEQ ID NO: 222943
  chr6:142622578-142622891
  hypo

SEQ ID NO: 243688 - DNA, 180 bp, Homo sapiens; identical to SEQ ID NO: 222944
  chr6:142623163-142623343
  hypo

SEQ ID NO: 243689 - DNA, 105 bp, Homo sapiens; identical to SEQ ID NO: 222945
  chr6:143266117-143266222
  hypo

SEQ ID NO: 243690 - DNA, 713 bp, Homo sapiens; identical to SEQ ID NO: 222946
  chr6:143998943-143999656
  hypo

SEQ ID NO: 243691 - DNA, 46 bp, Homo sapiens; identical to SEQ ID NO: 200686
  chr6:144537939-144537985
  hypo

SEQ ID NO: 243692 - DNA, 225 bp, Homo sapiens; identical to SEQ ID NO: 222948
  chr6:144606893-144607118
  hypo

SEQ ID NO: 243693 - DNA, 209 bp, Homo sapiens; identical to SEQ ID NO: 222949
  chr6:146136028-146136237
  hypo

SEQ ID NO: 243694 - DNA, 221 bp, Homo sapiens; identical to SEQ ID NO: 222950
  chr6:146136589-146136810
  hypo

SEQ ID NO: 243695 - DNA, 800 bp, Homo sapiens; identical to SEQ ID NO: 222951
  chr6:146864477-146865277
  hypo

SEQ ID NO: 243696 - DNA, 512 bp, Homo sapiens; identical to SEQ ID NO: 222952
  chr6:149771949-149772461
  hypo

SEQ ID NO: 243697 - DNA, 195 bp, Homo sapiens; identical to SEQ ID NO: 222953
  chr6:150185446-150185641
  hypo

SEQ ID NO: 243698 - DNA, 220 bp, Homo sapiens; identical to SEQ ID NO: 222954
  chr6:150921277-150921497
  hypo

SEQ ID NO: 243699 - DNA, 1409 bp, Homo sapiens; identical to SEQ ID NO: 222955
  chr6:151561222-151562631
  hypo

SEQ ID NO: 243700 - DNA, 406 bp, Homo sapiens; identical to SEQ ID NO: 222956
  chr6:152623124-152623530
  hypo

SEQ ID NO: 243701 - DNA, 960 bp, Homo sapiens; identical to SEQ ID NO: 222957
  chr6:152957540-152958500
  hypo

SEQ ID NO: 243702 - DNA, 240 bp, Homo sapiens; identical to SEQ ID NO: 222958
  chr6:154831367-154831607
  hypo

SEQ ID NO: 243703 - DNA, 540 bp, Homo sapiens; identical to SEQ ID NO: 222959
  chr6:154831653-154832193
  hypo

SEQ ID NO: 243704 - DNA, 1128 bp, Homo sapiens; identical to SEQ ID NO: 222960
  chr6:155316128-155317256
  hypo

SEQ ID NO: 243705 - DNA, 59 bp, Homo sapiens; identical to SEQ ID NO: 200718
  chr6:157802884-157802943
  hypo

SEQ ID NO: 243706 - DNA, 168 bp, Homo sapiens; identical to SEQ ID NO: 222962
  chr6:157803299-157803467
  hypo

SEQ ID NO: 243707 - DNA, 512 bp, Homo sapiens; identical to SEQ ID NO: 222963
  chr6:158244130-158244642
  hypo

SEQ ID NO: 243708 - DNA, 519 bp, Homo sapiens; identical to SEQ ID NO: 200720
  chr6:158402115-158402634
  hypo

SEQ ID NO: 243709 - DNA, 1318 bp, Homo sapiens; identical to SEQ ID NO: 222965
  chr6:158957207-158958525
  hypo

SEQ ID NO: 243710 - DNA, 479 bp, Homo sapiens; identical to SEQ ID NO: 222966
  chr6:159290684-159291163
  hypo

SEQ ID NO: 243711 - DNA, 360 bp, Homo sapiens; identical to SEQ ID NO: 222967
  chr6:159589986-159590346
  hypo

SEQ ID NO: 243712 - DNA, 907 bp, Homo sapiens; identical to SEQ ID NO: 222968
  chr6:159590432-159591339
  hypo

SEQ ID NO: 243713 - DNA, 240 bp, Homo sapiens; identical to SEQ ID NO: 222969
  chr6:160389724-160389964
  hypo

SEQ ID NO: 243714 - DNA, 240 bp, Homo sapiens; identical to SEQ ID NO: 222970
  chr6:163836402-163836642
  hypo

SEQ ID NO: 243715 - DNA, 180 bp, Homo sapiens; identical to SEQ ID NO: 222971
  chr6:163837345-163837525
  hypo

SEQ ID NO: 243716 - DNA, 780 bp, Homo sapiens; identical to SEQ ID NO: 222972
  chr6:166401982-166402762
  hypo

SEQ ID NO: 243717 - DNA, 420 bp, Homo sapiens; identical to SEQ ID NO: 222973
  chr6:166581096-166581516
  hypo

SEQ ID NO: 243718 - DNA, 660 bp, Homo sapiens; identical to SEQ ID NO: 222974
  chr6:166581656-166582316
  hypo

SEQ ID NO: 243719 - DNA, 507 bp, Homo sapiens; identical to SEQ ID NO: 222975
  chr6:166666751-166667258
  hypo

SEQ ID NO: 243720 - DNA, 263 bp, Homo sapiens; identical to SEQ ID NO: 222976
  chr6:166667369-166667632
  hypo

SEQ ID NO: 243721 - DNA, 355 bp, Homo sapiens; identical to SEQ ID NO: 222977
  chr6:167275700-167276055
  hypo

SEQ ID NO: 243722 - DNA, 105 bp, Homo sapiens; identical to SEQ ID NO: 222978
  chr6:167276260-167276365
  hypo

SEQ ID NO: 243723 - DNA, 154 bp, Homo sapiens; identical to SEQ ID NO: 222979
  chr6:168227314-168227468
  hypo

SEQ ID NO: 243724 - DNA, 33 bp, Homo sapiens; identical to SEQ ID NO: 200752
  chr6:168227910-168227943
  hypo

SEQ ID NO: 243725 - DNA, 84 bp, Homo sapiens; identical to SEQ ID NO: 200753
  chr6:168228222-168228306
  hypo

SEQ ID NO: 243726 - DNA, 577 bp, Homo sapiens; identical to SEQ ID NO: 222982
  chr6:168720070-168720647
  hypo

SEQ ID NO: 243727 - DNA, 318 bp, Homo sapiens; identical to SEQ ID NO: 222983
  chr6:170124883-170125201
  hypo

SEQ ID NO: 243728 - DNA, 650 bp, Homo sapiens; identical to SEQ ID NO: 222984
  chr6:170605422-170606072
  hypo

SEQ ID NO: 243729 - DNA, 789 bp, Homo sapiens; identical to SEQ ID NO: 222985
  chr7:149020-149809
  hypo

SEQ ID NO: 243730 - DNA, 1817 bp, Homo sapiens; identical to SEQ ID NO: 222986
  chr7:191992-193809
  hypo

SEQ ID NO: 243731 - DNA, 229 bp, Homo sapiens; identical to SEQ ID NO: 222987
  chr7:329606-329835
  hypo

SEQ ID NO: 243732 - DNA, 138 bp, Homo sapiens; identical to SEQ ID NO: 222988
  chr7:557874-558012
  hypo

SEQ ID NO: 243733 - DNA, 36 bp, Homo sapiens; identical to SEQ ID NO: 222989
  chr7:558727-558763
  hypo

SEQ ID NO: 243734 - DNA, 505 bp, Homo sapiens; identical to SEQ ID NO: 222990
  chr7:558986-559491
  hypo

SEQ ID NO: 243735 - DNA, 138 bp, Homo sapiens; identical to SEQ ID NO: 222991
  chr7:822392-822530
  hypo

SEQ ID NO: 243736 - DNA, 104 bp, Homo sapiens; identical to SEQ ID NO: 222992
  chr7:889532-889636
  hypo

SEQ ID NO: 243737 - DNA, 236 bp, Homo sapiens; identical to SEQ ID NO: 222993
  chr7:932819-933055
  hypo

SEQ ID NO: 243738 - DNA, 289 bp, Homo sapiens; identical to SEQ ID NO: 222994
  chr7:1001818-1002107
  hypo

SEQ ID NO: 243739 - DNA, 478 bp, Homo sapiens; identical to SEQ ID NO: 222995
  chr7:1007682-1008160
  hypo

SEQ ID NO: 243740 - DNA, 274 bp, Homo sapiens; identical to SEQ ID NO: 222996
  chr7:1069695-1069969
  hypo

SEQ ID NO: 243741 - DNA, 317 bp, Homo sapiens; identical to SEQ ID NO: 222997
  chr7:1083917-1084234
  hypo

SEQ ID NO: 243742 - DNA, 610 bp, Homo sapiens; identical to SEQ ID NO: 222998
  chr7:1269167-1269777
  hypo

SEQ ID NO: 243743 - DNA, 448 bp, Homo sapiens; identical to SEQ ID NO: 222999
  chr7:1408443-1408891
  hypo

SEQ ID NO: 243744 - DNA, 151 bp, Homo sapiens; identical to SEQ ID NO: 223000
  chr7:1409130-1409281
  hypo

SEQ ID NO: 243745 - DNA, 928 bp, Homo sapiens; identical to SEQ ID NO: 223001
  chr7:1498585-1499513
  hypo

SEQ ID NO: 243746 - DNA, 180 bp, Homo sapiens; identical to SEQ ID NO: 223002
  chr7:1704013-1704193
  hypo

SEQ ID NO: 243747 - DNA, 3000 bp, Homo sapiens; identical to SEQ ID NO: 223003
  chr7:1704336-1707336
  hypo

SEQ ID NO: 243748 - DNA, 613 bp, Homo sapiens; identical to SEQ ID NO: 223004
  chr7:1708906-1709519
  hypo

SEQ ID NO: 243749 - DNA, 104 bp, Homo sapiens; identical to SEQ ID NO: 223005
  chr7:1709560-1709664
  hypo

SEQ ID NO: 243750 - DNA, 570 bp, Homo sapiens; identical to SEQ ID NO: 223006
  chr7:1709872-1710442
  hypo

SEQ ID NO: 243751 - DNA, 900 bp, Homo sapiens; identical to SEQ ID NO: 223007
  chr7:1786090-1786990
  hypo

SEQ ID NO: 243752 - DNA, 105 bp, Homo sapiens; identical to SEQ ID NO: 223008
  chr7:2018616-2018721
  hypo

SEQ ID NO: 243753 - DNA, 202 bp, Homo sapiens; identical to SEQ ID NO: 200791
  chr7:2195725-2195927
  hypo

SEQ ID NO: 243754 - DNA, 77 bp, Homo sapiens; identical to SEQ ID NO: 223010
  chr7:2555344-2555421
  hypo

SEQ ID NO: 243755 - DNA, 423 bp, Homo sapiens; identical to SEQ ID NO: 223011
  chr7:2727879-2728302
  hypo

SEQ ID NO: 243756 - DNA, 501 bp, Homo sapiens; identical to SEQ ID NO: 223012
  chr7:3083199-3083700
  hypo

SEQ ID NO: 243757 - DNA, 1380 bp, Homo sapiens; identical to SEQ ID NO: 223013
  chr7:3340265-3341645
  hypo

SEQ ID NO: 243758 - DNA, 50 bp, Homo sapiens; identical to SEQ ID NO: 200795
  chr7:4770079-4770129
  hypo

SEQ ID NO: 243759 - DNA, 71 bp, Homo sapiens; identical to SEQ ID NO: 200796
  chr7:4770153-4770224
  hypo

SEQ ID NO: 243760 - DNA, 300 bp, Homo sapiens; identical to SEQ ID NO: 223016
  chr7:4998444-4998744
  hypo

SEQ ID NO: 243761 - DNA, 156 bp, Homo sapiens; identical to SEQ ID NO: 223017
  chr7:5462155-5462311
  hypo

SEQ ID NO: 243762 - DNA, 593 bp, Homo sapiens; identical to SEQ ID NO: 223018
  chr7:5594638-5595231
  hypo

SEQ ID NO: 243763 - DNA, 919 bp, Homo sapiens; identical to SEQ ID NO: 223019
  chr7:5632266-5633185
  hypo

SEQ ID NO: 243764 - DNA, 180 bp, Homo sapiens; identical to SEQ ID NO: 223020
  chr7:5633400-5633580
  hypo

SEQ ID NO: 243765 - DNA, 826 bp, Homo sapiens; identical to SEQ ID NO: 223021
  chr7:6570379-6571205
  hypo

SEQ ID NO: 243766 - DNA, 133 bp, Homo sapiens; identical to SEQ ID NO: 223022
  chr7:6575941-6576074
  hypo

SEQ ID NO: 243767 - DNA, 325 bp, Homo sapiens; identical to SEQ ID NO: 223023
  chr7:6654778-6655103
  hypo

SEQ ID NO: 243768 - DNA, 665 bp, Homo sapiens; identical to SEQ ID NO: 223024
  chr7:6655356-6656021
  hypo

SEQ ID NO: 243769 - DNA, 104 bp, Homo sapiens; identical to SEQ ID NO: 223025
  chr7:6966951-6967055
  hypo

SEQ ID NO: 243770 - DNA, 111 bp, Homo sapiens; identical to SEQ ID NO: 223026
  chr7:7605673-7605784
  hypo

SEQ ID NO: 243771 - DNA, 240 bp, Homo sapiens; identical to SEQ ID NO: 223027
  chr7:8483584-8483824
  hypo

SEQ ID NO: 243772 - DNA, 505 bp, Homo sapiens; identical to SEQ ID NO: 223028
  chr7:16793057-16793562
  hypo

SEQ ID NO: 243773 - DNA, 1038 bp, Homo sapiens; identical to SEQ ID NO: 200834
  chr7:17338062-17339100
  hypo

SEQ ID NO: 243774 - DNA, 840 bp, Homo sapiens; identical to SEQ ID NO: 223030
  chr7:18125886-18126726
  hypo

SEQ ID NO: 243775 - DNA, 1080 bp, Homo sapiens; identical to SEQ ID NO: 223031
  chr7:19156377-19157457
  hypo

SEQ ID NO: 243776 - DNA, 480 bp, Homo sapiens; identical to SEQ ID NO: 223032
  chr7:20817351-20817831
  hypo

SEQ ID NO: 243777 - DNA, 180 bp, Homo sapiens; identical to SEQ ID NO: 223033
  chr7:20826049-20826229
  hypo

SEQ ID NO: 243778 - DNA, 180 bp, Homo sapiens; identical to SEQ ID NO: 223034
  chr7:20826537-20826717
  hypo

SEQ ID NO: 243779 - DNA, 275 bp, Homo sapiens; identical to SEQ ID NO: 223035
  chr7:20837557-20837832
  hypo

SEQ ID NO: 243780 - DNA, 911 bp, Homo sapiens; identical to SEQ ID NO: 223036
  chr7:21984988-21985899
  hypo

SEQ ID NO: 243781 - DNA, 133 bp, Homo sapiens; identical to SEQ ID NO: 223037
  chr7:22143409-22143542
  hypo

SEQ ID NO: 243782 - DNA, 1244 bp, Homo sapiens; identical to SEQ ID NO: 223038
  chr7:22893423-22894667
  hypo

SEQ ID NO: 243783 - DNA, 1264 bp, Homo sapiens; identical to SEQ ID NO: 223039
  chr7:23052815-23054079
  hypo

SEQ ID NO: 243784 - DNA, 1080 bp, Homo sapiens; identical to SEQ ID NO: 223040
  chr7:23508678-23509758
  hypo

SEQ ID NO: 243785 - DNA, 335 bp, Homo sapiens; identical to SEQ ID NO: 223041
  chr7:23510689-23511024
  hypo

SEQ ID NO: 243786 - DNA, 1054 bp, Homo sapiens; identical to SEQ ID NO: 223042
  chr7:23513226-23514280
  hypo

SEQ ID NO: 243787 - DNA, 249 bp, Homo sapiens; identical to SEQ ID NO: 223043
  chr7:23570143-23570392
  hypo

SEQ ID NO: 243788 - DNA, 180 bp, Homo sapiens; identical to SEQ ID NO: 223044
  chr7:24323228-24323408
  hypo

SEQ ID NO: 243789 - DNA, 180 bp, Homo sapiens; identical to SEQ ID NO: 223045
  chr7:24323482-24323662
  hypo

SEQ ID NO: 243790 - DNA, 600 bp, Homo sapiens; identical to SEQ ID NO: 223046
  chr7:24323717-24324317
  hypo

SEQ ID NO: 243791 - DNA, 180 bp, Homo sapiens; identical to SEQ ID NO: 223047
  chr7:24324535-24324715
  hypo

SEQ ID NO: 243792 - DNA, 1084 bp, Homo sapiens; identical to SEQ ID NO: 223048
  chr7:24796417-24797501
  hypo

SEQ ID NO: 243793 - DNA, 360 bp, Homo sapiens; identical to SEQ ID NO: 223049
  chr7:25019719-25020079
  hypo

SEQ ID NO: 243794 - DNA, 200 bp, Homo sapiens; identical to SEQ ID NO: 223050
  chr7:25219900-25220100
  hypo

SEQ ID NO: 243795 - DNA, 676 bp, Homo sapiens; identical to SEQ ID NO: 223051
  chr7:25891899-25892575
  hypo

SEQ ID NO: 243796 - DNA, 360 bp, Homo sapiens; identical to SEQ ID NO: 223052
  chr7:25989980-25990340
  hypo

SEQ ID NO: 243797 - DNA, 300 bp, Homo sapiens; identical to SEQ ID NO: 223053
  chr7:25990462-25990762
  hypo

SEQ ID NO: 243798 - DNA, 180 bp, Homo sapiens; identical to SEQ ID NO: 223054
  chr7:27135297-27135477
  hypo

SEQ ID NO: 243799 - DNA, 1320 bp, Homo sapiens; identical to SEQ ID NO: 223055
  chr7:27135565-27136885
  hypo

SEQ ID NO: 243800 - DNA, 279 bp, Homo sapiens; identical to SEQ ID NO: 223056
  chr7:27146294-27146573
  hypo

SEQ ID NO: 243801 - DNA, 594 bp, Homo sapiens; identical to SEQ ID NO: 223057
  chr7:27191549-27192143
  hypo

SEQ ID NO: 243802 - DNA, 1020 bp, Homo sapiens; identical to SEQ ID NO: 223058
  chr7:27212925-27213945
  hypo

SEQ ID NO: 243803 - DNA, 720 bp, Homo sapiens; identical to SEQ ID NO: 223059
  chr7:27223936-27224656
  hypo

SEQ ID NO: 243804 - DNA, 728 bp, Homo sapiens; identical to SEQ ID NO: 223060
  chr7:27278959-27279687
  hypo

SEQ ID NO: 243805 - DNA, 193 bp, Homo sapiens; identical to SEQ ID NO: 223061
  chr7:27701810-27702003
  hypo

SEQ ID NO: 243806 - DNA, 389 bp, Homo sapiens; identical to SEQ ID NO: 223062
  chr7:29185859-29186248
  hypo

SEQ ID NO: 243807 - DNA, 1072 bp, Homo sapiens; identical to SEQ ID NO: 223063
  chr7:29233994-29235066
  hypo

SEQ ID NO: 243808 - DNA, 369 bp, Homo sapiens; identical to SEQ ID NO: 200920
  chr7:29724332-29724701
  hypo

SEQ ID NO: 243809 - DNA, 54 bp, Homo sapiens; identical to SEQ ID NO: 200921
  chr7:29725077-29725131
  hypo

SEQ ID NO: 243810 - DNA, 938 bp, Homo sapiens; identical to SEQ ID NO: 223066
  chr7:30028511-30029449
  hypo

SEQ ID NO: 243811 - DNA, 263 bp, Homo sapiens; identical to SEQ ID NO: 223067
  chr7:30029494-30029757
  hypo

SEQ ID NO: 243812 - DNA, 139 bp, Homo sapiens; identical to SEQ ID NO: 223068
  chr7:30067885-30068024
  hypo

SEQ ID NO: 243813 - DNA, 240 bp, Homo sapiens; identical to SEQ ID NO: 223069
  chr7:30517968-30518208
  hypo

SEQ ID NO: 243814 - DNA, 530 bp, Homo sapiens; identical to SEQ ID NO: 223070
  chr7:30721877-30722407
  hypo

SEQ ID NO: 243815 - DNA, 900 bp, Homo sapiens; identical to SEQ ID NO: 223071
  chr7:31091861-31092761
  hypo

SEQ ID NO: 243816 - DNA, 960 bp, Homo sapiens; identical to SEQ ID NO: 223072
  chr7:32337957-32338917
  hypo

SEQ ID NO: 243817 - DNA, 264 bp, Homo sapiens; identical to SEQ ID NO: 223073
  chr7:32768220-32768484
  hypo

SEQ ID NO: 243818 - DNA, 660 bp, Homo sapiens; identical to SEQ ID NO: 223074
  chr7:32981884-32982544
  hypo

SEQ ID NO: 243819 - DNA, 154 bp, Homo sapiens; identical to SEQ ID NO: 223075
  chr7:32996717-32996871
  hypo

SEQ ID NO: 243820 - DNA, 540 bp, Homo sapiens; identical to SEQ ID NO: 223076
  chr7:32997067-32997607
  hypo

SEQ ID NO: 243821 - DNA, 180 bp, Homo sapiens; identical to SEQ ID NO: 223077
  chr7:33944194-33944374
  hypo

SEQ ID NO: 243822 - DNA, 960 bp, Homo sapiens; identical to SEQ ID NO: 223078
  chr7:33944400-33945360
  hypo

SEQ ID NO: 243823 - DNA, 180 bp, Homo sapiens; identical to SEQ ID NO: 223079
  chr7:35225498-35225678
  hypo

SEQ ID NO: 243824 - DNA, 515 bp, Homo sapiens; identical to SEQ ID NO: 223080
  chr7:35225735-35226250
  hypo

SEQ ID NO: 243825 - DNA, 146 bp, Homo sapiens; identical to SEQ ID NO: 223081
  chr7:35226470-35226616
  hypo

SEQ ID NO: 243826 - DNA, 995 bp, Homo sapiens; identical to SEQ ID NO: 223082
  chr7:36192297-36193292
  hypo

SEQ ID NO: 243827 - DNA, 102 bp, Homo sapiens; identical to SEQ ID NO: 223083
  chr7:37487146-37487248
  hypo

SEQ ID NO: 243828 - DNA, 1722 bp, Homo sapiens; identical to SEQ ID NO: 223084
  chr7:37487368-37489090
  hypo

SEQ ID NO: 243829 - DNA, 981 bp, Homo sapiens; identical to SEQ ID NO: 223085
  chr7:37960166-37961147
  hypo

SEQ ID NO: 243830 - DNA, 256 bp, Homo sapiens; identical to SEQ ID NO: 223086
  chr7:39453506-39453762
  hypo

SEQ ID NO: 243831 - DNA, 240 bp, Homo sapiens; identical to SEQ ID NO: 223087
  chr7:42276671-42276911
  hypo

SEQ ID NO: 243832 - DNA, 180 bp, Homo sapiens; identical to SEQ ID NO: 223088
  chr7:42277034-42277214
  hypo

SEQ ID NO: 243833 - DNA, 300 bp, Homo sapiens; identical to SEQ ID NO: 223089
  chr7:42277290-42277590
  hypo

SEQ ID NO: 243834 - DNA, 1320 bp, Homo sapiens; identical to SEQ ID NO: 223090
  chr7:43152044-43153364
  hypo

SEQ ID NO: 243835 - DNA, 1193 bp, Homo sapiens; identical to SEQ ID NO: 223091
  chr7:44364449-44365642
  hypo

SEQ ID NO: 243836 - DNA, 699 bp, Homo sapiens; identical to SEQ ID NO: 223092
  chr7:44924079-44924778
  hypo

SEQ ID NO: 243837 - DNA, 623 bp, Homo sapiens; identical to SEQ ID NO: 223093
  chr7:45026005-45026628
  hypo

SEQ ID NO: 243838 - DNA, 220 bp, Homo sapiens; identical to SEQ ID NO: 223094
  chr7:45299652-45299872
  hypo

SEQ ID NO: 243839 - DNA, 1525 bp, Homo sapiens; identical to SEQ ID NO: 223095
  chr7:45613459-45614984
  hypo

SEQ ID NO: 243840 - DNA, 153 bp, Homo sapiens; identical to SEQ ID NO: 223096
  chr7:47293661-47293814
  hypo

SEQ ID NO: 243841 - DNA, 173 bp, Homo sapiens; identical to SEQ ID NO: 200965
  chr7:47294081-47294254
  hypo

SEQ ID NO: 243842 - DNA, 154 bp, Homo sapiens; identical to SEQ ID NO: 223098
  chr7:47621699-47621853
  hypo

SEQ ID NO: 243843 - DNA, 447 bp, Homo sapiens; identical to SEQ ID NO: 223099
  chr7:48074954-48075401
  hypo

SEQ ID NO: 243844 - DNA, 180 bp, Homo sapiens; identical to SEQ ID NO: 223100
  chr7:48075446-48075626
  hypo

SEQ ID NO: 243845 - DNA, 262 bp, Homo sapiens; identical to SEQ ID NO: 200969
  chr7:48127995-48128257
  hypo

SEQ ID NO: 243846 - DNA, 180 bp, Homo sapiens; identical to SEQ ID NO: 223102
  chr7:49812951-49813131
  hypo

SEQ ID NO: 243847 - DNA, 1260 bp, Homo sapiens; identical to SEQ ID NO: 223103
  chr7:49813204-49814464
  hypo

SEQ ID NO: 243848 - DNA, 1260 bp, Homo sapiens; identical to SEQ ID NO: 223104
  chr7:49814497-49815757
  hypo

SEQ ID NO: 243849 - DNA, 1658 bp, Homo sapiens; identical to SEQ ID NO: 223105
  chr7:50343196-50344854
  hypo

SEQ ID NO: 243850 - DNA, 115 bp, Homo sapiens; identical to SEQ ID NO: 200983
  chr7:55593336-55593451
  hypo

SEQ ID NO: 243851 - DNA, 161 bp, Homo sapiens; identical to SEQ ID NO: 223107
  chr7:57928159-57928320
  hypo

SEQ ID NO: 243852 - DNA, 120 bp, Homo sapiens; identical to SEQ ID NO: 223108
  chr7:63767610-63767730
  hypo

SEQ ID NO: 243853 - DNA, 509 bp, Homo sapiens; identical to SEQ ID NO: 223109
  chr7:64349589-64350098
  hypo

SEQ ID NO: 243854 - DNA, 93 bp, Homo sapiens; identical to SEQ ID NO: 223110
  chr7:64974061-64974154
  hypo

SEQ ID NO: 243855 - DNA, 120 bp, Homo sapiens; identical to SEQ ID NO: 223111
  chr7:64974301-64974421
  hypo

SEQ ID NO: 243856 - DNA, 533 bp, Homo sapiens; identical to SEQ ID NO: 223112
  chr7:64974481-64975014
  hypo

SEQ ID NO: 243857 - DNA, 142 bp, Homo sapiens; identical to SEQ ID NO: 223113
  chr7:65037619-65037761
  hypo

SEQ ID NO: 243858 - DNA, 38 bp, Homo sapiens; identical to SEQ ID NO: 200996
  chr7:65541037-65541075
  hypo

SEQ ID NO: 243859 - DNA, 137 bp, Homo sapiens; identical to SEQ ID NO: 200998
  chr7:66094049-66094186
  hypo

SEQ ID NO: 243860 - DNA, 1042 bp, Homo sapiens; identical to SEQ ID NO: 223116
  chr7:69062189-69063231
  hypo

SEQ ID NO: 243861 - DNA, 180 bp, Homo sapiens; identical to SEQ ID NO: 223117
  chr7:69063499-69063679
  hypo

SEQ ID NO: 243862 - DNA, 1380 bp, Homo sapiens; identical to SEQ ID NO: 223118
  chr7:69063746-69065126
  hypo

SEQ ID NO: 243863 - DNA, 105 bp, Homo sapiens; identical to SEQ ID NO: 223119
  chr7:70596058-70596163
  hypo

SEQ ID NO: 243864 - DNA, 360 bp, Homo sapiens; identical to SEQ ID NO: 223120
  chr7:70596460-70596820
  hypo

SEQ ID NO: 243865 - DNA, 300 bp, Homo sapiens; identical to SEQ ID NO: 223121
  chr7:70596864-70597164
  hypo

SEQ ID NO: 243866 - DNA, 180 bp, Homo sapiens; identical to SEQ ID NO: 223122
  chr7:70597264-70597444
  hypo

SEQ ID NO: 243867 - DNA, 88 bp, Homo sapiens; identical to SEQ ID NO: 223123
  chr7:71198521-71198609
  hypo

SEQ ID NO: 243868 - DNA, 1080 bp, Homo sapiens; identical to SEQ ID NO: 223124
  chr7:71801273-71802353
  hypo

SEQ ID NO: 243869 - DNA, 180 bp, Homo sapiens; identical to SEQ ID NO: 223125
  chr7:77167496-77167676
  hypo

SEQ ID NO: 243870 - DNA, 104 bp, Homo sapiens; identical to SEQ ID NO: 223126
  chr7:77167773-77167877
  hypo

SEQ ID NO: 243871 - DNA, 180 bp, Homo sapiens; identical to SEQ ID NO: 223127
  chr7:79082859-79083039
  hypo

SEQ ID NO: 243872 - DNA, 180 bp, Homo sapiens; identical to SEQ ID NO: 223128
  chr7:79083101-79083281
  hypo

SEQ ID NO: 243873 - DNA, 360 bp, Homo sapiens; identical to SEQ ID NO: 223129
  chr7:79083338-79083698
  hypo

SEQ ID NO: 243874 - DNA, 660 bp, Homo sapiens; identical to SEQ ID NO: 223130
  chr7:80548127-80548787
  hypo

SEQ ID NO: 243875 - DNA, 615 bp, Homo sapiens; identical to SEQ ID NO: 223131
  chr7:82791810-82792425
  hypo

SEQ ID NO: 243876 - DNA, 109 bp, Homo sapiens; identical to SEQ ID NO: 201027
  chr7:86849527-86849636
  hypo

SEQ ID NO: 243877 - DNA, 505 bp, Homo sapiens; identical to SEQ ID NO: 223133
  chr7:87257953-87258458
  hypo

SEQ ID NO: 243878 - DNA, 180 bp, Homo sapiens; identical to SEQ ID NO: 223134
  chr7:87563698-87563878
  hypo

SEQ ID NO: 243879 - DNA, 471 bp, Homo sapiens; identical to SEQ ID NO: 223135
  chr7:87564093-87564564
  hypo

SEQ ID NO: 243880 - DNA, 153 bp, Homo sapiens; identical to SEQ ID NO: 223136
  chr7:87849420-87849573
  hypo

SEQ ID NO: 243881 - DNA, 840 bp, Homo sapiens; identical to SEQ ID NO: 223137
  chr7:90225596-90226436
  hypo

SEQ ID NO: 243882 - DNA, 606 bp, Homo sapiens; identical to SEQ ID NO: 223138
  chr7:90894561-90895167
  hypo

SEQ ID NO: 243883 - DNA, 347 bp, Homo sapiens; identical to SEQ ID NO: 223139
  chr7:91808298-91808645
  hypo

SEQ ID NO: 243884 - DNA, 143 bp, Homo sapiens; identical to SEQ ID NO: 201043
  chr7:92219764-92219907
  hypo

SEQ ID NO: 243885 - DNA, 1229 bp, Homo sapiens; identical to SEQ ID NO: 44386
  chr7:92462187-92463416
  hypo

SEQ ID NO: 243886 - DNA, 247 bp, Homo sapiens; identical to SEQ ID NO: 201045
  chr7:92463701-92463948
  hypo

SEQ ID NO: 243887 - DNA, 205 bp, Homo sapiens; identical to SEQ ID NO: 223143
  chr7:92464934-92465139
  hypo

SEQ ID NO: 243888 - DNA, 252 bp, Homo sapiens; identical to SEQ ID NO: 223144
  chr7:92466276-92466528
  hypo

SEQ ID NO: 243889 - DNA, 180 bp, Homo sapiens; identical to SEQ ID NO: 223145
  chr7:95064267-95064447
  hypo

SEQ ID NO: 243890 - DNA, 180 bp, Homo sapiens; identical to SEQ ID NO: 223146
  chr7:96635628-96635808
  hypo

SEQ ID NO: 243891 - DNA, 420 bp, Homo sapiens; identical to SEQ ID NO: 223147
  chr7:96635832-96636252
  hypo

SEQ ID NO: 243892 - DNA, 180 bp, Homo sapiens; identical to SEQ ID NO: 223148
  chr7:96636291-96636471
  hypo

SEQ ID NO: 243893 - DNA, 821 bp, Homo sapiens; identical to SEQ ID NO: 223149
  chr7:96746747-96747568
  hypo

SEQ ID NO: 243894 - DNA, 674 bp, Homo sapiens; identical to SEQ ID NO: 223150
  chr7:97501249-97501923
  hypo

SEQ ID NO: 243895 - DNA, 217 bp, Homo sapiens; identical to SEQ ID NO: 223151
  chr7:98030420-98030637
  hypo

SEQ ID NO: 243896 - DNA, 720 bp, Homo sapiens; identical to SEQ ID NO: 223152
  chr7:98246402-98247122
  hypo

SEQ ID NO: 243897 - DNA, 678 bp, Homo sapiens; identical to SEQ ID NO: 223153
  chr7:98971534-98972212
  hypo

SEQ ID NO: 243898 - DNA, 1128 bp, Homo sapiens; identical to SEQ ID NO: 223154
  chr7:99155928-99157056
  hypo

SEQ ID NO: 243899 - DNA, 74 bp, Homo sapiens; identical to SEQ ID NO: 223155
  chr7:99613133-99613207
  hypo

SEQ ID NO: 243900 - DNA, 206 bp, Homo sapiens; identical to SEQ ID NO: 223156
  chr7:99725600-99725806
  hypo

SEQ ID NO: 243901 - DNA, 240 bp, Homo sapiens; identical to SEQ ID NO: 223157
  chr7:100424529-100424769
  hypo

SEQ ID NO: 243902 - DNA, 240 bp, Homo sapiens; identical to SEQ ID NO: 223158
  chr7:100424796-100425036
  hypo

SEQ ID NO: 243903 - DNA, 105 bp, Homo sapiens; identical to SEQ ID NO: 223159
  chr7:100608956-100609061
  hypo

SEQ ID NO: 243904 - DNA, 104 bp, Homo sapiens; identical to SEQ ID NO: 223160
  chr7:100609394-100609498
  hypo

SEQ ID NO: 243905 - DNA, 521 bp, Homo sapiens; identical to SEQ ID NO: 223161
  chr7:100808390-100808911
  hypo

SEQ ID NO: 243906 - DNA, 640 bp, Homo sapiens; identical to SEQ ID NO: 223162
  chr7:100823171-100823811
  hypo

SEQ ID NO: 243907 - DNA, 410 bp, Homo sapiens; identical to SEQ ID NO: 223163
  chr7:101006043-101006453
  hypo

SEQ ID NO: 243908 - DNA, 159 bp, Homo sapiens; identical to SEQ ID NO: 223164
  chr7:101457610-101457769
  hypo

SEQ ID NO: 243909 - DNA, 340 bp, Homo sapiens; identical to SEQ ID NO: 223165
  chr7:101458373-101458713
  hypo

SEQ ID NO: 243910 - DNA, 190 bp, Homo sapiens; identical to SEQ ID NO: 201088
  chr7:101459183-101459373
  hypo

SEQ ID NO: 243911 - DNA, 496 bp, Homo sapiens; identical to SEQ ID NO: 223167
  chr7:101460545-101461041
  hypo

SEQ ID NO: 243912 - DNA, 111 bp, Homo sapiens; identical to SEQ ID NO: 201091
  chr7:101559394-101559505
  hypo

SEQ ID NO: 243913 - DNA, 48 bp, Homo sapiens; identical to SEQ ID NO: 201092
  chr7:101671377-101671425
  hypo

SEQ ID NO: 243914 - DNA, 97 bp, Homo sapiens; identical to SEQ ID NO: 223170
  chr7:101707445-101707542
  hypo

SEQ ID NO: 243915 - DNA, 79 bp, Homo sapiens; identical to SEQ ID NO: 201093
  chr7:101713618-101713697
  hypo

SEQ ID NO: 243916 - DNA, 138 bp, Homo sapiens; identical to SEQ ID NO: 201094
  chr7:101740643-101740781
  hypo

SEQ ID NO: 243917 - DNA, 124 bp, Homo sapiens; identical to SEQ ID NO: 201095
  chr7:101747615-101747739
  hypo

SEQ ID NO: 243918 - DNA, 77 bp, Homo sapiens; identical to SEQ ID NO: 201096
  chr7:101754977-101755054
  hypo

SEQ ID NO: 243919 - DNA, 67 bp, Homo sapiens; identical to SEQ ID NO: 201097
  chr7:101758486-101758553
  hypo

SEQ ID NO: 243920 - DNA, 49 bp, Homo sapiens; identical to SEQ ID NO: 201098
  chr7:101801839-101801888
  hypo

SEQ ID NO: 243921 - DNA, 105 bp, Homo sapiens; identical to SEQ ID NO: 201099
  chr7:101813725-101813830
  hypo

SEQ ID NO: 243922 - DNA, 189 bp, Homo sapiens; identical to SEQ ID NO: 201100
  chr7:101821748-101821937
  hypo

SEQ ID NO: 243923 - DNA, 59 bp, Homo sapiens; identical to SEQ ID NO: 201101
  chr7:101833092-101833151
  hypo

SEQ ID NO: 243924 - DNA, 49 bp, Homo sapiens; identical to SEQ ID NO: 201102
  chr7:101837121-101837170
  hypo

SEQ ID NO: 243925 - DNA, 97 bp, Homo sapiens; identical to SEQ ID NO: 201103
  chr7:101838786-101838883
  hypo

SEQ ID NO: 243926 - DNA, 672 bp, Homo sapiens; identical to SEQ ID NO: 201104
  chr7:101839913-101840585
  hypo

SEQ ID NO: 243927 - DNA, 66 bp, Homo sapiens; identical to SEQ ID NO: 201105
  chr7:101842081-101842147
  hypo

SEQ ID NO: 243928 - DNA, 102 bp, Homo sapiens; identical to SEQ ID NO: 201106
  chr7:101843350-101843452
  hypo

SEQ ID NO: 243929 - DNA, 845 bp, Homo sapiens; identical to SEQ ID NO: 201107
  chr7:101844639-101845484
  hypo

SEQ ID NO: 243930 - DNA, 166 bp, Homo sapiens; identical to SEQ ID NO: 201108
  chr7:101847670-101847836
  hypo

SEQ ID NO: 243931 - DNA, 57 bp, Homo sapiens; identical to SEQ ID NO: 201109
  chr7:101848393-101848450
  hypo

SEQ ID NO: 243932 - DNA, 303 bp, Homo sapiens; identical to SEQ ID NO: 201110
  chr7:101870646-101870949
  hypo

SEQ ID NO: 243933 - DNA, 189 bp, Homo sapiens; identical to SEQ ID NO: 201111
  chr7:101877331-101877520
  hypo

SEQ ID NO: 243934 - DNA, 265 bp, Homo sapiens; identical to SEQ ID NO: 201112
  chr7:101882599-101882864
  hypo

SEQ ID NO: 243935 - DNA, 9822 bp, Homo sapiens; identical to SEQ ID NO: 201113
  chr7:101891691-101901513
  hypo

SEQ ID NO: 243936 - DNA, 128 bp, Homo sapiens; identical to SEQ ID NO: 201114
  chr7:101916636-101916764
  hypo

SEQ ID NO: 243937 - DNA, 67 bp, Homo sapiens; identical to SEQ ID NO: 201115
  chr7:101917514-101917581
  hypo

SEQ ID NO: 243938 - DNA, 113 bp, Homo sapiens; identical to SEQ ID NO: 201116
  chr7:101918517-101918630
  hypo

SEQ ID NO: 243939 - DNA, 117 bp, Homo sapiens; identical to SEQ ID NO: 201117
  chr7:101921219-101921336
  hypo

SEQ ID NO: 243940 - DNA, 84 bp, Homo sapiens; identical to SEQ ID NO: 201118
  chr7:101923328-101923412
  hypo

SEQ ID NO: 243941 - DNA, 57 bp, Homo sapiens; identical to SEQ ID NO: 201119
  chr7:101924095-101924152
  hypo

SEQ ID NO: 243942 - DNA, 81 bp, Homo sapiens; identical to SEQ ID NO: 201120
  chr7:101925131-101925212
  hypo

SEQ ID NO: 243943 - DNA, 65 bp, Homo sapiens; identical to SEQ ID NO: 201121
  chr7:101926003-101926068
  hypo

SEQ ID NO: 243944 - DNA, 938 bp, Homo sapiens; identical to SEQ ID NO: 201122
  chr7:101926312-101927250
  hypo

SEQ ID NO: 243945 - DNA, 690 bp, Homo sapiens; identical to SEQ ID NO: 223201
  chr7:102920838-102921528
  hypo

SEQ ID NO: 243946 - DNA, 960 bp, Homo sapiens; identical to SEQ ID NO: 223202
  chr7:103085903-103086863
  hypo

SEQ ID NO: 243947 - DNA, 960 bp, Homo sapiens; identical to SEQ ID NO: 223203
  chr7:103629201-103630161
  hypo

SEQ ID NO: 243948 - DNA, 180 bp, Homo sapiens; identical to SEQ ID NO: 223204
  chr7:103630274-103630454
  hypo

SEQ ID NO: 243949 - DNA, 256 bp, Homo sapiens; identical to SEQ ID NO: 223205
  chr7:105517675-105517931
  hypo

SEQ ID NO: 243950 - DNA, 687 bp, Homo sapiens; identical to SEQ ID NO: 223206
  chr7:106508245-106508932
  hypo

SEQ ID NO: 243951 - DNA, 956 bp, Homo sapiens; identical to SEQ ID NO: 223207
  chr7:106684800-106685756
  hypo

SEQ ID NO: 243952 - DNA, 233 bp, Homo sapiens; identical to SEQ ID NO: 223208
  chr7:107531764-107531997
  hypo

SEQ ID NO: 243953 - DNA, 1053 bp, Homo sapiens; identical to SEQ ID NO: 223209
  chr7:108095229-108096282
  hypo

SEQ ID NO: 243954 - DNA, 180 bp, Homo sapiens; identical to SEQ ID NO: 223210
  chr7:108096508-108096688
  hypo

SEQ ID NO: 243955 - DNA, 526 bp, Homo sapiens; identical to SEQ ID NO: 223211
  chr7:113727289-113727815
  hypo

SEQ ID NO: 243956 - DNA, 869 bp, Homo sapiens; identical to SEQ ID NO: 223212
  chr7:116962854-116963723
  hypo

SEQ ID NO: 243957 - DNA, 180 bp, Homo sapiens; identical to SEQ ID NO: 223213
  chr7:120497345-120497525
  hypo

SEQ ID NO: 243958 - DNA, 105 bp, Homo sapiens; identical to SEQ ID NO: 223214
  chr7:121863466-121863571
  hypo

SEQ ID NO: 243959 - DNA, 152 bp, Homo sapiens; identical to SEQ ID NO: 223215
  chr7:123174511-123174663
  hypo

SEQ ID NO: 243960 - DNA, 1260 bp, Homo sapiens; identical to SEQ ID NO: 223216
  chr7:126891196-126892456
  hypo

SEQ ID NO: 243961 - DNA, 180 bp, Homo sapiens; identical to SEQ ID NO: 223217
  chr7:126892488-126892668
  hypo

SEQ ID NO: 243962 - DNA, 420 bp, Homo sapiens; identical to SEQ ID NO: 223218
  chr7:126892805-126893225
  hypo

SEQ ID NO: 243963 - DNA, 454 bp, Homo sapiens; identical to SEQ ID NO: 223219
  chr7:126987826-126988280
  hypo

SEQ ID NO: 243964 - DNA, 671 bp, Homo sapiens; identical to SEQ ID NO: 223220
  chr7:127671336-127672007
  hypo

SEQ ID NO: 243965 - DNA, 498 bp, Homo sapiens; identical to SEQ ID NO: 223221
  chr7:127744070-127744568
  hypo

SEQ ID NO: 243966 - DNA, 621 bp, Homo sapiens; identical to SEQ ID NO: 223222
  chr7:128470517-128471138
  hypo

SEQ ID NO: 243967 - DNA, 104 bp, Homo sapiens; identical to SEQ ID NO: 223223
  chr7:128509606-128509710
  hypo

SEQ ID NO: 243968 - DNA, 239 bp, Homo sapiens; identical to SEQ ID NO: 223224
  chr7:128509982-128510221
  hypo

SEQ ID NO: 243969 - DNA, 480 bp, Homo sapiens; identical to SEQ ID NO: 223225
  chr7:128828199-128828679
  hypo

SEQ ID NO: 243970 - DNA, 180 bp, Homo sapiens; identical to SEQ ID NO: 223226
  chr7:129421889-129422069
  hypo

SEQ ID NO: 243971 - DNA, 600 bp, Homo sapiens; identical to SEQ ID NO: 223227
  chr7:132261552-132262152
  hypo

SEQ ID NO: 243972 - DNA, 104 bp, Homo sapiens; identical to SEQ ID NO: 223228
  chr7:132262376-132262480
  hypo

SEQ ID NO: 243973 - DNA, 878 bp, Homo sapiens; identical to SEQ ID NO: 223229
  chr7:134143261-134144139
  hypo

SEQ ID NO: 243974 - DNA, 492 bp, Homo sapiens; identical to SEQ ID NO: 223230
  chr7:138720460-138720952
  hypo

SEQ ID NO: 243975 - DNA, 478 bp, Homo sapiens; identical to SEQ ID NO: 223231
  chr7:139167556-139168034
  hypo

SEQ ID NO: 243976 - DNA, 540 bp, Homo sapiens; identical to SEQ ID NO: 223232
  chr7:139168060-139168600
  hypo

SEQ ID NO: 243977 - DNA, 363 bp, Homo sapiens; identical to SEQ ID NO: 223233
  chr7:139208473-139208836
  hypo

SEQ ID NO: 243978 - DNA, 437 bp, Homo sapiens; identical to SEQ ID NO: 223234
  chr7:139478051-139478488
  hypo

SEQ ID NO: 243979 - DNA, 627 bp, Homo sapiens; identical to SEQ ID NO: 223235
  chr7:139930082-139930709
  hypo

SEQ ID NO: 243980 - DNA, 180 bp, Homo sapiens; identical to SEQ ID NO: 223236
  chr7:140098228-140098408
  hypo

SEQ ID NO: 243981 - DNA, 320 bp, Homo sapiens; identical to SEQ ID NO: 223237
  chr7:140339867-140340187
  hypo

SEQ ID NO: 243982 - DNA, 696 bp, Homo sapiens; identical to SEQ ID NO: 223238
  chr7:140340287-140340983
  hypo

SEQ ID NO: 243983 - DNA, 2149 bp, Homo sapiens; identical to SEQ ID NO: 223239
  chr7:140772338-140774487
  hypo

SEQ ID NO: 243984 - DNA, 408 bp, Homo sapiens; identical to SEQ ID NO: 223240
  chr7:142985429-142985837
  hypo

SEQ ID NO: 243985 - DNA, 257 bp, Homo sapiens; identical to SEQ ID NO: 223241
  chr7:144100839-144101096
  hypo

SEQ ID NO: 243986 - DNA, 180 bp, Homo sapiens; identical to SEQ ID NO: 223242
  chr7:145813816-145813996
  hypo

SEQ ID NO: 243987 - DNA, 152 bp, Homo sapiens; identical to SEQ ID NO: 201215
  chr7:145981901-145982053
  hypo

SEQ ID NO: 243988 - DNA, 540 bp, Homo sapiens; identical to SEQ ID NO: 223244
  chr7:148036404-148036944
  hypo

SEQ ID NO: 243989 - DNA, 79 bp, Homo sapiens; identical to SEQ ID NO: 201217
  chr7:148506412-148506491
  hypo

SEQ ID NO: 243990 - DNA, 89 bp, Homo sapiens; identical to SEQ ID NO: 201218
  chr7:148507424-148507513
  hypo

SEQ ID NO: 243991 - DNA, 100 bp, Homo sapiens; identical to SEQ ID NO: 223247
  chr7:148508712-148508812
  hypo

SEQ ID NO: 243992 - DNA, 184 bp, Homo sapiens; identical to SEQ ID NO: 201220
  chr7:148511050-148511234
  hypo

SEQ ID NO: 243993 - DNA, 107 bp, Homo sapiens; identical to SEQ ID NO: 201221
  chr7:148512014-148512121
  hypo

SEQ ID NO: 243994 - DNA, 34 bp, Homo sapiens; identical to SEQ ID NO: 201222
  chr7:148513818-148513852
  hypo

SEQ ID NO: 243995 - DNA, 121 bp, Homo sapiens; identical to SEQ ID NO: 201223
  chr7:148514301-148514422
  hypo

SEQ ID NO: 243996 - DNA, 76 bp, Homo sapiens; identical to SEQ ID NO: 201224
  chr7:148515086-148515162
  hypo

SEQ ID NO: 243997 - DNA, 200 bp, Homo sapiens; identical to SEQ ID NO: 201225
  chr7:148523536-148523736
  hypo

SEQ ID NO: 243998 - DNA, 119 bp, Homo sapiens; identical to SEQ ID NO: 201226
  chr7:148526816-148526935
  hypo

SEQ ID NO: 243999 - DNA, 105 bp, Homo sapiens; identical to SEQ ID NO: 223255
  chr7:148936611-148936716
  hypo

SEQ ID NO: 244000 - DNA, 314 bp, Homo sapiens; identical to SEQ ID NO: 223256
  chr7:148959355-148959669
  hypo

SEQ ID NO: 244001 - DNA, 801 bp, Homo sapiens; identical to SEQ ID NO: 223257
  chr7:149411563-149412364
  hypo

SEQ ID NO: 244002 - DNA, 105 bp, Homo sapiens; identical to SEQ ID NO: 223258
  chr7:150497095-150497200
  hypo

SEQ ID NO: 244003 - DNA, 780 bp, Homo sapiens; identical to SEQ ID NO: 223259
  chr7:150497279-150498059
  hypo

SEQ ID NO: 244004 - DNA, 360 bp, Homo sapiens; identical to SEQ ID NO: 223260
  chr7:150671754-150672114
  hypo

SEQ ID NO: 244005 - DNA, 380 bp, Homo sapiens; identical to SEQ ID NO: 223261
  chr7:150676164-150676544
  hypo

SEQ ID NO: 244006 - DNA, 1113 bp, Homo sapiens; identical to SEQ ID NO: 223262
  chr7:150714959-150716072
  hypo

SEQ ID NO: 244007 - DNA, 206 bp, Homo sapiens; identical to SEQ ID NO: 223263
  chr7:150784073-150784279
  hypo

SEQ ID NO: 244008 - DNA, 446 bp, Homo sapiens; identical to SEQ ID NO: 223264
  chr7:150784597-150785043
  hypo

SEQ ID NO: 244009 - DNA, 33 bp, Homo sapiens; identical to SEQ ID NO: 201242
  chr7:150869804-150869837
  hypo

SEQ ID NO: 244010 - DNA, 64 bp, Homo sapiens; identical to SEQ ID NO: 223266
  chr7:150948746-150948810
  hypo

SEQ ID NO: 244011 - DNA, 380 bp, Homo sapiens; identical to SEQ ID NO: 223267
  chr7:151038583-151038963
  hypo

SEQ ID NO: 244012 - DNA, 1346 bp, Homo sapiens; identical to SEQ ID NO: 223268
  chr7:151106381-151107727
  hypo

SEQ ID NO: 244013 - DNA, 152 bp, Homo sapiens; identical to SEQ ID NO: 223269
  chr7:151217153-151217305
  hypo

SEQ ID NO: 244014 - DNA, 240 bp, Homo sapiens; identical to SEQ ID NO: 223270
  chr7:151573007-151573247
  hypo

SEQ ID NO: 244015 - DNA, 536 bp, Homo sapiens; identical to SEQ ID NO: 223271
  chr7:151722708-151723244
  hypo

SEQ ID NO: 244016 - DNA, 180 bp, Homo sapiens; identical to SEQ ID NO: 223272
  chr7:155166648-155166828
  hypo

SEQ ID NO: 244017 - DNA, 752 bp, Homo sapiens; identical to SEQ ID NO: 223273
  chr7:155167096-155167848
  hypo

SEQ ID NO: 244018 - DNA, 170 bp, Homo sapiens; identical to SEQ ID NO: 223274
  chr7:155170271-155170441
  hypo

SEQ ID NO: 244019 - DNA, 445 bp, Homo sapiens; identical to SEQ ID NO: 223275
  chr7:155170533-155170978
  hypo

SEQ ID NO: 244020 - DNA, 420 bp, Homo sapiens; identical to SEQ ID NO: 223276
  chr7:155247390-155247810
  hypo

SEQ ID NO: 244021 - DNA, 180 bp, Homo sapiens; identical to SEQ ID NO: 223277
  chr7:155247941-155248121
  hypo

SEQ ID NO: 244022 - DNA, 1680 bp, Homo sapiens; identical to SEQ ID NO: 223278
  chr7:155250312-155251992
  hypo

SEQ ID NO: 244023 - DNA, 180 bp, Homo sapiens; identical to SEQ ID NO: 223279
  chr7:155252154-155252334
  hypo

SEQ ID NO: 244024 - DNA, 780 bp, Homo sapiens; identical to SEQ ID NO: 223280
  chr7:155259402-155260182
  hypo

SEQ ID NO: 244025 - DNA, 180 bp, Homo sapiens; identical to SEQ ID NO: 223281
  chr7:155260233-155260413
  hypo

SEQ ID NO: 244026 - DNA, 366 bp, Homo sapiens; identical to SEQ ID NO: 223282
  chr7:155580046-155580412
  hypo

SEQ ID NO: 244027 - DNA, 196 bp, Homo sapiens; identical to SEQ ID NO: 223283
  chr7:155580715-155580911
  hypo

SEQ ID NO: 244028 - DNA, 480 bp, Homo sapiens; identical to SEQ ID NO: 223284
  chr7:156802197-156802677
  hypo

SEQ ID NO: 244029 - DNA, 960 bp, Homo sapiens; identical to SEQ ID NO: 223285
  chr7:156802713-156803673
  hypo

SEQ ID NO: 244030 - DNA, 180 bp, Homo sapiens; identical to SEQ ID NO: 223286
  chr7:156813616-156813796
  hypo

SEQ ID NO: 244031 - DNA, 360 bp, Homo sapiens; identical to SEQ ID NO: 223287
  chr7:156813892-156814252
  hypo

SEQ ID NO: 244032 - DNA, 360 bp, Homo sapiens; identical to SEQ ID NO: 223288
  chr7:156814294-156814654
  hypo

SEQ ID NO: 244033 - DNA, 231 bp, Homo sapiens; identical to SEQ ID NO: 223289
  chr7:157129086-157129317
  hypo

SEQ ID NO: 244034 - DNA, 104 bp, Homo sapiens; identical to SEQ ID NO: 223290
  chr7:157150797-157150901
  hypo

SEQ ID NO: 244035 - DNA, 880 bp, Homo sapiens; identical to SEQ ID NO: 223291
  chr7:157477409-157478289
  hypo

SEQ ID NO: 244036 - DNA, 270 bp, Homo sapiens; identical to SEQ ID NO: 223292
  chr7:157594763-157595033
  hypo

SEQ ID NO: 244037 - DNA, 104 bp, Homo sapiens; identical to SEQ ID NO: 223293
  chr7:157731955-157732059
  hypo

SEQ ID NO: 244038 - DNA, 462 bp, Homo sapiens; identical to SEQ ID NO: 223294
  chr7:158379348-158379810
  hypo

SEQ ID NO: 244039 - DNA, 351 bp, Homo sapiens; identical to SEQ ID NO: 223295
  chr7:158936494-158936845
  hypo

SEQ ID NO: 244040 - DNA, 960 bp, Homo sapiens; identical to SEQ ID NO: 223296
  chr7:158936949-158937909
  hypo

SEQ ID NO: 244041 - DNA, 457 bp, Homo sapiens; identical to SEQ ID NO: 223297
  chr8:494406-494863
  hypo

SEQ ID NO: 244042 - DNA, 120 bp, Homo sapiens; identical to SEQ ID NO: 223298
  chr8:495072-495192
  hypo

SEQ ID NO: 244043 - DNA, 477 bp, Homo sapiens; identical to SEQ ID NO: 223299
  chr8:495479-495956
  hypo

SEQ ID NO: 244044 - DNA, 1920 bp, Homo sapiens; identical to SEQ ID NO: 223300
  chr8:686814-688734
  hypo

SEQ ID NO: 244045 - DNA, 540 bp, Homo sapiens; identical to SEQ ID NO: 223301
  chr8:688768-689308
  hypo

SEQ ID NO: 244046 - DNA, 169 bp, Homo sapiens; identical to SEQ ID NO: 223302
  chr8:798795-798964
  hypo

SEQ ID NO: 244047 - DNA, 44 bp, Homo sapiens; identical to SEQ ID NO: 223303
  chr8:8640056-8640100
  hypo

SEQ ID NO: 244048 - DNA, 167 bp, Homo sapiens; identical to SEQ ID NO: 223304
  chr8:8750284-8750451
  hypo

SEQ ID NO: 244049 - DNA, 139 bp, Homo sapiens; identical to SEQ ID NO: 223305
  chr8:8750520-8750659
  hypo

SEQ ID NO: 244050 - DNA, 462 bp, Homo sapiens; identical to SEQ ID NO: 223306
  chr8:8820810-8821272
  hypo

SEQ ID NO: 244051 - DNA, 180 bp, Homo sapiens; identical to SEQ ID NO: 223307
  chr8:9761081-9761261
  hypo

SEQ ID NO: 244052 - DNA, 180 bp, Homo sapiens; identical to SEQ ID NO: 223308
  chr8:9761468-9761648
  hypo

SEQ ID NO: 244053 - DNA, 125 bp, Homo sapiens; identical to SEQ ID NO: 223309
  chr8:9762660-9762785
  hypo

SEQ ID NO: 244054 - DNA, 840 bp, Homo sapiens; identical to SEQ ID NO: 223310
  chr8:9763745-9764585
  hypo

SEQ ID NO: 244055 - DNA, 185 bp, Homo sapiens; identical to SEQ ID NO: 223311
  chr8:10058672-10058857
  hypo

SEQ ID NO: 244056 - DNA, 360 bp, Homo sapiens; identical to SEQ ID NO: 223312
  chr8:10587292-10587652
  hypo

SEQ ID NO: 244057 - DNA, 360 bp, Homo sapiens; identical to SEQ ID NO: 223313
  chr8:10587749-10588109
  hypo

SEQ ID NO: 244058 - DNA, 300 bp, Homo sapiens; identical to SEQ ID NO: 223314
  chr8:10873482-10873782
  hypo

SEQ ID NO: 244059 - DNA, 1045 bp, Homo sapiens; identical to SEQ ID NO: 223315
  chr8:11058124-11059169
  hypo

SEQ ID NO: 244060 - DNA, 129 bp, Homo sapiens; identical to SEQ ID NO: 223316
  chr8:11204526-11204655
  hypo

SEQ ID NO: 244061 - DNA, 780 bp, Homo sapiens; identical to SEQ ID NO: 223317
  chr8:11204763-11205543
  hypo

SEQ ID NO: 244062 - DNA, 449 bp, Homo sapiens; identical to SEQ ID NO: 223318
  chr8:11550051-11550500
  hypo

SEQ ID NO: 244063 - DNA, 147 bp, Homo sapiens; identical to SEQ ID NO: 223319
  chr8:11726004-11726151
  hypo

SEQ ID NO: 244064 - DNA, 1201 bp, Homo sapiens; identical to SEQ ID NO: 223320
  chr8:16884158-16885359
  hypo

SEQ ID NO: 244065 - DNA, 240 bp, Homo sapiens; identical to SEQ ID NO: 223321
  chr8:17434563-17434803
  hypo

SEQ ID NO: 244066 - DNA, 180 bp, Homo sapiens; identical to SEQ ID NO: 201321
  chr8:18870741-18870921
  hypo

SEQ ID NO: 244067 - DNA, 180 bp, Homo sapiens; identical to SEQ ID NO: 223323
  chr8:19797331-19797511
  hypo

SEQ ID NO: 244068 - DNA, 480 bp, Homo sapiens; identical to SEQ ID NO: 223324
  chr8:19797597-19798077
  hypo

SEQ ID NO: 244069 - DNA, 944 bp, Homo sapiens; identical to SEQ ID NO: 223325
  chr8:20160737-20161681
  hypo

SEQ ID NO: 244070 - DNA, 45 bp, Homo sapiens; identical to SEQ ID NO: 223326
  chr8:21868699-21868744
  hypo

SEQ ID NO: 244071 - DNA, 124 bp, Homo sapiens; identical to SEQ ID NO: 201326
  chr8:21906319-21906443
  hypo

SEQ ID NO: 244072 - DNA, 420 bp, Homo sapiens; identical to SEQ ID NO: 223328
  chr8:22408681-22409101
  hypo

SEQ ID NO: 244073 - DNA, 275 bp, Homo sapiens; identical to SEQ ID NO: 223329
  chr8:22409120-22409395
  hypo

SEQ ID NO: 244074 - DNA, 660 bp, Homo sapiens; identical to SEQ ID NO: 223330
  chr8:22436932-22437592
  hypo

SEQ ID NO: 244075 - DNA, 217 bp, Homo sapiens; identical to SEQ ID NO: 223331
  chr8:22550331-22550548
  hypo

SEQ ID NO: 244076 - DNA, 256 bp, Homo sapiens; identical to SEQ ID NO: 223332
  chr8:22550912-22551168
  hypo

SEQ ID NO: 244077 - DNA, 309 bp, Homo sapiens; identical to SEQ ID NO: 223333
  chr8:22925472-22925781
  hypo

SEQ ID NO: 244078 - DNA, 711 bp, Homo sapiens; identical to SEQ ID NO: 223334
  chr8:23020919-23021630
  hypo

SEQ ID NO: 244079 - DNA, 194 bp, Homo sapiens; identical to SEQ ID NO: 201338
  chr8:23386092-23386286
  hypo

SEQ ID NO: 244080 - DNA, 240 bp, Homo sapiens; identical to SEQ ID NO: 223336
  chr8:23560427-23560667
  hypo

SEQ ID NO: 244081 - DNA, 300 bp, Homo sapiens; identical to SEQ ID NO: 223337
  chr8:23567466-23567766
  hypo

SEQ ID NO: 244082 - DNA, 180 bp, Homo sapiens; identical to SEQ ID NO: 223338
  chr8:25901675-25901855
  hypo

SEQ ID NO: 244083 - DNA, 314 bp, Homo sapiens; identical to SEQ ID NO: 223339
  chr8:25902015-25902329
  hypo

SEQ ID NO: 244084 - DNA, 360 bp, Homo sapiens; identical to SEQ ID NO: 223340
  chr8:25905117-25905477
  hypo

SEQ ID NO: 244085 - DNA, 335 bp, Homo sapiens; identical to SEQ ID NO: 223341
  chr8:25909334-25909669
  hypo

SEQ ID NO: 244086 - DNA, 206 bp, Homo sapiens; identical to SEQ ID NO: 223342
  chr8:26148759-26148965
  hypo

SEQ ID NO: 244087 - DNA, 180 bp, Homo sapiens; identical to SEQ ID NO: 223343
  chr8:26372013-26372193
  hypo

SEQ ID NO: 244088 - DNA, 404 bp, Homo sapiens; identical to SEQ ID NO: 223344
  chr8:26372392-26372796
  hypo

SEQ ID NO: 244089 - DNA, 64 bp, Homo sapiens; identical to SEQ ID NO: 223345
  chr8:26435020-26435084
  hypo

SEQ ID NO: 244090 - DNA, 105 bp, Homo sapiens; identical to SEQ ID NO: 223346
  chr8:26436194-26436299
  hypo

SEQ ID NO: 244091 - DNA, 383 bp, Homo sapiens; identical to SEQ ID NO: 223347
  chr8:26436415-26436798
  hypo

SEQ ID NO: 244092 - DNA, 78 bp, Homo sapiens; identical to SEQ ID NO: 201364
  chr8:27168528-27168606
  hypo

SEQ ID NO: 244093 - DNA, 217 bp, Homo sapiens; identical to SEQ ID NO: 223349
  chr8:27327235-27327452
  hypo

SEQ ID NO: 244094 - DNA, 152 bp, Homo sapiens; identical to SEQ ID NO: 223350
  chr8:28242733-28242885
  hypo

SEQ ID NO: 244095 - DNA, 78 bp, Homo sapiens; identical to SEQ ID NO: 201368
  chr8:28258795-28258873
  hypo

SEQ ID NO: 244096 - DNA, 288 bp, Homo sapiens; identical to SEQ ID NO: 223352
  chr8:28748909-28749197
  hypo

SEQ ID NO: 244097 - DNA, 480 bp, Homo sapiens; identical to SEQ ID NO: 223353
  chr8:29206314-29206794
  hypo

SEQ ID NO: 244098 - DNA, 1320 bp, Homo sapiens; identical to SEQ ID NO: 223354
  chr8:29206910-29208230
  hypo

SEQ ID NO: 244099 - DNA, 180 bp, Homo sapiens; identical to SEQ ID NO: 223355
  chr8:30241852-30242032
  hypo

SEQ ID NO: 244100 - DNA, 480 bp, Homo sapiens; identical to SEQ ID NO: 223356
  chr8:30242849-30243329
  hypo

SEQ ID NO: 244101 - DNA, 540 bp, Homo sapiens; identical to SEQ ID NO: 223357
  chr8:33371767-33372307
  hypo

SEQ ID NO: 244102 - DNA, 180 bp, Homo sapiens; identical to SEQ ID NO: 223358
  chr8:35092997-35093177
  hypo

SEQ ID NO: 244103 - DNA, 273 bp, Homo sapiens; identical to SEQ ID NO: 223359
  chr8:35093226-35093499
  hypo

SEQ ID NO: 244104 - DNA, 1140 bp, Homo sapiens; identical to SEQ ID NO: 223360
  chr8:37552565-37553705
  hypo

SEQ ID NO: 244105 - DNA, 660 bp, Homo sapiens; identical to SEQ ID NO: 223361
  chr8:37655519-37656179
  hypo

SEQ ID NO: 244106 - DNA, 480 bp, Homo sapiens; identical to SEQ ID NO: 223362
  chr8:38325248-38325728
  hypo

SEQ ID NO: 244107 - DNA, 180 bp, Homo sapiens; identical to SEQ ID NO: 223363
  chr8:38325889-38326069
  hypo

SEQ ID NO: 244108 - DNA, 180 bp, Homo sapiens; identical to SEQ ID NO: 223364
  chr8:38614525-38614705
  hypo

SEQ ID NO: 244109 - DNA, 340 bp, Homo sapiens; identical to SEQ ID NO: 223365
  chr8:38614823-38615163
  hypo

SEQ ID NO: 244110 - DNA, 780 bp, Homo sapiens; identical to SEQ ID NO: 223366
  chr8:41166351-41167131
  hypo

SEQ ID NO: 244111 - DNA, 1620 bp, Homo sapiens; identical to SEQ ID NO: 223367
  chr8:41753534-41755154
  hypo

SEQ ID NO: 244112 - DNA, 34 bp, Homo sapiens; identical to SEQ ID NO: 201399
  chr8:42040329-42040363
  hypo

SEQ ID NO: 244113 - DNA, 380 bp, Homo sapiens; identical to SEQ ID NO: 223369
  chr8:42996735-42997115
  hypo

SEQ ID NO: 244114 - DNA, 300 bp, Homo sapiens; identical to SEQ ID NO: 223370
  chr8:48649775-48650075
  hypo

SEQ ID NO: 244115 - DNA, 300 bp, Homo sapiens; identical to SEQ ID NO: 223371
  chr8:48650137-48650437
  hypo

SEQ ID NO: 244116 - DNA, 240 bp, Homo sapiens; identical to SEQ ID NO: 223372
  chr8:48650853-48651093
  hypo

SEQ ID NO: 244117 - DNA, 481 bp, Homo sapiens; identical to SEQ ID NO: 223373
  chr8:49468663-49469144
  hypo

SEQ ID NO: 244118 - DNA, 944 bp, Homo sapiens; identical to SEQ ID NO: 223374
  chr8:53852161-53853105
  hypo

SEQ ID NO: 244119 - DNA, 384 bp, Homo sapiens; identical to SEQ ID NO: 223375
  chr8:53853385-53853769
  hypo

SEQ ID NO: 244120 - DNA, 300 bp, Homo sapiens; identical to SEQ ID NO: 223376
  chr8:53853783-53854083
  hypo

SEQ ID NO: 244121 - DNA, 180 bp, Homo sapiens; identical to SEQ ID NO: 223377
  chr8:54163352-54163532
  hypo

SEQ ID NO: 244122 - DNA, 300 bp, Homo sapiens; identical to SEQ ID NO: 223378
  chr8:54163580-54163880
  hypo

SEQ ID NO: 244123 - DNA, 300 bp, Homo sapiens; identical to SEQ ID NO: 223379
  chr8:54164031-54164331
  hypo

SEQ ID NO: 244124 - DNA, 180 bp, Homo sapiens; identical to SEQ ID NO: 223380
  chr8:54792690-54792870
  hypo

SEQ ID NO: 244125 - DNA, 1200 bp, Homo sapiens; identical to SEQ ID NO: 223381
  chr8:54792943-54794143
  hypo

SEQ ID NO: 244126 - DNA, 600 bp, Homo sapiens; identical to SEQ ID NO: 223382
  chr8:55366393-55366993
  hypo

SEQ ID NO: 244127 - DNA, 180 bp, Homo sapiens; identical to SEQ ID NO: 223383
  chr8:55367083-55367263
  hypo

SEQ ID NO: 244128 - DNA, 1406 bp, Homo sapiens; identical to SEQ ID NO: 223384
  chr8:55371178-55372584
  hypo

SEQ ID NO: 244129 - DNA, 529 bp, Homo sapiens; identical to SEQ ID NO: 223385
  chr8:55382715-55383244
  hypo

SEQ ID NO: 244130 - DNA, 844 bp, Homo sapiens; identical to SEQ ID NO: 223386
  chr8:56013636-56014480
  hypo

SEQ ID NO: 244131 - DNA, 1233 bp, Homo sapiens; identical to SEQ ID NO: 223387
  chr8:56014573-56015806
  hypo

SEQ ID NO: 244132 - DNA, 360 bp, Homo sapiens; identical to SEQ ID NO: 223388
  chr8:56791925-56792285
  hypo

SEQ ID NO: 244133 - DNA, 933 bp, Homo sapiens; identical to SEQ ID NO: 223389
  chr8:56792306-56793239
  hypo

SEQ ID NO: 244134 - DNA, 180 bp, Homo sapiens; identical to SEQ ID NO: 223390
  chr8:57122746-57122926
  hypo

SEQ ID NO: 244135 - DNA, 208 bp, Homo sapiens; identical to SEQ ID NO: 223391
  chr8:57123067-57123275
  hypo

SEQ ID NO: 244136 - DNA, 141 bp, Homo sapiens; identical to SEQ ID NO: 223392
  chr8:57123329-57123470
  hypo

SEQ ID NO: 244137 - DNA, 202 bp, Homo sapiens; identical to SEQ ID NO: 223393
  chr8:57360600-57360802
  hypo

SEQ ID NO: 244138 - DNA, 180 bp, Homo sapiens; identical to SEQ ID NO: 223394
  chr8:60030765-60030945
  hypo

SEQ ID NO: 244139 - DNA, 480 bp, Homo sapiens; identical to SEQ ID NO: 223395
  chr8:60031138-60031618
  hypo

SEQ ID NO: 244140 - DNA, 180 bp, Homo sapiens; identical to SEQ ID NO: 223396
  chr8:60031678-60031858
  hypo

SEQ ID NO: 244141 - DNA, 1003 bp, Homo sapiens; identical to SEQ ID NO: 223397
  chr8:61193254-61194257
  hypo

SEQ ID NO: 244142 - DNA, 321 bp, Homo sapiens; identical to SEQ ID NO: 223398
  chr8:61822706-61823027
  hypo

SEQ ID NO: 244143 - DNA, 1119 bp, Homo sapiens; identical to SEQ ID NO: 223399
  chr8:62626314-62627433
  hypo

SEQ ID NO: 244144 - DNA, 144 bp, Homo sapiens; identical to SEQ ID NO: 223400
  chr8:65281622-65281766
  hypo

SEQ ID NO: 244145 - DNA, 180 bp, Homo sapiens; identical to SEQ ID NO: 223401
  chr8:65281875-65282055
  hypo

SEQ ID NO: 244146 - DNA, 780 bp, Homo sapiens; identical to SEQ ID NO: 223402
  chr8:65492945-65493725
  hypo

SEQ ID NO: 244147 - DNA, 480 bp, Homo sapiens; identical to SEQ ID NO: 223403
  chr8:65493843-65494323
  hypo

SEQ ID NO: 244148 - DNA, 180 bp, Homo sapiens; identical to SEQ ID NO: 223404
  chr8:67025328-67025508
  hypo

SEQ ID NO: 244149 - DNA, 360 bp, Homo sapiens; identical to SEQ ID NO: 223405
  chr8:67417603-67417963
  hypo

SEQ ID NO: 244150 - DNA, 1435 bp, Homo sapiens; identical to SEQ ID NO: 223406
  chr8:67873384-67874819
  hypo

SEQ ID NO: 244151 - DNA, 420 bp, Homo sapiens; identical to SEQ ID NO: 223407
  chr8:67940671-67941091
  hypo

SEQ ID NO: 244152 - DNA, 142 bp, Homo sapiens; identical to SEQ ID NO: 223408
  chr8:68863998-68864140
  hypo

SEQ ID NO: 244153 - DNA, 780 bp, Homo sapiens; identical to SEQ ID NO: 223409
  chr8:68864200-68864980
  hypo

SEQ ID NO: 244154 - DNA, 805 bp, Homo sapiens; identical to SEQ ID NO: 223410
  chr8:69242747-69243552
  hypo

SEQ ID NO: 244155 - DNA, 180 bp, Homo sapiens; identical to SEQ ID NO: 223411
  chr8:69243612-69243792
  hypo

SEQ ID NO: 244156 - DNA, 420 bp, Homo sapiens; identical to SEQ ID NO: 223412
  chr8:70744936-70745356
  hypo

SEQ ID NO: 244157 - DNA, 319 bp, Homo sapiens; identical to SEQ ID NO: 223413
  chr8:71316515-71316834
  hypo

SEQ ID NO: 244158 - DNA, 180 bp, Homo sapiens; identical to SEQ ID NO: 223414
  chr8:72459557-72459737
  hypo

SEQ ID NO: 244159 - DNA, 1020 bp, Homo sapiens; identical to SEQ ID NO: 223415
  chr8:72755722-72756742
  hypo

SEQ ID NO: 244160 - DNA, 180 bp, Homo sapiens; identical to SEQ ID NO: 223416
  chr8:72756811-72756991
  hypo

SEQ ID NO: 244161 - DNA, 1524 bp, Homo sapiens; identical to SEQ ID NO: 223417
  chr8:73448678-73450202
  hypo

SEQ ID NO: 244162 - DNA, 183 bp, Homo sapiens; identical to SEQ ID NO: 223418
  chr8:74208009-74208192
  hypo

SEQ ID NO: 244163 - DNA, 462 bp, Homo sapiens; identical to SEQ ID NO: 223419
  chr8:75896508-75896970
  hypo

SEQ ID NO: 244164 - DNA, 539 bp, Homo sapiens; identical to SEQ ID NO: 223420
  chr8:77590075-77590614
  hypo

SEQ ID NO: 244165 - DNA, 217 bp, Homo sapiens; identical to SEQ ID NO: 223421
  chr8:80523884-80524101
  hypo

SEQ ID NO: 244166 - DNA, 377 bp, Homo sapiens; identical to SEQ ID NO: 223422
  chr8:80524105-80524482
  hypo

SEQ ID NO: 244167 - DNA, 398 bp, Homo sapiens; identical to SEQ ID NO: 223423
  chr8:80525381-80525779
  hypo

SEQ ID NO: 244168 - DNA, 521 bp, Homo sapiens; identical to SEQ ID NO: 223424
  chr8:80803644-80804165
  hypo

SEQ ID NO: 244169 - DNA, 300 bp, Homo sapiens; identical to SEQ ID NO: 223425
  chr8:81398360-81398660
  hypo

SEQ ID NO: 244170 - DNA, 240 bp, Homo sapiens; identical to SEQ ID NO: 223426
  chr8:81490306-81490546
  hypo

SEQ ID NO: 244171 - DNA, 119 bp, Homo sapiens; identical to SEQ ID NO: 223427
  chr8:81599502-81599621
  hypo

SEQ ID NO: 244172 - DNA, 300 bp, Homo sapiens; identical to SEQ ID NO: 201486
  chr8:81785141-81785441
  hypo

SEQ ID NO: 244173 - DNA, 178 bp, Homo sapiens; identical to SEQ ID NO: 223429
  chr8:81785467-81785645
  hypo

SEQ ID NO: 244174 - DNA, 360 bp, Homo sapiens; identical to SEQ ID NO: 223430
  chr8:81786384-81786744
  hypo

SEQ ID NO: 244175 - DNA, 449 bp, Homo sapiens; identical to SEQ ID NO: 223431
  chr8:82192417-82192866
  hypo

SEQ ID NO: 244176 - DNA, 402 bp, Homo sapiens; identical to SEQ ID NO: 223432
  chr8:82193409-82193811
  hypo

SEQ ID NO: 244177 - DNA, 148 bp, Homo sapiens; identical to SEQ ID NO: 223433
  chr8:86132759-86132907
  hypo

SEQ ID NO: 244178 - DNA, 89 bp, Homo sapiens; identical to SEQ ID NO: 201499
  chr8:87527032-87527121
  hypo

SEQ ID NO: 244179 - DNA, 180 bp, Homo sapiens; identical to SEQ ID NO: 223435
  chr8:91657418-91657598
  hypo

SEQ ID NO: 244180 - DNA, 840 bp, Homo sapiens; identical to SEQ ID NO: 223436
  chr8:91997152-91997992
  hypo

SEQ ID NO: 244181 - DNA, 333 bp, Homo sapiens; identical to SEQ ID NO: 223437
  chr8:94713096-94713429
  hypo

SEQ ID NO: 244182 - DNA, 209 bp, Homo sapiens; identical to SEQ ID NO: 201506
  chr8:94929137-94929346
  hypo

SEQ ID NO: 244183 - DNA, 812 bp, Homo sapiens; identical to SEQ ID NO: 223439
  chr8:95653941-95654753
  hypo

SEQ ID NO: 244184 - DNA, 570 bp, Homo sapiens; identical to SEQ ID NO: 223440
  chr8:96145958-96146528
  hypo

SEQ ID NO: 244185 - DNA, 420 bp, Homo sapiens; identical to SEQ ID NO: 223441
  chr8:97172653-97173073
  hypo

SEQ ID NO: 244186 - DNA, 420 bp, Homo sapiens; identical to SEQ ID NO: 223442
  chr8:97173126-97173546
  hypo

SEQ ID NO: 244187 - DNA, 180 bp, Homo sapiens; identical to SEQ ID NO: 223443
  chr8:97657760-97657940
  hypo

SEQ ID NO: 244188 - DNA, 205 bp, Homo sapiens; identical to SEQ ID NO: 223444
  chr8:98880995-98881200
  hypo

SEQ ID NO: 244189 - DNA, 707 bp, Homo sapiens; identical to SEQ ID NO: 223445
  chr8:98881235-98881942
  hypo

SEQ ID NO: 244190 - DNA, 1123 bp, Homo sapiens; identical to SEQ ID NO: 223446
  chr8:99438692-99439815
  hypo

SEQ ID NO: 244191 - DNA, 54 bp, Homo sapiens; identical to SEQ ID NO: 223447
  chr8:99837477-99837531
  hypo

SEQ ID NO: 244192 - DNA, 600 bp, Homo sapiens; identical to SEQ ID NO: 223448
  chr8:99954165-99954765
  hypo

SEQ ID NO: 244193 - DNA, 480 bp, Homo sapiens; identical to SEQ ID NO: 223449
  chr8:99956590-99957070
  hypo

SEQ ID NO: 244194 - DNA, 142 bp, Homo sapiens; identical to SEQ ID NO: 223450
  chr8:102505557-102505699
  hypo

SEQ ID NO: 244195 - DNA, 696 bp, Homo sapiens; identical to SEQ ID NO: 223451
  chr8:102505721-102506417
  hypo

SEQ ID NO: 244196 - DNA, 600 bp, Homo sapiens; identical to SEQ ID NO: 223452
  chr8:104511008-104511608
  hypo

SEQ ID NO: 244197 - DNA, 240 bp, Homo sapiens; identical to SEQ ID NO: 223453
  chr8:104511638-104511878
  hypo

SEQ ID NO: 244198 - DNA, 2007 bp, Homo sapiens; identical to SEQ ID NO: 223454
  chr8:104511926-104513933
  hypo

SEQ ID NO: 244199 - DNA, 452 bp, Homo sapiens; identical to SEQ ID NO: 223455
  chr8:106330393-106330845
  hypo

SEQ ID NO: 244200 - DNA, 360 bp, Homo sapiens; identical to SEQ ID NO: 223456
  chr8:106330910-106331270
  hypo

SEQ ID NO: 244201 - DNA, 180 bp, Homo sapiens; identical to SEQ ID NO: 223457
  chr8:107669643-107669823
  hypo

SEQ ID NO: 244202 - DNA, 719 bp, Homo sapiens; identical to SEQ ID NO: 223458
  chr8:109799247-109799966
  hypo

SEQ ID NO: 244203 - DNA, 324 bp, Homo sapiens; identical to SEQ ID NO: 223459
  chr8:110703974-110704298
  hypo

SEQ ID NO: 244204 - DNA, 1758 bp, Homo sapiens; identical to SEQ ID NO: 201571
  chr8:117858172-117859930
  hypo

SEQ ID NO: 244205 - DNA, 84 bp, Homo sapiens; identical to SEQ ID NO: 201572
  chr8:117861184-117861268
  hypo

SEQ ID NO: 244206 - DNA, 161 bp, Homo sapiens; identical to SEQ ID NO: 201573
  chr8:117862856-117863017
  hypo

SEQ ID NO: 244207 - DNA, 149 bp, Homo sapiens; identical to SEQ ID NO: 201574
  chr8:117864186-117864335
  hypo

SEQ ID NO: 244208 - DNA, 174 bp, Homo sapiens; identical to SEQ ID NO: 201575
  chr8:117864773-117864947
  hypo

SEQ ID NO: 244209 - DNA, 224 bp, Homo sapiens; identical to SEQ ID NO: 201576
  chr8:117866483-117866707
  hypo

SEQ ID NO: 244210 - DNA, 123 bp, Homo sapiens; identical to SEQ ID NO: 201577
  chr8:117868404-117868527
  hypo

SEQ ID NO: 244211 - DNA, 133 bp, Homo sapiens; identical to SEQ ID NO: 201578
  chr8:117868877-117869010
  hypo

SEQ ID NO: 244212 - DNA, 221 bp, Homo sapiens; identical to SEQ ID NO: 201579
  chr8:117869491-117869712
  hypo

SEQ ID NO: 244213 - DNA, 107 bp, Homo sapiens; identical to SEQ ID NO: 201580
  chr8:117870590-117870697
  hypo

SEQ ID NO: 244214 - DNA, 112 bp, Homo sapiens; identical to SEQ ID NO: 201581
  chr8:117874067-117874179
  hypo

SEQ ID NO: 244215 - DNA, 130 bp, Homo sapiens; identical to SEQ ID NO: 201582
  chr8:117875368-117875498
  hypo

SEQ ID NO: 244216 - DNA, 176 bp, Homo sapiens; identical to SEQ ID NO: 201583
  chr8:117878824-117879000
  hypo

SEQ ID NO: 244217 - DNA, 338 bp, Homo sapiens; identical to SEQ ID NO: 223473
  chr8:117886849-117887187
  hypo

SEQ ID NO: 244218 - DNA, 207 bp, Homo sapiens; identical to SEQ ID NO: 201586
  chr8:119123498-119123705
  hypo

SEQ ID NO: 244219 - DNA, 240 bp, Homo sapiens; identical to SEQ ID NO: 223475
  chr8:121823386-121823626
  hypo

SEQ ID NO: 244220 - DNA, 216 bp, Homo sapiens; identical to SEQ ID NO: 223476
  chr8:121823749-121823965
  hypo

SEQ ID NO: 244221 - DNA, 257 bp, Homo sapiens; identical to SEQ ID NO: 223477
  chr8:121824444-121824701
  hypo

SEQ ID NO: 244222 - DNA, 259 bp, Homo sapiens; identical to SEQ ID NO: 223478
  chr8:124552598-124552857
  hypo

SEQ ID NO: 244223 - DNA, 334 bp, Homo sapiens; identical to SEQ ID NO: 223479
  chr8:125985497-125985831
  hypo

SEQ ID NO: 244224 - DNA, 180 bp, Homo sapiens; identical to SEQ ID NO: 223480
  chr8:127569952-127570132
  hypo

SEQ ID NO: 244225 - DNA, 240 bp, Homo sapiens; identical to SEQ ID NO: 223481
  chr8:127570653-127570893
  hypo

SEQ ID NO: 244226 - DNA, 521 bp, Homo sapiens; identical to SEQ ID NO: 223482
  chr8:131455078-131455599
  hypo

SEQ ID NO: 244227 - DNA, 180 bp, Homo sapiens; identical to SEQ ID NO: 223483
  chr8:131455651-131455831
  hypo

SEQ ID NO: 244228 - DNA, 879 bp, Homo sapiens; identical to SEQ ID NO: 223484
  chr8:132051950-132052829
  hypo

SEQ ID NO: 244229 - DNA, 142 bp, Homo sapiens; identical to SEQ ID NO: 223485
  chr8:133492048-133492190
  hypo

SEQ ID NO: 244230 - DNA, 698 bp, Homo sapiens; identical to SEQ ID NO: 223486
  chr8:133492250-133492948
  hypo

SEQ ID NO: 244231 - DNA, 180 bp, Homo sapiens; identical to SEQ ID NO: 223487
  chr8:133493029-133493209
  hypo

SEQ ID NO: 244232 - DNA, 319 bp, Homo sapiens; identical to SEQ ID NO: 223488
  chr8:134232754-134233073
  hypo

SEQ ID NO: 244233 - DNA, 453 bp, Homo sapiens; identical to SEQ ID NO: 223489
  chr8:134308942-134309395
  hypo

SEQ ID NO: 244234 - DNA, 85 bp, Homo sapiens; identical to SEQ ID NO: 223490
  chr8:134581264-134581349
  hypo

SEQ ID NO: 244235 - DNA, 480 bp, Homo sapiens; identical to SEQ ID NO: 223491
  chr8:134583169-134583649
  hypo

SEQ ID NO: 244236 - DNA, 1020 bp, Homo sapiens; identical to SEQ ID NO: 223492
  chr8:136469378-136470398
  hypo

SEQ ID NO: 244237 - DNA, 697 bp, Homo sapiens; identical to SEQ ID NO: 223493
  chr8:139509025-139509722
  hypo

SEQ ID NO: 244238 - DNA, 1771 bp, Homo sapiens; identical to SEQ ID NO: 223494
  chr8:140714565-140716336
  hypo

SEQ ID NO: 244239 - DNA, 268 bp, Homo sapiens; identical to SEQ ID NO: 223495
  chr8:140716396-140716664
  hypo

SEQ ID NO: 244240 - DNA, 300 bp, Homo sapiens; identical to SEQ ID NO: 223496
  chr8:140716780-140717080
  hypo

SEQ ID NO: 244241 - DNA, 188 bp, Homo sapiens; identical to SEQ ID NO: 223497
  chr8:141260487-141260675
  hypo

SEQ ID NO: 244242 - DNA, 81 bp, Homo sapiens; identical to SEQ ID NO: 201611
  chr8:141644414-141644495
  hypo

SEQ ID NO: 244243 - DNA, 561 bp, Homo sapiens; identical to SEQ ID NO: 223499
  chr8:142010302-142010863
  hypo

SEQ ID NO: 244244 - DNA, 1080 bp, Homo sapiens; identical to SEQ ID NO: 223500
  chr8:142010924-142012004
  hypo

SEQ ID NO: 244245 - DNA, 180 bp, Homo sapiens; identical to SEQ ID NO: 223501
  chr8:142012067-142012247
  hypo

SEQ ID NO: 244246 - DNA, 334 bp, Homo sapiens; identical to SEQ ID NO: 223502
  chr8:142138200-142138534
  hypo

SEQ ID NO: 244247 - DNA, 420 bp, Homo sapiens; identical to SEQ ID NO: 223503
  chr8:142138658-142139078
  hypo

SEQ ID NO: 244248 - DNA, 360 bp, Homo sapiens; identical to SEQ ID NO: 223504
  chr8:142139201-142139561
  hypo

SEQ ID NO: 244249 - DNA, 105 bp, Homo sapiens; identical to SEQ ID NO: 223505
  chr8:142297652-142297757
  hypo

SEQ ID NO: 244250 - DNA, 360 bp, Homo sapiens; identical to SEQ ID NO: 223506
  chr8:142317782-142318142
  hypo

SEQ ID NO: 244251 - DNA, 406 bp, Homo sapiens; identical to SEQ ID NO: 223507
  chr8:142318191-142318597
  hypo

SEQ ID NO: 244252 - DNA, 137 bp, Homo sapiens; identical to SEQ ID NO: 223508
  chr8:142425663-142425800
  hypo

SEQ ID NO: 244253 - DNA, 799 bp, Homo sapiens; identical to SEQ ID NO: 223509
  chr8:142427479-142428278
  hypo

SEQ ID NO: 244254 - DNA, 688 bp, Homo sapiens; identical to SEQ ID NO: 223510
  chr8:142528219-142528907
  hypo

SEQ ID NO: 244255 - DNA, 41 bp, Homo sapiens; identical to SEQ ID NO: 201620
  chr8:143429133-143429174
  hypo

SEQ ID NO: 244256 - DNA, 780 bp, Homo sapiens; identical to SEQ ID NO: 223512
  chr8:143531075-143531855
  hypo

SEQ ID NO: 244257 - DNA, 2220 bp, Homo sapiens; identical to SEQ ID NO: 223513
  chr8:143531942-143534162
  hypo

SEQ ID NO: 244258 - DNA, 180 bp, Homo sapiens; identical to SEQ ID NO: 223514
  chr8:143534210-143534390
  hypo

SEQ ID NO: 244259 - DNA, 240 bp, Homo sapiens; identical to SEQ ID NO: 223515
  chr8:143534443-143534683
  hypo

SEQ ID NO: 244260 - DNA, 520 bp, Homo sapiens; identical to SEQ ID NO: 223516
  chr8:143545528-143546048
  hypo

SEQ ID NO: 244261 - DNA, 295 bp, Homo sapiens; identical to SEQ ID NO: 201622
  chr8:143556723-143557018
  hypo

SEQ ID NO: 244262 - DNA, 240 bp, Homo sapiens; identical to SEQ ID NO: 223518
  chr8:144241219-144241459
  hypo

SEQ ID NO: 244263 - DNA, 720 bp, Homo sapiens; identical to SEQ ID NO: 223519
  chr8:144241477-144242197
  hypo

SEQ ID NO: 244264 - DNA, 135 bp, Homo sapiens; identical to SEQ ID NO: 223520
  chr8:144484160-144484295
  hypo

SEQ ID NO: 244265 - DNA, 180 bp, Homo sapiens; identical to SEQ ID NO: 223521
  chr8:144510878-144511058
  hypo

SEQ ID NO: 244266 - DNA, 1727 bp, Homo sapiens; identical to SEQ ID NO: 223522
  chr8:144511086-144512813
  hypo

SEQ ID NO: 244267 - DNA, 324 bp, Homo sapiens; identical to SEQ ID NO: 223523
  chr8:144636562-144636886
  hypo

SEQ ID NO: 244268 - DNA, 137 bp, Homo sapiens; identical to SEQ ID NO: 223524
  chr8:144640633-144640770
  hypo

SEQ ID NO: 244269 - DNA, 85 bp, Homo sapiens; identical to SEQ ID NO: 223525
  chr8:144680874-144680959
  hypo

SEQ ID NO: 244270 - DNA, 53 bp, Homo sapiens; identical to SEQ ID NO: 201633
  chr8:144691796-144691849
  hypo

SEQ ID NO: 244271 - DNA, 237 bp, Homo sapiens; identical to SEQ ID NO: 223527
  chr8:145697349-145697586
  hypo

SEQ ID NO: 244272 - DNA, 280 bp, Homo sapiens; identical to SEQ ID NO: 223528
  chr8:145697859-145698139
  hypo

SEQ ID NO: 244273 - DNA, 477 bp, Homo sapiens; identical to SEQ ID NO: 223529
  chr8:145726121-145726598
  hypo

SEQ ID NO: 244274 - DNA, 321 bp, Homo sapiens; identical to SEQ ID NO: 223530
  chr8:145733644-145733965
  hypo

SEQ ID NO: 244275 - DNA, 104 bp, Homo sapiens; identical to SEQ ID NO: 223531
  chr8:145910677-145910781
  hypo

SEQ ID NO: 244276 - DNA, 542 bp, Homo sapiens; identical to SEQ ID NO: 223532
  chr8:145910994-145911536
  hypo

SEQ ID NO: 244277 - DNA, 105 bp, Homo sapiens; identical to SEQ ID NO: 223533
  chr8:146052101-146052206
  hypo

SEQ ID NO: 244278 - DNA, 36 bp, Homo sapiens; identical to SEQ ID NO: 201641
  chr8:146078071-146078107
  hypo

SEQ ID NO: 244279 - DNA, 786 bp, Homo sapiens; identical to SEQ ID NO: 223535
  chr9:113512-114298
  hypo

SEQ ID NO: 244280 - DNA, 240 bp, Homo sapiens; identical to SEQ ID NO: 223536
  chr9:214546-214786
  hypo

SEQ ID NO: 244281 - DNA, 1320 bp, Homo sapiens; identical to SEQ ID NO: 223537
  chr9:503993-505313
  hypo

SEQ ID NO: 244282 - DNA, 354 bp, Homo sapiens; identical to SEQ ID NO: 223538
  chr9:505388-505742
  hypo

SEQ ID NO: 244283 - DNA, 431 bp, Homo sapiens; identical to SEQ ID NO: 223539
  chr9:706973-707404
  hypo

SEQ ID NO: 244284 - DNA, 637 bp, Homo sapiens; identical to SEQ ID NO: 223540
  chr9:841600-842237
  hypo

SEQ ID NO: 244285 - DNA, 165 bp, Homo sapiens; identical to SEQ ID NO: 223541
  chr9:842552-842717
  hypo

SEQ ID NO: 244286 - DNA, 442 bp, Homo sapiens; identical to SEQ ID NO: 223542
  chr9:1042427-1042869
  hypo

SEQ ID NO: 244287 - DNA, 792 bp, Homo sapiens; identical to SEQ ID NO: 223543
  chr9:4299403-4300195
  hypo

SEQ ID NO: 244288 - DNA, 99 bp, Homo sapiens; identical to SEQ ID NO: 201655
  chr9:5022028-5022127
  hypo

SEQ ID NO: 244289 - DNA, 248 bp, Homo sapiens; identical to SEQ ID NO: 201656
  chr9:5054640-5054888
  hypo

SEQ ID NO: 244290 - DNA, 128 bp, Homo sapiens; identical to SEQ ID NO: 223546
  chr9:5069924-5070052
  hypo

SEQ ID NO: 244291 - DNA, 62 bp, Homo sapiens; identical to SEQ ID NO: 223547
  chr9:5073737-5073799
  hypo

SEQ ID NO: 244292 - DNA, 152 bp, Homo sapiens; identical to SEQ ID NO: 201658
  chr9:5080228-5080380
  hypo

SEQ ID NO: 244293 - DNA, 99 bp, Homo sapiens; identical to SEQ ID NO: 201659
  chr9:5081712-5081811
  hypo

SEQ ID NO: 244294 - DNA, 147 bp, Homo sapiens; identical to SEQ ID NO: 223550
  chr9:6412837-6412984
  hypo

SEQ ID NO: 244295 - DNA, 572 bp, Homo sapiens; identical to SEQ ID NO: 223551
  chr9:12776013-12776585
  hypo

SEQ ID NO: 244296 - DNA, 180 bp, Homo sapiens; identical to SEQ ID NO: 223552
  chr9:13278760-13278940
  hypo

SEQ ID NO: 244297 - DNA, 697 bp, Homo sapiens; identical to SEQ ID NO: 223553
  chr9:13279078-13279775
  hypo

SEQ ID NO: 244298 - DNA, 180 bp, Homo sapiens; identical to SEQ ID NO: 223554
  chr9:14313265-14313445
  hypo

SEQ ID NO: 244299 - DNA, 360 bp, Homo sapiens; identical to SEQ ID NO: 223555
  chr9:14313531-14313891
  hypo

SEQ ID NO: 244300 - DNA, 780 bp, Homo sapiens; identical to SEQ ID NO: 223556
  chr9:14313969-14314749
  hypo

SEQ ID NO: 244301 - DNA, 1007 bp, Homo sapiens; identical to SEQ ID NO: 223557
  chr9:14314803-14315810
  hypo

SEQ ID NO: 244302 - DNA, 795 bp, Homo sapiens; identical to SEQ ID NO: 223558
  chr9:14322343-14323138
  hypo

SEQ ID NO: 244303 - DNA, 1002 bp, Homo sapiens; identical to SEQ ID NO: 223559
  chr9:15306389-15307391
  hypo

SEQ ID NO: 244304 - DNA, 360 bp, Homo sapiens; identical to SEQ ID NO: 223560
  chr9:16870775-16871135
  hypo

SEQ ID NO: 244305 - DNA, 180 bp, Homo sapiens; identical to SEQ ID NO: 223561
  chr9:16871341-16871521
  hypo

SEQ ID NO: 244306 - DNA, 180 bp, Homo sapiens; identical to SEQ ID NO: 223562
  chr9:16871571-16871751
  hypo

SEQ ID NO: 244307 - DNA, 858 bp, Homo sapiens; identical to SEQ ID NO: 223563
  chr9:17134853-17135711
  hypo

SEQ ID NO: 244308 - DNA, 1082 bp, Homo sapiens; identical to SEQ ID NO: 223564
  chr9:17578728-17579810
  hypo

SEQ ID NO: 244309 - DNA, 240 bp, Homo sapiens; identical to SEQ ID NO: 223565
  chr9:20621170-20621410
  hypo

SEQ ID NO: 244310 - DNA, 780 bp, Homo sapiens; identical to SEQ ID NO: 223566
  chr9:20621559-20622339
  hypo

SEQ ID NO: 244311 - DNA, 386 bp, Homo sapiens; identical to SEQ ID NO: 223567
  chr9:21031412-21031798
  hypo

SEQ ID NO: 244312 - DNA, 35 bp, Homo sapiens; identical to SEQ ID NO: 223568
  chr9:21032003-21032038
  hypo

SEQ ID NO: 244313 - DNA, 68 bp, Homo sapiens; identical to SEQ ID NO: 223569
  chr9:21802584-21802652
  hypo

SEQ ID NO: 244314 - DNA, 104 bp, Homo sapiens; identical to SEQ ID NO: 223570
  chr9:21971031-21971135
  hypo

SEQ ID NO: 244315 - DNA, 191 bp, Homo sapiens; identical to SEQ ID NO: 223571
  chr9:21995719-21995910
  hypo

SEQ ID NO: 244316 - DNA, 240 bp, Homo sapiens; identical to SEQ ID NO: 223572
  chr9:22446977-22447217
  hypo

SEQ ID NO: 244317 - DNA, 676 bp, Homo sapiens; identical to SEQ ID NO: 223573
  chr9:23821454-23822130
  hypo

SEQ ID NO: 244318 - DNA, 320 bp, Homo sapiens; identical to SEQ ID NO: 223574
  chr9:25677513-25677833
  hypo

SEQ ID NO: 244319 - DNA, 480 bp, Homo sapiens; identical to SEQ ID NO: 223575
  chr9:25677903-25678383
  hypo

SEQ ID NO: 244320 - DNA, 104 bp, Homo sapiens; identical to SEQ ID NO: 223576
  chr9:25678513-25678617
  hypo

SEQ ID NO: 244321 - DNA, 900 bp, Homo sapiens; identical to SEQ ID NO: 223577
  chr9:27529006-27529906
  hypo

SEQ ID NO: 244322 - DNA, 660 bp, Homo sapiens; identical to SEQ ID NO: 223578
  chr9:29213107-29213767
  hypo

SEQ ID NO: 244323 - DNA, 360 bp, Homo sapiens; identical to SEQ ID NO: 223579
  chr9:29213813-29214173
  hypo

SEQ ID NO: 244324 - DNA, 518 bp, Homo sapiens; identical to SEQ ID NO: 223580
  chr9:34591177-34591695
  hypo

SEQ ID NO: 244325 - DNA, 77 bp, Homo sapiens; identical to SEQ ID NO: 201697
  chr9:34646925-34647002
  hypo

SEQ ID NO: 244326 - DNA, 33 bp, Homo sapiens; identical to SEQ ID NO: 201699
  chr9:35072284-35072317
  hypo

SEQ ID NO: 244327 - DNA, 240 bp, Homo sapiens; identical to SEQ ID NO: 223583
  chr9:35161771-35162011
  hypo

SEQ ID NO: 244328 - DNA, 180 bp, Homo sapiens; identical to SEQ ID NO: 223584
  chr9:35675747-35675927
  hypo

SEQ ID NO: 244329 - DNA, 145 bp, Homo sapiens; identical to SEQ ID NO: 201705
  chr9:35814690-35814835
  hypo

SEQ ID NO: 244330 - DNA, 139 bp, Homo sapiens; identical to SEQ ID NO: 223586
  chr9:36257376-36257515
  hypo

SEQ ID NO: 244331 - DNA, 523 bp, Homo sapiens; identical to SEQ ID NO: 223587
  chr9:36257924-36258447
  hypo

SEQ ID NO: 244332 - DNA, 180 bp, Homo sapiens; identical to SEQ ID NO: 223588
  chr9:37026263-37026443
  hypo

SEQ ID NO: 244333 - DNA, 1500 bp, Homo sapiens; identical to SEQ ID NO: 223589
  chr9:37026514-37028014
  hypo

SEQ ID NO: 244334 - DNA, 180 bp, Homo sapiens; identical to SEQ ID NO: 223590
  chr9:37035720-37035900
  hypo

SEQ ID NO: 244335 - DNA, 480 bp, Homo sapiens; identical to SEQ ID NO: 223591
  chr9:37036366-37036846
  hypo

SEQ ID NO: 244336 - DNA, 153 bp, Homo sapiens; identical to SEQ ID NO: 223592
  chr9:37036984-37037137
  hypo

SEQ ID NO: 244337 - DNA, 40 bp, Homo sapiens; identical to SEQ ID NO: 223593
  chr9:37998725-37998765
  hypo

SEQ ID NO: 244338 - DNA, 1119 bp, Homo sapiens; identical to SEQ ID NO: 223594
  chr9:38067788-38068907
  hypo

SEQ ID NO: 244339 - DNA, 42 bp, Homo sapiens; identical to SEQ ID NO: 223595
  chr9:66494115-66494157
  hypo

SEQ ID NO: 244340 - DNA, 42 bp, Homo sapiens; identical to SEQ ID NO: 223596
  chr9:71736563-71736605
  hypo

SEQ ID NO: 244341 - DNA, 240 bp, Homo sapiens; identical to SEQ ID NO: 223597
  chr9:71788601-71788841
  hypo

SEQ ID NO: 244342 - DNA, 105 bp, Homo sapiens; identical to SEQ ID NO: 223598
  chr9:72874088-72874193
  hypo

SEQ ID NO: 244343 - DNA, 240 bp, Homo sapiens; identical to SEQ ID NO: 223599
  chr9:73027854-73028094
  hypo

SEQ ID NO: 244344 - DNA, 139 bp, Homo sapiens; identical to SEQ ID NO: 223600
  chr9:73028899-73029038
  hypo

SEQ ID NO: 244345 - DNA, 624 bp, Homo sapiens; identical to SEQ ID NO: 223601
  chr9:74061493-74062117
  hypo

SEQ ID NO: 244346 - DNA, 277 bp, Homo sapiens; identical to SEQ ID NO: 223602
  chr9:74639982-74640259
  hypo

SEQ ID NO: 244347 - DNA, 720 bp, Homo sapiens; identical to SEQ ID NO: 223603
  chr9:77112912-77113632
  hypo

SEQ ID NO: 244348 - DNA, 180 bp, Homo sapiens; identical to SEQ ID NO: 223604
  chr9:77113716-77113896
  hypo

SEQ ID NO: 244349 - DNA, 476 bp, Homo sapiens; identical to SEQ ID NO: 223605
  chr9:79521088-79521564
  hypo

SEQ ID NO: 244350 - DNA, 600 bp, Homo sapiens; identical to SEQ ID NO: 223606
  chr9:79630997-79631597
  hypo

SEQ ID NO: 244351 - DNA, 180 bp, Homo sapiens; identical to SEQ ID NO: 223607
  chr9:79631837-79632017
  hypo

SEQ ID NO: 244352 - DNA, 300 bp, Homo sapiens; identical to SEQ ID NO: 223608
  chr9:79633450-79633750
  hypo

SEQ ID NO: 244353 - DNA, 1140 bp, Homo sapiens; identical to SEQ ID NO: 223609
  chr9:80646089-80647229
  hypo

SEQ ID NO: 244354 - DNA, 1059 bp, Homo sapiens; identical to SEQ ID NO: 223610
  chr9:82185618-82186677
  hypo

SEQ ID NO: 244355 - DNA, 105 bp, Homo sapiens; identical to SEQ ID NO: 223611
  chr9:82187755-82187860
  hypo

SEQ ID NO: 244356 - DNA, 323 bp, Homo sapiens; identical to SEQ ID NO: 223612
  chr9:82187924-82188247
  hypo

SEQ ID NO: 244357 - DNA, 89 bp, Homo sapiens; identical to SEQ ID NO: 223613
  chr9:82188485-82188574
  hypo

SEQ ID NO: 244358 - DNA, 240 bp, Homo sapiens; identical to SEQ ID NO: 223614
  chr9:84303026-84303266
  hypo

SEQ ID NO: 244359 - DNA, 240 bp, Homo sapiens; identical to SEQ ID NO: 223615
  chr9:84303313-84303553
  hypo

SEQ ID NO: 244360 - DNA, 327 bp, Homo sapiens; identical to SEQ ID NO: 223616
  chr9:86152304-86152631
  hypo

SEQ ID NO: 244361 - DNA, 180 bp, Homo sapiens; identical to SEQ ID NO: 223617
  chr9:86153080-86153260
  hypo

SEQ ID NO: 244362 - DNA, 176 bp, Homo sapiens; identical to SEQ ID NO: 223618
  chr9:86238306-86238482
  hypo

SEQ ID NO: 244363 - DNA, 264 bp, Homo sapiens; identical to SEQ ID NO: 223619
  chr9:88355780-88356044
  hypo

SEQ ID NO: 244364 - DNA, 2068 bp, Homo sapiens; identical to SEQ ID NO: 223620
  chr9:89560494-89562562
  hypo

SEQ ID NO: 244365 - DNA, 38 bp, Homo sapiens; identical to SEQ ID NO: 201765
  chr9:90112392-90112430
  hypo

SEQ ID NO: 244366 - DNA, 180 bp, Homo sapiens; identical to SEQ ID NO: 223622
  chr9:93955613-93955793
  hypo

SEQ ID NO: 244367 - DNA, 180 bp, Homo sapiens; identical to SEQ ID NO: 223623
  chr9:93955963-93956143
  hypo

SEQ ID NO: 244368 - DNA, 398 bp, Homo sapiens; identical to SEQ ID NO: 223624
  chr9:93956178-93956576
  hypo

SEQ ID NO: 244369 - DNA, 504 bp, Homo sapiens; identical to SEQ ID NO: 223625
  chr9:94183485-94183989
  hypo

SEQ ID NO: 244370 - DNA, 840 bp, Homo sapiens; identical to SEQ ID NO: 223626
  chr9:94711769-94712609
  hypo

SEQ ID NO: 244371 - DNA, 147 bp, Homo sapiens; identical to SEQ ID NO: 223627
  chr9:94712648-94712795
  hypo

SEQ ID NO: 244372 - DNA, 113 bp, Homo sapiens; identical to SEQ ID NO: 223628
  chr9:95570901-95571014
  hypo

SEQ ID NO: 244373 - DNA, 360 bp, Homo sapiens; identical to SEQ ID NO: 223629
  chr9:95571320-95571680
  hypo

SEQ ID NO: 244374 - DNA, 600 bp, Homo sapiens; identical to SEQ ID NO: 223630
  chr9:96717026-96717626
  hypo

SEQ ID NO: 244375 - DNA, 180 bp, Homo sapiens; identical to SEQ ID NO: 223631
  chr9:96717746-96717926
  hypo

SEQ ID NO: 244376 - DNA, 360 bp, Homo sapiens; identical to SEQ ID NO: 223632
  chr9:96722534-96722894
  hypo

SEQ ID NO: 244377 - DNA, 443 bp, Homo sapiens; identical to SEQ ID NO: 201796
  chr9:97767419-97767862
  hypo

SEQ ID NO: 244378 - DNA, 405 bp, Homo sapiens; identical to SEQ ID NO: 223634
  chr9:97810932-97811337
  hypo

SEQ ID NO: 244379 - DNA, 45 bp, Homo sapiens; identical to SEQ ID NO: 223635
  chr9:98079175-98079220
  hypo

SEQ ID NO: 244380 - DNA, 60 bp, Homo sapiens; identical to SEQ ID NO: 223636
  chr9:98189305-98189365
  hypo

SEQ ID NO: 244381 - DNA, 46 bp, Homo sapiens; identical to SEQ ID NO: 201798
  chr9:98268140-98268186
  hypo

SEQ ID NO: 244382 - DNA, 1283 bp, Homo sapiens; identical to SEQ ID NO: 223638
  chr9:98272638-98273921
  hypo

SEQ ID NO: 244383 - DNA, 105 bp, Homo sapiens; identical to SEQ ID NO: 223639
  chr9:98278353-98278458
  hypo

SEQ ID NO: 244384 - DNA, 698 bp, Homo sapiens; identical to SEQ ID NO: 223640
  chr9:98278489-98279187
  hypo

SEQ ID NO: 244385 - DNA, 443 bp, Homo sapiens; identical to SEQ ID NO: 223641
  chr9:99145529-99145972
  hypo

SEQ ID NO: 244386 - DNA, 104 bp, Homo sapiens; identical to SEQ ID NO: 223642
  chr9:99146049-99146153
  hypo

SEQ ID NO: 244387 - DNA, 218 bp, Homo sapiens; identical to SEQ ID NO: 223643
  chr9:99416972-99417190
  hypo

SEQ ID NO: 244388 - DNA, 204 bp, Homo sapiens; identical to SEQ ID NO: 223644
  chr9:99417397-99417601
  hypo

SEQ ID NO: 244389 - DNA, 240 bp, Homo sapiens; identical to SEQ ID NO: 223645
  chr9:99983468-99983708
  hypo

SEQ ID NO: 244390 - DNA, 216 bp, Homo sapiens; identical to SEQ ID NO: 223646
  chr9:99983792-99984008
  hypo

SEQ ID NO: 244391 - DNA, 303 bp, Homo sapiens; identical to SEQ ID NO: 201811
  chr9:100565762-100566065
  hypo

SEQ ID NO: 244392 - DNA, 180 bp, Homo sapiens; identical to SEQ ID NO: 223648
  chr9:100610113-100610293
  hypo

SEQ ID NO: 244393 - DNA, 1140 bp, Homo sapiens; identical to SEQ ID NO: 223649
  chr9:100615184-100616324
  hypo

SEQ ID NO: 244394 - DNA, 780 bp, Homo sapiens; identical to SEQ ID NO: 223650
  chr9:100616344-100617124
  hypo

SEQ ID NO: 244395 - DNA, 900 bp, Homo sapiens; identical to SEQ ID NO: 223651
  chr9:101469436-101470336
  hypo

SEQ ID NO: 244396 - DNA, 420 bp, Homo sapiens; identical to SEQ ID NO: 223652
  chr9:101569893-101570313
  hypo

SEQ ID NO: 244397 - DNA, 770 bp, Homo sapiens; identical to SEQ ID NO: 223653
  chr9:101705947-101706717
  hypo

SEQ ID NO: 244398 - DNA, 74 bp, Homo sapiens; identical to SEQ ID NO: 201819
  chr9:103190036-103190110
  hypo

SEQ ID NO: 244399 - DNA, 282 bp, Homo sapiens; identical to SEQ ID NO: 223655
  chr9:104248323-104248605
  hypo

SEQ ID NO: 244400 - DNA, 360 bp, Homo sapiens; identical to SEQ ID NO: 223656
  chr9:104248619-104248979
  hypo

SEQ ID NO: 244401 - DNA, 749 bp, Homo sapiens; identical to SEQ ID NO: 223657
  chr9:108418383-108419132
  hypo

SEQ ID NO: 244402 - DNA, 300 bp, Homo sapiens; identical to SEQ ID NO: 223658
  chr9:112081590-112081890
  hypo

SEQ ID NO: 244403 - DNA, 180 bp, Homo sapiens; identical to SEQ ID NO: 223659
  chr9:112082103-112082283
  hypo

SEQ ID NO: 244404 - DNA, 1138 bp, Homo sapiens; identical to SEQ ID NO: 223660
  chr9:112082364-112083502
  hypo

SEQ ID NO: 244405 - DNA, 207 bp, Homo sapiens; identical to SEQ ID NO: 223661
  chr9:113017456-113017663
  hypo

SEQ ID NO: 244406 - DNA, 192 bp, Homo sapiens; identical to SEQ ID NO: 223662
  chr9:114937755-114937947
  hypo

SEQ ID NO: 244407 - DNA, 401 bp, Homo sapiens; identical to SEQ ID NO: 223663
  chr9:116111661-116112062
  hypo

SEQ ID NO: 244408 - DNA, 569 bp, Homo sapiens; identical to SEQ ID NO: 223664
  chr9:118916363-118916932
  hypo

SEQ ID NO: 244409 - DNA, 180 bp, Homo sapiens; identical to SEQ ID NO: 223665
  chr9:120177258-120177438
  hypo

SEQ ID NO: 244410 - DNA, 52 bp, Homo sapiens; identical to SEQ ID NO: 223666
  chr9:120177964-120178016
  hypo

SEQ ID NO: 244411 - DNA, 105 bp, Homo sapiens; identical to SEQ ID NO: 223667
  chr9:124131788-124131893
  hypo

SEQ ID NO: 244412 - DNA, 600 bp, Homo sapiens; identical to SEQ ID NO: 223668
  chr9:124131999-124132599
  hypo

SEQ ID NO: 244413 - DNA, 181 bp, Homo sapiens; identical to SEQ ID NO: 223669
  chr9:124622036-124622217
  hypo

SEQ ID NO: 244414 - DNA, 446 bp, Homo sapiens; identical to SEQ ID NO: 223670
  chr9:124981571-124982017
  hypo

SEQ ID NO: 244415 - DNA, 744 bp, Homo sapiens; identical to SEQ ID NO: 223671
  chr9:124990418-124991162
  hypo

SEQ ID NO: 244416 - DNA, 629 bp, Homo sapiens; identical to SEQ ID NO: 223672
  chr9:126762044-126762673
  hypo

SEQ ID NO: 244417 - DNA, 900 bp, Homo sapiens; identical to SEQ ID NO: 223673
  chr9:126770446-126771346
  hypo

SEQ ID NO: 244418 - DNA, 214 bp, Homo sapiens; identical to SEQ ID NO: 223674
  chr9:126780759-126780973
  hypo

SEQ ID NO: 244419 - DNA, 573 bp, Homo sapiens; identical to SEQ ID NO: 223675
  chr9:127215312-127215885
  hypo

SEQ ID NO: 244420 - DNA, 127 bp, Homo sapiens; identical to SEQ ID NO: 201874
  chr9:127534416-127534543
  hypo

SEQ ID NO: 244421 - DNA, 467 bp, Homo sapiens; identical to SEQ ID NO: 223677
  chr9:128651896-128652363
  hypo

SEQ ID NO: 244422 - DNA, 658 bp, Homo sapiens; identical to SEQ ID NO: 223678
  chr9:130158818-130159476
  hypo

SEQ ID NO: 244423 - DNA, 137 bp, Homo sapiens; identical to SEQ ID NO: 223679
  chr9:130331122-130331259
  hypo

SEQ ID NO: 244424 - DNA, 158 bp, Homo sapiens; identical to SEQ ID NO: 223680
  chr9:130374196-130374354
  hypo

SEQ ID NO: 244425 - DNA, 36 bp, Homo sapiens; identical to SEQ ID NO: 223681
  chr9:130374657-130374693
  hypo

SEQ ID NO: 244426 - DNA, 224 bp, Homo sapiens; identical to SEQ ID NO: 223682
  chr9:130616612-130616836
  hypo

SEQ ID NO: 244427 - DNA, 368 bp, Homo sapiens; identical to SEQ ID NO: 223683
  chr9:130639768-130640136
  hypo

SEQ ID NO: 244428 - DNA, 449 bp, Homo sapiens; identical to SEQ ID NO: 223684
  chr9:130674574-130675023
  hypo

SEQ ID NO: 244429 - DNA, 140 bp, Homo sapiens; identical to SEQ ID NO: 223685
  chr9:131183034-131183174
  hypo

SEQ ID NO: 244430 - DNA, 240 bp, Homo sapiens; identical to SEQ ID NO: 223686
  chr9:131709487-131709727
  hypo

SEQ ID NO: 244431 - DNA, 600 bp, Homo sapiens; identical to SEQ ID NO: 223687
  chr9:131842975-131843575
  hypo

SEQ ID NO: 244432 - DNA, 264 bp, Homo sapiens; identical to SEQ ID NO: 223688
  chr9:131940269-131940533
  hypo

SEQ ID NO: 244433 - DNA, 300 bp, Homo sapiens; identical to SEQ ID NO: 223689
  chr9:131940596-131940896
  hypo

SEQ ID NO: 244434 - DNA, 292 bp, Homo sapiens; identical to SEQ ID NO: 223690
  chr9:132145469-132145761
  hypo

SEQ ID NO: 244435 - DNA, 34 bp, Homo sapiens; identical to SEQ ID NO: 223691
  chr9:132222864-132222898
  hypo

SEQ ID NO: 244436 - DNA, 480 bp, Homo sapiens; identical to SEQ ID NO: 223692
  chr9:132245325-132245805
  hypo

SEQ ID NO: 244437 - DNA, 56 bp, Homo sapiens; identical to SEQ ID NO: 223693
  chr9:132250698-132250754
  hypo

SEQ ID NO: 244438 - DNA, 707 bp, Homo sapiens; identical to SEQ ID NO: 201901
  chr9:132258223-132258930
  hypo

SEQ ID NO: 244439 - DNA, 847 bp, Homo sapiens; identical to SEQ ID NO: 223695
  chr9:132330680-132331527
  hypo

SEQ ID NO: 244440 - DNA, 104 bp, Homo sapiens; identical to SEQ ID NO: 223696
  chr9:132331553-132331657
  hypo

SEQ ID NO: 244441 - DNA, 522 bp, Homo sapiens; identical to SEQ ID NO: 223697
  chr9:132382255-132382777
  hypo

SEQ ID NO: 244442 - DNA, 201 bp, Homo sapiens; identical to SEQ ID NO: 223698
  chr9:132804284-132804485
  hypo

SEQ ID NO: 244443 - DNA, 240 bp, Homo sapiens; identical to SEQ ID NO: 223699
  chr9:132805427-132805667
  hypo

SEQ ID NO: 244444 - DNA, 274 bp, Homo sapiens; identical to SEQ ID NO: 223700
  chr9:133308611-133308885
  hypo

SEQ ID NO: 244445 - DNA, 210 bp, Homo sapiens; identical to SEQ ID NO: 223701
  chr9:133534647-133534857
  hypo

SEQ ID NO: 244446 - DNA, 498 bp, Homo sapiens; identical to SEQ ID NO: 223702
  chr9:133535058-133535556
  hypo

SEQ ID NO: 244447 - DNA, 180 bp, Homo sapiens; identical to SEQ ID NO: 223703
  chr9:133538095-133538275
  hypo

SEQ ID NO: 244448 - DNA, 104 bp, Homo sapiens; identical to SEQ ID NO: 223704
  chr9:133538383-133538487
  hypo

SEQ ID NO: 244449 - DNA, 105 bp, Homo sapiens; identical to SEQ ID NO: 223705
  chr9:133538728-133538833
  hypo

SEQ ID NO: 244450 - DNA, 104 bp, Homo sapiens; identical to SEQ ID NO: 223706
  chr9:133538927-133539031
  hypo

SEQ ID NO: 244451 - DNA, 240 bp, Homo sapiens; identical to SEQ ID NO: 223707
  chr9:133710615-133710855
  hypo

SEQ ID NO: 244452 - DNA, 429 bp, Homo sapiens; identical to SEQ ID NO: 223708
  chr9:133814206-133814635
  hypo

SEQ ID NO: 244453 - DNA, 297 bp, Homo sapiens; identical to SEQ ID NO: 223709
  chr9:133814876-133815173
  hypo

SEQ ID NO: 244454 - DNA, 752 bp, Homo sapiens; identical to SEQ ID NO: 223710
  chr9:134151924-134152676
  hypo

SEQ ID NO: 244455 - DNA, 700 bp, Homo sapiens; identical to SEQ ID NO: 223711
  chr9:135036860-135037560
  hypo

SEQ ID NO: 244456 - DNA, 672 bp, Homo sapiens; identical to SEQ ID NO: 223712
  chr9:135285314-135285986
  hypo

SEQ ID NO: 244457 - DNA, 619 bp, Homo sapiens; identical to SEQ ID NO: 223713
  chr9:135286199-135286818
  hypo

SEQ ID NO: 244458 - DNA, 161 bp, Homo sapiens; identical to SEQ ID NO: 223714
  chr9:135395349-135395510
  hypo

SEQ ID NO: 244459 - DNA, 422 bp, Homo sapiens; identical to SEQ ID NO: 223715
  chr9:135462500-135462922
  hypo

SEQ ID NO: 244460 - DNA, 266 bp, Homo sapiens; identical to SEQ ID NO: 223716
  chr9:135464627-135464893
  hypo

SEQ ID NO: 244461 - DNA, 105 bp, Homo sapiens; identical to SEQ ID NO: 223717
  chr9:135906451-135906556
  hypo

SEQ ID NO: 244462 - DNA, 104 bp, Homo sapiens; identical to SEQ ID NO: 223718
  chr9:137273993-137274097
  hypo

SEQ ID NO: 244463 - DNA, 360 bp, Homo sapiens; identical to SEQ ID NO: 223719
  chr9:137967489-137967849
  hypo

SEQ ID NO: 244464 - DNA, 151 bp, Homo sapiens; identical to SEQ ID NO: 223720
  chr9:138372138-138372289
  hypo

SEQ ID NO: 244465 - DNA, 682 bp, Homo sapiens; identical to SEQ ID NO: 223721
  chr9:138606161-138606843
  hypo

SEQ ID NO: 244466 - DNA, 1532 bp, Homo sapiens; identical to SEQ ID NO: 223722
  chr9:138986159-138987691
  hypo

SEQ ID NO: 244467 - DNA, 448 bp, Homo sapiens; identical to SEQ ID NO: 223723
  chr9:139024426-139024874
  hypo

SEQ ID NO: 244468 - DNA, 1079 bp, Homo sapiens; identical to SEQ ID NO: 223724
  chr9:139090400-139091479
  hypo

SEQ ID NO: 244469 - DNA, 360 bp, Homo sapiens; identical to SEQ ID NO: 223725
  chr9:139093542-139093902
  hypo

SEQ ID NO: 244470 - DNA, 311 bp, Homo sapiens; identical to SEQ ID NO: 223726
  chr9:139096714-139097025
  hypo

SEQ ID NO: 244471 - DNA, 56 bp, Homo sapiens; identical to SEQ ID NO: 201930
  chr9:139294771-139294827
  hypo

SEQ ID NO: 244472 - DNA, 149 bp, Homo sapiens; identical to SEQ ID NO: 223728
  chr9:139334259-139334408
  hypo

SEQ ID NO: 244473 - DNA, 279 bp, Homo sapiens; identical to SEQ ID NO: 223729
  chr9:139401222-139401501
  hypo

SEQ ID NO: 244474 - DNA, 145 bp, Homo sapiens; identical to SEQ ID NO: 223730
  chr9:139440760-139440905
  hypo

SEQ ID NO: 244475 - DNA, 105 bp, Homo sapiens; identical to SEQ ID NO: 223731
  chr9:139580674-139580779
  hypo

SEQ ID NO: 244476 - DNA, 277 bp, Homo sapiens; identical to SEQ ID NO: 201936
  chr9:139580993-139581270
  hypo

SEQ ID NO: 244477 - DNA, 144 bp, Homo sapiens; identical to SEQ ID NO: 223733
  chr9:139581731-139581875
  hypo

SEQ ID NO: 244478 - DNA, 457 bp, Homo sapiens; identical to SEQ ID NO: 223734
  chr9:139606529-139606986
  hypo

SEQ ID NO: 244479 - DNA, 480 bp, Homo sapiens; identical to SEQ ID NO: 223735
  chr9:139607054-139607534
  hypo

SEQ ID NO: 244480 - DNA, 502 bp, Homo sapiens; identical to SEQ ID NO: 223736
  chr9:139948402-139948904
  hypo

SEQ ID NO: 244481 - DNA, 780 bp, Homo sapiens; identical to SEQ ID NO: 223737
  chr9:140024264-140025044
  hypo

SEQ ID NO: 244482 - DNA, 794 bp, Homo sapiens; identical to SEQ ID NO: 223738
  chr9:140033285-140034079
  hypo

SEQ ID NO: 244483 - DNA, 600 bp, Homo sapiens; identical to SEQ ID NO: 223739
  chr9:140196228-140196828
  hypo

SEQ ID NO: 244484 - DNA, 480 bp, Homo sapiens; identical to SEQ ID NO: 223740
  chr9:140196914-140197394
  hypo

SEQ ID NO: 244485 - DNA, 387 bp, Homo sapiens; identical to SEQ ID NO: 223741
  chr9:140445746-140446133
  hypo

SEQ ID NO: 244486 - DNA, 122 bp, Homo sapiens; identical to SEQ ID NO: 201948
  chr9:140473437-140473559
  hypo

SEQ ID NO: 244487 - DNA, 128 bp, Homo sapiens; identical to SEQ ID NO: 223743
  chr9:140703838-140703966
  hypo

SEQ ID NO: 244488 - DNA, 240 bp, Homo sapiens; identical to SEQ ID NO: 223744
  chr9:140704205-140704445
  hypo

SEQ ID NO: 244489 - DNA, 824 bp, Homo sapiens; identical to SEQ ID NO: 223745
  chr9:140772631-140773455
  hypo

SEQ ID NO: 244490 - DNA, 1002 bp, Homo sapiens; identical to SEQ ID NO: 223746
  chr10:3109010-3110012
  hypo

SEQ ID NO: 244491 - DNA, 977 bp, Homo sapiens; identical to SEQ ID NO: 223747
  chr10:3110383-3111360
  hypo

SEQ ID NO: 244492 - DNA, 58 bp, Homo sapiens; identical to SEQ ID NO: 201960
  chr10:3862675-3862733
  hypo

SEQ ID NO: 244493 - DNA, 157 bp, Homo sapiens; identical to SEQ ID NO: 223749
  chr10:5488421-5488578
  hypo

SEQ ID NO: 244494 - DNA, 540 bp, Homo sapiens; identical to SEQ ID NO: 223750
  chr10:5708105-5708645
  hypo

SEQ ID NO: 244495 - DNA, 893 bp, Homo sapiens; identical to SEQ ID NO: 223751
  chr10:6621840-6622733
  hypo

SEQ ID NO: 244496 - DNA, 1920 bp, Homo sapiens; identical to SEQ ID NO: 223752
  chr10:7449992-7451912
  hypo

SEQ ID NO: 244497 - DNA, 480 bp, Homo sapiens; identical to SEQ ID NO: 223753
  chr10:7452133-7452613
  hypo

SEQ ID NO: 244498 - DNA, 480 bp, Homo sapiens; identical to SEQ ID NO: 223754
  chr10:7452712-7453192
  hypo

SEQ ID NO: 244499 - DNA, 180 bp, Homo sapiens; identical to SEQ ID NO: 223755
  chr10:7453241-7453421
  hypo

SEQ ID NO: 244500 - DNA, 105 bp, Homo sapiens; identical to SEQ ID NO: 223756
  chr10:8075799-8075904
  hypo

SEQ ID NO: 244501 - DNA, 360 bp, Homo sapiens; identical to SEQ ID NO: 223757
  chr10:8096529-8096889
  hypo

SEQ ID NO: 244502 - DNA, 480 bp, Homo sapiens; identical to SEQ ID NO: 223758
  chr10:8096965-8097445
  hypo

SEQ ID NO: 244503 - DNA, 104 bp, Homo sapiens; identical to SEQ ID NO: 223759
  chr10:8097512-8097616
  hypo

SEQ ID NO: 244504 - DNA, 1387 bp, Homo sapiens; identical to SEQ ID NO: 223760
  chr10:11059422-11060809
  hypo

SEQ ID NO: 244505 - DNA, 572 bp, Homo sapiens; identical to SEQ ID NO: 223761
  chr10:11865425-11865997
  hypo

SEQ ID NO: 244506 - DNA, 579 bp, Homo sapiens; identical to SEQ ID NO: 223762
  chr10:12390698-12391277
  hypo

SEQ ID NO: 244507 - DNA, 360 bp, Homo sapiens; identical to SEQ ID NO: 223763
  chr10:12391495-12391855
  hypo

SEQ ID NO: 244508 - DNA, 180 bp, Homo sapiens; identical to SEQ ID NO: 223764
  chr10:12392222-12392402
  hypo

SEQ ID NO: 244509 - DNA, 241 bp, Homo sapiens; identical to SEQ ID NO: 201985
  chr10:13341387-13341628
  hypo

SEQ ID NO: 244510 - DNA, 900 bp, Homo sapiens; identical to SEQ ID NO: 223766
  chr10:13933369-13934269
  hypo

SEQ ID NO: 244511 - DNA, 71 bp, Homo sapiens; identical to SEQ ID NO: 223767
  chr10:14646262-14646333
  hypo

SEQ ID NO: 244512 - DNA, 100 bp, Homo sapiens; identical to SEQ ID NO: 223768
  chr10:14646654-14646754
  hypo

SEQ ID NO: 244513 - DNA, 960 bp, Homo sapiens; identical to SEQ ID NO: 223769
  chr10:15761221-15762181
  hypo

SEQ ID NO: 244514 - DNA, 1860 bp, Homo sapiens; identical to SEQ ID NO: 223770
  chr10:17270191-17272051
  hypo

SEQ ID NO: 244515 - DNA, 1500 bp, Homo sapiens; identical to SEQ ID NO: 223771
  chr10:17495333-17496833
  hypo

SEQ ID NO: 244516 - DNA, 420 bp, Homo sapiens; identical to SEQ ID NO: 223772
  chr10:18429439-18429859
  hypo

SEQ ID NO: 244517 - DNA, 49 bp, Homo sapiens; identical to SEQ ID NO: 223773
  chr10:21785701-21785750
  hypo

SEQ ID NO: 244518 - DNA, 43 bp, Homo sapiens; identical to SEQ ID NO: 202008
  chr10:21785786-21785829
  hypo

SEQ ID NO: 244519 - DNA, 153 bp, Homo sapiens; identical to SEQ ID NO: 223775
  chr10:21805907-21806060
  hypo

SEQ ID NO: 244520 - DNA, 271 bp, Homo sapiens; identical to SEQ ID NO: 223776
  chr10:21814235-21814506
  hypo

SEQ ID NO: 244521 - DNA, 886 bp, Homo sapiens; identical to SEQ ID NO: 223777
  chr10:21815634-21816520
  hypo

SEQ ID NO: 244522 - DNA, 142 bp, Homo sapiens; identical to SEQ ID NO: 223778
  chr10:21824264-21824406
  hypo

SEQ ID NO: 244523 - DNA, 104 bp, Homo sapiens; identical to SEQ ID NO: 223779
  chr10:22032852-22032956
  hypo

SEQ ID NO: 244524 - DNA, 1488 bp, Homo sapiens; identical to SEQ ID NO: 223780
  chr10:22540630-22542118
  hypo

SEQ ID NO: 244525 - DNA, 325 bp, Homo sapiens; identical to SEQ ID NO: 223781
  chr10:22614720-22615045
  hypo

SEQ ID NO: 244526 - DNA, 537 bp, Homo sapiens; identical to SEQ ID NO: 223782
  chr10:22634092-22634629
  hypo

SEQ ID NO: 244527 - DNA, 300 bp, Homo sapiens; identical to SEQ ID NO: 223783
  chr10:23002025-23002325
  hypo

SEQ ID NO: 244528 - DNA, 128 bp, Homo sapiens; identical to SEQ ID NO: 223784
  chr10:23002401-23002529
  hypo

SEQ ID NO: 244529 - DNA, 153 bp, Homo sapiens; identical to SEQ ID NO: 223785
  chr10:23461904-23462057
  hypo

SEQ ID NO: 244530 - DNA, 480 bp, Homo sapiens; identical to SEQ ID NO: 223786
  chr10:23462116-23462596
  hypo

SEQ ID NO: 244531 - DNA, 840 bp, Homo sapiens; identical to SEQ ID NO: 223787
  chr10:23983442-23984282
  hypo

SEQ ID NO: 244532 - DNA, 456 bp, Homo sapiens; identical to SEQ ID NO: 223788
  chr10:23984536-23984992
  hypo

SEQ ID NO: 244533 - DNA, 180 bp, Homo sapiens; identical to SEQ ID NO: 223789
  chr10:25011198-25011378
  hypo

SEQ ID NO: 244534 - DNA, 164 bp, Homo sapiens; identical to SEQ ID NO: 202016
  chr10:25012546-25012710
  hypo

SEQ ID NO: 244535 - DNA, 895 bp, Homo sapiens; identical to SEQ ID NO: 223791
  chr10:25463329-25464224
  hypo

SEQ ID NO: 244536 - DNA, 360 bp, Homo sapiens; identical to SEQ ID NO: 223792
  chr10:26504940-26505300
  hypo

SEQ ID NO: 244537 - DNA, 540 bp, Homo sapiens; identical to SEQ ID NO: 223793
  chr10:26505410-26505950
  hypo

SEQ ID NO: 244538 - DNA, 300 bp, Homo sapiens; identical to SEQ ID NO: 223794
  chr10:26727531-26727831
  hypo

SEQ ID NO: 244539 - DNA, 180 bp, Homo sapiens; identical to SEQ ID NO: 223795
  chr10:26727894-26728074
  hypo

SEQ ID NO: 244540 - DNA, 163 bp, Homo sapiens; identical to SEQ ID NO: 223796
  chr10:28033466-28033629
  hypo

SEQ ID NO: 244541 - DNA, 180 bp, Homo sapiens; identical to SEQ ID NO: 223797
  chr10:28033750-28033930
  hypo

SEQ ID NO: 244542 - DNA, 1320 bp, Homo sapiens; identical to SEQ ID NO: 223798
  chr10:28033955-28035275
  hypo

SEQ ID NO: 244543 - DNA, 392 bp, Homo sapiens; identical to SEQ ID NO: 223799
  chr10:28035353-28035745
  hypo

SEQ ID NO: 244544 - DNA, 152 bp, Homo sapiens; identical to SEQ ID NO: 223800
  chr10:28966149-28966301
  hypo

SEQ ID NO: 244545 - DNA, 188 bp, Homo sapiens; identical to SEQ ID NO: 223801
  chr10:28966598-28966786
  hypo

SEQ ID NO: 244546 - DNA, 61 bp, Homo sapiens; identical to SEQ ID NO: 223802
  chr10:29738072-29738133
  hypo

SEQ ID NO: 244547 - DNA, 600 bp, Homo sapiens; identical to SEQ ID NO: 223803
  chr10:30024183-30024783
  hypo

SEQ ID NO: 244548 - DNA, 180 bp, Homo sapiens; identical to SEQ ID NO: 223804
  chr10:30024947-30025127
  hypo

SEQ ID NO: 244549 - DNA, 2173 bp, Homo sapiens; identical to SEQ ID NO: 223805
  chr10:31607941-31610114
  hypo

SEQ ID NO: 244550 - DNA, 240 bp, Homo sapiens; identical to SEQ ID NO: 223806
  chr10:35103652-35103892
  hypo

SEQ ID NO: 244551 - DNA, 180 bp, Homo sapiens; identical to SEQ ID NO: 223807
  chr10:35105068-35105248
  hypo

SEQ ID NO: 244552 - DNA, 240 bp, Homo sapiens; identical to SEQ ID NO: 223808
  chr10:35929653-35929893
  hypo

SEQ ID NO: 244553 - DNA, 1140 bp, Homo sapiens; identical to SEQ ID NO: 223809
  chr10:43249718-43250858
  hypo

SEQ ID NO: 244554 - DNA, 496 bp, Homo sapiens; identical to SEQ ID NO: 223810
  chr10:43361590-43362086
  hypo

SEQ ID NO: 244555 - DNA, 180 bp, Homo sapiens; identical to SEQ ID NO: 223811
  chr10:43362112-43362292
  hypo

SEQ ID NO: 244556 - DNA, 377 bp, Homo sapiens; identical to SEQ ID NO: 223812
  chr10:43571919-43572296
  hypo

SEQ ID NO: 244557 - DNA, 342 bp, Homo sapiens; identical to SEQ ID NO: 223813
  chr10:43572559-43572901
  hypo

SEQ ID NO: 244558 - DNA, 439 bp, Homo sapiens; identical to SEQ ID NO: 223814
  chr10:43600282-43600721
  hypo

SEQ ID NO: 244559 - DNA, 50 bp, Homo sapiens; identical to SEQ ID NO: 202066
  chr10:49514479-49514529
  hypo

SEQ ID NO: 244560 - DNA, 780 bp, Homo sapiens; identical to SEQ ID NO: 223816
  chr10:50605992-50606772
  hypo

SEQ ID NO: 244561 - DNA, 420 bp, Homo sapiens; identical to SEQ ID NO: 223817
  chr10:50817578-50817998
  hypo

SEQ ID NO: 244562 - DNA, 960 bp, Homo sapiens; identical to SEQ ID NO: 223818
  chr10:50818162-50819122
  hypo

SEQ ID NO: 244563 - DNA, 420 bp, Homo sapiens; identical to SEQ ID NO: 223819
  chr10:50822247-50822667
  hypo

SEQ ID NO: 244564 - DNA, 300 bp, Homo sapiens; identical to SEQ ID NO: 223820
  chr10:50969834-50970134
  hypo

SEQ ID NO: 244565 - DNA, 276 bp, Homo sapiens; identical to SEQ ID NO: 223821
  chr10:50970330-50970606
  hypo

SEQ ID NO: 244566 - DNA, 114 bp, Homo sapiens; identical to SEQ ID NO: 223822
  chr10:52177704-52177818
  hypo

SEQ ID NO: 244567 - DNA, 300 bp, Homo sapiens; identical to SEQ ID NO: 223823
  chr10:52833454-52833754
  hypo

SEQ ID NO: 244568 - DNA, 105 bp, Homo sapiens; identical to SEQ ID NO: 223824
  chr10:54072982-54073087
  hypo

SEQ ID NO: 244569 - DNA, 180 bp, Homo sapiens; identical to SEQ ID NO: 223825
  chr10:62703336-62703516
  hypo

SEQ ID NO: 244570 - DNA, 180 bp, Homo sapiens; identical to SEQ ID NO: 202090
  chr10:62703652-62703832
  hypo

SEQ ID NO: 244571 - DNA, 222 bp, Homo sapiens; identical to SEQ ID NO: 223827
  chr10:62704082-62704304
  hypo

SEQ ID NO: 244572 - DNA, 206 bp, Homo sapiens; identical to SEQ ID NO: 223828
  chr10:64028003-64028209
  hypo

SEQ ID NO: 244573 - DNA, 1110 bp, Homo sapiens; identical to SEQ ID NO: 223829
  chr10:64574692-64575802
  hypo

SEQ ID NO: 244574 - DNA, 329 bp, Homo sapiens; identical to SEQ ID NO: 223830
  chr10:65225896-65226225
  hypo

SEQ ID NO: 244575 - DNA, 206 bp, Homo sapiens; identical to SEQ ID NO: 223831
  chr10:71078140-71078346
  hypo

SEQ ID NO: 244576 - DNA, 780 bp, Homo sapiens; identical to SEQ ID NO: 223832
  chr10:71078387-71079167
  hypo

SEQ ID NO: 244577 - DNA, 420 bp, Homo sapiens; identical to SEQ ID NO: 223833
  chr10:71331836-71332256
  hypo

SEQ ID NO: 244578 - DNA, 420 bp, Homo sapiens; identical to SEQ ID NO: 223834
  chr10:71332285-71332705
  hypo

SEQ ID NO: 244579 - DNA, 105 bp, Homo sapiens; identical to SEQ ID NO: 223835
  chr10:71892160-71892265
  hypo

SEQ ID NO: 244580 - DNA, 457 bp, Homo sapiens; identical to SEQ ID NO: 223836
  chr10:71892379-71892836
  hypo

SEQ ID NO: 244581 - DNA, 105 bp, Homo sapiens; identical to SEQ ID NO: 223837
  chr10:71892919-71893024
  hypo

SEQ ID NO: 244582 - DNA, 650 bp, Homo sapiens; identical to SEQ ID NO: 223838
  chr10:72238258-72238908
  hypo

SEQ ID NO: 244583 - DNA, 37 bp, Homo sapiens; identical to SEQ ID NO: 202115
  chr10:73113223-73113260
  hypo

SEQ ID NO: 244584 - DNA, 600 bp, Homo sapiens; identical to SEQ ID NO: 223840
  chr10:73847722-73848322
  hypo

SEQ ID NO: 244585 - DNA, 105 bp, Homo sapiens; identical to SEQ ID NO: 223841
  chr10:74032435-74032540
  hypo

SEQ ID NO: 244586 - DNA, 294 bp, Homo sapiens; identical to SEQ ID NO: 223842
  chr10:74032607-74032901
  hypo

SEQ ID NO: 244587 - DNA, 300 bp, Homo sapiens; identical to SEQ ID NO: 223843
  chr10:74079499-74079799
  hypo

SEQ ID NO: 244588 - DNA, 141 bp, Homo sapiens; identical to SEQ ID NO: 223844
  chr10:75408169-75408310
  hypo

SEQ ID NO: 244589 - DNA, 294 bp, Homo sapiens; identical to SEQ ID NO: 223845
  chr10:77054513-77054807
  hypo

SEQ ID NO: 244590 - DNA, 240 bp, Homo sapiens; identical to SEQ ID NO: 223846
  chr10:77160012-77160252
  hypo

SEQ ID NO: 244591 - DNA, 446 bp, Homo sapiens; identical to SEQ ID NO: 223847
  chr10:79396823-79397269
  hypo

SEQ ID NO: 244592 - DNA, 994 bp, Homo sapiens; identical to SEQ ID NO: 223848
  chr10:79397389-79398383
  hypo

SEQ ID NO: 244593 - DNA, 45 bp, Homo sapiens; identical to SEQ ID NO: 223849
  chr10:79686268-79686313
  hypo

SEQ ID NO: 244594 - DNA, 469 bp, Homo sapiens; identical to SEQ ID NO: 223850
  chr10:79686575-79687044
  hypo

SEQ ID NO: 244595 - DNA, 115 bp, Homo sapiens; identical to SEQ ID NO: 202151
  chr10:80733746-80733861
  hypo

SEQ ID NO: 244596 - DNA, 115 bp, Homo sapiens; identical to SEQ ID NO: 202152
  chr10:80827233-80827348
  hypo

SEQ ID NO: 244597 - DNA, 210 bp, Homo sapiens; identical to SEQ ID NO: 223853
  chr10:80828532-80828742
  hypo

SEQ ID NO: 244598 - DNA, 105 bp, Homo sapiens; identical to SEQ ID NO: 223854
  chr10:80830746-80830851
  hypo

SEQ ID NO: 244599 - DNA, 262 bp, Homo sapiens; identical to SEQ ID NO: 223855
  chr10:81002446-81002708
  hypo

SEQ ID NO: 244600 - DNA, 144 bp, Homo sapiens; identical to SEQ ID NO: 223856
  chr10:81002951-81003095
  hypo

SEQ ID NO: 244601 - DNA, 146 bp, Homo sapiens; identical to SEQ ID NO: 202156
  chr10:82213597-82213743
  hypo

SEQ ID NO: 244602 - DNA, 42 bp, Homo sapiens; identical to SEQ ID NO: 202161
  chr10:86088147-86088189
  hypo

SEQ ID NO: 244603 - DNA, 56 bp, Homo sapiens; identical to SEQ ID NO: 223859
  chr10:87493570-87493626
  hypo

SEQ ID NO: 244604 - DNA, 105 bp, Homo sapiens; identical to SEQ ID NO: 223860
  chr10:88125457-88125562
  hypo

SEQ ID NO: 244605 - DNA, 44 bp, Homo sapiens; identical to SEQ ID NO: 223861
  chr10:88224613-88224657
  hypo

SEQ ID NO: 244606 - DNA, 105 bp, Homo sapiens; identical to SEQ ID NO: 223862
  chr10:88294492-88294597
  hypo

SEQ ID NO: 244607 - DNA, 148 bp, Homo sapiens; identical to SEQ ID NO: 223863
  chr10:90750730-90750878
  hypo

SEQ ID NO: 244608 - DNA, 180 bp, Homo sapiens; identical to SEQ ID NO: 223864
  chr10:91295664-91295844
  hypo

SEQ ID NO: 244609 - DNA, 720 bp, Homo sapiens; identical to SEQ ID NO: 223865
  chr10:92617054-92617774
  hypo

SEQ ID NO: 244610 - DNA, 180 bp, Homo sapiens; identical to SEQ ID NO: 223866
  chr10:92617904-92618084
  hypo

SEQ ID NO: 244611 - DNA, 660 bp, Homo sapiens; identical to SEQ ID NO: 223867
  chr10:93647041-93647701
  hypo

SEQ ID NO: 244612 - DNA, 508 bp, Homo sapiens; identical to SEQ ID NO: 223868
  chr10:94448889-94449397
  hypo

SEQ ID NO: 244613 - DNA, 951 bp, Homo sapiens; identical to SEQ ID NO: 223869
  chr10:94449615-94450566
  hypo

SEQ ID NO: 244614 - DNA, 180 bp, Homo sapiens; identical to SEQ ID NO: 223870
  chr10:94833583-94833763
  hypo

SEQ ID NO: 244615 - DNA, 180 bp, Homo sapiens; identical to SEQ ID NO: 223871
  chr10:94833999-94834179
  hypo

SEQ ID NO: 244616 - DNA, 420 bp, Homo sapiens; identical to SEQ ID NO: 223872
  chr10:94834236-94834656
  hypo

SEQ ID NO: 244617 - DNA, 120 bp, Homo sapiens; identical to SEQ ID NO: 223873
  chr10:95753358-95753478
  hypo

SEQ ID NO: 244618 - DNA, 480 bp, Homo sapiens; identical to SEQ ID NO: 223874
  chr10:95753559-95754039
  hypo

SEQ ID NO: 244619 - DNA, 150 bp, Homo sapiens; identical to SEQ ID NO: 223875
  chr10:96122666-96122816
  hypo

SEQ ID NO: 244620 - DNA, 180 bp, Homo sapiens; identical to SEQ ID NO: 223876
  chr10:96162194-96162374
  hypo

SEQ ID NO: 244621 - DNA, 1124 bp, Homo sapiens; identical to SEQ ID NO: 223877
  chr10:96162479-96163603
  hypo

SEQ ID NO: 244622 - DNA, 180 bp, Homo sapiens; identical to SEQ ID NO: 223878
  chr10:97051019-97051199
  hypo

SEQ ID NO: 244623 - DNA, 149 bp, Homo sapiens; identical to SEQ ID NO: 223879
  chr10:97321243-97321392
  hypo

SEQ ID NO: 244624 - DNA, 228 bp, Homo sapiens; identical to SEQ ID NO: 223880
  chr10:98593370-98593598
  hypo

SEQ ID NO: 244625 - DNA, 336 bp, Homo sapiens; identical to SEQ ID NO: 223881
  chr10:99259373-99259709
  hypo

SEQ ID NO: 244626 - DNA, 122 bp, Homo sapiens; identical to SEQ ID NO: 223882
  chr10:99447292-99447414
  hypo

SEQ ID NO: 244627 - DNA, 260 bp, Homo sapiens; identical to SEQ ID NO: 223883
  chr10:99474283-99474543
  hypo

SEQ ID NO: 244628 - DNA, 999 bp, Homo sapiens; identical to SEQ ID NO: 223884
  chr10:99530982-99531981
  hypo

SEQ ID NO: 244629 - DNA, 990 bp, Homo sapiens; identical to SEQ ID NO: 223885
  chr10:99790187-99791177
  hypo

SEQ ID NO: 244630 - DNA, 498 bp, Homo sapiens; identical to SEQ ID NO: 223886
  chr10:101294529-101295027
  hypo

SEQ ID NO: 244631 - DNA, 720 bp, Homo sapiens; identical to SEQ ID NO: 223887
  chr10:101296612-101297332
  hypo

SEQ ID NO: 244632 - DNA, 384 bp, Homo sapiens; identical to SEQ ID NO: 223888
  chr10:102430677-102431061
  hypo

SEQ ID NO: 244633 - DNA, 511 bp, Homo sapiens; identical to SEQ ID NO: 223889
  chr10:102483802-102484313
  hypo

SEQ ID NO: 244634 - DNA, 180 bp, Homo sapiens; identical to SEQ ID NO: 223890
  chr10:102508215-102508395
  hypo

SEQ ID NO: 244635 - DNA, 180 bp, Homo sapiens; identical to SEQ ID NO: 223891
  chr10:102508543-102508723
  hypo

SEQ ID NO: 244636 - DNA, 180 bp, Homo sapiens; identical to SEQ ID NO: 223892
  chr10:102586056-102586236
  hypo

SEQ ID NO: 244637 - DNA, 780 bp, Homo sapiens; identical to SEQ ID NO: 223893
  chr10:102586377-102587157
  hypo

SEQ ID NO: 244638 - DNA, 180 bp, Homo sapiens; identical to SEQ ID NO: 223894
  chr10:102802733-102802913
  hypo

SEQ ID NO: 244639 - DNA, 598 bp, Homo sapiens; identical to SEQ ID NO: 223895
  chr10:102822296-102822894
  hypo

SEQ ID NO: 244640 - DNA, 120 bp, Homo sapiens; identical to SEQ ID NO: 202233
  chr10:102973524-102973644
  hypo

SEQ ID NO: 244641 - DNA, 180 bp, Homo sapiens; identical to SEQ ID NO: 223897
  chr10:102977137-102977317
  hypo

SEQ ID NO: 244642 - DNA, 180 bp, Homo sapiens; identical to SEQ ID NO: 223898
  chr10:102977427-102977607
  hypo

SEQ ID NO: 244643 - DNA, 180 bp, Homo sapiens; identical to SEQ ID NO: 223899
  chr10:102977727-102977907
  hypo

SEQ ID NO: 244644 - DNA, 540 bp, Homo sapiens; identical to SEQ ID NO: 223900
  chr10:102982461-102983001
  hypo

SEQ ID NO: 244645 - DNA, 821 bp, Homo sapiens; identical to SEQ ID NO: 223901
  chr10:102988115-102988936
  hypo

SEQ ID NO: 244646 - DNA, 282 bp, Homo sapiens; identical to SEQ ID NO: 223902
  chr10:102989956-102990238
  hypo

SEQ ID NO: 244647 - DNA, 444 bp, Homo sapiens; identical to SEQ ID NO: 223903
  chr10:103051150-103051594
  hypo

SEQ ID NO: 244648 - DNA, 202 bp, Homo sapiens; identical to SEQ ID NO: 202237
  chr10:103348788-103348990
  hypo

SEQ ID NO: 244649 - DNA, 137 bp, Homo sapiens; identical to SEQ ID NO: 223905
  chr10:103535381-103535518
  hypo

SEQ ID NO: 244650 - DNA, 180 bp, Homo sapiens; identical to SEQ ID NO: 223906
  chr10:103535702-103535882
  hypo

SEQ ID NO: 244651 - DNA, 300 bp, Homo sapiens; identical to SEQ ID NO: 223907
  chr10:103536080-103536380
  hypo

SEQ ID NO: 244652 - DNA, 370 bp, Homo sapiens; identical to SEQ ID NO: 223908
  chr10:103985871-103986241
  hypo

SEQ ID NO: 244653 - DNA, 600 bp, Homo sapiens; identical to SEQ ID NO: 223909
  chr10:104170178-104170778
  hypo

SEQ ID NO: 244654 - DNA, 1365 bp, Homo sapiens; identical to SEQ ID NO: 223910
  chr10:105036451-105037816
  hypo

SEQ ID NO: 244655 - DNA, 817 bp, Homo sapiens; identical to SEQ ID NO: 223911
  chr10:106097223-106098040
  hypo

SEQ ID NO: 244656 - DNA, 180 bp, Homo sapiens; identical to SEQ ID NO: 223912
  chr10:106098388-106098568
  hypo

SEQ ID NO: 244657 - DNA, 102 bp, Homo sapiens; identical to SEQ ID NO: 223913
  chr10:106098946-106099048
  hypo

SEQ ID NO: 244658 - DNA, 180 bp, Homo sapiens; identical to SEQ ID NO: 223914
  chr10:106113454-106113634
  hypo

SEQ ID NO: 244659 - DNA, 104 bp, Homo sapiens; identical to SEQ ID NO: 223915
  chr10:106113712-106113816
  hypo

SEQ ID NO: 244660 - DNA, 180 bp, Homo sapiens; identical to SEQ ID NO: 223916
  chr10:106399509-106399689
  hypo

SEQ ID NO: 244661 - DNA, 900 bp, Homo sapiens; identical to SEQ ID NO: 223917
  chr10:106399800-106400700
  hypo

SEQ ID NO: 244662 - DNA, 720 bp, Homo sapiens; identical to SEQ ID NO: 223918
  chr10:106400796-106401516
  hypo

SEQ ID NO: 244663 - DNA, 710 bp, Homo sapiens; identical to SEQ ID NO: 223919
  chr10:111767172-111767882
  hypo

SEQ ID NO: 244664 - DNA, 272 bp, Homo sapiens; identical to SEQ ID NO: 223920
  chr10:112327397-112327669
  hypo

SEQ ID NO: 244665 - DNA, 76 bp, Homo sapiens; identical to SEQ ID NO: 202262
  chr10:112328695-112328771
  hypo

SEQ ID NO: 244666 - DNA, 39 bp, Homo sapiens; identical to SEQ ID NO: 202263
  chr10:112333464-112333503
  hypo

SEQ ID NO: 244667 - DNA, 68 bp, Homo sapiens; identical to SEQ ID NO: 202264
  chr10:112335093-112335161
  hypo

SEQ ID NO: 244668 - DNA, 72 bp, Homo sapiens; identical to SEQ ID NO: 202265
  chr10:112337178-112337250
  hypo

SEQ ID NO: 244669 - DNA, 80 bp, Homo sapiens; identical to SEQ ID NO: 202266
  chr10:112337592-112337672
  hypo

SEQ ID NO: 244670 - DNA, 79 bp, Homo sapiens; identical to SEQ ID NO: 202267
  chr10:112338385-112338464
  hypo

SEQ ID NO: 244671 - DNA, 118 bp, Homo sapiens; identical to SEQ ID NO: 202268
  chr10:112340661-112340779
  hypo

SEQ ID NO: 244672 - DNA, 176 bp, Homo sapiens; identical to SEQ ID NO: 202269
  chr10:112341680-112341856
  hypo

SEQ ID NO: 244673 - DNA, 81 bp, Homo sapiens; identical to SEQ ID NO: 202270
  chr10:112342319-112342400
  hypo

SEQ ID NO: 244674 - DNA, 165 bp, Homo sapiens; identical to SEQ ID NO: 202271
  chr10:112343141-112343306
  hypo

SEQ ID NO: 244675 - DNA, 122 bp, Homo sapiens; identical to SEQ ID NO: 202272
  chr10:112343598-112343720
  hypo

SEQ ID NO: 244676 - DNA, 214 bp, Homo sapiens; identical to SEQ ID NO: 202273
  chr10:112343940-112344154
  hypo

SEQ ID NO: 244677 - DNA, 387 bp, Homo sapiens; identical to SEQ ID NO: 202274
  chr10:112349362-112349749
  hypo

SEQ ID NO: 244678 - DNA, 161 bp, Homo sapiens; identical to SEQ ID NO: 202275
  chr10:112350169-112350330
  hypo

SEQ ID NO: 244679 - DNA, 142 bp, Homo sapiens; identical to SEQ ID NO: 202276
  chr10:112350748-112350890
  hypo

SEQ ID NO: 244680 - DNA, 151 bp, Homo sapiens; identical to SEQ ID NO: 202277
  chr10:112352830-112352981
  hypo

SEQ ID NO: 244681 - DNA, 153 bp, Homo sapiens; identical to SEQ ID NO: 202278
  chr10:112356155-112356308
  hypo

SEQ ID NO: 244682 - DNA, 152 bp, Homo sapiens; identical to SEQ ID NO: 202279
  chr10:112357896-112358048
  hypo

SEQ ID NO: 244683 - DNA, 159 bp, Homo sapiens; identical to SEQ ID NO: 202280
  chr10:112359411-112359570
  hypo

SEQ ID NO: 244684 - DNA, 108 bp, Homo sapiens; identical to SEQ ID NO: 202281
  chr10:112360196-112360304
  hypo

SEQ ID NO: 244685 - DNA, 109 bp, Homo sapiens; identical to SEQ ID NO: 202282
  chr10:112360779-112360888
  hypo

SEQ ID NO: 244686 - DNA, 542 bp, Homo sapiens; identical to SEQ ID NO: 202283
  chr10:112361394-112361936
  hypo

SEQ ID NO: 244687 - DNA, 817 bp, Homo sapiens; identical to SEQ ID NO: 202284
  chr10:112362231-112363048
  hypo

SEQ ID NO: 244688 - DNA, 404 bp, Homo sapiens; identical to SEQ ID NO: 202285
  chr10:112363988-112364392
  hypo

SEQ ID NO: 244689 - DNA, 862 bp, Homo sapiens; identical to SEQ ID NO: 223945
  chr10:112403651-112404513
  hypo

SEQ ID NO: 244690 - DNA, 631 bp, Homo sapiens; identical to SEQ ID NO: 223946
  chr10:112431815-112432446
  hypo

SEQ ID NO: 244691 - DNA, 39 bp, Homo sapiens; identical to SEQ ID NO: 223947
  chr10:112838326-112838365
  hypo

SEQ ID NO: 244692 - DNA, 33 bp, Homo sapiens; identical to SEQ ID NO: 202295
  chr10:114709864-114709897
  hypo

SEQ ID NO: 244693 - DNA, 56 bp, Homo sapiens; identical to SEQ ID NO: 223949
  chr10:114710115-114710171
  hypo

SEQ ID NO: 244694 - DNA, 105 bp, Homo sapiens; identical to SEQ ID NO: 223950
  chr10:114710845-114710950
  hypo

SEQ ID NO: 244695 - DNA, 46 bp, Homo sapiens; identical to SEQ ID NO: 223951
  chr10:114711334-114711380
  hypo

SEQ ID NO: 244696 - DNA, 822 bp, Homo sapiens; identical to SEQ ID NO: 223952
  chr10:114712054-114712876
  hypo

SEQ ID NO: 244697 - DNA, 900 bp, Homo sapiens; identical to SEQ ID NO: 223953
  chr10:115804427-115805327
  hypo

SEQ ID NO: 244698 - DNA, 505 bp, Homo sapiens; identical to SEQ ID NO: 223954
  chr10:116527400-116527905
  hypo

SEQ ID NO: 244699 - DNA, 576 bp, Homo sapiens; identical to SEQ ID NO: 223955
  chr10:116852172-116852748
  hypo

SEQ ID NO: 244700 - DNA, 180 bp, Homo sapiens; identical to SEQ ID NO: 223956
  chr10:118764302-118764482
  hypo

SEQ ID NO: 244701 - DNA, 141 bp, Homo sapiens; identical to SEQ ID NO: 223957
  chr10:118764980-118765121
  hypo

SEQ ID NO: 244702 - DNA, 798 bp, Homo sapiens; identical to SEQ ID NO: 223958
  chr10:118896284-118897082
  hypo

SEQ ID NO: 244703 - DNA, 480 bp, Homo sapiens; identical to SEQ ID NO: 223959
  chr10:118897582-118898062
  hypo

SEQ ID NO: 244704 - DNA, 1186 bp, Homo sapiens; identical to SEQ ID NO: 223960
  chr10:119000427-119001613
  hypo

SEQ ID NO: 244705 - DNA, 144 bp, Homo sapiens; identical to SEQ ID NO: 223961
  chr10:119256210-119256354
  hypo

SEQ ID NO: 244706 - DNA, 826 bp, Homo sapiens; identical to SEQ ID NO: 223962
  chr10:119302473-119303299
  hypo

SEQ ID NO: 244707 - DNA, 332 bp, Homo sapiens; identical to SEQ ID NO: 223963
  chr10:119312662-119312994
  hypo

SEQ ID NO: 244708 - DNA, 418 bp, Homo sapiens; identical to SEQ ID NO: 223964
  chr10:120514800-120515218
  hypo

SEQ ID NO: 244709 - DNA, 84 bp, Homo sapiens; identical to SEQ ID NO: 223965
  chr10:121271622-121271706
  hypo

SEQ ID NO: 244710 - DNA, 1225 bp, Homo sapiens; identical to SEQ ID NO: 223966
  chr10:121301447-121302672
  hypo

SEQ ID NO: 244711 - DNA, 43 bp, Homo sapiens; identical to SEQ ID NO: 202334
  chr10:121356079-121356122
  hypo

SEQ ID NO: 244712 - DNA, 498 bp, Homo sapiens; identical to SEQ ID NO: 223968
  chr10:122216806-122217304
  hypo

SEQ ID NO: 244713 - DNA, 480 bp, Homo sapiens; identical to SEQ ID NO: 223969
  chr10:124134482-124134962
  hypo

SEQ ID NO: 244714 - DNA, 480 bp, Homo sapiens; identical to SEQ ID NO: 223970
  chr10:124895135-124895615
  hypo

SEQ ID NO: 244715 - DNA, 360 bp, Homo sapiens; identical to SEQ ID NO: 223971
  chr10:124895671-124896031
  hypo

SEQ ID NO: 244716 - DNA, 480 bp, Homo sapiens; identical to SEQ ID NO: 223972
  chr10:124896116-124896596
  hypo

SEQ ID NO: 244717 - DNA, 1217 bp, Homo sapiens; identical to SEQ ID NO: 223973
  chr10:126106654-126107871
  hypo

SEQ ID NO: 244718 - DNA, 439 bp, Homo sapiens; identical to SEQ ID NO: 223974
  chr10:126847584-126848023
  hypo

SEQ ID NO: 244719 - DNA, 240 bp, Homo sapiens; identical to SEQ ID NO: 223975
  chr10:126849895-126850135
  hypo

SEQ ID NO: 244720 - DNA, 180 bp, Homo sapiens; identical to SEQ ID NO: 223976
  chr10:130008992-130009172
  hypo

SEQ ID NO: 244721 - DNA, 245 bp, Homo sapiens; identical to SEQ ID NO: 223977
  chr10:131757092-131757337
  hypo

SEQ ID NO: 244722 - DNA, 286 bp, Homo sapiens; identical to SEQ ID NO: 223978
  chr10:131757612-131757898
  hypo

SEQ ID NO: 244723 - DNA, 180 bp, Homo sapiens; identical to SEQ ID NO: 223979
  chr10:131757952-131758132
  hypo

SEQ ID NO: 244724 - DNA, 660 bp, Homo sapiens; identical to SEQ ID NO: 223980
  chr10:131763069-131763729
  hypo

SEQ ID NO: 244725 - DNA, 123 bp, Homo sapiens; identical to SEQ ID NO: 223981
  chr10:131763778-131763901
  hypo

SEQ ID NO: 244726 - DNA, 831 bp, Homo sapiens; identical to SEQ ID NO: 223982
  chr10:131769491-131770322
  hypo

SEQ ID NO: 244727 - DNA, 660 bp, Homo sapiens; identical to SEQ ID NO: 223983
  chr10:133109408-133110068
  hypo

SEQ ID NO: 244728 - DNA, 300 bp, Homo sapiens; identical to SEQ ID NO: 223984
  chr10:133110290-133110590
  hypo

SEQ ID NO: 244729 - DNA, 180 bp, Homo sapiens; identical to SEQ ID NO: 223985
  chr10:133110795-133110975
  hypo

SEQ ID NO: 244730 - DNA, 180 bp, Homo sapiens; identical to SEQ ID NO: 223986
  chr10:133795409-133795589
  hypo

SEQ ID NO: 244731 - DNA, 681 bp, Homo sapiens; identical to SEQ ID NO: 223987
  chr10:133795621-133796302
  hypo

SEQ ID NO: 244732 - DNA, 180 bp, Homo sapiens; identical to SEQ ID NO: 223988
  chr10:134000143-134000323
  hypo

SEQ ID NO: 244733 - DNA, 938 bp, Homo sapiens; identical to SEQ ID NO: 223989
  chr10:134000385-134001323
  hypo

SEQ ID NO: 244734 - DNA, 748 bp, Homo sapiens; identical to SEQ ID NO: 223990
  chr10:134120689-134121437
  hypo

SEQ ID NO: 244735 - DNA, 309 bp, Homo sapiens; identical to SEQ ID NO: 223991
  chr10:134121688-134121997
  hypo

SEQ ID NO: 244736 - DNA, 269 bp, Homo sapiens; identical to SEQ ID NO: 223992
  chr10:134209484-134209753
  hypo

SEQ ID NO: 244737 - DNA, 588 bp, Homo sapiens; identical to SEQ ID NO: 223993
  chr10:134210377-134210965
  hypo

SEQ ID NO: 244738 - DNA, 380 bp, Homo sapiens; identical to SEQ ID NO: 223994
  chr10:134351009-134351389
  hypo

SEQ ID NO: 244739 - DNA, 215 bp, Homo sapiens; identical to SEQ ID NO: 223995
  chr10:134602330-134602545
  hypo

SEQ ID NO: 244740 - DNA, 300 bp, Homo sapiens; identical to SEQ ID NO: 223996
  chr10:135043985-135044285
  hypo

SEQ ID NO: 244741 - DNA, 180 bp, Homo sapiens; identical to SEQ ID NO: 223997
  chr10:135044372-135044552
  hypo

SEQ ID NO: 244742 - DNA, 113 bp, Homo sapiens; identical to SEQ ID NO: 223998
  chr10:135044627-135044740
  hypo

SEQ ID NO: 244743 - DNA, 180 bp, Homo sapiens; identical to SEQ ID NO: 223999
  chr10:135139016-135139196
  hypo

SEQ ID NO: 244744 - DNA, 377 bp, Homo sapiens; identical to SEQ ID NO: 224000
  chr10:135139247-135139624
  hypo

SEQ ID NO: 244745 - DNA, 418 bp, Homo sapiens; identical to SEQ ID NO: 224001
  chr10:135148819-135149237
  hypo

SEQ ID NO: 244746 - DNA, 624 bp, Homo sapiens; identical to SEQ ID NO: 224002
  chr10:135149869-135150493
  hypo

SEQ ID NO: 244747 - DNA, 180 bp, Homo sapiens; identical to SEQ ID NO: 224003
  chr11:314301-314481
  hypo

SEQ ID NO: 244748 - DNA, 105 bp, Homo sapiens; identical to SEQ ID NO: 224004
  chr11:327113-327218
  hypo

SEQ ID NO: 244749 - DNA, 729 bp, Homo sapiens; identical to SEQ ID NO: 224005
  chr11:369470-370199
  hypo

SEQ ID NO: 244750 - DNA, 307 bp, Homo sapiens; identical to SEQ ID NO: 224006
  chr11:406793-407100
  hypo

SEQ ID NO: 244751 - DNA, 75 bp, Homo sapiens; identical to SEQ ID NO: 224007
  chr11:407428-407503
  hypo

SEQ ID NO: 244752 - DNA, 983 bp, Homo sapiens; identical to SEQ ID NO: 224008
  chr11:416532-417515
  hypo

SEQ ID NO: 244753 - DNA, 138 bp, Homo sapiens; identical to SEQ ID NO: 224009
  chr11:450011-450149
  hypo

SEQ ID NO: 244754 - DNA, 107 bp, Homo sapiens; identical to SEQ ID NO: 224010
  chr11:450172-450279
  hypo

SEQ ID NO: 244755 - DNA, 202 bp, Homo sapiens; identical to SEQ ID NO: 224011
  chr11:485908-486110
  hypo

SEQ ID NO: 244756 - DNA, 297 bp, Homo sapiens; identical to SEQ ID NO: 224012
  chr11:518712-519009
  hypo

SEQ ID NO: 244757 - DNA, 105 bp, Homo sapiens; identical to SEQ ID NO: 224013
  chr11:568294-568399
  hypo

SEQ ID NO: 244758 - DNA, 221 bp, Homo sapiens; identical to SEQ ID NO: 202394
  chr11:575604-575825
  hypo

SEQ ID NO: 244759 - DNA, 138 bp, Homo sapiens; identical to SEQ ID NO: 224015
  chr11:615658-615796
  hypo

SEQ ID NO: 244760 - DNA, 263 bp, Homo sapiens; identical to SEQ ID NO: 224016
  chr11:694728-694991
  hypo

SEQ ID NO: 244761 - DNA, 687 bp, Homo sapiens; identical to SEQ ID NO: 224017
  chr11:705951-706638
  hypo

SEQ ID NO: 244762 - DNA, 207 bp, Homo sapiens; identical to SEQ ID NO: 224018
  chr11:720668-720875
  hypo

SEQ ID NO: 244763 - DNA, 189 bp, Homo sapiens; identical to SEQ ID NO: 224019
  chr11:721128-721317
  hypo

SEQ ID NO: 244764 - DNA, 34 bp, Homo sapiens; identical to SEQ ID NO: 202396
  chr11:832781-832815
  hypo

SEQ ID NO: 244765 - DNA, 1080 bp, Homo sapiens; identical to SEQ ID NO: 224021
  chr11:1411187-1412267
  hypo

SEQ ID NO: 244766 - DNA, 498 bp, Homo sapiens; identical to SEQ ID NO: 224022
  chr11:1592747-1593245
  hypo

SEQ ID NO: 244767 - DNA, 117 bp, Homo sapiens; identical to SEQ ID NO: 202402
  chr11:1594039-1594156
  hypo

SEQ ID NO: 244768 - DNA, 1440 bp, Homo sapiens; identical to SEQ ID NO: 224024
  chr11:2290955-2292395
  hypo

SEQ ID NO: 244769 - DNA, 937 bp, Homo sapiens; identical to SEQ ID NO: 224025
  chr11:2398758-2399695
  hypo

SEQ ID NO: 244770 - DNA, 65 bp, Homo sapiens; identical to SEQ ID NO: 224026
  chr11:2554360-2554425
  hypo

SEQ ID NO: 244771 - DNA, 67 bp, Homo sapiens; identical to SEQ ID NO: 224027
  chr11:2554454-2554521
  hypo

SEQ ID NO: 244772 - DNA, 1260 bp, Homo sapiens; identical to SEQ ID NO: 224028
  chr11:2905857-2907117
  hypo

SEQ ID NO: 244773 - DNA, 433 bp, Homo sapiens; identical to SEQ ID NO: 224029
  chr11:2951691-2952124
  hypo

SEQ ID NO: 244774 - DNA, 180 bp, Homo sapiens; identical to SEQ ID NO: 224030
  chr11:3186329-3186509
  hypo

SEQ ID NO: 244775 - DNA, 242 bp, Homo sapiens; identical to SEQ ID NO: 202418
  chr11:3444553-3444795
  hypo

SEQ ID NO: 244776 - DNA, 105 bp, Homo sapiens; identical to SEQ ID NO: 202421
  chr11:6502787-6502892
  hypo

SEQ ID NO: 244777 - DNA, 420 bp, Homo sapiens; identical to SEQ ID NO: 224033
  chr11:6947648-6948068
  hypo

SEQ ID NO: 244778 - DNA, 127 bp, Homo sapiens; identical to SEQ ID NO: 224034
  chr11:6948121-6948248
  hypo

SEQ ID NO: 244779 - DNA, 438 bp, Homo sapiens; identical to SEQ ID NO: 224035
  chr11:7694834-7695272
  hypo

SEQ ID NO: 244780 - DNA, 564 bp, Homo sapiens; identical to SEQ ID NO: 224036
  chr11:8040395-8040959
  hypo

SEQ ID NO: 244781 - DNA, 180 bp, Homo sapiens; identical to SEQ ID NO: 224037
  chr11:8040996-8041176
  hypo

SEQ ID NO: 244782 - DNA, 630 bp, Homo sapiens; identical to SEQ ID NO: 224038
  chr11:8102565-8103195
  hypo

SEQ ID NO: 244783 - DNA, 180 bp, Homo sapiens; identical to SEQ ID NO: 224039
  chr11:8190284-8190464
  hypo

SEQ ID NO: 244784 - DNA, 242 bp, Homo sapiens; identical to SEQ ID NO: 224040
  chr11:8190524-8190766
  hypo

SEQ ID NO: 244785 - DNA, 720 bp, Homo sapiens; identical to SEQ ID NO: 224041
  chr11:8615283-8616003
  hypo

SEQ ID NO: 244786 - DNA, 621 bp, Homo sapiens; identical to SEQ ID NO: 224042
  chr11:9025075-9025696
  hypo

SEQ ID NO: 244787 - DNA, 180 bp, Homo sapiens; identical to SEQ ID NO: 224043
  chr11:9025870-9026050
  hypo

SEQ ID NO: 244788 - DNA, 407 bp, Homo sapiens; identical to SEQ ID NO: 224044
  chr11:9112724-9113131
  hypo

SEQ ID NO: 244789 - DNA, 411 bp, Homo sapiens; identical to SEQ ID NO: 224045
  chr11:9596436-9596847
  hypo

SEQ ID NO: 244790 - DNA, 577 bp, Homo sapiens; identical to SEQ ID NO: 224046
  chr11:9685464-9686041
  hypo

SEQ ID NO: 244791 - DNA, 742 bp, Homo sapiens; identical to SEQ ID NO: 224047
  chr11:12029918-12030660
  hypo

SEQ ID NO: 244792 - DNA, 383 bp, Homo sapiens; identical to SEQ ID NO: 224048
  chr11:12030677-12031060
  hypo

SEQ ID NO: 244793 - DNA, 300 bp, Homo sapiens; identical to SEQ ID NO: 224049
  chr11:12132104-12132404
  hypo

SEQ ID NO: 244794 - DNA, 1140 bp, Homo sapiens; identical to SEQ ID NO: 224050
  chr11:12695555-12696695
  hypo

SEQ ID NO: 244795 - DNA, 105 bp, Homo sapiens; identical to SEQ ID NO: 224051
  chr11:13298718-13298823
  hypo

SEQ ID NO: 244796 - DNA, 473 bp, Homo sapiens; identical to SEQ ID NO: 224052
  chr11:13300228-13300701
  hypo

SEQ ID NO: 244797 - DNA, 512 bp, Homo sapiens; identical to SEQ ID NO: 224053
  chr11:13689450-13689962
  hypo

SEQ ID NO: 244798 - DNA, 480 bp, Homo sapiens; identical to SEQ ID NO: 224054
  chr11:13690037-13690517
  hypo

SEQ ID NO: 244799 - DNA, 105 bp, Homo sapiens; identical to SEQ ID NO: 224055
  chr11:15671822-15671927
  hypo

SEQ ID NO: 244800 - DNA, 900 bp, Homo sapiens; identical to SEQ ID NO: 224056
  chr11:17035187-17036087
  hypo

SEQ ID NO: 244801 - DNA, 320 bp, Homo sapiens; identical to SEQ ID NO: 224057
  chr11:17036279-17036599
  hypo

SEQ ID NO: 244802 - DNA, 180 bp, Homo sapiens; identical to SEQ ID NO: 224058
  chr11:17498236-17498416
  hypo

SEQ ID NO: 244803 - DNA, 260 bp, Homo sapiens; identical to SEQ ID NO: 224059
  chr11:17498486-17498746
  hypo

SEQ ID NO: 244804 - DNA, 780 bp, Homo sapiens; identical to SEQ ID NO: 224060
  chr11:17741464-17742244
  hypo

SEQ ID NO: 244805 - DNA, 114 bp, Homo sapiens; identical to SEQ ID NO: 224061
  chr11:17742382-17742496
  hypo

SEQ ID NO: 244806 - DNA, 180 bp, Homo sapiens; identical to SEQ ID NO: 224062
  chr11:17742843-17743023
  hypo

SEQ ID NO: 244807 - DNA, 104 bp, Homo sapiens; identical to SEQ ID NO: 224063
  chr11:17743180-17743284
  hypo

SEQ ID NO: 244808 - DNA, 139 bp, Homo sapiens; identical to SEQ ID NO: 224064
  chr11:18610605-18610744
  hypo

SEQ ID NO: 244809 - DNA, 727 bp, Homo sapiens; identical to SEQ ID NO: 224065
  chr11:19366639-19367366
  hypo

SEQ ID NO: 244810 - DNA, 126 bp, Homo sapiens; identical to SEQ ID NO: 224066
  chr11:19367873-19367999
  hypo

SEQ ID NO: 244811 - DNA, 1620 bp, Homo sapiens; identical to SEQ ID NO: 224067
  chr11:19733825-19735445
  hypo

SEQ ID NO: 244812 - DNA, 720 bp, Homo sapiens; identical to SEQ ID NO: 224068
  chr11:20178332-20179052
  hypo

SEQ ID NO: 244813 - DNA, 286 bp, Homo sapiens; identical to SEQ ID NO: 224069
  chr11:20181750-20182036
  hypo

SEQ ID NO: 244814 - DNA, 1200 bp, Homo sapiens; identical to SEQ ID NO: 224070
  chr11:20690526-20691726
  hypo

SEQ ID NO: 244815 - DNA, 360 bp, Homo sapiens; identical to SEQ ID NO: 224071
  chr11:27743975-27744335
  hypo

SEQ ID NO: 244816 - DNA, 600 bp, Homo sapiens; identical to SEQ ID NO: 224072
  chr11:30606995-30607595
  hypo

SEQ ID NO: 244817 - DNA, 540 bp, Homo sapiens; identical to SEQ ID NO: 224073
  chr11:30607612-30608152
  hypo

SEQ ID NO: 244818 - DNA, 360 bp, Homo sapiens; identical to SEQ ID NO: 224074
  chr11:31820609-31820969
  hypo

SEQ ID NO: 244819 - DNA, 420 bp, Homo sapiens; identical to SEQ ID NO: 224075
  chr11:31821107-31821527
  hypo

SEQ ID NO: 244820 - DNA, 280 bp, Homo sapiens; identical to SEQ ID NO: 224076
  chr11:32008880-32009160
  hypo

SEQ ID NO: 244821 - DNA, 180 bp, Homo sapiens; identical to SEQ ID NO: 224077
  chr11:32455912-32456092
  hypo

SEQ ID NO: 244822 - DNA, 720 bp, Homo sapiens; identical to SEQ ID NO: 224078
  chr11:32456250-32456970
  hypo

SEQ ID NO: 244823 - DNA, 412 bp, Homo sapiens; identical to SEQ ID NO: 202504
  chr11:32851553-32851965
  hypo

SEQ ID NO: 244824 - DNA, 300 bp, Homo sapiens; identical to SEQ ID NO: 224080
  chr11:32915258-32915558
  hypo

SEQ ID NO: 244825 - DNA, 1005 bp, Homo sapiens; identical to SEQ ID NO: 224081
  chr11:33397489-33398494
  hypo

SEQ ID NO: 244826 - DNA, 927 bp, Homo sapiens; identical to SEQ ID NO: 224082
  chr11:33890237-33891164
  hypo

SEQ ID NO: 244827 - DNA, 352 bp, Homo sapiens; identical to SEQ ID NO: 224083
  chr11:35439842-35440194
  hypo

SEQ ID NO: 244828 - DNA, 600 bp, Homo sapiens; identical to SEQ ID NO: 224084
  chr11:35440350-35440950
  hypo

SEQ ID NO: 244829 - DNA, 180 bp, Homo sapiens; identical to SEQ ID NO: 224085
  chr11:35440995-35441175
  hypo

SEQ ID NO: 244830 - DNA, 960 bp, Homo sapiens; identical to SEQ ID NO: 224086
  chr11:35640713-35641673
  hypo

SEQ ID NO: 244831 - DNA, 286 bp, Homo sapiens; identical to SEQ ID NO: 224087
  chr11:43569008-43569294
  hypo

SEQ ID NO: 244832 - DNA, 420 bp, Homo sapiens; identical to SEQ ID NO: 224088
  chr11:43600469-43600889
  hypo

SEQ ID NO: 244833 - DNA, 536 bp, Homo sapiens; identical to SEQ ID NO: 224089
  chr11:43600938-43601474
  hypo

SEQ ID NO: 244834 - DNA, 600 bp, Homo sapiens; identical to SEQ ID NO: 224090
  chr11:43602584-43603184
  hypo

SEQ ID NO: 244835 - DNA, 300 bp, Homo sapiens; identical to SEQ ID NO: 224091
  chr11:43965021-43965321
  hypo

SEQ ID NO: 244836 - DNA, 420 bp, Homo sapiens; identical to SEQ ID NO: 224092
  chr11:43965486-43965906
  hypo

SEQ ID NO: 244837 - DNA, 780 bp, Homo sapiens; identical to SEQ ID NO: 224093
  chr11:44330911-44331691
  hypo

SEQ ID NO: 244838 - DNA, 240 bp, Homo sapiens; identical to SEQ ID NO: 224094
  chr11:44748805-44749045
  hypo

SEQ ID NO: 244839 - DNA, 96 bp, Homo sapiens; identical to SEQ ID NO: 202537
  chr11:45684299-45684395
  hypo

SEQ ID NO: 244840 - DNA, 232 bp, Homo sapiens; identical to SEQ ID NO: 224096
  chr11:45825485-45825717
  hypo

SEQ ID NO: 244841 - DNA, 62 bp, Homo sapiens; identical to SEQ ID NO: 202540
  chr11:46264958-46265020
  hypo

SEQ ID NO: 244842 - DNA, 180 bp, Homo sapiens; identical to SEQ ID NO: 224098
  chr11:46299158-46299338
  hypo

SEQ ID NO: 244843 - DNA, 294 bp, Homo sapiens; identical to SEQ ID NO: 224099
  chr11:46299562-46299856
  hypo

SEQ ID NO: 244844 - DNA, 550 bp, Homo sapiens; identical to SEQ ID NO: 224100
  chr11:46412034-46412584
  hypo

SEQ ID NO: 244845 - DNA, 240 bp, Homo sapiens; identical to SEQ ID NO: 202542
  chr11:46413465-46413705
  hypo

SEQ ID NO: 244846 - DNA, 333 bp, Homo sapiens; identical to SEQ ID NO: 224102
  chr11:46564032-46564365
  hypo

SEQ ID NO: 244847 - DNA, 182 bp, Homo sapiens; identical to SEQ ID NO: 224103
  chr11:46848281-46848463
  hypo

SEQ ID NO: 244848 - DNA, 278 bp, Homo sapiens; identical to SEQ ID NO: 224104
  chr11:46938770-46939048
  hypo

SEQ ID NO: 244849 - DNA, 34 bp, Homo sapiens; identical to SEQ ID NO: 224105
  chr11:46939597-46939631
  hypo

SEQ ID NO: 244850 - DNA, 50 bp, Homo sapiens; identical to SEQ ID NO: 224106
  chr11:48002696-48002746
  hypo

SEQ ID NO: 244851 - DNA, 720 bp, Homo sapiens; identical to SEQ ID NO: 224107
  chr11:57243667-57244387
  hypo

SEQ ID NO: 244852 - DNA, 51 bp, Homo sapiens; identical to SEQ ID NO: 202551
  chr11:57434928-57434979
  hypo

SEQ ID NO: 244853 - DNA, 210 bp, Homo sapiens; identical to SEQ ID NO: 202557
  chr11:59523106-59523316
  hypo

SEQ ID NO: 244854 - DNA, 49 bp, Homo sapiens; identical to SEQ ID NO: 202558
  chr11:60692121-60692170
  hypo

SEQ ID NO: 244855 - DNA, 297 bp, Homo sapiens; identical to SEQ ID NO: 224111
  chr11:60775084-60775381
  hypo

SEQ ID NO: 244856 - DNA, 478 bp, Homo sapiens; identical to SEQ ID NO: 224112
  chr11:61062605-61063083
  hypo

SEQ ID NO: 244857 - DNA, 180 bp, Homo sapiens; identical to SEQ ID NO: 224113
  chr11:61276134-61276314
  hypo

SEQ ID NO: 244858 - DNA, 916 bp, Homo sapiens; identical to SEQ ID NO: 224114
  chr11:61276393-61277309
  hypo

SEQ ID NO: 244859 - DNA, 712 bp, Homo sapiens; identical to SEQ ID NO: 224115
  chr11:61347880-61348592
  hypo

SEQ ID NO: 244860 - DNA, 240 bp, Homo sapiens; identical to SEQ ID NO: 224116
  chr11:61520025-61520265
  hypo

SEQ ID NO: 244861 - DNA, 1761 bp, Homo sapiens; identical to SEQ ID NO: 224117
  chr11:61594982-61596743
  hypo

SEQ ID NO: 244862 - DNA, 190 bp, Homo sapiens; identical to SEQ ID NO: 202567
  chr11:61659371-61659561
  hypo

SEQ ID NO: 244863 - DNA, 164 bp, Homo sapiens; identical to SEQ ID NO: 224119
  chr11:62192262-62192426
  hypo

SEQ ID NO: 244864 - DNA, 281 bp, Homo sapiens; identical to SEQ ID NO: 224120
  chr11:62313646-62313927
  hypo

SEQ ID NO: 244865 - DNA, 145 bp, Homo sapiens; identical to SEQ ID NO: 224121
  chr11:62313969-62314114
  hypo

SEQ ID NO: 244866 - DNA, 105 bp, Homo sapiens; identical to SEQ ID NO: 224122
  chr11:62369474-62369579
  hypo

SEQ ID NO: 244867 - DNA, 239 bp, Homo sapiens; identical to SEQ ID NO: 224123
  chr11:62473884-62474123
  hypo

SEQ ID NO: 244868 - DNA, 391 bp, Homo sapiens; identical to SEQ ID NO: 224124
  chr11:63258433-63258824
  hypo

SEQ ID NO: 244869 - DNA, 269 bp, Homo sapiens; identical to SEQ ID NO: 224125
  chr11:63767964-63768233
  hypo

SEQ ID NO: 244870 - DNA, 217 bp, Homo sapiens; identical to SEQ ID NO: 224126
  chr11:64015094-64015311
  hypo

SEQ ID NO: 244871 - DNA, 597 bp, Homo sapiens; identical to SEQ ID NO: 224127
  chr11:64059064-64059661
  hypo

SEQ ID NO: 244872 - DNA, 293 bp, Homo sapiens; identical to SEQ ID NO: 224128
  chr11:64059900-64060193
  hypo

SEQ ID NO: 244873 - DNA, 740 bp, Homo sapiens; identical to SEQ ID NO: 224129
  chr11:64409893-64410633
  hypo

SEQ ID NO: 244874 - DNA, 1198 bp, Homo sapiens; identical to SEQ ID NO: 224130
  chr11:64480266-64481464
  hypo

SEQ ID NO: 244875 - DNA, 1380 bp, Homo sapiens; identical to SEQ ID NO: 224131
  chr11:64512278-64513658
  hypo

SEQ ID NO: 244876 - DNA, 198 bp, Homo sapiens; identical to SEQ ID NO: 224132
  chr11:64698945-64699143
  hypo

SEQ ID NO: 244877 - DNA, 133 bp, Homo sapiens; identical to SEQ ID NO: 224133
  chr11:64739232-64739365
  hypo

SEQ ID NO: 244878 - DNA, 105 bp, Homo sapiens; identical to SEQ ID NO: 224134
  chr11:65082053-65082158
  hypo

SEQ ID NO: 244879 - DNA, 91 bp, Homo sapiens; identical to SEQ ID NO: 224135
  chr11:65147933-65148024
  hypo

SEQ ID NO: 244880 - DNA, 98 bp, Homo sapiens; identical to SEQ ID NO: 202592
  chr11:65189906-65190004
  hypo

SEQ ID NO: 244881 - DNA, 111 bp, Homo sapiens; identical to SEQ ID NO: 224137
  chr11:65307104-65307215
  hypo

SEQ ID NO: 244882 - DNA, 144 bp, Homo sapiens; identical to SEQ ID NO: 202602
  chr11:65419839-65419983
  hypo

SEQ ID NO: 244883 - DNA, 206 bp, Homo sapiens; identical to SEQ ID NO: 224139
  chr11:65548872-65549078
  hypo

SEQ ID NO: 244884 - DNA, 1920 bp, Homo sapiens; identical to SEQ ID NO: 224140
  chr11:65553786-65555706
  hypo

SEQ ID NO: 244885 - DNA, 104 bp, Homo sapiens; identical to SEQ ID NO: 224141
  chr11:65582976-65583080
  hypo

SEQ ID NO: 244886 - DNA, 179 bp, Homo sapiens; identical to SEQ ID NO: 224142
  chr11:65600724-65600903
  hypo

SEQ ID NO: 244887 - DNA, 597 bp, Homo sapiens; identical to SEQ ID NO: 224143
  chr11:65600974-65601571
  hypo

SEQ ID NO: 244888 - DNA, 65 bp, Homo sapiens; identical to SEQ ID NO: 224144
  chr11:65746278-65746343
  hypo

SEQ ID NO: 244889 - DNA, 270 bp, Homo sapiens; identical to SEQ ID NO: 224145
  chr11:66045217-66045487
  hypo

SEQ ID NO: 244890 - DNA, 578 bp, Homo sapiens; identical to SEQ ID NO: 224146
  chr11:66079389-66079967
  hypo

SEQ ID NO: 244891 - DNA, 180 bp, Homo sapiens; identical to SEQ ID NO: 224147
  chr11:66176338-66176518
  hypo

SEQ ID NO: 244892 - DNA, 105 bp, Homo sapiens; identical to SEQ ID NO: 224148
  chr11:66176616-66176721
  hypo

SEQ ID NO: 244893 - DNA, 694 bp, Homo sapiens; identical to SEQ ID NO: 224149
  chr11:66885462-66886156
  hypo

SEQ ID NO: 244894 - DNA, 105 bp, Homo sapiens; identical to SEQ ID NO: 224150
  chr11:67141093-67141198
  hypo

SEQ ID NO: 244895 - DNA, 234 bp, Homo sapiens; identical to SEQ ID NO: 202629
  chr11:67210770-67211004
  hypo

SEQ ID NO: 244896 - DNA, 104 bp, Homo sapiens; identical to SEQ ID NO: 224152
  chr11:67407021-67407125
  hypo

SEQ ID NO: 244897 - DNA, 95 bp, Homo sapiens; identical to SEQ ID NO: 202634
  chr11:67777602-67777697
  hypo

SEQ ID NO: 244898 - DNA, 386 bp, Homo sapiens; identical to SEQ ID NO: 224154
  chr11:67889354-67889740
  hypo

SEQ ID NO: 244899 - DNA, 441 bp, Homo sapiens; identical to SEQ ID NO: 224155
  chr11:67895653-67896094
  hypo

SEQ ID NO: 244900 - DNA, 110 bp, Homo sapiens; identical to SEQ ID NO: 224156
  chr11:68080104-68080214
  hypo

SEQ ID NO: 244901 - DNA, 165 bp, Homo sapiens; identical to SEQ ID NO: 224157
  chr11:68080741-68080906
  hypo

SEQ ID NO: 244902 - DNA, 680 bp, Homo sapiens; identical to SEQ ID NO: 224158
  chr11:68606633-68607313
  hypo

SEQ ID NO: 244903 - DNA, 253 bp, Homo sapiens; identical to SEQ ID NO: 224159
  chr11:69331403-69331656
  hypo

SEQ ID NO: 244904 - DNA, 31 bp, Homo sapiens; identical to SEQ ID NO: 202643
  chr11:69477505-69477536
  hypo

SEQ ID NO: 244905 - DNA, 720 bp, Homo sapiens; identical to SEQ ID NO: 224161
  chr11:71954875-71955595
  hypo

SEQ ID NO: 244906 - DNA, 324 bp, Homo sapiens; identical to SEQ ID NO: 224162
  chr11:72301342-72301666
  hypo

SEQ ID NO: 244907 - DNA, 139 bp, Homo sapiens; identical to SEQ ID NO: 224163
  chr11:73088003-73088142
  hypo

SEQ ID NO: 244908 - DNA, 285 bp, Homo sapiens; identical to SEQ ID NO: 224164
  chr11:74022460-74022745
  hypo

SEQ ID NO: 244909 - DNA, 600 bp, Homo sapiens; identical to SEQ ID NO: 224165
  chr11:74441796-74442396
  hypo

SEQ ID NO: 244910 - DNA, 370 bp, Homo sapiens; identical to SEQ ID NO: 224166
  chr11:74953064-74953434
  hypo

SEQ ID NO: 244911 - DNA, 458 bp, Homo sapiens; identical to SEQ ID NO: 224167
  chr11:75062529-75062987
  hypo

SEQ ID NO: 244912 - DNA, 947 bp, Homo sapiens; identical to SEQ ID NO: 224168
  chr11:75140922-75141869
  hypo

SEQ ID NO: 244913 - DNA, 660 bp, Homo sapiens; identical to SEQ ID NO: 224169
  chr11:75379519-75380179
  hypo

SEQ ID NO: 244914 - DNA, 134 bp, Homo sapiens; identical to SEQ ID NO: 224170
  chr11:75480048-75480182
  hypo

SEQ ID NO: 244915 - DNA, 253 bp, Homo sapiens; identical to SEQ ID NO: 224171
  chr11:75921931-75922184
  hypo

SEQ ID NO: 244916 - DNA, 180 bp, Homo sapiens; identical to SEQ ID NO: 224172
  chr11:76381523-76381703
  hypo

SEQ ID NO: 244917 - DNA, 539 bp, Homo sapiens; identical to SEQ ID NO: 224173
  chr11:76381776-76382315
  hypo

SEQ ID NO: 244918 - DNA, 300 bp, Homo sapiens; identical to SEQ ID NO: 224174
  chr11:77184465-77184765
  hypo

SEQ ID NO: 244919 - DNA, 300 bp, Homo sapiens; identical to SEQ ID NO: 224175
  chr11:77184969-77185269
  hypo

SEQ ID NO: 244920 - DNA, 180 bp, Homo sapiens; identical to SEQ ID NO: 224176
  chr11:79150873-79151053
  hypo

SEQ ID NO: 244921 - DNA, 480 bp, Homo sapiens; identical to SEQ ID NO: 224177
  chr11:79151385-79151865
  hypo

SEQ ID NO: 244922 - DNA, 1560 bp, Homo sapiens; identical to SEQ ID NO: 224178
  chr11:82443402-82444962
  hypo

SEQ ID NO: 244923 - DNA, 215 bp, Homo sapiens; identical to SEQ ID NO: 224179
  chr11:86510900-86511115
  hypo

SEQ ID NO: 244924 - DNA, 662 bp, Homo sapiens; identical to SEQ ID NO: 224180
  chr11:86511379-86512041
  hypo

SEQ ID NO: 244925 - DNA, 283 bp, Homo sapiens; identical to SEQ ID NO: 224181
  chr11:86513414-86513697
  hypo

SEQ ID NO: 244926 - DNA, 240 bp, Homo sapiens; identical to SEQ ID NO: 224182
  chr11:86666276-86666516
  hypo

SEQ ID NO: 244927 - DNA, 180 bp, Homo sapiens; identical to SEQ ID NO: 224183
  chr11:92931081-92931261
  hypo

SEQ ID NO: 244928 - DNA, 445 bp, Homo sapiens; identical to SEQ ID NO: 224184
  chr11:93063608-93064053
  hypo

SEQ ID NO: 244929 - DNA, 1167 bp, Homo sapiens; identical to SEQ ID NO: 224185
  chr11:96122355-96123522
  hypo

SEQ ID NO: 244930 - DNA, 840 bp, Homo sapiens; identical to SEQ ID NO: 224186
  chr11:100998017-100998857
  hypo

SEQ ID NO: 244931 - DNA, 711 bp, Homo sapiens; identical to SEQ ID NO: 224187
  chr11:104034455-104035166
  hypo

SEQ ID NO: 244932 - DNA, 660 bp, Homo sapiens; identical to SEQ ID NO: 224188
  chr11:106888278-106888938
  hypo

SEQ ID NO: 244933 - DNA, 180 bp, Homo sapiens; identical to SEQ ID NO: 224189
  chr11:106888995-106889175
  hypo

SEQ ID NO: 244934 - DNA, 829 bp, Homo sapiens; identical to SEQ ID NO: 224190
  chr11:107799223-107800052
  hypo

SEQ ID NO: 244935 - DNA, 420 bp, Homo sapiens; identical to SEQ ID NO: 224191
  chr11:108368803-108369223
  hypo

SEQ ID NO: 244936 - DNA, 180 bp, Homo sapiens; identical to SEQ ID NO: 224192
  chr11:110582950-110583130
  hypo

SEQ ID NO: 244937 - DNA, 720 bp, Homo sapiens; identical to SEQ ID NO: 224193
  chr11:110583213-110583933
  hypo

SEQ ID NO: 244938 - DNA, 840 bp, Homo sapiens; identical to SEQ ID NO: 224194
  chr11:111411125-111411965
  hypo

SEQ ID NO: 244939 - DNA, 180 bp, Homo sapiens; identical to SEQ ID NO: 224195
  chr11:115373171-115373351
  hypo

SEQ ID NO: 244940 - DNA, 1260 bp, Homo sapiens; identical to SEQ ID NO: 224196
  chr11:115373483-115374743
  hypo

SEQ ID NO: 244941 - DNA, 1080 bp, Homo sapiens; identical to SEQ ID NO: 224197
  chr11:115374771-115375851
  hypo

SEQ ID NO: 244942 - DNA, 876 bp, Homo sapiens; identical to SEQ ID NO: 224198
  chr11:115630443-115631319
  hypo

SEQ ID NO: 244943 - DNA, 615 bp, Homo sapiens; identical to SEQ ID NO: 224199
  chr11:116450735-116451350
  hypo

SEQ ID NO: 244944 - DNA, 54 bp, Homo sapiens; identical to SEQ ID NO: 224200
  chr11:116706357-116706411
  hypo

SEQ ID NO: 244945 - DNA, 300 bp, Homo sapiens; identical to SEQ ID NO: 224201
  chr11:116706460-116706760
  hypo

SEQ ID NO: 244946 - DNA, 300 bp, Homo sapiens; identical to SEQ ID NO: 224202
  chr11:117186684-117186984
  hypo

SEQ ID NO: 244947 - DNA, 250 bp, Homo sapiens; identical to SEQ ID NO: 224203
  chr11:117352704-117352954
  hypo

SEQ ID NO: 244948 - DNA, 480 bp, Homo sapiens; identical to SEQ ID NO: 224204
  chr11:117666997-117667477
  hypo

SEQ ID NO: 244949 - DNA, 559 bp, Homo sapiens; identical to SEQ ID NO: 224205
  chr11:117667570-117668129
  hypo

SEQ ID NO: 244950 - DNA, 276 bp, Homo sapiens; identical to SEQ ID NO: 224206
  chr11:117856650-117856926
  hypo

SEQ ID NO: 244951 - DNA, 137 bp, Homo sapiens; identical to SEQ ID NO: 224207
  chr11:118662851-118662988
  hypo

SEQ ID NO: 244952 - DNA, 145 bp, Homo sapiens; identical to SEQ ID NO: 224208
  chr11:119039968-119040113
  hypo

SEQ ID NO: 244953 - DNA, 236 bp, Homo sapiens; identical to SEQ ID NO: 202736
  chr11:119103176-119103412
  hypo

SEQ ID NO: 244954 - DNA, 83 bp, Homo sapiens; identical to SEQ ID NO: 202737
  chr11:119142431-119142514
  hypo

SEQ ID NO: 244955 - DNA, 106 bp, Homo sapiens; identical to SEQ ID NO: 202738
  chr11:119144575-119144681
  hypo

SEQ ID NO: 244956 - DNA, 130 bp, Homo sapiens; identical to SEQ ID NO: 202739
  chr11:119145547-119145677
  hypo

SEQ ID NO: 244957 - DNA, 142 bp, Homo sapiens; identical to SEQ ID NO: 202740
  chr11:119146702-119146844
  hypo

SEQ ID NO: 244958 - DNA, 102 bp, Homo sapiens; identical to SEQ ID NO: 202741
  chr11:119148462-119148564
  hypo

SEQ ID NO: 244959 - DNA, 562 bp, Homo sapiens; identical to SEQ ID NO: 224215
  chr11:119148861-119149423
  hypo

SEQ ID NO: 244960 - DNA, 492 bp, Homo sapiens; identical to SEQ ID NO: 202744
  chr11:119155748-119156240
  hypo

SEQ ID NO: 244961 - DNA, 126 bp, Homo sapiens; identical to SEQ ID NO: 202745
  chr11:119167631-119167757
  hypo

SEQ ID NO: 244962 - DNA, 86 bp, Homo sapiens; identical to SEQ ID NO: 202746
  chr11:119168098-119168184
  hypo

SEQ ID NO: 244963 - DNA, 175 bp, Homo sapiens; identical to SEQ ID NO: 202747
  chr11:119169061-119169236
  hypo

SEQ ID NO: 244964 - DNA, 100 bp, Homo sapiens; identical to SEQ ID NO: 202748
  chr11:119170361-119170461
  hypo

SEQ ID NO: 244965 - DNA, 130 bp, Homo sapiens; identical to SEQ ID NO: 224221
  chr11:119227108-119227238
  hypo

SEQ ID NO: 244966 - DNA, 254 bp, Homo sapiens; identical to SEQ ID NO: 224222
  chr11:119587838-119588092
  hypo

SEQ ID NO: 244967 - DNA, 269 bp, Homo sapiens; identical to SEQ ID NO: 202753
  chr11:119598243-119598512
  hypo

SEQ ID NO: 244968 - DNA, 236 bp, Homo sapiens; identical to SEQ ID NO: 224224
  chr11:119599089-119599325
  hypo

SEQ ID NO: 244969 - DNA, 57 bp, Homo sapiens; identical to SEQ ID NO: 202755
  chr11:119600032-119600089
  hypo

SEQ ID NO: 244970 - DNA, 105 bp, Homo sapiens; identical to SEQ ID NO: 224226
  chr11:120110624-120110729
  hypo

SEQ ID NO: 244971 - DNA, 333 bp, Homo sapiens; identical to SEQ ID NO: 224227
  chr11:120110803-120111136
  hypo

SEQ ID NO: 244972 - DNA, 562 bp, Homo sapiens; identical to SEQ ID NO: 224228
  chr11:120195958-120196520
  hypo

SEQ ID NO: 244973 - DNA, 142 bp, Homo sapiens; identical to SEQ ID NO: 202758
  chr11:120206447-120206589
  hypo

SEQ ID NO: 244974 - DNA, 274 bp, Homo sapiens; identical to SEQ ID NO: 202759
  chr11:120207766-120208040
  hypo

SEQ ID NO: 244975 - DNA, 557 bp, Homo sapiens; identical to SEQ ID NO: 224231
  chr11:120382097-120382654
  hypo

SEQ ID NO: 244976 - DNA, 105 bp, Homo sapiens; identical to SEQ ID NO: 224232
  chr11:121323530-121323635
  hypo

SEQ ID NO: 244977 - DNA, 105 bp, Homo sapiens; identical to SEQ ID NO: 224233
  chr11:123228762-123228867
  hypo

SEQ ID NO: 244978 - DNA, 586 bp, Homo sapiens; identical to SEQ ID NO: 224234
  chr11:123228906-123229492
  hypo

SEQ ID NO: 244979 - DNA, 1296 bp, Homo sapiens; identical to SEQ ID NO: 224235
  chr11:123300824-123302120
  hypo

SEQ ID NO: 244980 - DNA, 991 bp, Homo sapiens; identical to SEQ ID NO: 224236
  chr11:124709075-124710066
  hypo

SEQ ID NO: 244981 - DNA, 180 bp, Homo sapiens; identical to SEQ ID NO: 224237
  chr11:124735663-124735843
  hypo

SEQ ID NO: 244982 - DNA, 551 bp, Homo sapiens; identical to SEQ ID NO: 224238
  chr11:124735954-124736505
  hypo

SEQ ID NO: 244983 - DNA, 556 bp, Homo sapiens; identical to SEQ ID NO: 224239
  chr11:125773966-125774522
  hypo

SEQ ID NO: 244984 - DNA, 498 bp, Homo sapiens; identical to SEQ ID NO: 224240
  chr11:125932494-125932992
  hypo

SEQ ID NO: 244985 - DNA, 105 bp, Homo sapiens; identical to SEQ ID NO: 224241
  chr11:125933223-125933328
  hypo

SEQ ID NO: 244986 - DNA, 318 bp, Homo sapiens; identical to SEQ ID NO: 224242
  chr11:126225867-126226185
  hypo

SEQ ID NO: 244987 - DNA, 998 bp, Homo sapiens; identical to SEQ ID NO: 224243
  chr11:128391755-128392753
  hypo

SEQ ID NO: 244988 - DNA, 720 bp, Homo sapiens; identical to SEQ ID NO: 224244
  chr11:128562993-128563713
  hypo

SEQ ID NO: 244989 - DNA, 1282 bp, Homo sapiens; identical to SEQ ID NO: 224245
  chr11:128563895-128565177
  hypo

SEQ ID NO: 244990 - DNA, 1140 bp, Homo sapiens; identical to SEQ ID NO: 224246
  chr11:129148675-129149815
  hypo

SEQ ID NO: 244991 - DNA, 147 bp, Homo sapiens; identical to SEQ ID NO: 224247
  chr11:129765560-129765707
  hypo

SEQ ID NO: 244992 - DNA, 238 bp, Homo sapiens; identical to SEQ ID NO: 224248
  chr11:129939594-129939832
  hypo

SEQ ID NO: 244993 - DNA, 53 bp, Homo sapiens; identical to SEQ ID NO: 224249
  chr11:130083121-130083174
  hypo

SEQ ID NO: 244994 - DNA, 180 bp, Homo sapiens; identical to SEQ ID NO: 224250
  chr11:130319509-130319689
  hypo

SEQ ID NO: 244995 - DNA, 285 bp, Homo sapiens; identical to SEQ ID NO: 224251
  chr11:132864081-132864366
  hypo

SEQ ID NO: 244996 - DNA, 440 bp, Homo sapiens; identical to SEQ ID NO: 224252
  chr11:132952553-132952993
  hypo

SEQ ID NO: 244997 - DNA, 267 bp, Homo sapiens; identical to SEQ ID NO: 224253
  chr11:132953060-132953327
  hypo

SEQ ID NO: 244998 - DNA, 1860 bp, Homo sapiens; identical to SEQ ID NO: 224254
  chr11:133825558-133827418
  hypo

SEQ ID NO: 244999 - DNA, 726 bp, Homo sapiens; identical to SEQ ID NO: 224255
  chr11:133938736-133939462
  hypo

SEQ ID NO: 245000 - DNA, 104 bp, Homo sapiens; identical to SEQ ID NO: 224256
  chr11:133939508-133939612
  hypo

SEQ ID NO: 245001 - DNA, 1200 bp, Homo sapiens; identical to SEQ ID NO: 224257
  chr11:134145568-134146768
  hypo

SEQ ID NO: 245002 - DNA, 159 bp, Homo sapiens; identical to SEQ ID NO: 224258
  chr11:134281377-134281536
  hypo

SEQ ID NO: 245003 - DNA, 281 bp, Homo sapiens; identical to SEQ ID NO: 224259
  chr11:134281599-134281880
  hypo

SEQ ID NO: 245004 - DNA, 180 bp, Homo sapiens; identical to SEQ ID NO: 224260
  chr11:134282478-134282658
  hypo

SEQ ID NO: 245005 - DNA, 180 bp, Homo sapiens; identical to SEQ ID NO: 224261
  chr11:134282734-134282914
  hypo

SEQ ID NO: 245006 - DNA, 391 bp, Homo sapiens; identical to SEQ ID NO: 224262
  chr12:569750-570141
  hypo

SEQ ID NO: 245007 - DNA, 209 bp, Homo sapiens; identical to SEQ ID NO: 202807
  chr12:694940-695149
  hypo

SEQ ID NO: 245008 - DNA, 322 bp, Homo sapiens; identical to SEQ ID NO: 224264
  chr12:708936-709258
  hypo

SEQ ID NO: 245009 - DNA, 347 bp, Homo sapiens; identical to SEQ ID NO: 224265
  chr12:1639108-1639455
  hypo

SEQ ID NO: 245010 - DNA, 180 bp, Homo sapiens; identical to SEQ ID NO: 224266
  chr12:1639529-1639709
  hypo

SEQ ID NO: 245011 - DNA, 300 bp, Homo sapiens; identical to SEQ ID NO: 224267
  chr12:1640254-1640554
  hypo

SEQ ID NO: 245012 - DNA, 426 bp, Homo sapiens; identical to SEQ ID NO: 224268
  chr12:2144046-2144472
  hypo

SEQ ID NO: 245013 - DNA, 2213 bp, Homo sapiens; identical to SEQ ID NO: 224269
  chr12:2161370-2163583
  hypo

SEQ ID NO: 245014 - DNA, 142 bp, Homo sapiens; identical to SEQ ID NO: 202827
  chr12:3129463-3129605
  hypo

SEQ ID NO: 245015 - DNA, 540 bp, Homo sapiens; identical to SEQ ID NO: 224271
  chr12:3186403-3186943
  hypo

SEQ ID NO: 245016 - DNA, 58 bp, Homo sapiens; identical to SEQ ID NO: 224272
  chr12:3474998-3475056
  hypo

SEQ ID NO: 245017 - DNA, 980 bp, Homo sapiens; identical to SEQ ID NO: 224273
  chr12:3600023-3601003
  hypo

SEQ ID NO: 245018 - DNA, 1020 bp, Homo sapiens; identical to SEQ ID NO: 224274
  chr12:3601270-3602290
  hypo

SEQ ID NO: 245019 - DNA, 480 bp, Homo sapiens; identical to SEQ ID NO: 224275
  chr12:3602395-3602875
  hypo

SEQ ID NO: 245020 - DNA, 1432 bp, Homo sapiens; identical to SEQ ID NO: 224276
  chr12:4377789-4379221
  hypo

SEQ ID NO: 245021 - DNA, 180 bp, Homo sapiens; identical to SEQ ID NO: 224277
  chr12:4380180-4380360
  hypo

SEQ ID NO: 245022 - DNA, 780 bp, Homo sapiens; identical to SEQ ID NO: 224278
  chr12:4381479-4382259
  hypo

SEQ ID NO: 245023 - DNA, 376 bp, Homo sapiens; identical to SEQ ID NO: 224279
  chr12:4918558-4918934
  hypo

SEQ ID NO: 245024 - DNA, 288 bp, Homo sapiens; identical to SEQ ID NO: 224280
  chr12:4920225-4920513
  hypo

SEQ ID NO: 245025 - DNA, 1920 bp, Homo sapiens; identical to SEQ ID NO: 224281
  chr12:5018390-5020310
  hypo

SEQ ID NO: 245026 - DNA, 812 bp, Homo sapiens; identical to SEQ ID NO: 224282
  chr12:5540932-5541744
  hypo

SEQ ID NO: 245027 - DNA, 660 bp, Homo sapiens; identical to SEQ ID NO: 224283
  chr12:5541892-5542552
  hypo

SEQ ID NO: 245028 - DNA, 317 bp, Homo sapiens; identical to SEQ ID NO: 224284
  chr12:6309398-6309715
  hypo

SEQ ID NO: 245029 - DNA, 141 bp, Homo sapiens; identical to SEQ ID NO: 224285
  chr12:6387950-6388091
  hypo

SEQ ID NO: 245030 - DNA, 671 bp, Homo sapiens; identical to SEQ ID NO: 224286
  chr12:6492950-6493621
  hypo

SEQ ID NO: 245031 - DNA, 723 bp, Homo sapiens; identical to SEQ ID NO: 224287
  chr12:6809093-6809816
  hypo

SEQ ID NO: 245032 - DNA, 439 bp, Homo sapiens; identical to SEQ ID NO: 224288
  chr12:8123158-8123597
  hypo

SEQ ID NO: 245033 - DNA, 521 bp, Homo sapiens; identical to SEQ ID NO: 224289
  chr12:8171289-8171810
  hypo

SEQ ID NO: 245034 - DNA, 292 bp, Homo sapiens; identical to SEQ ID NO: 224290
  chr12:9216953-9217245
  hypo

SEQ ID NO: 245035 - DNA, 44 bp, Homo sapiens; identical to SEQ ID NO: 202870
  chr12:11801643-11801687
  hypo

SEQ ID NO: 245036 - DNA, 394 bp, Homo sapiens; identical to SEQ ID NO: 224292
  chr12:11802787-11803181
  hypo

SEQ ID NO: 245037 - DNA, 198 bp, Homo sapiens; identical to SEQ ID NO: 202872
  chr12:11905383-11905581
  hypo

SEQ ID NO: 245038 - DNA, 165 bp, Homo sapiens; identical to SEQ ID NO: 202873
  chr12:11992073-11992238
  hypo

SEQ ID NO: 245039 - DNA, 217 bp, Homo sapiens; identical to SEQ ID NO: 224295
  chr12:12006278-12006495
  hypo

SEQ ID NO: 245040 - DNA, 546 bp, Homo sapiens; identical to SEQ ID NO: 202875
  chr12:12022357-12022903
  hypo

SEQ ID NO: 245041 - DNA, 147 bp, Homo sapiens; identical to SEQ ID NO: 202876
  chr12:12037378-12037525
  hypo

SEQ ID NO: 245042 - DNA, 101 bp, Homo sapiens; identical to SEQ ID NO: 202877
  chr12:12038859-12038960
  hypo

SEQ ID NO: 245043 - DNA, 2801 bp, Homo sapiens; identical to SEQ ID NO: 202878
  chr12:12043874-12046675
  hypo

SEQ ID NO: 245044 - DNA, 1481 bp, Homo sapiens; identical to SEQ ID NO: 202879
  chr12:12046855-12048336
  hypo

SEQ ID NO: 245045 - DNA, 319 bp, Homo sapiens; identical to SEQ ID NO: 224301
  chr12:12502885-12503204
  hypo

SEQ ID NO: 245046 - DNA, 105 bp, Homo sapiens; identical to SEQ ID NO: 224302
  chr12:12848341-12848446
  hypo

SEQ ID NO: 245047 - DNA, 105 bp, Homo sapiens; identical to SEQ ID NO: 224303
  chr12:12869129-12869234
  hypo

SEQ ID NO: 245048 - DNA, 180 bp, Homo sapiens; identical to SEQ ID NO: 224304
  chr12:12869320-12869500
  hypo

SEQ ID NO: 245049 - DNA, 159 bp, Homo sapiens; identical to SEQ ID NO: 224305
  chr12:12877458-12877617
  hypo

SEQ ID NO: 245050 - DNA, 137 bp, Homo sapiens; identical to SEQ ID NO: 224306
  chr12:13069193-13069330
  hypo

SEQ ID NO: 245051 - DNA, 447 bp, Homo sapiens; identical to SEQ ID NO: 202885
  chr12:13152998-13153445
  hypo

SEQ ID NO: 245052 - DNA, 93 bp, Homo sapiens; identical to SEQ ID NO: 224308
  chr12:13154241-13154334
  hypo

SEQ ID NO: 245053 - DNA, 360 bp, Homo sapiens; identical to SEQ ID NO: 224309
  chr12:14133746-14134106
  hypo

SEQ ID NO: 245054 - DNA, 540 bp, Homo sapiens; identical to SEQ ID NO: 224310
  chr12:14134192-14134732
  hypo

SEQ ID NO: 245055 - DNA, 806 bp, Homo sapiens; identical to SEQ ID NO: 224311
  chr12:15941915-15942721
  hypo

SEQ ID NO: 245056 - DNA, 1200 bp, Homo sapiens; identical to SEQ ID NO: 224312
  chr12:19282309-19283509
  hypo

SEQ ID NO: 245057 - DNA, 180 bp, Homo sapiens; identical to SEQ ID NO: 224313
  chr12:19283593-19283773
  hypo

SEQ ID NO: 245058 - DNA, 545 bp, Homo sapiens; identical to SEQ ID NO: 224314
  chr12:21680606-21681151
  hypo

SEQ ID NO: 245059 - DNA, 1440 bp, Homo sapiens; identical to SEQ ID NO: 224315
  chr12:22486815-22488255
  hypo

SEQ ID NO: 245060 - DNA, 106 bp, Homo sapiens; identical to SEQ ID NO: 224316
  chr12:22488329-22488435
  hypo

SEQ ID NO: 245061 - DNA, 180 bp, Homo sapiens; identical to SEQ ID NO: 224317
  chr12:22488533-22488713
  hypo

SEQ ID NO: 245062 - DNA, 360 bp, Homo sapiens; identical to SEQ ID NO: 224318
  chr12:24714624-24714984
  hypo

SEQ ID NO: 245063 - DNA, 360 bp, Homo sapiens; identical to SEQ ID NO: 224319
  chr12:24715020-24715380
  hypo

SEQ ID NO: 245064 - DNA, 720 bp, Homo sapiens; identical to SEQ ID NO: 224320
  chr12:24715440-24716160
  hypo

SEQ ID NO: 245065 - DNA, 775 bp, Homo sapiens; identical to SEQ ID NO: 224321
  chr12:25101370-25102145
  hypo

SEQ ID NO: 245066 - DNA, 135 bp, Homo sapiens; identical to SEQ ID NO: 224322
  chr12:25378546-25378681
  hypo

SEQ ID NO: 245067 - DNA, 94 bp, Homo sapiens; identical to SEQ ID NO: 224323
  chr12:25380229-25380323
  hypo

SEQ ID NO: 245068 - DNA, 86 bp, Homo sapiens; identical to SEQ ID NO: 224324
  chr12:25398214-25398300
  hypo

SEQ ID NO: 245069 - DNA, 259 bp, Homo sapiens; identical to SEQ ID NO: 202917
  chr12:25404339-25404598
  hypo

SEQ ID NO: 245070 - DNA, 142 bp, Homo sapiens; identical to SEQ ID NO: 224326
  chr12:25538253-25538395
  hypo

SEQ ID NO: 245071 - DNA, 104 bp, Homo sapiens; identical to SEQ ID NO: 224327
  chr12:27486691-27486795
  hypo

SEQ ID NO: 245072 - DNA, 600 bp, Homo sapiens; identical to SEQ ID NO: 224328
  chr12:28123506-28124106
  hypo

SEQ ID NO: 245073 - DNA, 105 bp, Homo sapiens; identical to SEQ ID NO: 224329
  chr12:29301531-29301636
  hypo

SEQ ID NO: 245074 - DNA, 810 bp, Homo sapiens; identical to SEQ ID NO: 224330
  chr12:29301986-29302796
  hypo

SEQ ID NO: 245075 - DNA, 180 bp, Homo sapiens; identical to SEQ ID NO: 224331
  chr12:33049815-33049995
  hypo

SEQ ID NO: 245076 - DNA, 720 bp, Homo sapiens; identical to SEQ ID NO: 224332
  chr12:33591756-33592476
  hypo

SEQ ID NO: 245077 - DNA, 180 bp, Homo sapiens; identical to SEQ ID NO: 224333
  chr12:33592571-33592751
  hypo

SEQ ID NO: 245078 - DNA, 180 bp, Homo sapiens; identical to SEQ ID NO: 224334
  chr12:33592865-33593045
  hypo

SEQ ID NO: 245079 - DNA, 815 bp, Homo sapiens; identical to SEQ ID NO: 224335
  chr12:40618276-40619091
  hypo

SEQ ID NO: 245080 - DNA, 835 bp, Homo sapiens; identical to SEQ ID NO: 224336
  chr12:41582147-41582982
  hypo

SEQ ID NO: 245081 - DNA, 180 bp, Homo sapiens; identical to SEQ ID NO: 224337
  chr12:45444647-45444827
  hypo

SEQ ID NO: 245082 - DNA, 180 bp, Homo sapiens; identical to SEQ ID NO: 224338
  chr12:45445143-45445323
  hypo

SEQ ID NO: 245083 - DNA, 320 bp, Homo sapiens; identical to SEQ ID NO: 224339
  chr12:48299194-48299514
  hypo

SEQ ID NO: 245084 - DNA, 240 bp, Homo sapiens; identical to SEQ ID NO: 224340
  chr12:48397784-48398024
  hypo

SEQ ID NO: 245085 - DNA, 360 bp, Homo sapiens; identical to SEQ ID NO: 224341
  chr12:48398049-48398409
  hypo

SEQ ID NO: 245086 - DNA, 328 bp, Homo sapiens; identical to SEQ ID NO: 224342
  chr12:48576835-48577163
  hypo

SEQ ID NO: 245087 - DNA, 540 bp, Homo sapiens; identical to SEQ ID NO: 224343
  chr12:48577270-48577810
  hypo

SEQ ID NO: 245088 - DNA, 180 bp, Homo sapiens; identical to SEQ ID NO: 224344
  chr12:48578049-48578229
  hypo

SEQ ID NO: 245089 - DNA, 335 bp, Homo sapiens; identical to SEQ ID NO: 202960
  chr12:49182447-49182782
  hypo

SEQ ID NO: 245090 - DNA, 217 bp, Homo sapiens; identical to SEQ ID NO: 224346
  chr12:49183113-49183330
  hypo

SEQ ID NO: 245091 - DNA, 204 bp, Homo sapiens; identical to SEQ ID NO: 224347
  chr12:49351242-49351446
  hypo

SEQ ID NO: 245092 - DNA, 695 bp, Homo sapiens; identical to SEQ ID NO: 224348
  chr12:49363694-49364389
  hypo

SEQ ID NO: 245093 - DNA, 698 bp, Homo sapiens; identical to SEQ ID NO: 224349
  chr12:49371614-49372312
  hypo

SEQ ID NO: 245094 - DNA, 180 bp, Homo sapiens; identical to SEQ ID NO: 224350
  chr12:49374367-49374547
  hypo

SEQ ID NO: 245095 - DNA, 720 bp, Homo sapiens; identical to SEQ ID NO: 224351
  chr12:49374829-49375549
  hypo

SEQ ID NO: 245096 - DNA, 229 bp, Homo sapiens; identical to SEQ ID NO: 224352
  chr12:49487980-49488209
  hypo

SEQ ID NO: 245097 - DNA, 301 bp, Homo sapiens; identical to SEQ ID NO: 202975
  chr12:49761541-49761842
  hypo

SEQ ID NO: 245098 - DNA, 284 bp, Homo sapiens; identical to SEQ ID NO: 224354
  chr12:49931779-49932063
  hypo

SEQ ID NO: 245099 - DNA, 92 bp, Homo sapiens; identical to SEQ ID NO: 224355
  chr12:49932286-49932378
  hypo

SEQ ID NO: 245100 - DNA, 538 bp, Homo sapiens; identical to SEQ ID NO: 224356
  chr12:49932966-49933504
  hypo

SEQ ID NO: 245101 - DNA, 240 bp, Homo sapiens; identical to SEQ ID NO: 224357
  chr12:50677272-50677512
  hypo

SEQ ID NO: 245102 - DNA, 32 bp, Homo sapiens; identical to SEQ ID NO: 224358
  chr12:51610959-51610991
  hypo

SEQ ID NO: 245103 - DNA, 380 bp, Homo sapiens; identical to SEQ ID NO: 224359
  chr12:51818412-51818792
  hypo

SEQ ID NO: 245104 - DNA, 104 bp, Homo sapiens; identical to SEQ ID NO: 224360
  chr12:51818997-51819101
  hypo

SEQ ID NO: 245105 - DNA, 165 bp, Homo sapiens; identical to SEQ ID NO: 224361
  chr12:52294168-52294333
  hypo

SEQ ID NO: 245106 - DNA, 139 bp, Homo sapiens; identical to SEQ ID NO: 224362
  chr12:52345764-52345903
  hypo

SEQ ID NO: 245107 - DNA, 1064 bp, Homo sapiens; identical to SEQ ID NO: 224363
  chr12:52400262-52401326
  hypo

SEQ ID NO: 245108 - DNA, 180 bp, Homo sapiens; identical to SEQ ID NO: 224364
  chr12:52401389-52401569
  hypo

SEQ ID NO: 245109 - DNA, 360 bp, Homo sapiens; identical to SEQ ID NO: 224365
  chr12:52416804-52417164
  hypo

SEQ ID NO: 245110 - DNA, 105 bp, Homo sapiens; identical to SEQ ID NO: 224366
  chr12:52427134-52427239
  hypo

SEQ ID NO: 245111 - DNA, 185 bp, Homo sapiens; identical to SEQ ID NO: 224367
  chr12:53272443-53272628
  hypo

SEQ ID NO: 245112 - DNA, 267 bp, Homo sapiens; identical to SEQ ID NO: 224368
  chr12:53719525-53719792
  hypo

SEQ ID NO: 245113 - DNA, 118 bp, Homo sapiens; identical to SEQ ID NO: 224369
  chr12:53765064-53765182
  hypo

SEQ ID NO: 245114 - DNA, 281 bp, Homo sapiens; identical to SEQ ID NO: 224370
  chr12:54144768-54145049
  hypo

SEQ ID NO: 245115 - DNA, 1080 bp, Homo sapiens; identical to SEQ ID NO: 224371
  chr12:54332688-54333768
  hypo

SEQ ID NO: 245116 - DNA, 300 bp, Homo sapiens; identical to SEQ ID NO: 224372
  chr12:54393348-54393648
  hypo

SEQ ID NO: 245117 - DNA, 930 bp, Homo sapiens; identical to SEQ ID NO: 224373
  chr12:54393706-54394636
  hypo

SEQ ID NO: 245118 - DNA, 278 bp, Homo sapiens; identical to SEQ ID NO: 224374
  chr12:54398739-54399017
  hypo

SEQ ID NO: 245119 - DNA, 420 bp, Homo sapiens; identical to SEQ ID NO: 224375
  chr12:54399254-54399674
  hypo

SEQ ID NO: 245120 - DNA, 360 bp, Homo sapiens; identical to SEQ ID NO: 224376
  chr12:54400010-54400370
  hypo

SEQ ID NO: 245121 - DNA, 420 bp, Homo sapiens; identical to SEQ ID NO: 224377
  chr12:54426968-54427388
  hypo

SEQ ID NO: 245122 - DNA, 180 bp, Homo sapiens; identical to SEQ ID NO: 224378
  chr12:54427426-54427606
  hypo

SEQ ID NO: 245123 - DNA, 41 bp, Homo sapiens; identical to SEQ ID NO: 203030
  chr12:54686414-54686455
  hypo

SEQ ID NO: 245124 - DNA, 246 bp, Homo sapiens; identical to SEQ ID NO: 224380
  chr12:54812376-54812622
  hypo

SEQ ID NO: 245125 - DNA, 326 bp, Homo sapiens; identical to SEQ ID NO: 224381
  chr12:54812830-54813156
  hypo

SEQ ID NO: 245126 - DNA, 42 bp, Homo sapiens; identical to SEQ ID NO: 224382
  chr12:56326151-56326193
  hypo

SEQ ID NO: 245127 - DNA, 151 bp, Homo sapiens; identical to SEQ ID NO: 203036
  chr12:56390556-56390707
  hypo

SEQ ID NO: 245128 - DNA, 268 bp, Homo sapiens; identical to SEQ ID NO: 224384
  chr12:56472768-56473036
  hypo

SEQ ID NO: 245129 - DNA, 273 bp, Homo sapiens; identical to SEQ ID NO: 224385
  chr12:56474073-56474346
  hypo

SEQ ID NO: 245130 - DNA, 480 bp, Homo sapiens; identical to SEQ ID NO: 224386
  chr12:58158951-58159431
  hypo

SEQ ID NO: 245131 - DNA, 374 bp, Homo sapiens; identical to SEQ ID NO: 224387
  chr12:58259123-58259497
  hypo

SEQ ID NO: 245132 - DNA, 280 bp, Homo sapiens; identical to SEQ ID NO: 224388
  chr12:58290227-58290507
  hypo

SEQ ID NO: 245133 - DNA, 960 bp, Homo sapiens; identical to SEQ ID NO: 224389
  chr12:59313525-59314485
  hypo

SEQ ID NO: 245134 - DNA, 180 bp, Homo sapiens; identical to SEQ ID NO: 224390
  chr12:59989688-59989868
  hypo

SEQ ID NO: 245135 - DNA, 180 bp, Homo sapiens; identical to SEQ ID NO: 224391
  chr12:59989994-59990174
  hypo

SEQ ID NO: 245136 - DNA, 180 bp, Homo sapiens; identical to SEQ ID NO: 224392
  chr12:59990261-59990441
  hypo

SEQ ID NO: 245137 - DNA, 960 bp, Homo sapiens; identical to SEQ ID NO: 224393
  chr12:62584729-62585689
  hypo

SEQ ID NO: 245138 - DNA, 329 bp, Homo sapiens; identical to SEQ ID NO: 203072
  chr12:64237615-64237944
  hypo

SEQ ID NO: 245139 - DNA, 110 bp, Homo sapiens; identical to SEQ ID NO: 203073
  chr12:64238195-64238305
  hypo

SEQ ID NO: 245140 - DNA, 31 bp, Homo sapiens; identical to SEQ ID NO: 224396
  chr12:64783548-64783579
  hypo

SEQ ID NO: 245141 - DNA, 270 bp, Homo sapiens; identical to SEQ ID NO: 224397
  chr12:64784133-64784403
  hypo

SEQ ID NO: 245142 - DNA, 396 bp, Homo sapiens; identical to SEQ ID NO: 203076
  chr12:64845175-64845571
  hypo

SEQ ID NO: 245143 - DNA, 145 bp, Homo sapiens; identical to SEQ ID NO: 224399
  chr12:65564627-65564772
  hypo

SEQ ID NO: 245144 - DNA, 174 bp, Homo sapiens; identical to SEQ ID NO: 224400
  chr12:66582759-66582933
  hypo

SEQ ID NO: 245145 - DNA, 180 bp, Homo sapiens; identical to SEQ ID NO: 224401
  chr12:66582984-66583164
  hypo

SEQ ID NO: 245146 - DNA, 151 bp, Homo sapiens; identical to SEQ ID NO: 224402
  chr12:66583214-66583365
  hypo

SEQ ID NO: 245147 - DNA, 341 bp, Homo sapiens; identical to SEQ ID NO: 224403
  chr12:66629083-66629424
  hypo

SEQ ID NO: 245148 - DNA, 64 bp, Homo sapiens; identical to SEQ ID NO: 224404
  chr12:69080591-69080655
  hypo

SEQ ID NO: 245149 - DNA, 47 bp, Homo sapiens; identical to SEQ ID NO: 224405
  chr12:69080866-69080913
  hypo

SEQ ID NO: 245150 - DNA, 114 bp, Homo sapiens; identical to SEQ ID NO: 203107
  chr12:77272744-77272858
  hypo

SEQ ID NO: 245151 - DNA, 855 bp, Homo sapiens; identical to SEQ ID NO: 224407
  chr12:80084234-80085089
  hypo

SEQ ID NO: 245152 - DNA, 660 bp, Homo sapiens; identical to SEQ ID NO: 224408
  chr12:81330538-81331198
  hypo

SEQ ID NO: 245153 - DNA, 360 bp, Homo sapiens; identical to SEQ ID NO: 224409
  chr12:83080964-83081324
  hypo

SEQ ID NO: 245154 - DNA, 38 bp, Homo sapiens; identical to SEQ ID NO: 224410
  chr12:89747142-89747180
  hypo

SEQ ID NO: 245155 - DNA, 336 bp, Homo sapiens; identical to SEQ ID NO: 224411
  chr12:89747255-89747591
  hypo

SEQ ID NO: 245156 - DNA, 398 bp, Homo sapiens; identical to SEQ ID NO: 224412
  chr12:93966030-93966428
  hypo

SEQ ID NO: 245157 - DNA, 465 bp, Homo sapiens; identical to SEQ ID NO: 224413
  chr12:93985219-93985684
  hypo

SEQ ID NO: 245158 - DNA, 450 bp, Homo sapiens; identical to SEQ ID NO: 224414
  chr12:94541784-94542234
  hypo

SEQ ID NO: 245159 - DNA, 1591 bp, Homo sapiens; identical to SEQ ID NO: 224415
  chr12:94542561-94544152
  hypo

SEQ ID NO: 245160 - DNA, 34 bp, Homo sapiens; identical to SEQ ID NO: 203135
  chr12:94544417-94544451
  hypo

SEQ ID NO: 245161 - DNA, 105 bp, Homo sapiens; identical to SEQ ID NO: 224417
  chr12:96183926-96184031
  hypo

SEQ ID NO: 245162 - DNA, 180 bp, Homo sapiens; identical to SEQ ID NO: 224418
  chr12:96185017-96185197
  hypo

SEQ ID NO: 245163 - DNA, 206 bp, Homo sapiens; identical to SEQ ID NO: 224419
  chr12:96587648-96587854
  hypo

SEQ ID NO: 245164 - DNA, 33 bp, Homo sapiens; identical to SEQ ID NO: 224420
  chr12:96618052-96618085
  hypo

SEQ ID NO: 245165 - DNA, 1080 bp, Homo sapiens; identical to SEQ ID NO: 224421
  chr12:99288192-99289272
  hypo

SEQ ID NO: 245166 - DNA, 180 bp, Homo sapiens; identical to SEQ ID NO: 224422
  chr12:103351554-103351734
  hypo

SEQ ID NO: 245167 - DNA, 900 bp, Homo sapiens; identical to SEQ ID NO: 224423
  chr12:103351876-103352776
  hypo

SEQ ID NO: 245168 - DNA, 243 bp, Homo sapiens; identical to SEQ ID NO: 224424
  chr12:103696152-103696395
  hypo

SEQ ID NO: 245169 - DNA, 398 bp, Homo sapiens; identical to SEQ ID NO: 224425
  chr12:104322990-104323388
  hypo

SEQ ID NO: 245170 - DNA, 98 bp, Homo sapiens; identical to SEQ ID NO: 203156
  chr12:104459023-104459121
  hypo

SEQ ID NO: 245171 - DNA, 900 bp, Homo sapiens; identical to SEQ ID NO: 224427
  chr12:104850324-104851224
  hypo

SEQ ID NO: 245172 - DNA, 360 bp, Homo sapiens; identical to SEQ ID NO: 224428
  chr12:104851599-104851959
  hypo

SEQ ID NO: 245173 - DNA, 180 bp, Homo sapiens; identical to SEQ ID NO: 224429
  chr12:106532708-106532888
  hypo

SEQ ID NO: 245174 - DNA, 105 bp, Homo sapiens; identical to SEQ ID NO: 224430
  chr12:106641151-106641256
  hypo

SEQ ID NO: 245175 - DNA, 54 bp, Homo sapiens; identical to SEQ ID NO: 203163
  chr12:106641515-106641569
  hypo

SEQ ID NO: 245176 - DNA, 420 bp, Homo sapiens; identical to SEQ ID NO: 224432
  chr12:106979781-106980201
  hypo

SEQ ID NO: 245177 - DNA, 142 bp, Homo sapiens; identical to SEQ ID NO: 224433
  chr12:107167936-107168078
  hypo

SEQ ID NO: 245178 - DNA, 240 bp, Homo sapiens; identical to SEQ ID NO: 224434
  chr12:107168258-107168498
  hypo

SEQ ID NO: 245179 - DNA, 505 bp, Homo sapiens; identical to SEQ ID NO: 224435
  chr12:108169005-108169510
  hypo

SEQ ID NO: 245180 - DNA, 415 bp, Homo sapiens; identical to SEQ ID NO: 224436
  chr12:108297348-108297763
  hypo

SEQ ID NO: 245181 - DNA, 330 bp, Homo sapiens; identical to SEQ ID NO: 224437
  chr12:109746884-109747214
  hypo

SEQ ID NO: 245182 - DNA, 180 bp, Homo sapiens; identical to SEQ ID NO: 224438
  chr12:109747243-109747423
  hypo

SEQ ID NO: 245183 - DNA, 480 bp, Homo sapiens; identical to SEQ ID NO: 224439
  chr12:111284566-111285046
  hypo

SEQ ID NO: 245184 - DNA, 1876 bp, Homo sapiens; identical to SEQ ID NO: 224440
  chr12:111471132-111473008
  hypo

SEQ ID NO: 245185 - DNA, 332 bp, Homo sapiens; identical to SEQ ID NO: 224441
  chr12:111473056-111473388
  hypo

SEQ ID NO: 245186 - DNA, 262 bp, Homo sapiens; identical to SEQ ID NO: 224442
  chr12:111844275-111844537
  hypo

SEQ ID NO: 245187 - DNA, 42 bp, Homo sapiens; identical to SEQ ID NO: 224443
  chr12:112689847-112689889
  hypo

SEQ ID NO: 245188 - DNA, 35 bp, Homo sapiens; identical to SEQ ID NO: 203186
  chr12:112884177-112884212
  hypo

SEQ ID NO: 245189 - DNA, 196 bp, Homo sapiens; identical to SEQ ID NO: 224445
  chr12:112888121-112888317
  hypo

SEQ ID NO: 245190 - DNA, 86 bp, Homo sapiens; identical to SEQ ID NO: 224446
  chr12:112915451-112915537
  hypo

SEQ ID NO: 245191 - DNA, 116 bp, Homo sapiens; identical to SEQ ID NO: 203188
  chr12:112924321-112924437
  hypo

SEQ ID NO: 245192 - DNA, 152 bp, Homo sapiens; identical to SEQ ID NO: 224448
  chr12:112926827-112926979
  hypo

SEQ ID NO: 245193 - DNA, 261 bp, Homo sapiens; identical to SEQ ID NO: 224449
  chr12:113013083-113013344
  hypo

SEQ ID NO: 245194 - DNA, 817 bp, Homo sapiens; identical to SEQ ID NO: 224450
  chr12:113494407-113495224
  hypo

SEQ ID NO: 245195 - DNA, 420 bp, Homo sapiens; identical to SEQ ID NO: 224451
  chr12:113796410-113796830
  hypo

SEQ ID NO: 245196 - DNA, 180 bp, Homo sapiens; identical to SEQ ID NO: 224452
  chr12:113905484-113905664
  hypo

SEQ ID NO: 245197 - DNA, 600 bp, Homo sapiens; identical to SEQ ID NO: 224453
  chr12:113905729-113906329
  hypo

SEQ ID NO: 245198 - DNA, 180 bp, Homo sapiens; identical to SEQ ID NO: 224454
  chr12:113913768-113913948
  hypo

SEQ ID NO: 245199 - DNA, 360 bp, Homo sapiens; identical to SEQ ID NO: 224455
  chr12:113914006-113914366
  hypo

SEQ ID NO: 245200 - DNA, 420 bp, Homo sapiens; identical to SEQ ID NO: 224456
  chr12:114029378-114029798
  hypo

SEQ ID NO: 245201 - DNA, 229 bp, Homo sapiens; identical to SEQ ID NO: 224457
  chr12:114075830-114076059
  hypo

SEQ ID NO: 245202 - DNA, 176 bp, Homo sapiens; identical to SEQ ID NO: 224458
  chr12:114841464-114841640
  hypo

SEQ ID NO: 245203 - DNA, 324 bp, Homo sapiens; identical to SEQ ID NO: 224459
  chr12:114881653-114881977
  hypo

SEQ ID NO: 245204 - DNA, 228 bp, Homo sapiens; identical to SEQ ID NO: 224460
  chr12:114885146-114885374
  hypo

SEQ ID NO: 245205 - DNA, 145 bp, Homo sapiens; identical to SEQ ID NO: 224461
  chr12:116972230-116972375
  hypo

SEQ ID NO: 245206 - DNA, 72 bp, Homo sapiens; identical to SEQ ID NO: 224462
  chr12:117316909-117316981
  hypo

SEQ ID NO: 245207 - DNA, 517 bp, Homo sapiens; identical to SEQ ID NO: 224463
  chr12:117317225-117317742
  hypo

SEQ ID NO: 245208 - DNA, 480 bp, Homo sapiens; identical to SEQ ID NO: 224464
  chr12:117798695-117799175
  hypo

SEQ ID NO: 245209 - DNA, 180 bp, Homo sapiens; identical to SEQ ID NO: 224465
  chr12:117799280-117799460
  hypo

SEQ ID NO: 245210 - DNA, 253 bp, Homo sapiens; identical to SEQ ID NO: 224466
  chr12:121077958-121078211
  hypo

SEQ ID NO: 245211 - DNA, 184 bp, Homo sapiens; identical to SEQ ID NO: 224467
  chr12:122214126-122214310
  hypo

SEQ ID NO: 245212 - DNA, 240 bp, Homo sapiens; identical to SEQ ID NO: 224468
  chr12:122231464-122231704
  hypo

SEQ ID NO: 245213 - DNA, 190 bp, Homo sapiens; identical to SEQ ID NO: 224469
  chr12:122232106-122232296
  hypo

SEQ ID NO: 245214 - DNA, 238 bp, Homo sapiens; identical to SEQ ID NO: 224470
  chr12:122459882-122460120
  hypo

SEQ ID NO: 245215 - DNA, 602 bp, Homo sapiens; identical to SEQ ID NO: 224471
  chr12:122460949-122461551
  hypo

SEQ ID NO: 245216 - DNA, 558 bp, Homo sapiens; identical to SEQ ID NO: 224472
  chr12:122688624-122689182
  hypo

SEQ ID NO: 245217 - DNA, 95 bp, Homo sapiens; identical to SEQ ID NO: 224473
  chr12:122907734-122907829
  hypo

SEQ ID NO: 245218 - DNA, 70 bp, Homo sapiens; identical to SEQ ID NO: 224474
  chr12:122907838-122907908
  hypo

SEQ ID NO: 245219 - DNA, 567 bp, Homo sapiens; identical to SEQ ID NO: 224475
  chr12:123258812-123259379
  hypo

SEQ ID NO: 245220 - DNA, 240 bp, Homo sapiens; identical to SEQ ID NO: 224476
  chr12:123380440-123380680
  hypo

SEQ ID NO: 245221 - DNA, 281 bp, Homo sapiens; identical to SEQ ID NO: 224477
  chr12:123754888-123755169
  hypo

SEQ ID NO: 245222 - DNA, 180 bp, Homo sapiens; identical to SEQ ID NO: 224478
  chr12:123920672-123920852
  hypo

SEQ ID NO: 245223 - DNA, 274 bp, Homo sapiens; identical to SEQ ID NO: 224479
  chr12:124017709-124017983
  hypo

SEQ ID NO: 245224 - DNA, 290 bp, Homo sapiens; identical to SEQ ID NO: 224480
  chr12:126018012-126018302
  hypo

SEQ ID NO: 245225 - DNA, 180 bp, Homo sapiens; identical to SEQ ID NO: 224481
  chr12:128751069-128751249
  hypo

SEQ ID NO: 245226 - DNA, 780 bp, Homo sapiens; identical to SEQ ID NO: 224482
  chr12:128751292-128752072
  hypo

SEQ ID NO: 245227 - DNA, 180 bp, Homo sapiens; identical to SEQ ID NO: 224483
  chr12:128752126-128752306
  hypo

SEQ ID NO: 245228 - DNA, 804 bp, Homo sapiens; identical to SEQ ID NO: 224484
  chr12:129337895-129338699
  hypo

SEQ ID NO: 245229 - DNA, 104 bp, Homo sapiens; identical to SEQ ID NO: 224485
  chr12:129338740-129338844
  hypo

SEQ ID NO: 245230 - DNA, 600 bp, Homo sapiens; identical to SEQ ID NO: 224486
  chr12:130645405-130646005
  hypo

SEQ ID NO: 245231 - DNA, 300 bp, Homo sapiens; identical to SEQ ID NO: 224487
  chr12:130646508-130646808
  hypo

SEQ ID NO: 245232 - DNA, 660 bp, Homo sapiens; identical to SEQ ID NO: 224488
  chr12:130646869-130647529
  hypo

SEQ ID NO: 245233 - DNA, 402 bp, Homo sapiens; identical to SEQ ID NO: 224489
  chr12:132312446-132312848
  hypo

SEQ ID NO: 245234 - DNA, 37 bp, Homo sapiens; identical to SEQ ID NO: 203262
  chr12:132380828-132380865
  hypo

SEQ ID NO: 245235 - DNA, 50 bp, Homo sapiens; identical to SEQ ID NO: 224491
  chr12:132480346-132480396
  hypo

SEQ ID NO: 245236 - DNA, 400 bp, Homo sapiens; identical to SEQ ID NO: 224492
  chr12:133286719-133287119
  hypo

SEQ ID NO: 245237 - DNA, 180 bp, Homo sapiens; identical to SEQ ID NO: 224493
  chr12:133464270-133464450
  hypo

SEQ ID NO: 245238 - DNA, 316 bp, Homo sapiens; identical to SEQ ID NO: 224494
  chr12:133464562-133464878
  hypo

SEQ ID NO: 245239 - DNA, 242 bp, Homo sapiens; identical to SEQ ID NO: 224495
  chr12:133481375-133481617
  hypo

SEQ ID NO: 245240 - DNA, 1140 bp, Homo sapiens; identical to SEQ ID NO: 224496
  chr12:133484732-133485872
  hypo

SEQ ID NO: 245241 - DNA, 201 bp, Homo sapiens; identical to SEQ ID NO: 224497
  chr12:133706815-133707016
  hypo

SEQ ID NO: 245242 - DNA, 810 bp, Homo sapiens; identical to SEQ ID NO: 224498
  chr13:20735313-20736123
  hypo

SEQ ID NO: 245243 - DNA, 240 bp, Homo sapiens; identical to SEQ ID NO: 224499
  chr13:20766700-20766940
  hypo

SEQ ID NO: 245244 - DNA, 420 bp, Homo sapiens; identical to SEQ ID NO: 224500
  chr13:21099646-21100066
  hypo

SEQ ID NO: 245245 - DNA, 105 bp, Homo sapiens; identical to SEQ ID NO: 224501
  chr13:21141668-21141773
  hypo

SEQ ID NO: 245246 - DNA, 240 bp, Homo sapiens; identical to SEQ ID NO: 224502
  chr13:21635643-21635883
  hypo

SEQ ID NO: 245247 - DNA, 360 bp, Homo sapiens; identical to SEQ ID NO: 224503
  chr13:22243584-22243944
  hypo

SEQ ID NO: 245248 - DNA, 179 bp, Homo sapiens; identical to SEQ ID NO: 224504
  chr13:22244074-22244253
  hypo

SEQ ID NO: 245249 - DNA, 273 bp, Homo sapiens; identical to SEQ ID NO: 224505
  chr13:22245126-22245399
  hypo

SEQ ID NO: 245250 - DNA, 96 bp, Homo sapiens; identical to SEQ ID NO: 203283
  chr13:22247845-22247941
  hypo

SEQ ID NO: 245251 - DNA, 180 bp, Homo sapiens; identical to SEQ ID NO: 224507
  chr13:23733916-23734096
  hypo

SEQ ID NO: 245252 - DNA, 652 bp, Homo sapiens; identical to SEQ ID NO: 224508
  chr13:23734184-23734836
  hypo

SEQ ID NO: 245253 - DNA, 240 bp, Homo sapiens; identical to SEQ ID NO: 224509
  chr13:24040524-24040764
  hypo

SEQ ID NO: 245254 - DNA, 420 bp, Homo sapiens; identical to SEQ ID NO: 224510
  chr13:24734780-24735200
  hypo

SEQ ID NO: 245255 - DNA, 240 bp, Homo sapiens; identical to SEQ ID NO: 224511
  chr13:24735313-24735553
  hypo

SEQ ID NO: 245256 - DNA, 626 bp, Homo sapiens; identical to SEQ ID NO: 224512
  chr13:25321642-25322268
  hypo

SEQ ID NO: 245257 - DNA, 1381 bp, Homo sapiens; identical to SEQ ID NO: 224513
  chr13:25744683-25746064
  hypo

SEQ ID NO: 245258 - DNA, 877 bp, Homo sapiens; identical to SEQ ID NO: 224514
  chr13:25946074-25946951
  hypo

SEQ ID NO: 245259 - DNA, 448 bp, Homo sapiens; identical to SEQ ID NO: 224515
  chr13:26042694-26043142
  hypo

SEQ ID NO: 245260 - DNA, 180 bp, Homo sapiens; identical to SEQ ID NO: 224516
  chr13:26043192-26043372
  hypo

SEQ ID NO: 245261 - DNA, 180 bp, Homo sapiens; identical to SEQ ID NO: 224517
  chr13:26625398-26625578
  hypo

SEQ ID NO: 245262 - DNA, 180 bp, Homo sapiens; identical to SEQ ID NO: 224518
  chr13:26625655-26625835
  hypo

SEQ ID NO: 245263 - DNA, 420 bp, Homo sapiens; identical to SEQ ID NO: 224519
  chr13:26625885-26626305
  hypo

SEQ ID NO: 245264 - DNA, 835 bp, Homo sapiens; identical to SEQ ID NO: 224520
  chr13:27334206-27335041
  hypo

SEQ ID NO: 245265 - DNA, 275 bp, Homo sapiens; identical to SEQ ID NO: 203294
  chr13:27744759-27745034
  hypo

SEQ ID NO: 245266 - DNA, 106 bp, Homo sapiens; identical to SEQ ID NO: 224522
  chr13:28493981-28494087
  hypo

SEQ ID NO: 245267 - DNA, 660 bp, Homo sapiens; identical to SEQ ID NO: 224523
  chr13:28552051-28552711
  hypo

SEQ ID NO: 245268 - DNA, 66 bp, Homo sapiens; identical to SEQ ID NO: 224524
  chr13:28592626-28592692
  hypo

SEQ ID NO: 245269 - DNA, 499 bp, Homo sapiens; identical to SEQ ID NO: 224525
  chr13:28608023-28608522
  hypo

SEQ ID NO: 245270 - DNA, 106 bp, Homo sapiens; identical to SEQ ID NO: 203314
  chr13:28636040-28636146
  hypo

SEQ ID NO: 245271 - DNA, 1093 bp, Homo sapiens; identical to SEQ ID NO: 224527
  chr13:28674057-28675150
  hypo

SEQ ID NO: 245272 - DNA, 300 bp, Homo sapiens; identical to SEQ ID NO: 224528
  chr13:29068070-29068370
  hypo

SEQ ID NO: 245273 - DNA, 1075 bp, Homo sapiens; identical to SEQ ID NO: 224529
  chr13:29292471-29293546
  hypo

SEQ ID NO: 245274 - DNA, 580 bp, Homo sapiens; identical to SEQ ID NO: 224530
  chr13:29394053-29394633
  hypo

SEQ ID NO: 245275 - DNA, 236 bp, Homo sapiens; identical to SEQ ID NO: 224531
  chr13:29394676-29394912
  hypo

SEQ ID NO: 245276 - DNA, 180 bp, Homo sapiens; identical to SEQ ID NO: 224532
  chr13:30982594-30982774
  hypo

SEQ ID NO: 245277 - DNA, 274 bp, Homo sapiens; identical to SEQ ID NO: 224533
  chr13:32889530-32889804
  hypo

SEQ ID NO: 245278 - DNA, 106 bp, Homo sapiens; identical to SEQ ID NO: 224534
  chr13:32890558-32890664
  hypo

SEQ ID NO: 245279 - DNA, 249 bp, Homo sapiens; identical to SEQ ID NO: 224535
  chr13:32893213-32893462
  hypo

SEQ ID NO: 245280 - DNA, 109 bp, Homo sapiens; identical to SEQ ID NO: 224536
  chr13:32899212-32899321
  hypo

SEQ ID NO: 245281 - DNA, 182 bp, Homo sapiens; identical to SEQ ID NO: 224537
  chr13:32900237-32900419
  hypo

SEQ ID NO: 245282 - DNA, 115 bp, Homo sapiens; identical to SEQ ID NO: 224538
  chr13:32900635-32900750
  hypo

SEQ ID NO: 245283 - DNA, 50 bp, Homo sapiens; identical to SEQ ID NO: 224539
  chr13:32903579-32903629
  hypo

SEQ ID NO: 245284 - DNA, 146 bp, Homo sapiens; identical to SEQ ID NO: 224540
  chr13:32905055-32905201
  hypo

SEQ ID NO: 245285 - DNA, 1116 bp, Homo sapiens; identical to SEQ ID NO: 224541
  chr13:32906408-32907524
  hypo

SEQ ID NO: 245286 - DNA, 4932 bp, Homo sapiens; identical to SEQ ID NO: 224542
  chr13:32910401-32915333
  hypo

SEQ ID NO: 245287 - DNA, 96 bp, Homo sapiens; identical to SEQ ID NO: 224543
  chr13:32918694-32918790
  hypo

SEQ ID NO: 245288 - DNA, 70 bp, Homo sapiens; identical to SEQ ID NO: 224544
  chr13:32920963-32921033
  hypo

SEQ ID NO: 245289 - DNA, 428 bp, Homo sapiens; identical to SEQ ID NO: 224545
  chr13:32928997-32929425
  hypo

SEQ ID NO: 245290 - DNA, 182 bp, Homo sapiens; identical to SEQ ID NO: 224546
  chr13:32930564-32930746
  hypo

SEQ ID NO: 245291 - DNA, 188 bp, Homo sapiens; identical to SEQ ID NO: 224547
  chr13:32931878-32932066
  hypo

SEQ ID NO: 245292 - DNA, 171 bp, Homo sapiens; identical to SEQ ID NO: 224548
  chr13:32936659-32936830
  hypo

SEQ ID NO: 245293 - DNA, 355 bp, Homo sapiens; identical to SEQ ID NO: 224549
  chr13:32937315-32937670
  hypo

SEQ ID NO: 245294 - DNA, 156 bp, Homo sapiens; identical to SEQ ID NO: 224550
  chr13:32944538-32944694
  hypo

SEQ ID NO: 245295 - DNA, 145 bp, Homo sapiens; identical to SEQ ID NO: 224551
  chr13:32945092-32945237
  hypo

SEQ ID NO: 245296 - DNA, 122 bp, Homo sapiens; identical to SEQ ID NO: 224552
  chr13:32950806-32950928
  hypo

SEQ ID NO: 245297 - DNA, 199 bp, Homo sapiens; identical to SEQ ID NO: 224553
  chr13:32953453-32953652
  hypo

SEQ ID NO: 245298 - DNA, 396 bp, Homo sapiens; identical to SEQ ID NO: 224554
  chr13:32953886-32954282
  hypo

SEQ ID NO: 245299 - DNA, 245 bp, Homo sapiens; identical to SEQ ID NO: 224555
  chr13:32968825-32969070
  hypo

SEQ ID NO: 245300 - DNA, 147 bp, Homo sapiens; identical to SEQ ID NO: 224556
  chr13:32971034-32971181
  hypo

SEQ ID NO: 245301 - DNA, 876 bp, Homo sapiens; identical to SEQ ID NO: 224557
  chr13:32972298-32973174
  hypo

SEQ ID NO: 245302 - DNA, 515 bp, Homo sapiens; identical to SEQ ID NO: 224558
  chr13:32973294-32973809
  hypo

SEQ ID NO: 245303 - DNA, 552 bp, Homo sapiens; identical to SEQ ID NO: 224559
  chr13:33000877-33001429
  hypo

SEQ ID NO: 245304 - DNA, 360 bp, Homo sapiens; identical to SEQ ID NO: 224560
  chr13:33590033-33590393
  hypo

SEQ ID NO: 245305 - DNA, 180 bp, Homo sapiens; identical to SEQ ID NO: 224561
  chr13:33590467-33590647
  hypo

SEQ ID NO: 245306 - DNA, 180 bp, Homo sapiens; identical to SEQ ID NO: 224562
  chr13:33590845-33591025
  hypo

SEQ ID NO: 245307 - DNA, 1320 bp, Homo sapiens; identical to SEQ ID NO: 224563
  chr13:37005447-37006767
  hypo

SEQ ID NO: 245308 - DNA, 304 bp, Homo sapiens; identical to SEQ ID NO: 203332
  chr13:37393232-37393536
  hypo

SEQ ID NO: 245309 - DNA, 33 bp, Homo sapiens; identical to SEQ ID NO: 203337
  chr13:39612009-39612042
  hypo

SEQ ID NO: 245310 - DNA, 180 bp, Homo sapiens; identical to SEQ ID NO: 224566
  chr13:41345257-41345437
  hypo

SEQ ID NO: 245311 - DNA, 206 bp, Homo sapiens; identical to SEQ ID NO: 203340
  chr13:41364043-41364249
  hypo

SEQ ID NO: 245312 - DNA, 271 bp, Homo sapiens; identical to SEQ ID NO: 224568
  chr13:41767821-41768092
  hypo

SEQ ID NO: 245313 - DNA, 105 bp, Homo sapiens; identical to SEQ ID NO: 224569
  chr13:42032016-42032121
  hypo

SEQ ID NO: 245314 - DNA, 379 bp, Homo sapiens; identical to SEQ ID NO: 224570
  chr13:42032381-42032760
  hypo

SEQ ID NO: 245315 - DNA, 162 bp, Homo sapiens; identical to SEQ ID NO: 224571
  chr13:42615145-42615307
  hypo

SEQ ID NO: 245316 - DNA, 180 bp, Homo sapiens; identical to SEQ ID NO: 224572
  chr13:42615560-42615740
  hypo

SEQ ID NO: 245317 - DNA, 161 bp, Homo sapiens; identical to SEQ ID NO: 203343
  chr13:42615857-42616018
  hypo

SEQ ID NO: 245318 - DNA, 516 bp, Homo sapiens; identical to SEQ ID NO: 224574
  chr13:43566054-43566570
  hypo

SEQ ID NO: 245319 - DNA, 312 bp, Homo sapiens; identical to SEQ ID NO: 224575
  chr13:44544247-44544559
  hypo

SEQ ID NO: 245320 - DNA, 205 bp, Homo sapiens; identical to SEQ ID NO: 224576
  chr13:44991619-44991824
  hypo

SEQ ID NO: 245321 - DNA, 106 bp, Homo sapiens; identical to SEQ ID NO: 224577
  chr13:45150764-45150870
  hypo

SEQ ID NO: 245322 - DNA, 291 bp, Homo sapiens; identical to SEQ ID NO: 224578
  chr13:52585269-52585560
  hypo

SEQ ID NO: 245323 - DNA, 85 bp, Homo sapiens; identical to SEQ ID NO: 224579
  chr13:52702430-52702515
  hypo

SEQ ID NO: 245324 - DNA, 280 bp, Homo sapiens; identical to SEQ ID NO: 224580
  chr13:52702767-52703047
  hypo

SEQ ID NO: 245325 - DNA, 240 bp, Homo sapiens; identical to SEQ ID NO: 224581
  chr13:53425029-53425269
  hypo

SEQ ID NO: 245326 - DNA, 737 bp, Homo sapiens; identical to SEQ ID NO: 224582
  chr13:53425316-53426053
  hypo

SEQ ID NO: 245327 - DNA, 213 bp, Homo sapiens; identical to SEQ ID NO: 224583
  chr13:60972272-60972485
  hypo

SEQ ID NO: 245328 - DNA, 243 bp, Homo sapiens; identical to SEQ ID NO: 224584
  chr13:67799457-67799700
  hypo

SEQ ID NO: 245329 - DNA, 32 bp, Homo sapiens; identical to SEQ ID NO: 224585
  chr13:67801107-67801139
  hypo

SEQ ID NO: 245330 - DNA, 254 bp, Homo sapiens; identical to SEQ ID NO: 224586
  chr13:67801447-67801701
  hypo

SEQ ID NO: 245331 - DNA, 180 bp, Homo sapiens; identical to SEQ ID NO: 224587
  chr13:74708275-74708455
  hypo

SEQ ID NO: 245332 - DNA, 200 bp, Homo sapiens; identical to SEQ ID NO: 203388
  chr13:74709334-74709534
  hypo

SEQ ID NO: 245333 - DNA, 35 bp, Homo sapiens; identical to SEQ ID NO: 203389
  chr13:75794021-75794056
  hypo

SEQ ID NO: 245334 - DNA, 981 bp, Homo sapiens; identical to SEQ ID NO: 224590
  chr13:76055057-76056038
  hypo

SEQ ID NO: 245335 - DNA, 960 bp, Homo sapiens; identical to SEQ ID NO: 224591
  chr13:77459255-77460215
  hypo

SEQ ID NO: 245336 - DNA, 659 bp, Homo sapiens; identical to SEQ ID NO: 224592
  chr13:78271995-78272654
  hypo

SEQ ID NO: 245337 - DNA, 660 bp, Homo sapiens; identical to SEQ ID NO: 224593
  chr13:79170079-79170739
  hypo

SEQ ID NO: 245338 - DNA, 900 bp, Homo sapiens; identical to SEQ ID NO: 224594
  chr13:79175769-79176669
  hypo

SEQ ID NO: 245339 - DNA, 1223 bp, Homo sapiens; identical to SEQ ID NO: 224595
  chr13:79176851-79178074
  hypo

SEQ ID NO: 245340 - DNA, 313 bp, Homo sapiens; identical to SEQ ID NO: 224596
  chr13:80916947-80917260
  hypo

SEQ ID NO: 245341 - DNA, 360 bp, Homo sapiens; identical to SEQ ID NO: 224597
  chr13:88323541-88323901
  hypo

SEQ ID NO: 245342 - DNA, 720 bp, Homo sapiens; identical to SEQ ID NO: 224598
  chr13:88323971-88324691
  hypo

SEQ ID NO: 245343 - DNA, 180 bp, Homo sapiens; identical to SEQ ID NO: 224599
  chr13:88324801-88324981
  hypo

SEQ ID NO: 245344 - DNA, 240 bp, Homo sapiens; identical to SEQ ID NO: 224600
  chr13:95201509-95201749
  hypo

SEQ ID NO: 245345 - DNA, 180 bp, Homo sapiens; identical to SEQ ID NO: 224601
  chr13:95354546-95354726
  hypo

SEQ ID NO: 245346 - DNA, 480 bp, Homo sapiens; identical to SEQ ID NO: 224602
  chr13:95354802-95355282
  hypo

SEQ ID NO: 245347 - DNA, 455 bp, Homo sapiens; identical to SEQ ID NO: 224603
  chr13:95359621-95360076
  hypo

SEQ ID NO: 245348 - DNA, 180 bp, Homo sapiens; identical to SEQ ID NO: 224604
  chr13:95360281-95360461
  hypo

SEQ ID NO: 245349 - DNA, 1260 bp, Homo sapiens; identical to SEQ ID NO: 224605
  chr13:95363549-95364809
  hypo

SEQ ID NO: 245350 - DNA, 696 bp, Homo sapiens; identical to SEQ ID NO: 224606
  chr13:95619804-95620500
  hypo

SEQ ID NO: 245351 - DNA, 420 bp, Homo sapiens; identical to SEQ ID NO: 224607
  chr13:95620570-95620990
  hypo

SEQ ID NO: 245352 - DNA, 579 bp, Homo sapiens; identical to SEQ ID NO: 224608
  chr13:96705319-96705898
  hypo

SEQ ID NO: 245353 - DNA, 240 bp, Homo sapiens; identical to SEQ ID NO: 224609
  chr13:98795437-98795677
  hypo

SEQ ID NO: 245354 - DNA, 105 bp, Homo sapiens; identical to SEQ ID NO: 224610
  chr13:99129012-99129117
  hypo

SEQ ID NO: 245355 - DNA, 297 bp, Homo sapiens; identical to SEQ ID NO: 224611
  chr13:99229764-99230061
  hypo

SEQ ID NO: 245356 - DNA, 105 bp, Homo sapiens; identical to SEQ ID NO: 224612
  chr13:99739098-99739203
  hypo

SEQ ID NO: 245357 - DNA, 435 bp, Homo sapiens; identical to SEQ ID NO: 224613
  chr13:100620292-100620727
  hypo

SEQ ID NO: 245358 - DNA, 180 bp, Homo sapiens; identical to SEQ ID NO: 224614
  chr13:100621835-100622015
  hypo

SEQ ID NO: 245359 - DNA, 420 bp, Homo sapiens; identical to SEQ ID NO: 224615
  chr13:100622065-100622485
  hypo

SEQ ID NO: 245360 - DNA, 692 bp, Homo sapiens; identical to SEQ ID NO: 224616
  chr13:100632528-100633220
  hypo

SEQ ID NO: 245361 - DNA, 466 bp, Homo sapiens; identical to SEQ ID NO: 224617
  chr13:100633420-100633886
  hypo

SEQ ID NO: 245362 - DNA, 458 bp, Homo sapiens; identical to SEQ ID NO: 224618
  chr13:100634132-100634590
  hypo

SEQ ID NO: 245363 - DNA, 376 bp, Homo sapiens; identical to SEQ ID NO: 224619
  chr13:102068159-102068535
  hypo

SEQ ID NO: 245364 - DNA, 180 bp, Homo sapiens; identical to SEQ ID NO: 224620
  chr13:102068703-102068883
  hypo

SEQ ID NO: 245365 - DNA, 900 bp, Homo sapiens; identical to SEQ ID NO: 224621
  chr13:102568742-102569642
  hypo

SEQ ID NO: 245366 - DNA, 180 bp, Homo sapiens; identical to SEQ ID NO: 224622
  chr13:102569765-102569945
  hypo

SEQ ID NO: 245367 - DNA, 803 bp, Homo sapiens; identical to SEQ ID NO: 224623
  chr13:103046525-103047328
  hypo

SEQ ID NO: 245368 - DNA, 205 bp, Homo sapiens; identical to SEQ ID NO: 224624
  chr13:103450867-103451072
  hypo

SEQ ID NO: 245369 - DNA, 2299 bp, Homo sapiens; identical to SEQ ID NO: 224625
  chr13:107186847-107189146
  hypo

SEQ ID NO: 245370 - DNA, 189 bp, Homo sapiens; identical to SEQ ID NO: 224626
  chr13:108518460-108518649
  hypo

SEQ ID NO: 245371 - DNA, 180 bp, Homo sapiens; identical to SEQ ID NO: 224627
  chr13:108519263-108519443
  hypo

SEQ ID NO: 245372 - DNA, 180 bp, Homo sapiens; identical to SEQ ID NO: 224628
  chr13:108519619-108519799
  hypo

SEQ ID NO: 245373 - DNA, 180 bp, Homo sapiens; identical to SEQ ID NO: 224629
  chr13:108519860-108520040
  hypo

SEQ ID NO: 245374 - DNA, 180 bp, Homo sapiens; identical to SEQ ID NO: 224630
  chr13:108520164-108520344
  hypo

SEQ ID NO: 245375 - DNA, 420 bp, Homo sapiens; identical to SEQ ID NO: 224631
  chr13:108520599-108521019
  hypo

SEQ ID NO: 245376 - DNA, 760 bp, Homo sapiens; identical to SEQ ID NO: 224632
  chr13:109147714-109148474
  hypo

SEQ ID NO: 245377 - DNA, 720 bp, Homo sapiens; identical to SEQ ID NO: 224633
  chr13:110434530-110435250
  hypo

SEQ ID NO: 245378 - DNA, 300 bp, Homo sapiens; identical to SEQ ID NO: 224634
  chr13:110435353-110435653
  hypo

SEQ ID NO: 245379 - DNA, 180 bp, Homo sapiens; identical to SEQ ID NO: 224635
  chr13:110439043-110439223
  hypo

SEQ ID NO: 245380 - DNA, 480 bp, Homo sapiens; identical to SEQ ID NO: 224636
  chr13:110959492-110959972
  hypo

SEQ ID NO: 245381 - DNA, 360 bp, Homo sapiens; identical to SEQ ID NO: 224637
  chr13:110960108-110960468
  hypo

SEQ ID NO: 245382 - DNA, 240 bp, Homo sapiens; identical to SEQ ID NO: 224638
  chr13:111213793-111214033
  hypo

SEQ ID NO: 245383 - DNA, 258 bp, Homo sapiens; identical to SEQ ID NO: 224639
  chr13:111214122-111214380
  hypo

SEQ ID NO: 245384 - DNA, 265 bp, Homo sapiens; identical to SEQ ID NO: 224640
  chr13:111268043-111268308
  hypo

SEQ ID NO: 245385 - DNA, 585 bp, Homo sapiens; identical to SEQ ID NO: 224641
  chr13:112708093-112708678
  hypo

SEQ ID NO: 245386 - DNA, 180 bp, Homo sapiens; identical to SEQ ID NO: 224642
  chr13:112710243-112710423
  hypo

SEQ ID NO: 245387 - DNA, 167 bp, Homo sapiens; identical to SEQ ID NO: 224643
  chr13:112710671-112710838
  hypo

SEQ ID NO: 245388 - DNA, 141 bp, Homo sapiens; identical to SEQ ID NO: 224644
  chr13:112711044-112711185
  hypo

SEQ ID NO: 245389 - DNA, 600 bp, Homo sapiens; identical to SEQ ID NO: 224645
  chr13:112711704-112712304
  hypo

SEQ ID NO: 245390 - DNA, 720 bp, Homo sapiens; identical to SEQ ID NO: 224646
  chr13:112722239-112722959
  hypo

SEQ ID NO: 245391 - DNA, 180 bp, Homo sapiens; identical to SEQ ID NO: 224647
  chr13:112722997-112723177
  hypo

SEQ ID NO: 245392 - DNA, 180 bp, Homo sapiens; identical to SEQ ID NO: 224648
  chr13:112726642-112726822
  hypo

SEQ ID NO: 245393 - DNA, 540 bp, Homo sapiens; identical to SEQ ID NO: 224649
  chr13:112726970-112727510
  hypo

SEQ ID NO: 245394 - DNA, 180 bp, Homo sapiens; identical to SEQ ID NO: 224650
  chr13:112727615-112727795
  hypo

SEQ ID NO: 245395 - DNA, 180 bp, Homo sapiens; identical to SEQ ID NO: 224651
  chr13:112727872-112728052
  hypo

SEQ ID NO: 245396 - DNA, 245 bp, Homo sapiens; identical to SEQ ID NO: 224652
  chr13:112728205-112728450
  hypo

SEQ ID NO: 245397 - DNA, 35 bp, Homo sapiens; identical to SEQ ID NO: 224653
  chr13:113261127-113261162
  hypo

SEQ ID NO: 245398 - DNA, 710 bp, Homo sapiens; identical to SEQ ID NO: 224654
  chr13:113597560-113598270
  hypo

SEQ ID NO: 245399 - DNA, 87 bp, Homo sapiens; identical to SEQ ID NO: 203465
  chr13:113951225-113951312
  hypo

SEQ ID NO: 245400 - DNA, 180 bp, Homo sapiens; identical to SEQ ID NO: 224656
  chr13:114017970-114018150
  hypo

SEQ ID NO: 245401 - DNA, 105 bp, Homo sapiens; identical to SEQ ID NO: 224657
  chr13:114285598-114285703
  hypo

SEQ ID NO: 245402 - DNA, 420 bp, Homo sapiens; identical to SEQ ID NO: 224658
  chr13:114285861-114286281
  hypo

SEQ ID NO: 245403 - DNA, 342 bp, Homo sapiens; identical to SEQ ID NO: 224659
  chr13:114566180-114566522
  hypo

SEQ ID NO: 245404 - DNA, 171 bp, Homo sapiens; identical to SEQ ID NO: 224660
  chr13:114776329-114776500
  hypo

SEQ ID NO: 245405 - DNA, 105 bp, Homo sapiens; identical to SEQ ID NO: 224661
  chr13:114776782-114776887
  hypo

SEQ ID NO: 245406 - DNA, 176 bp, Homo sapiens; identical to SEQ ID NO: 224662
  chr14:21121403-21121579
  hypo

SEQ ID NO: 245407 - DNA, 165 bp, Homo sapiens; identical to SEQ ID NO: 224663
  chr14:21150255-21150420
  hypo

SEQ ID NO: 245408 - DNA, 180 bp, Homo sapiens; identical to SEQ ID NO: 224664
  chr14:21150453-21150633
  hypo

SEQ ID NO: 245409 - DNA, 264 bp, Homo sapiens; identical to SEQ ID NO: 224665
  chr14:21152787-21153051
  hypo

SEQ ID NO: 245410 - DNA, 464 bp, Homo sapiens; identical to SEQ ID NO: 224666
  chr14:21493801-21494265
  hypo

SEQ ID NO: 245411 - DNA, 338 bp, Homo sapiens; identical to SEQ ID NO: 224667
  chr14:21769056-21769394
  hypo

SEQ ID NO: 245412 - DNA, 196 bp, Homo sapiens; identical to SEQ ID NO: 224668
  chr14:23355351-23355547
  hypo

SEQ ID NO: 245413 - DNA, 188 bp, Homo sapiens; identical to SEQ ID NO: 203499
  chr14:23776071-23776259
  hypo

SEQ ID NO: 245414 - DNA, 582 bp, Homo sapiens; identical to SEQ ID NO: 224670
  chr14:23834817-23835399
  hypo

SEQ ID NO: 245415 - DNA, 104 bp, Homo sapiens; identical to SEQ ID NO: 224671
  chr14:24550914-24551018
  hypo

SEQ ID NO: 245416 - DNA, 180 bp, Homo sapiens; identical to SEQ ID NO: 224672
  chr14:29235944-29236124
  hypo

SEQ ID NO: 245417 - DNA, 180 bp, Homo sapiens; identical to SEQ ID NO: 224673
  chr14:29236302-29236482
  hypo

SEQ ID NO: 245418 - DNA, 145 bp, Homo sapiens; identical to SEQ ID NO: 224674
  chr14:29236671-29236816
  hypo

SEQ ID NO: 245419 - DNA, 282 bp, Homo sapiens; identical to SEQ ID NO: 224675
  chr14:30397158-30397440
  hypo

SEQ ID NO: 245420 - DNA, 540 bp, Homo sapiens; identical to SEQ ID NO: 224676
  chr14:33403736-33404276
  hypo

SEQ ID NO: 245421 - DNA, 420 bp, Homo sapiens; identical to SEQ ID NO: 224677
  chr14:36003248-36003668
  hypo

SEQ ID NO: 245422 - DNA, 1140 bp, Homo sapiens; identical to SEQ ID NO: 224678
  chr14:36003716-36004856
  hypo

SEQ ID NO: 245423 - DNA, 180 bp, Homo sapiens; identical to SEQ ID NO: 224679
  chr14:37132679-37132859
  hypo

SEQ ID NO: 245424 - DNA, 229 bp, Homo sapiens; identical to SEQ ID NO: 224680
  chr14:38080395-38080624
  hypo

SEQ ID NO: 245425 - DNA, 180 bp, Homo sapiens; identical to SEQ ID NO: 224681
  chr14:38678039-38678219
  hypo

SEQ ID NO: 245426 - DNA, 213 bp, Homo sapiens; identical to SEQ ID NO: 224682
  chr14:39735565-39735778
  hypo

SEQ ID NO: 245427 - DNA, 105 bp, Homo sapiens; identical to SEQ ID NO: 224683
  chr14:42075355-42075460
  hypo

SEQ ID NO: 245428 - DNA, 600 bp, Homo sapiens; identical to SEQ ID NO: 224684
  chr14:42075695-42076295
  hypo

SEQ ID NO: 245429 - DNA, 116 bp, Homo sapiens; identical to SEQ ID NO: 224685
  chr14:45431367-45431483
  hypo

SEQ ID NO: 245430 - DNA, 574 bp, Homo sapiens; identical to SEQ ID NO: 224686
  chr14:48145028-48145602
  hypo

SEQ ID NO: 245431 - DNA, 258 bp, Homo sapiens; identical to SEQ ID NO: 224687
  chr14:50999540-50999798
  hypo

SEQ ID NO: 245432 - DNA, 300 bp, Homo sapiens; identical to SEQ ID NO: 224688
  chr14:51027699-51027999
  hypo

SEQ ID NO: 245433 - DNA, 600 bp, Homo sapiens; identical to SEQ ID NO: 224689
  chr14:51410479-51411079
  hypo

SEQ ID NO: 245434 - DNA, 1500 bp, Homo sapiens; identical to SEQ ID NO: 224690
  chr14:51560876-51562376
  hypo

SEQ ID NO: 245435 - DNA, 240 bp, Homo sapiens; identical to SEQ ID NO: 224691
  chr14:52118254-52118494
  hypo

SEQ ID NO: 245436 - DNA, 38 bp, Homo sapiens; identical to SEQ ID NO: 224692
  chr14:55032358-55032396
  hypo

SEQ ID NO: 245437 - DNA, 155 bp, Homo sapiens; identical to SEQ ID NO: 224693
  chr14:56047824-56047979
  hypo

SEQ ID NO: 245438 - DNA, 567 bp, Homo sapiens; identical to SEQ ID NO: 224694
  chr14:56585472-56586039
  hypo

SEQ ID NO: 245439 - DNA, 176 bp, Homo sapiens; identical to SEQ ID NO: 224695
  chr14:57265894-57266070
  hypo

SEQ ID NO: 245440 - DNA, 240 bp, Homo sapiens; identical to SEQ ID NO: 224696
  chr14:58862950-58863190
  hypo

SEQ ID NO: 245441 - DNA, 283 bp, Homo sapiens; identical to SEQ ID NO: 224697
  chr14:59932020-59932303
  hypo

SEQ ID NO: 245442 - DNA, 401 bp, Homo sapiens; identical to SEQ ID NO: 224698
  chr14:60097172-60097573
  hypo

SEQ ID NO: 245443 - DNA, 840 bp, Homo sapiens; identical to SEQ ID NO: 224699
  chr14:60385922-60386762
  hypo

SEQ ID NO: 245444 - DNA, 344 bp, Homo sapiens; identical to SEQ ID NO: 224700
  chr14:60973758-60974102
  hypo

SEQ ID NO: 245445 - DNA, 447 bp, Homo sapiens; identical to SEQ ID NO: 224701
  chr14:60981478-60981925
  hypo

SEQ ID NO: 245446 - DNA, 660 bp, Homo sapiens; identical to SEQ ID NO: 224702
  chr14:61123308-61123968
  hypo

SEQ ID NO: 245447 - DNA, 585 bp, Homo sapiens; identical to SEQ ID NO: 224703
  chr14:61124041-61124626
  hypo

SEQ ID NO: 245448 - DNA, 840 bp, Homo sapiens; identical to SEQ ID NO: 224704
  chr14:61747192-61748032
  hypo

SEQ ID NO: 245449 - DNA, 256 bp, Homo sapiens; identical to SEQ ID NO: 224705
  chr14:62105861-62106117
  hypo

SEQ ID NO: 245450 - DNA, 88 bp, Homo sapiens; identical to SEQ ID NO: 224706
  chr14:62161813-62161901
  hypo

SEQ ID NO: 245451 - DNA, 392 bp, Homo sapiens; identical to SEQ ID NO: 224707
  chr14:62162324-62162716
  hypo

SEQ ID NO: 245452 - DNA, 240 bp, Homo sapiens; identical to SEQ ID NO: 224708
  chr14:62162826-62163066
  hypo

SEQ ID NO: 245453 - DNA, 780 bp, Homo sapiens; identical to SEQ ID NO: 224709
  chr14:63512282-63513062
  hypo

SEQ ID NO: 245454 - DNA, 104 bp, Homo sapiens; identical to SEQ ID NO: 224710
  chr14:63513093-63513197
  hypo

SEQ ID NO: 245455 - DNA, 35 bp, Homo sapiens; identical to SEQ ID NO: 224711
  chr14:64182960-64182995
  hypo

SEQ ID NO: 245456 - DNA, 562 bp, Homo sapiens; identical to SEQ ID NO: 224712
  chr14:64760753-64761315
  hypo

SEQ ID NO: 245457 - DNA, 89 bp, Homo sapiens; identical to SEQ ID NO: 224713
  chr14:65006319-65006408
  hypo

SEQ ID NO: 245458 - DNA, 105 bp, Homo sapiens; identical to SEQ ID NO: 224714
  chr14:69259400-69259505
  hypo

SEQ ID NO: 245459 - DNA, 515 bp, Homo sapiens; identical to SEQ ID NO: 224715
  chr14:69444793-69445308
  hypo

SEQ ID NO: 245460 - DNA, 299 bp, Homo sapiens; identical to SEQ ID NO: 203651
  chr14:69445727-69446026
  hypo

SEQ ID NO: 245461 - DNA, 104 bp, Homo sapiens; identical to SEQ ID NO: 203653
  chr14:69618203-69618307
  hypo

SEQ ID NO: 245462 - DNA, 95 bp, Homo sapiens; identical to SEQ ID NO: 203654
  chr14:69658738-69658833
  hypo

SEQ ID NO: 245463 - DNA, 353 bp, Homo sapiens; identical to SEQ ID NO: 224719
  chr14:70041211-70041564
  hypo

SEQ ID NO: 245464 - DNA, 485 bp, Homo sapiens; identical to SEQ ID NO: 224720
  chr14:70346062-70346547
  hypo

SEQ ID NO: 245465 - DNA, 420 bp, Homo sapiens; identical to SEQ ID NO: 224721
  chr14:70654387-70654807
  hypo

SEQ ID NO: 245466 - DNA, 1171 bp, Homo sapiens; identical to SEQ ID NO: 224722
  chr14:70654966-70656137
  hypo

SEQ ID NO: 245467 - DNA, 146 bp, Homo sapiens; identical to SEQ ID NO: 224723
  chr14:70826412-70826558
  hypo

SEQ ID NO: 245468 - DNA, 60 bp, Homo sapiens; identical to SEQ ID NO: 224724
  chr14:71108798-71108858
  hypo

SEQ ID NO: 245469 - DNA, 771 bp, Homo sapiens; identical to SEQ ID NO: 224725
  chr14:73358889-73359660
  hypo

SEQ ID NO: 245470 - DNA, 403 bp, Homo sapiens; identical to SEQ ID NO: 224726
  chr14:73359847-73360250
  hypo

SEQ ID NO: 245471 - DNA, 240 bp, Homo sapiens; identical to SEQ ID NO: 224727
  chr14:73393373-73393613
  hypo

SEQ ID NO: 245472 - DNA, 417 bp, Homo sapiens; identical to SEQ ID NO: 224728
  chr14:74100395-74100812
  hypo

SEQ ID NO: 245473 - DNA, 137 bp, Homo sapiens; identical to SEQ ID NO: 224729
  chr14:74111442-74111579
  hypo

SEQ ID NO: 245474 - DNA, 240 bp, Homo sapiens; identical to SEQ ID NO: 224730
  chr14:74180521-74180761
  hypo

SEQ ID NO: 245475 - DNA, 140 bp, Homo sapiens; identical to SEQ ID NO: 224731
  chr14:74253324-74253464
  hypo

SEQ ID NO: 245476 - DNA, 1320 bp, Homo sapiens; identical to SEQ ID NO: 224732
  chr14:74706588-74707908
  hypo

SEQ ID NO: 245477 - DNA, 180 bp, Homo sapiens; identical to SEQ ID NO: 224733
  chr14:74707946-74708126
  hypo

SEQ ID NO: 245478 - DNA, 180 bp, Homo sapiens; identical to SEQ ID NO: 224734
  chr14:74708226-74708406
  hypo

SEQ ID NO: 245479 - DNA, 196 bp, Homo sapiens; identical to SEQ ID NO: 203675
  chr14:75743668-75743864
  hypo

SEQ ID NO: 245480 - DNA, 165 bp, Homo sapiens; identical to SEQ ID NO: 203676
  chr14:75743897-75744062
  hypo

SEQ ID NO: 245481 - DNA, 300 bp, Homo sapiens; identical to SEQ ID NO: 224737
  chr14:76605098-76605398
  hypo

SEQ ID NO: 245482 - DNA, 227 bp, Homo sapiens; identical to SEQ ID NO: 224738
  chr14:77493532-77493759
  hypo

SEQ ID NO: 245483 - DNA, 826 bp, Homo sapiens; identical to SEQ ID NO: 224739
  chr14:77591041-77591867
  hypo

SEQ ID NO: 245484 - DNA, 670 bp, Homo sapiens; identical to SEQ ID NO: 224740
  chr14:77605688-77606358
  hypo

SEQ ID NO: 245485 - DNA, 872 bp, Homo sapiens; identical to SEQ ID NO: 224741
  chr14:77736779-77737651
  hypo

SEQ ID NO: 245486 - DNA, 1070 bp, Homo sapiens; identical to SEQ ID NO: 224742
  chr14:77964582-77965652
  hypo

SEQ ID NO: 245487 - DNA, 752 bp, Homo sapiens; identical to SEQ ID NO: 224743
  chr14:88458957-88459709
  hypo

SEQ ID NO: 245488 - DNA, 1118 bp, Homo sapiens; identical to SEQ ID NO: 224744
  chr14:88789388-88790506
  hypo

SEQ ID NO: 245489 - DNA, 503 bp, Homo sapiens; identical to SEQ ID NO: 224745
  chr14:89020910-89021413
  hypo

SEQ ID NO: 245490 - DNA, 325 bp, Homo sapiens; identical to SEQ ID NO: 224746
  chr14:89290890-89291215
  hypo

SEQ ID NO: 245491 - DNA, 104 bp, Homo sapiens; identical to SEQ ID NO: 224747
  chr14:89506995-89507099
  hypo

SEQ ID NO: 245492 - DNA, 574 bp, Homo sapiens; identical to SEQ ID NO: 224748
  chr14:90085338-90085912
  hypo

SEQ ID NO: 245493 - DNA, 182 bp, Homo sapiens; identical to SEQ ID NO: 224749
  chr14:90167708-90167890
  hypo

SEQ ID NO: 245494 - DNA, 578 bp, Homo sapiens; identical to SEQ ID NO: 224750
  chr14:90420751-90421329
  hypo

SEQ ID NO: 245495 - DNA, 660 bp, Homo sapiens; identical to SEQ ID NO: 224751
  chr14:90422122-90422782
  hypo

SEQ ID NO: 245496 - DNA, 300 bp, Homo sapiens; identical to SEQ ID NO: 224752
  chr14:90526942-90527242
  hypo

SEQ ID NO: 245497 - DNA, 600 bp, Homo sapiens; identical to SEQ ID NO: 224753
  chr14:90527422-90528022
  hypo

SEQ ID NO: 245498 - DNA, 360 bp, Homo sapiens; identical to SEQ ID NO: 224754
  chr14:90528121-90528481
  hypo

SEQ ID NO: 245499 - DNA, 360 bp, Homo sapiens; identical to SEQ ID NO: 224755
  chr14:90528549-90528909
  hypo

SEQ ID NO: 245500 - DNA, 300 bp, Homo sapiens; identical to SEQ ID NO: 224756
  chr14:90849732-90850032
  hypo

SEQ ID NO: 245501 - DNA, 288 bp, Homo sapiens; identical to SEQ ID NO: 224757
  chr14:91755343-91755631
  hypo

SEQ ID NO: 245502 - DNA, 514 bp, Homo sapiens; identical to SEQ ID NO: 224758
  chr14:91883365-91883879
  hypo

SEQ ID NO: 245503 - DNA, 144 bp, Homo sapiens; identical to SEQ ID NO: 203720
  chr14:91976436-91976580
  hypo

SEQ ID NO: 245504 - DNA, 960 bp, Homo sapiens; identical to SEQ ID NO: 224760
  chr14:92789418-92790378
  hypo

SEQ ID NO: 245505 - DNA, 1291 bp, Homo sapiens; identical to SEQ ID NO: 224761
  chr14:92979677-92980968
  hypo

SEQ ID NO: 245506 - DNA, 360 bp, Homo sapiens; identical to SEQ ID NO: 224762
  chr14:93389462-93389822
  hypo

SEQ ID NO: 245507 - DNA, 104 bp, Homo sapiens; identical to SEQ ID NO: 224763
  chr14:93389943-93390047
  hypo

SEQ ID NO: 245508 - DNA, 250 bp, Homo sapiens; identical to SEQ ID NO: 224764
  chr14:94405983-94406233
  hypo

SEQ ID NO: 245509 - DNA, 71 bp, Homo sapiens; identical to SEQ ID NO: 203730
  chr14:94640376-94640447
  hypo

SEQ ID NO: 245510 - DNA, 36 bp, Homo sapiens; identical to SEQ ID NO: 203734
  chr14:95864478-95864514
  hypo

SEQ ID NO: 245511 - DNA, 47 bp, Homo sapiens; identical to SEQ ID NO: 203735
  chr14:95932542-95932589
  hypo

SEQ ID NO: 245512 - DNA, 230 bp, Homo sapiens; identical to SEQ ID NO: 224768
  chr14:96152751-96152981
  hypo

SEQ ID NO: 245513 - DNA, 339 bp, Homo sapiens; identical to SEQ ID NO: 224769
  chr14:96342210-96342549
  hypo

SEQ ID NO: 245514 - DNA, 720 bp, Homo sapiens; identical to SEQ ID NO: 224770
  chr14:96342575-96343295
  hypo

SEQ ID NO: 245515 - DNA, 480 bp, Homo sapiens; identical to SEQ ID NO: 224771
  chr14:96505612-96506092
  hypo

SEQ ID NO: 245516 - DNA, 300 bp, Homo sapiens; identical to SEQ ID NO: 224772
  chr14:96506199-96506499
  hypo

SEQ ID NO: 245517 - DNA, 524 bp, Homo sapiens; identical to SEQ ID NO: 224773
  chr14:97685492-97686016
  hypo

SEQ ID NO: 245518 - DNA, 240 bp, Homo sapiens; identical to SEQ ID NO: 224774
  chr14:100070301-100070541
  hypo

SEQ ID NO: 245519 - DNA, 420 bp, Homo sapiens; identical to SEQ ID NO: 224775
  chr14:100070591-100071011
  hypo

SEQ ID NO: 245520 - DNA, 240 bp, Homo sapiens; identical to SEQ ID NO: 224776
  chr14:100071337-100071577
  hypo

SEQ ID NO: 245521 - DNA, 697 bp, Homo sapiens; identical to SEQ ID NO: 224777
  chr14:100149732-100150429
  hypo

SEQ ID NO: 245522 - DNA, 342 bp, Homo sapiens; identical to SEQ ID NO: 224778
  chr14:100150505-100150847
  hypo

SEQ ID NO: 245523 - DNA, 1500 bp, Homo sapiens; identical to SEQ ID NO: 224779
  chr14:100437460-100438960
  hypo

SEQ ID NO: 245524 - DNA, 185 bp, Homo sapiens; identical to SEQ ID NO: 224780
  chr14:100613202-100613387
  hypo

SEQ ID NO: 245525 - DNA, 863 bp, Homo sapiens; identical to SEQ ID NO: 224781
  chr14:100625496-100626359
  hypo

SEQ ID NO: 245526 - DNA, 206 bp, Homo sapiens; identical to SEQ ID NO: 224782
  chr14:100751381-100751587
  hypo

SEQ ID NO: 245527 - DNA, 300 bp, Homo sapiens; identical to SEQ ID NO: 224783
  chr14:100771916-100772216
  hypo

SEQ ID NO: 245528 - DNA, 370 bp, Homo sapiens; identical to SEQ ID NO: 203757
  chr14:100773262-100773632
  hypo

SEQ ID NO: 245529 - DNA, 104 bp, Homo sapiens; identical to SEQ ID NO: 224785
  chr14:101192406-101192510
  hypo

SEQ ID NO: 245530 - DNA, 273 bp, Homo sapiens; identical to SEQ ID NO: 224786
  chr14:101192969-101193242
  hypo

SEQ ID NO: 245531 - DNA, 261 bp, Homo sapiens; identical to SEQ ID NO: 224787
  chr14:102975797-102976058
  hypo

SEQ ID NO: 245532 - DNA, 127 bp, Homo sapiens; identical to SEQ ID NO: 224788
  chr14:103242436-103242563
  hypo

SEQ ID NO: 245533 - DNA, 180 bp, Homo sapiens; identical to SEQ ID NO: 224789
  chr14:103394639-103394819
  hypo

SEQ ID NO: 245534 - DNA, 420 bp, Homo sapiens; identical to SEQ ID NO: 224790
  chr14:103394908-103395328
  hypo

SEQ ID NO: 245535 - DNA, 160 bp, Homo sapiens; identical to SEQ ID NO: 203769
  chr14:103430222-103430382
  hypo

SEQ ID NO: 245536 - DNA, 104 bp, Homo sapiens; identical to SEQ ID NO: 224792
  chr14:103430529-103430633
  hypo

SEQ ID NO: 245537 - DNA, 1440 bp, Homo sapiens; identical to SEQ ID NO: 224793
  chr14:103523076-103524516
  hypo

SEQ ID NO: 245538 - DNA, 77 bp, Homo sapiens; identical to SEQ ID NO: 203771
  chr14:103541957-103542034
  hypo

SEQ ID NO: 245539 - DNA, 389 bp, Homo sapiens; identical to SEQ ID NO: 224795
  chr14:103593755-103594144
  hypo

SEQ ID NO: 245540 - DNA, 138 bp, Homo sapiens; identical to SEQ ID NO: 224796
  chr14:103988425-103988563
  hypo

SEQ ID NO: 245541 - DNA, 1119 bp, Homo sapiens; identical to SEQ ID NO: 224797
  chr14:103988600-103989719
  hypo

SEQ ID NO: 245542 - DNA, 1331 bp, Homo sapiens; identical to SEQ ID NO: 224798
  chr14:104604264-104605595
  hypo

SEQ ID NO: 245543 - DNA, 237 bp, Homo sapiens; identical to SEQ ID NO: 224799
  chr14:105189936-105190173
  hypo

SEQ ID NO: 245544 - DNA, 314 bp, Homo sapiens; identical to SEQ ID NO: 224800
  chr14:105195591-105195905
  hypo

SEQ ID NO: 245545 - DNA, 172 bp, Homo sapiens; identical to SEQ ID NO: 224801
  chr14:105196124-105196296
  hypo

SEQ ID NO: 245546 - DNA, 87 bp, Homo sapiens; identical to SEQ ID NO: 224802
  chr14:105196474-105196561
  hypo

SEQ ID NO: 245547 - DNA, 180 bp, Homo sapiens; identical to SEQ ID NO: 224803
  chr14:105269059-105269239
  hypo

SEQ ID NO: 245548 - DNA, 743 bp, Homo sapiens; identical to SEQ ID NO: 224804
  chr14:105331155-105331898
  hypo

SEQ ID NO: 245549 - DNA, 86 bp, Homo sapiens; identical to SEQ ID NO: 224805
  chr14:105511596-105511682
  hypo

SEQ ID NO: 245550 - DNA, 420 bp, Homo sapiens; identical to SEQ ID NO: 224806
  chr14:105511975-105512395
  hypo

SEQ ID NO: 245551 - DNA, 144 bp, Homo sapiens; identical to SEQ ID NO: 224807
  chr14:105647609-105647753
  hypo

SEQ ID NO: 245552 - DNA, 57 bp, Homo sapiens; identical to SEQ ID NO: 224808
  chr14:105714400-105714457
  hypo

SEQ ID NO: 245553 - DNA, 52 bp, Homo sapiens; identical to SEQ ID NO: 224809
  chr14:105714486-105714538
  hypo

SEQ ID NO: 245554 - DNA, 105 bp, Homo sapiens; identical to SEQ ID NO: 224810
  chr14:105781805-105781910
  hypo

SEQ ID NO: 245555 - DNA, 202 bp, Homo sapiens; identical to SEQ ID NO: 224811
  chr15:20478123-20478325
  hypo

SEQ ID NO: 245556 - DNA, 509 bp, Homo sapiens; identical to SEQ ID NO: 224812
  chr15:22892004-22892513
  hypo

SEQ ID NO: 245557 - DNA, 932 bp, Homo sapiens; identical to SEQ ID NO: 224813
  chr15:29130656-29131588
  hypo

SEQ ID NO: 245558 - DNA, 346 bp, Homo sapiens; identical to SEQ ID NO: 224814
  chr15:29395803-29396149
  hypo

SEQ ID NO: 245559 - DNA, 180 bp, Homo sapiens; identical to SEQ ID NO: 224815
  chr15:30113792-30113972
  hypo

SEQ ID NO: 245560 - DNA, 360 bp, Homo sapiens; identical to SEQ ID NO: 224816
  chr15:30114028-30114388
  hypo

SEQ ID NO: 245561 - DNA, 300 bp, Homo sapiens; identical to SEQ ID NO: 224817
  chr15:30114565-30114865
  hypo

SEQ ID NO: 245562 - DNA, 161 bp, Homo sapiens; identical to SEQ ID NO: 224818
  chr15:31508793-31508954
  hypo

SEQ ID NO: 245563 - DNA, 276 bp, Homo sapiens; identical to SEQ ID NO: 224819
  chr15:31620729-31621005
  hypo

SEQ ID NO: 245564 - DNA, 180 bp, Homo sapiens; identical to SEQ ID NO: 224820
  chr15:31774864-31775044
  hypo

SEQ ID NO: 245565 - DNA, 540 bp, Homo sapiens; identical to SEQ ID NO: 224821
  chr15:31775362-31775902
  hypo

SEQ ID NO: 245566 - DNA, 1082 bp, Homo sapiens; identical to SEQ ID NO: 224822
  chr15:32162216-32163298
  hypo

SEQ ID NO: 245567 - DNA, 180 bp, Homo sapiens; identical to SEQ ID NO: 224823
  chr15:33010322-33010502
  hypo

SEQ ID NO: 245568 - DNA, 1286 bp, Homo sapiens; identical to SEQ ID NO: 224824
  chr15:33602692-33603978
  hypo

SEQ ID NO: 245569 - DNA, 891 bp, Homo sapiens; identical to SEQ ID NO: 224825
  chr15:34728767-34729658
  hypo

SEQ ID NO: 245570 - DNA, 105 bp, Homo sapiens; identical to SEQ ID NO: 224826
  chr15:34729901-34730006
  hypo

SEQ ID NO: 245571 - DNA, 685 bp, Homo sapiens; identical to SEQ ID NO: 224827
  chr15:34786529-34787214
  hypo

SEQ ID NO: 245572 - DNA, 105 bp, Homo sapiens; identical to SEQ ID NO: 224828
  chr15:35046505-35046610
  hypo

SEQ ID NO: 245573 - DNA, 660 bp, Homo sapiens; identical to SEQ ID NO: 224829
  chr15:35046843-35047503
  hypo

SEQ ID NO: 245574 - DNA, 679 bp, Homo sapiens; identical to SEQ ID NO: 224830
  chr15:37393563-37394242
  hypo

SEQ ID NO: 245575 - DNA, 135 bp, Homo sapiens; identical to SEQ ID NO: 203833
  chr15:38365202-38365337
  hypo

SEQ ID NO: 245576 - DNA, 105 bp, Homo sapiens; identical to SEQ ID NO: 224832
  chr15:38543129-38543234
  hypo

SEQ ID NO: 245577 - DNA, 136 bp, Homo sapiens; identical to SEQ ID NO: 224833
  chr15:38857268-38857404
  hypo

SEQ ID NO: 245578 - DNA, 45 bp, Homo sapiens; identical to SEQ ID NO: 224834
  chr15:39958298-39958343
  hypo

SEQ ID NO: 245579 - DNA, 131 bp, Homo sapiens; identical to SEQ ID NO: 224835
  chr15:40074971-40075102
  hypo

SEQ ID NO: 245580 - DNA, 66 bp, Homo sapiens; identical to SEQ ID NO: 224836
  chr15:40094250-40094316
  hypo

SEQ ID NO: 245581 - DNA, 36 bp, Homo sapiens; identical to SEQ ID NO: 203836
  chr15:40559555-40559591
  hypo

SEQ ID NO: 245582 - DNA, 376 bp, Homo sapiens; identical to SEQ ID NO: 224838
  chr15:40575342-40575718
  hypo

SEQ ID NO: 245583 - DNA, 56 bp, Homo sapiens; identical to SEQ ID NO: 203838
  chr15:41046993-41047049
  hypo

SEQ ID NO: 245584 - DNA, 156 bp, Homo sapiens; identical to SEQ ID NO: 224840
  chr15:41136285-41136441
  hypo

SEQ ID NO: 245585 - DNA, 489 bp, Homo sapiens; identical to SEQ ID NO: 224841
  chr15:41136702-41137191
  hypo

SEQ ID NO: 245586 - DNA, 200 bp, Homo sapiens; identical to SEQ ID NO: 224842
  chr15:42112223-42112423
  hypo

SEQ ID NO: 245587 - DNA, 157 bp, Homo sapiens; identical to SEQ ID NO: 224843
  chr15:44038552-44038709
  hypo

SEQ ID NO: 245588 - DNA, 877 bp, Homo sapiens; identical to SEQ ID NO: 224844
  chr15:44486764-44487641
  hypo

SEQ ID NO: 245589 - DNA, 347 bp, Homo sapiens; identical to SEQ ID NO: 224845
  chr15:45479541-45479888
  hypo

SEQ ID NO: 245590 - DNA, 839 bp, Homo sapiens; identical to SEQ ID NO: 224846
  chr15:45670210-45671049
  hypo

SEQ ID NO: 245591 - DNA, 337 bp, Homo sapiens; identical to SEQ ID NO: 224847
  chr15:45722622-45722959
  hypo

SEQ ID NO: 245592 - DNA, 1958 bp, Homo sapiens; identical to SEQ ID NO: 224848
  chr15:48936639-48938597
  hypo

SEQ ID NO: 245593 - DNA, 366 bp, Homo sapiens; identical to SEQ ID NO: 224849
  chr15:50474766-50475132
  hypo

SEQ ID NO: 245594 - DNA, 438 bp, Homo sapiens; identical to SEQ ID NO: 224850
  chr15:51633890-51634328
  hypo

SEQ ID NO: 245595 - DNA, 480 bp, Homo sapiens; identical to SEQ ID NO: 224851
  chr15:52404392-52404872
  hypo

SEQ ID NO: 245596 - DNA, 616 bp, Homo sapiens; identical to SEQ ID NO: 224852
  chr15:52587633-52588249
  hypo

SEQ ID NO: 245597 - DNA, 300 bp, Homo sapiens; identical to SEQ ID NO: 224853
  chr15:52820625-52820925
  hypo

SEQ ID NO: 245598 - DNA, 89 bp, Homo sapiens; identical to SEQ ID NO: 203885
  chr15:55699900-55699989
  hypo

SEQ ID NO: 245599 - DNA, 753 bp, Homo sapiens; identical to SEQ ID NO: 224855
  chr15:55880357-55881110
  hypo

SEQ ID NO: 245600 - DNA, 510 bp, Homo sapiens; identical to SEQ ID NO: 224856
  chr15:56034400-56034910
  hypo

SEQ ID NO: 245601 - DNA, 508 bp, Homo sapiens; identical to SEQ ID NO: 224857
  chr15:56035251-56035759
  hypo

SEQ ID NO: 245602 - DNA, 504 bp, Homo sapiens; identical to SEQ ID NO: 203886
  chr15:56285864-56286368
  hypo

SEQ ID NO: 245603 - DNA, 340 bp, Homo sapiens; identical to SEQ ID NO: 224859
  chr15:57210212-57210552
  hypo

SEQ ID NO: 245604 - DNA, 210 bp, Homo sapiens; identical to SEQ ID NO: 224860
  chr15:57598970-57599180
  hypo

SEQ ID NO: 245605 - DNA, 960 bp, Homo sapiens; identical to SEQ ID NO: 224861
  chr15:58357315-58358275
  hypo

SEQ ID NO: 245606 - DNA, 132 bp, Homo sapiens; identical to SEQ ID NO: 203894
  chr15:59663973-59664105
  hypo

SEQ ID NO: 245607 - DNA, 342 bp, Homo sapiens; identical to SEQ ID NO: 224863
  chr15:59664435-59664777
  hypo

SEQ ID NO: 245608 - DNA, 144 bp, Homo sapiens; identical to SEQ ID NO: 224864
  chr15:60288754-60288898
  hypo

SEQ ID NO: 245609 - DNA, 360 bp, Homo sapiens; identical to SEQ ID NO: 224865
  chr15:60289247-60289607
  hypo

SEQ ID NO: 245610 - DNA, 78 bp, Homo sapiens; identical to SEQ ID NO: 203901
  chr15:60690265-60690343
  hypo

SEQ ID NO: 245611 - DNA, 356 bp, Homo sapiens; identical to SEQ ID NO: 224867
  chr15:60884997-60885353
  hypo

SEQ ID NO: 245612 - DNA, 1259 bp, Homo sapiens; identical to SEQ ID NO: 224868
  chr15:62456139-62457398
  hypo

SEQ ID NO: 245613 - DNA, 105 bp, Homo sapiens; identical to SEQ ID NO: 224869
  chr15:63130456-63130561
  hypo

SEQ ID NO: 245614 - DNA, 360 bp, Homo sapiens; identical to SEQ ID NO: 224870
  chr15:63795799-63796159
  hypo

SEQ ID NO: 245615 - DNA, 105 bp, Homo sapiens; identical to SEQ ID NO: 224871
  chr15:64454728-64454833
  hypo

SEQ ID NO: 245616 - DNA, 308 bp, Homo sapiens; identical to SEQ ID NO: 224872
  chr15:65203967-65204275
  hypo

SEQ ID NO: 245617 - DNA, 212 bp, Homo sapiens; identical to SEQ ID NO: 224873
  chr15:65360173-65360385
  hypo

SEQ ID NO: 245618 - DNA, 159 bp, Homo sapiens; identical to SEQ ID NO: 224874
  chr15:65669256-65669415
  hypo

SEQ ID NO: 245619 - DNA, 360 bp, Homo sapiens; identical to SEQ ID NO: 224875
  chr15:65669472-65669832
  hypo

SEQ ID NO: 245620 - DNA, 180 bp, Homo sapiens; identical to SEQ ID NO: 224876
  chr15:65669981-65670161
  hypo

SEQ ID NO: 245621 - DNA, 180 bp, Homo sapiens; identical to SEQ ID NO: 224877
  chr15:65715041-65715221
  hypo

SEQ ID NO: 245622 - DNA, 221 bp, Homo sapiens; identical to SEQ ID NO: 224878
  chr15:65715363-65715584
  hypo

SEQ ID NO: 245623 - DNA, 105 bp, Homo sapiens; identical to SEQ ID NO: 224879
  chr15:66994356-66994461
  hypo

SEQ ID NO: 245624 - DNA, 480 bp, Homo sapiens; identical to SEQ ID NO: 224880
  chr15:66995500-66995980
  hypo

SEQ ID NO: 245625 - DNA, 807 bp, Homo sapiens; identical to SEQ ID NO: 224881
  chr15:68115496-68116303
  hypo

SEQ ID NO: 245626 - DNA, 186 bp, Homo sapiens; identical to SEQ ID NO: 224882
  chr15:68116333-68116519
  hypo

SEQ ID NO: 245627 - DNA, 71 bp, Homo sapiens; identical to SEQ ID NO: 224883
  chr15:68177208-68177279
  hypo

SEQ ID NO: 245628 - DNA, 70 bp, Homo sapiens; identical to SEQ ID NO: 224884
  chr15:70388126-70388196
  hypo

SEQ ID NO: 245629 - DNA, 105 bp, Homo sapiens; identical to SEQ ID NO: 224885
  chr15:70388412-70388517
  hypo

SEQ ID NO: 245630 - DNA, 76 bp, Homo sapiens; identical to SEQ ID NO: 203948
  chr15:70391279-70391355
  hypo

SEQ ID NO: 245631 - DNA, 452 bp, Homo sapiens; identical to SEQ ID NO: 224887
  chr15:71184274-71184726
  hypo

SEQ ID NO: 245632 - DNA, 1047 bp, Homo sapiens; identical to SEQ ID NO: 224888
  chr15:71407571-71408618
  hypo

SEQ ID NO: 245633 - DNA, 180 bp, Homo sapiens; identical to SEQ ID NO: 224889
  chr15:72523039-72523219
  hypo

SEQ ID NO: 245634 - DNA, 505 bp, Homo sapiens; identical to SEQ ID NO: 224890
  chr15:72564620-72565125
  hypo

SEQ ID NO: 245635 - DNA, 104 bp, Homo sapiens; identical to SEQ ID NO: 224891
  chr15:72565162-72565266
  hypo

SEQ ID NO: 245636 - DNA, 164 bp, Homo sapiens; identical to SEQ ID NO: 224892
  chr15:73344008-73344172
  hypo

SEQ ID NO: 245637 - DNA, 992 bp, Homo sapiens; identical to SEQ ID NO: 224893
  chr15:74044728-74045720
  hypo

SEQ ID NO: 245638 - DNA, 171 bp, Homo sapiens; identical to SEQ ID NO: 224894
  chr15:74426591-74426762
  hypo

SEQ ID NO: 245639 - DNA, 678 bp, Homo sapiens; identical to SEQ ID NO: 224895
  chr15:74725114-74725792
  hypo

SEQ ID NO: 245640 - DNA, 105 bp, Homo sapiens; identical to SEQ ID NO: 224896
  chr15:74912313-74912418
  hypo

SEQ ID NO: 245641 - DNA, 541 bp, Homo sapiens; identical to SEQ ID NO: 224897
  chr15:75248549-75249090
  hypo

SEQ ID NO: 245642 - DNA, 319 bp, Homo sapiens; identical to SEQ ID NO: 224898
  chr15:75640491-75640810
  hypo

SEQ ID NO: 245643 - DNA, 104 bp, Homo sapiens; identical to SEQ ID NO: 224899
  chr15:75640871-75640975
  hypo

SEQ ID NO: 245644 - DNA, 219 bp, Homo sapiens; identical to SEQ ID NO: 224900
  chr15:75976176-75976395
  hypo

SEQ ID NO: 245645 - DNA, 313 bp, Homo sapiens; identical to SEQ ID NO: 224901
  chr15:78110977-78111290
  hypo

SEQ ID NO: 245646 - DNA, 680 bp, Homo sapiens; identical to SEQ ID NO: 224902
  chr15:78111499-78112179
  hypo

SEQ ID NO: 245647 - DNA, 1020 bp, Homo sapiens; identical to SEQ ID NO: 224903
  chr15:78912573-78913593
  hypo

SEQ ID NO: 245648 - DNA, 101 bp, Homo sapiens; identical to SEQ ID NO: 203989
  chr15:79237308-79237409
  hypo

SEQ ID NO: 245649 - DNA, 1520 bp, Homo sapiens; identical to SEQ ID NO: 224905
  chr15:79381728-79383248
  hypo

SEQ ID NO: 245650 - DNA, 1342 bp, Homo sapiens; identical to SEQ ID NO: 224906
  chr15:79723976-79725318
  hypo

SEQ ID NO: 245651 - DNA, 984 bp, Homo sapiens; identical to SEQ ID NO: 224907
  chr15:80215560-80216544
  hypo

SEQ ID NO: 245652 - DNA, 105 bp, Homo sapiens; identical to SEQ ID NO: 224908
  chr15:81294107-81294212
  hypo

SEQ ID NO: 245653 - DNA, 533 bp, Homo sapiens; identical to SEQ ID NO: 224909
  chr15:82339664-82340197
  hypo

SEQ ID NO: 245654 - DNA, 1018 bp, Homo sapiens; identical to SEQ ID NO: 224910
  chr15:83316057-83317075
  hypo

SEQ ID NO: 245655 - DNA, 180 bp, Homo sapiens; identical to SEQ ID NO: 224911
  chr15:83377955-83378135
  hypo

SEQ ID NO: 245656 - DNA, 540 bp, Homo sapiens; identical to SEQ ID NO: 224912
  chr15:83378181-83378721
  hypo

SEQ ID NO: 245657 - DNA, 300 bp, Homo sapiens; identical to SEQ ID NO: 224913
  chr15:83654649-83654949
  hypo

SEQ ID NO: 245658 - DNA, 91 bp, Homo sapiens; identical to SEQ ID NO: 224914
  chr15:83655945-83656036
  hypo

SEQ ID NO: 245659 - DNA, 134 bp, Homo sapiens; identical to SEQ ID NO: 224915
  chr15:83680651-83680785
  hypo

SEQ ID NO: 245660 - DNA, 1026 bp, Homo sapiens; identical to SEQ ID NO: 224916
  chr15:83775916-83776942
  hypo

SEQ ID NO: 245661 - DNA, 420 bp, Homo sapiens; identical to SEQ ID NO: 224917
  chr15:83953566-83953986
  hypo

SEQ ID NO: 245662 - DNA, 156 bp, Homo sapiens; identical to SEQ ID NO: 224918
  chr15:84034342-84034498
  hypo

SEQ ID NO: 245663 - DNA, 180 bp, Homo sapiens; identical to SEQ ID NO: 224919
  chr15:84323185-84323365
  hypo

SEQ ID NO: 245664 - DNA, 180 bp, Homo sapiens; identical to SEQ ID NO: 224920
  chr15:84323447-84323627
  hypo

SEQ ID NO: 245665 - DNA, 503 bp, Homo sapiens; identical to SEQ ID NO: 224921
  chr15:84748573-84749076
  hypo

SEQ ID NO: 245666 - DNA, 328 bp, Homo sapiens; identical to SEQ ID NO: 224922
  chr15:85143661-85143989
  hypo

SEQ ID NO: 245667 - DNA, 111 bp, Homo sapiens; identical to SEQ ID NO: 224923
  chr15:85200405-85200516
  hypo

SEQ ID NO: 245668 - DNA, 105 bp, Homo sapiens; identical to SEQ ID NO: 224924
  chr15:85258869-85258974
  hypo

SEQ ID NO: 245669 - DNA, 338 bp, Homo sapiens; identical to SEQ ID NO: 224925
  chr15:85525136-85525474
  hypo

SEQ ID NO: 245670 - DNA, 180 bp, Homo sapiens; identical to SEQ ID NO: 224926
  chr15:88798937-88799117
  hypo

SEQ ID NO: 245671 - DNA, 660 bp, Homo sapiens; identical to SEQ ID NO: 224927
  chr15:88799448-88800108
  hypo

SEQ ID NO: 245672 - DNA, 420 bp, Homo sapiens; identical to SEQ ID NO: 224928
  chr15:88800110-88800530
  hypo

SEQ ID NO: 245673 - DNA, 107 bp, Homo sapiens; identical to SEQ ID NO: 224929
  chr15:89248382-89248489
  hypo

SEQ ID NO: 245674 - DNA, 209 bp, Homo sapiens; identical to SEQ ID NO: 224930
  chr15:89248727-89248936
  hypo

SEQ ID NO: 245675 - DNA, 480 bp, Homo sapiens; identical to SEQ ID NO: 224931
  chr15:89346119-89346599
  hypo

SEQ ID NO: 245676 - DNA, 540 bp, Homo sapiens; identical to SEQ ID NO: 224932
  chr15:89346676-89347216
  hypo

SEQ ID NO: 245677 - DNA, 709 bp, Homo sapiens; identical to SEQ ID NO: 224933
  chr15:89905478-89906187
  hypo

SEQ ID NO: 245678 - DNA, 539 bp, Homo sapiens; identical to SEQ ID NO: 224934
  chr15:90455670-90456209
  hypo

SEQ ID NO: 245679 - DNA, 68 bp, Homo sapiens; identical to SEQ ID NO: 204032
  chr15:90628227-90628295
  hypo

SEQ ID NO: 245680 - DNA, 369 bp, Homo sapiens; identical to SEQ ID NO: 224936
  chr15:90631580-90631949
  hypo

SEQ ID NO: 245681 - DNA, 81 bp, Homo sapiens; identical to SEQ ID NO: 204034
  chr15:90634777-90634858
  hypo

SEQ ID NO: 245682 - DNA, 157 bp, Homo sapiens; identical to SEQ ID NO: 224938
  chr15:90792653-90792810
  hypo

SEQ ID NO: 245683 - DNA, 89 bp, Homo sapiens; identical to SEQ ID NO: 224939
  chr15:90891918-90892007
  hypo

SEQ ID NO: 245684 - DNA, 72 bp, Homo sapiens; identical to SEQ ID NO: 204036
  chr15:91414358-91414430
  hypo

SEQ ID NO: 245685 - DNA, 718 bp, Homo sapiens; identical to SEQ ID NO: 224941
  chr15:91427348-91428066
  hypo

SEQ ID NO: 245686 - DNA, 376 bp, Homo sapiens; identical to SEQ ID NO: 224942
  chr15:92459274-92459650
  hypo

SEQ ID NO: 245687 - DNA, 180 bp, Homo sapiens; identical to SEQ ID NO: 224943
  chr15:92936819-92936999
  hypo

SEQ ID NO: 245688 - DNA, 540 bp, Homo sapiens; identical to SEQ ID NO: 224944
  chr15:92937062-92937602
  hypo

SEQ ID NO: 245689 - DNA, 720 bp, Homo sapiens; identical to SEQ ID NO: 224945
  chr15:92937628-92938348
  hypo

SEQ ID NO: 245690 - DNA, 1036 bp, Homo sapiens; identical to SEQ ID NO: 224946
  chr15:94774274-94775310
  hypo

SEQ ID NO: 245691 - DNA, 1057 bp, Homo sapiens; identical to SEQ ID NO: 224947
  chr15:96873421-96874478
  hypo

SEQ ID NO: 245692 - DNA, 240 bp, Homo sapiens; identical to SEQ ID NO: 224948
  chr15:98503757-98503997
  hypo

SEQ ID NO: 245693 - DNA, 282 bp, Homo sapiens; identical to SEQ ID NO: 224949
  chr15:98836145-98836427
  hypo

SEQ ID NO: 245694 - DNA, 360 bp, Homo sapiens; identical to SEQ ID NO: 224950
  chr15:98971537-98971897
  hypo

SEQ ID NO: 245695 - DNA, 627 bp, Homo sapiens; identical to SEQ ID NO: 224951
  chr15:99191331-99191958
  hypo

SEQ ID NO: 245696 - DNA, 570 bp, Homo sapiens; identical to SEQ ID NO: 224952
  chr15:99192162-99192732
  hypo

SEQ ID NO: 245697 - DNA, 600 bp, Homo sapiens; identical to SEQ ID NO: 224953
  chr15:99192836-99193436
  hypo

SEQ ID NO: 245698 - DNA, 42 bp, Homo sapiens; identical to SEQ ID NO: 204068
  chr15:100273862-100273904
  hypo

SEQ ID NO: 245699 - DNA, 48 bp, Homo sapiens; identical to SEQ ID NO: 224955
  chr15:100273946-100273994
  hypo

SEQ ID NO: 245700 - DNA, 1281 bp, Homo sapiens; identical to SEQ ID NO: 224956
  chr15:100881285-100882566
  hypo

SEQ ID NO: 245701 - DNA, 180 bp, Homo sapiens; identical to SEQ ID NO: 224957
  chr15:101458490-101458670
  hypo

SEQ ID NO: 245702 - DNA, 1225 bp, Homo sapiens; identical to SEQ ID NO: 224958
  chr15:101459065-101460290
  hypo

SEQ ID NO: 245703 - DNA, 154 bp, Homo sapiens; identical to SEQ ID NO: 224959
  chr15:101791012-101791166
  hypo

SEQ ID NO: 245704 - DNA, 246 bp, Homo sapiens; identical to SEQ ID NO: 224960
  chr15:101835610-101835856
  hypo

SEQ ID NO: 245705 - DNA, 470 bp, Homo sapiens; identical to SEQ ID NO: 224961
  chr16:204416-204886
  hypo

SEQ ID NO: 245706 - DNA, 360 bp, Homo sapiens; identical to SEQ ID NO: 224962
  chr16:215352-215712
  hypo

SEQ ID NO: 245707 - DNA, 660 bp, Homo sapiens; identical to SEQ ID NO: 224963
  chr16:215863-216523
  hypo

SEQ ID NO: 245708 - DNA, 780 bp, Homo sapiens; identical to SEQ ID NO: 224964
  chr16:230502-231282
  hypo

SEQ ID NO: 245709 - DNA, 105 bp, Homo sapiens; identical to SEQ ID NO: 224965
  chr16:325111-325216
  hypo

SEQ ID NO: 245710 - DNA, 322 bp, Homo sapiens; identical to SEQ ID NO: 224966
  chr16:325277-325599
  hypo

SEQ ID NO: 245711 - DNA, 212 bp, Homo sapiens; identical to SEQ ID NO: 224967
  chr16:325890-326102
  hypo

SEQ ID NO: 245712 - DNA, 71 bp, Homo sapiens; identical to SEQ ID NO: 224968
  chr16:347205-347276
  hypo

SEQ ID NO: 245713 - DNA, 317 bp, Homo sapiens; identical to SEQ ID NO: 224969
  chr16:374802-375119
  hypo

SEQ ID NO: 245714 - DNA, 130 bp, Homo sapiens; identical to SEQ ID NO: 224970
  chr16:565596-565726
  hypo

SEQ ID NO: 245715 - DNA, 139 bp, Homo sapiens; identical to SEQ ID NO: 224971
  chr16:577540-577679
  hypo

SEQ ID NO: 245716 - DNA, 646 bp, Homo sapiens; identical to SEQ ID NO: 224972
  chr16:609994-610640
  hypo

SEQ ID NO: 245717 - DNA, 50 bp, Homo sapiens; identical to SEQ ID NO: 204077
  chr16:717960-718010
  hypo

SEQ ID NO: 245718 - DNA, 837 bp, Homo sapiens; identical to SEQ ID NO: 224974
  chr16:745046-745883
  hypo

SEQ ID NO: 245719 - DNA, 111 bp, Homo sapiens; identical to SEQ ID NO: 204079
  chr16:765207-765318
  hypo

SEQ ID NO: 245720 - DNA, 62 bp, Homo sapiens; identical to SEQ ID NO: 224976
  chr16:765586-765648
  hypo

SEQ ID NO: 245721 - DNA, 105 bp, Homo sapiens; identical to SEQ ID NO: 224977
  chr16:778111-778216
  hypo

SEQ ID NO: 245722 - DNA, 121 bp, Homo sapiens; identical to SEQ ID NO: 224978
  chr16:778761-778882
  hypo

SEQ ID NO: 245723 - DNA, 640 bp, Homo sapiens; identical to SEQ ID NO: 224979
  chr16:1031783-1032423
  hypo

SEQ ID NO: 245724 - DNA, 564 bp, Homo sapiens; identical to SEQ ID NO: 224980
  chr16:1035087-1035651
  hypo

SEQ ID NO: 245725 - DNA, 148 bp, Homo sapiens; identical to SEQ ID NO: 224981
  chr16:1202438-1202586
  hypo

SEQ ID NO: 245726 - DNA, 691 bp, Homo sapiens; identical to SEQ ID NO: 224982
  chr16:1203076-1203767
  hypo

SEQ ID NO: 245727 - DNA, 420 bp, Homo sapiens; identical to SEQ ID NO: 224983
  chr16:1203856-1204276
  hypo

SEQ ID NO: 245728 - DNA, 210 bp, Homo sapiens; identical to SEQ ID NO: 224984
  chr16:1384032-1384242
  hypo

SEQ ID NO: 245729 - DNA, 130 bp, Homo sapiens; identical to SEQ ID NO: 224985
  chr16:1384575-1384705
  hypo

SEQ ID NO: 245730 - DNA, 243 bp, Homo sapiens; identical to SEQ ID NO: 204080
  chr16:1429037-1429280
  hypo

SEQ ID NO: 245731 - DNA, 434 bp, Homo sapiens; identical to SEQ ID NO: 224987
  chr16:1660449-1660883
  hypo

SEQ ID NO: 245732 - DNA, 700 bp, Homo sapiens; identical to SEQ ID NO: 224988
  chr16:1664481-1665181
  hypo

SEQ ID NO: 245733 - DNA, 693 bp, Homo sapiens; identical to SEQ ID NO: 224989
  chr16:1968286-1968979
  hypo

SEQ ID NO: 245734 - DNA, 390 bp, Homo sapiens; identical to SEQ ID NO: 224990
  chr16:2041790-2042180
  hypo

SEQ ID NO: 245735 - DNA, 346 bp, Homo sapiens; identical to SEQ ID NO: 224991
  chr16:2042499-2042845
  hypo

SEQ ID NO: 245736 - DNA, 146 bp, Homo sapiens; identical to SEQ ID NO: 224992
  chr16:2295263-2295409
  hypo

SEQ ID NO: 245737 - DNA, 317 bp, Homo sapiens; identical to SEQ ID NO: 224993
  chr16:2521659-2521976
  hypo

SEQ ID NO: 245738 - DNA, 326 bp, Homo sapiens; identical to SEQ ID NO: 224994
  chr16:3096720-3097046
  hypo

SEQ ID NO: 245739 - DNA, 290 bp, Homo sapiens; identical to SEQ ID NO: 224995
  chr16:3200695-3200985
  hypo

SEQ ID NO: 245740 - DNA, 300 bp, Homo sapiens; identical to SEQ ID NO: 224996
  chr16:3209083-3209383
  hypo

SEQ ID NO: 245741 - DNA, 840 bp, Homo sapiens; identical to SEQ ID NO: 224997
  chr16:3232774-3233614
  hypo

SEQ ID NO: 245742 - DNA, 157 bp, Homo sapiens; identical to SEQ ID NO: 224998
  chr16:3781398-3781555
  hypo

SEQ ID NO: 245743 - DNA, 180 bp, Homo sapiens; identical to SEQ ID NO: 224999
  chr16:3781616-3781796
  hypo

SEQ ID NO: 245744 - DNA, 148 bp, Homo sapiens; identical to SEQ ID NO: 225000
  chr16:3931082-3931230
  hypo

SEQ ID NO: 245745 - DNA, 111 bp, Homo sapiens; identical to SEQ ID NO: 225001
  chr16:3989147-3989258
  hypo

SEQ ID NO: 245746 - DNA, 1016 bp, Homo sapiens; identical to SEQ ID NO: 225002
  chr16:4165532-4166548
  hypo

SEQ ID NO: 245747 - DNA, 240 bp, Homo sapiens; identical to SEQ ID NO: 225003
  chr16:4166570-4166810
  hypo

SEQ ID NO: 245748 - DNA, 553 bp, Homo sapiens; identical to SEQ ID NO: 225004
  chr16:4233232-4233785
  hypo

SEQ ID NO: 245749 - DNA, 204 bp, Homo sapiens; identical to SEQ ID NO: 204104
  chr16:4234087-4234291
  hypo

SEQ ID NO: 245750 - DNA, 377 bp, Homo sapiens; identical to SEQ ID NO: 225006
  chr16:4357423-4357800
  hypo

SEQ ID NO: 245751 - DNA, 105 bp, Homo sapiens; identical to SEQ ID NO: 225007
  chr16:4852797-4852902
  hypo

SEQ ID NO: 245752 - DNA, 215 bp, Homo sapiens; identical to SEQ ID NO: 225008
  chr16:4852975-4853190
  hypo

SEQ ID NO: 245753 - DNA, 180 bp, Homo sapiens; identical to SEQ ID NO: 225009
  chr16:5007975-5008155
  hypo

SEQ ID NO: 245754 - DNA, 105 bp, Homo sapiens; identical to SEQ ID NO: 225010
  chr16:5121901-5122006
  hypo

SEQ ID NO: 245755 - DNA, 240 bp, Homo sapiens; identical to SEQ ID NO: 225011
  chr16:8768181-8768421
  hypo

SEQ ID NO: 245756 - DNA, 262 bp, Homo sapiens; identical to SEQ ID NO: 225012
  chr16:9186867-9187129
  hypo

SEQ ID NO: 245757 - DNA, 772 bp, Homo sapiens; identical to SEQ ID NO: 204120
  chr16:10673913-10674685
  hypo

SEQ ID NO: 245758 - DNA, 114 bp, Homo sapiens; identical to SEQ ID NO: 204121
  chr16:11035552-11035666
  hypo

SEQ ID NO: 245759 - DNA, 416 bp, Homo sapiens; identical to SEQ ID NO: 225015
  chr16:11348663-11349079
  hypo

SEQ ID NO: 245760 - DNA, 105 bp, Homo sapiens; identical to SEQ ID NO: 225016
  chr16:12211191-12211296
  hypo

SEQ ID NO: 245761 - DNA, 564 bp, Homo sapiens; identical to SEQ ID NO: 225017
  chr16:12897345-12897909
  hypo

SEQ ID NO: 245762 - DNA, 420 bp, Homo sapiens; identical to SEQ ID NO: 225018
  chr16:12994899-12995319
  hypo

SEQ ID NO: 245763 - DNA, 960 bp, Homo sapiens; identical to SEQ ID NO: 225019
  chr16:12995437-12996397
  hypo

SEQ ID NO: 245764 - DNA, 180 bp, Homo sapiens; identical to SEQ ID NO: 225020
  chr16:12996602-12996782
  hypo

SEQ ID NO: 245765 - DNA, 177 bp, Homo sapiens; identical to SEQ ID NO: 225021
  chr16:13877530-13877707
  hypo

SEQ ID NO: 245766 - DNA, 180 bp, Homo sapiens; identical to SEQ ID NO: 225022
  chr16:14396889-14397069
  hypo

SEQ ID NO: 245767 - DNA, 210 bp, Homo sapiens; identical to SEQ ID NO: 225023
  chr16:15952216-15952426
  hypo

SEQ ID NO: 245768 - DNA, 143 bp, Homo sapiens; identical to SEQ ID NO: 225024
  chr16:20817490-20817633
  hypo

SEQ ID NO: 245769 - DNA, 429 bp, Homo sapiens; identical to SEQ ID NO: 225025
  chr16:21831535-21831964
  hypo

SEQ ID NO: 245770 - DNA, 158 bp, Homo sapiens; identical to SEQ ID NO: 225026
  chr16:22217232-22217390
  hypo

SEQ ID NO: 245771 - DNA, 360 bp, Homo sapiens; identical to SEQ ID NO: 225027
  chr16:22825592-22825952
  hypo

SEQ ID NO: 245772 - DNA, 443 bp, Homo sapiens; identical to SEQ ID NO: 225028
  chr16:22825977-22826420
  hypo

SEQ ID NO: 245773 - DNA, 160 bp, Homo sapiens; identical to SEQ ID NO: 225029
  chr16:23193738-23193898
  hypo

SEQ ID NO: 245774 - DNA, 436 bp, Homo sapiens; identical to SEQ ID NO: 225030
  chr16:23194201-23194637
  hypo

SEQ ID NO: 245775 - DNA, 269 bp, Homo sapiens; identical to SEQ ID NO: 225031
  chr16:23313253-23313522
  hypo

SEQ ID NO: 245776 - DNA, 180 bp, Homo sapiens; identical to SEQ ID NO: 225032
  chr16:23313706-23313886
  hypo

SEQ ID NO: 245777 - DNA, 579 bp, Homo sapiens; identical to SEQ ID NO: 225033
  chr16:23765898-23766477
  hypo

SEQ ID NO: 245778 - DNA, 1714 bp, Homo sapiens; identical to SEQ ID NO: 225034
  chr16:23846763-23848477
  hypo

SEQ ID NO: 245779 - DNA, 44 bp, Homo sapiens; identical to SEQ ID NO: 204140
  chr16:24354628-24354672
  hypo

SEQ ID NO: 245780 - DNA, 360 bp, Homo sapiens; identical to SEQ ID NO: 225036
  chr16:25703094-25703454
  hypo

SEQ ID NO: 245781 - DNA, 780 bp, Homo sapiens; identical to SEQ ID NO: 225037
  chr16:25703468-25704248
  hypo

SEQ ID NO: 245782 - DNA, 142 bp, Homo sapiens; identical to SEQ ID NO: 225038
  chr16:27121251-27121393
  hypo

SEQ ID NO: 245783 - DNA, 140 bp, Homo sapiens; identical to SEQ ID NO: 225039
  chr16:27280121-27280261
  hypo

SEQ ID NO: 245784 - DNA, 1252 bp, Homo sapiens; identical to SEQ ID NO: 225040
  chr16:28074002-28075254
  hypo

SEQ ID NO: 245785 - DNA, 79 bp, Homo sapiens; identical to SEQ ID NO: 204150
  chr16:29606232-29606311
  hypo

SEQ ID NO: 245786 - DNA, 521 bp, Homo sapiens; identical to SEQ ID NO: 225042
  chr16:29624670-29625191
  hypo

SEQ ID NO: 245787 - DNA, 35 bp, Homo sapiens; identical to SEQ ID NO: 225043
  chr16:29691806-29691841
  hypo

SEQ ID NO: 245788 - DNA, 180 bp, Homo sapiens; identical to SEQ ID NO: 225044
  chr16:29822567-29822747
  hypo

SEQ ID NO: 245789 - DNA, 136 bp, Homo sapiens; identical to SEQ ID NO: 204154
  chr16:29836031-29836167
  hypo

SEQ ID NO: 245790 - DNA, 160 bp, Homo sapiens; identical to SEQ ID NO: 225046
  chr16:29910605-29910765
  hypo

SEQ ID NO: 245791 - DNA, 104 bp, Homo sapiens; identical to SEQ ID NO: 225047
  chr16:29938093-29938197
  hypo

SEQ ID NO: 245792 - DNA, 562 bp, Homo sapiens; identical to SEQ ID NO: 225048
  chr16:30596384-30596946
  hypo

SEQ ID NO: 245793 - DNA, 153 bp, Homo sapiens; identical to SEQ ID NO: 225049
  chr16:30905625-30905778
  hypo

SEQ ID NO: 245794 - DNA, 412 bp, Homo sapiens; identical to SEQ ID NO: 225050
  chr16:30959757-30960169
  hypo

SEQ ID NO: 245795 - DNA, 104 bp, Homo sapiens; identical to SEQ ID NO: 225051
  chr16:30960209-30960313
  hypo

SEQ ID NO: 245796 - DNA, 334 bp, Homo sapiens; identical to SEQ ID NO: 225052
  chr16:31075206-31075540
  hypo

SEQ ID NO: 245797 - DNA, 104 bp, Homo sapiens; identical to SEQ ID NO: 225053
  chr16:31117288-31117392
  hypo

SEQ ID NO: 245798 - DNA, 271 bp, Homo sapiens; identical to SEQ ID NO: 204176
  chr16:31153837-31154108
  hypo

SEQ ID NO: 245799 - DNA, 402 bp, Homo sapiens; identical to SEQ ID NO: 225055
  chr16:31453960-31454362
  hypo

SEQ ID NO: 245800 - DNA, 184 bp, Homo sapiens; identical to SEQ ID NO: 225056
  chr16:31487758-31487942
  hypo

SEQ ID NO: 245801 - DNA, 410 bp, Homo sapiens; identical to SEQ ID NO: 225057
  chr16:31712179-31712589
  hypo

SEQ ID NO: 245802 - DNA, 1278 bp, Homo sapiens; identical to SEQ ID NO: 225058
  chr16:47176462-47177740
  hypo

SEQ ID NO: 245803 - DNA, 360 bp, Homo sapiens; identical to SEQ ID NO: 225059
  chr16:47177860-47178220
  hypo

SEQ ID NO: 245804 - DNA, 1020 bp, Homo sapiens; identical to SEQ ID NO: 225060
  chr16:49315445-49316465
  hypo

SEQ ID NO: 245805 - DNA, 66 bp, Homo sapiens; identical to SEQ ID NO: 204188
  chr16:50773734-50773800
  hypo

SEQ ID NO: 245806 - DNA, 180 bp, Homo sapiens; identical to SEQ ID NO: 225062
  chr16:51185391-51185571
  hypo

SEQ ID NO: 245807 - DNA, 780 bp, Homo sapiens; identical to SEQ ID NO: 225063
  chr16:51185691-51186471
  hypo

SEQ ID NO: 245808 - DNA, 321 bp, Homo sapiens; identical to SEQ ID NO: 225064
  chr16:51189084-51189405
  hypo

SEQ ID NO: 245809 - DNA, 364 bp, Homo sapiens; identical to SEQ ID NO: 225065
  chr16:55357501-55357865
  hypo

SEQ ID NO: 245810 - DNA, 360 bp, Homo sapiens; identical to SEQ ID NO: 225066
  chr16:55362704-55363064
  hypo

SEQ ID NO: 245811 - DNA, 900 bp, Homo sapiens; identical to SEQ ID NO: 225067
  chr16:55512771-55513671
  hypo

SEQ ID NO: 245812 - DNA, 180 bp, Homo sapiens; identical to SEQ ID NO: 225068
  chr16:55513971-55514151
  hypo

SEQ ID NO: 245813 - DNA, 1620 bp, Homo sapiens; identical to SEQ ID NO: 225069
  chr16:56224727-56226347
  hypo

SEQ ID NO: 245814 - DNA, 55 bp, Homo sapiens; identical to SEQ ID NO: 225070
  chr16:56227984-56228039
  hypo

SEQ ID NO: 245815 - DNA, 382 bp, Homo sapiens; identical to SEQ ID NO: 225071
  chr16:56228280-56228662
  hypo

SEQ ID NO: 245816 - DNA, 556 bp, Homo sapiens; identical to SEQ ID NO: 225072
  chr16:56623201-56623757
  hypo

SEQ ID NO: 245817 - DNA, 185 bp, Homo sapiens; identical to SEQ ID NO: 225073
  chr16:56642263-56642448
  hypo

SEQ ID NO: 245818 - DNA, 633 bp, Homo sapiens; identical to SEQ ID NO: 225074
  chr16:56666028-56666661
  hypo

SEQ ID NO: 245819 - DNA, 100 bp, Homo sapiens; identical to SEQ ID NO: 225075
  chr16:56691992-56692092
  hypo

SEQ ID NO: 245820 - DNA, 270 bp, Homo sapiens; identical to SEQ ID NO: 225076
  chr16:56697000-56697270
  hypo

SEQ ID NO: 245821 - DNA, 319 bp, Homo sapiens; identical to SEQ ID NO: 225077
  chr16:57126699-57127018
  hypo

SEQ ID NO: 245822 - DNA, 153 bp, Homo sapiens; identical to SEQ ID NO: 225078
  chr16:57318465-57318618
  hypo

SEQ ID NO: 245823 - DNA, 752 bp, Homo sapiens; identical to SEQ ID NO: 225079
  chr16:58059829-58060581
  hypo

SEQ ID NO: 245824 - DNA, 105 bp, Homo sapiens; identical to SEQ ID NO: 225080
  chr16:58426279-58426384
  hypo

SEQ ID NO: 245825 - DNA, 300 bp, Homo sapiens; identical to SEQ ID NO: 225081
  chr16:58497683-58497983
  hypo

SEQ ID NO: 245826 - DNA, 180 bp, Homo sapiens; identical to SEQ ID NO: 225082
  chr16:65156756-65156936
  hypo

SEQ ID NO: 245827 - DNA, 519 bp, Homo sapiens; identical to SEQ ID NO: 225083
  chr16:65157159-65157678
  hypo

SEQ ID NO: 245828 - DNA, 704 bp, Homo sapiens; identical to SEQ ID NO: 225084
  chr16:66461412-66462116
  hypo

SEQ ID NO: 245829 - DNA, 360 bp, Homo sapiens; identical to SEQ ID NO: 225085
  chr16:66638116-66638476
  hypo

SEQ ID NO: 245830 - DNA, 500 bp, Homo sapiens; identical to SEQ ID NO: 225086
  chr16:66638521-66639021
  hypo

SEQ ID NO: 245831 - DNA, 293 bp, Homo sapiens; identical to SEQ ID NO: 225087
  chr16:66730106-66730399
  hypo

SEQ ID NO: 245832 - DNA, 623 bp, Homo sapiens; identical to SEQ ID NO: 225088
  chr16:66958744-66959367
  hypo

SEQ ID NO: 245833 - DNA, 453 bp, Homo sapiens; identical to SEQ ID NO: 225089
  chr16:67183854-67184307
  hypo

SEQ ID NO: 245834 - DNA, 104 bp, Homo sapiens; identical to SEQ ID NO: 225090
  chr16:67184538-67184642
  hypo

SEQ ID NO: 245835 - DNA, 334 bp, Homo sapiens; identical to SEQ ID NO: 225091
  chr16:67189018-67189352
  hypo

SEQ ID NO: 245836 - DNA, 215 bp, Homo sapiens; identical to SEQ ID NO: 204249
  chr16:67280008-67280223
  hypo

SEQ ID NO: 245837 - DNA, 240 bp, Homo sapiens; identical to SEQ ID NO: 225093
  chr16:67281281-67281521
  hypo

SEQ ID NO: 245838 - DNA, 201 bp, Homo sapiens; identical to SEQ ID NO: 225094
  chr16:67563142-67563343
  hypo

SEQ ID NO: 245839 - DNA, 65 bp, Homo sapiens; identical to SEQ ID NO: 225095
  chr16:67563576-67563641
  hypo

SEQ ID NO: 245840 - DNA, 145 bp, Homo sapiens; identical to SEQ ID NO: 225096
  chr16:67564103-67564248
  hypo

SEQ ID NO: 245841 - DNA, 180 bp, Homo sapiens; identical to SEQ ID NO: 225097
  chr16:67571809-67571989
  hypo

SEQ ID NO: 245842 - DNA, 325 bp, Homo sapiens; identical to SEQ ID NO: 225098
  chr16:67678709-67679034
  hypo

SEQ ID NO: 245843 - DNA, 649 bp, Homo sapiens; identical to SEQ ID NO: 225099
  chr16:67700713-67701362
  hypo

SEQ ID NO: 245844 - DNA, 681 bp, Homo sapiens; identical to SEQ ID NO: 225100
  chr16:68118298-68118979
  hypo

SEQ ID NO: 245845 - DNA, 490 bp, Homo sapiens; identical to SEQ ID NO: 225101
  chr16:68269813-68270303
  hypo

SEQ ID NO: 245846 - DNA, 511 bp, Homo sapiens; identical to SEQ ID NO: 225102
  chr16:68270867-68271378
  hypo

SEQ ID NO: 245847 - DNA, 57 bp, Homo sapiens; identical to SEQ ID NO: 204267
  chr16:68298829-68298886
  hypo

SEQ ID NO: 245848 - DNA, 703 bp, Homo sapiens; identical to SEQ ID NO: 225104
  chr16:68482062-68482765
  hypo

SEQ ID NO: 245849 - DNA, 241 bp, Homo sapiens; identical to SEQ ID NO: 225105
  chr16:68544137-68544378
  hypo

SEQ ID NO: 245850 - DNA, 91 bp, Homo sapiens; identical to SEQ ID NO: 225106
  chr16:68564224-68564315
  hypo

SEQ ID NO: 245851 - DNA, 660 bp, Homo sapiens; identical to SEQ ID NO: 225107
  chr16:69139815-69140475
  hypo

SEQ ID NO: 245852 - DNA, 89 bp, Homo sapiens; identical to SEQ ID NO: 204274
  chr16:69373055-69373144
  hypo

SEQ ID NO: 245853 - DNA, 105 bp, Homo sapiens; identical to SEQ ID NO: 225109
  chr16:70472498-70472603
  hypo

SEQ ID NO: 245854 - DNA, 637 bp, Homo sapiens; identical to SEQ ID NO: 225110
  chr16:71459795-71460432
  hypo

SEQ ID NO: 245855 - DNA, 149 bp, Homo sapiens; identical to SEQ ID NO: 225111
  chr16:72699010-72699159
  hypo

SEQ ID NO: 245856 - DNA, 566 bp, Homo sapiens; identical to SEQ ID NO: 225112
  chr16:73091551-73092117
  hypo

SEQ ID NO: 245857 - DNA, 152 bp, Homo sapiens; identical to SEQ ID NO: 225113
  chr16:73092394-73092546
  hypo

SEQ ID NO: 245858 - DNA, 105 bp, Homo sapiens; identical to SEQ ID NO: 225114
  chr16:74659520-74659625
  hypo

SEQ ID NO: 245859 - DNA, 79 bp, Homo sapiens; identical to SEQ ID NO: 225115
  chr16:74808949-74809028
  hypo

SEQ ID NO: 245860 - DNA, 40 bp, Homo sapiens; identical to SEQ ID NO: 204287
  chr16:75018963-75019003
  hypo

SEQ ID NO: 245861 - DNA, 363 bp, Homo sapiens; identical to SEQ ID NO: 225117
  chr16:75033799-75034162
  hypo

SEQ ID NO: 245862 - DNA, 180 bp, Homo sapiens; identical to SEQ ID NO: 225118
  chr16:75263571-75263751
  hypo

SEQ ID NO: 245863 - DNA, 161 bp, Homo sapiens; identical to SEQ ID NO: 225119
  chr16:75299751-75299912
  hypo

SEQ ID NO: 245864 - DNA, 95 bp, Homo sapiens; identical to SEQ ID NO: 225120
  chr16:75529239-75529334
  hypo

SEQ ID NO: 245865 - DNA, 165 bp, Homo sapiens; identical to SEQ ID NO: 204293
  chr16:75529727-75529892
  hypo

SEQ ID NO: 245866 - DNA, 360 bp, Homo sapiens; identical to SEQ ID NO: 225122
  chr16:77246636-77246996
  hypo

SEQ ID NO: 245867 - DNA, 283 bp, Homo sapiens; identical to SEQ ID NO: 225123
  chr16:77247377-77247660
  hypo

SEQ ID NO: 245868 - DNA, 959 bp, Homo sapiens; identical to SEQ ID NO: 225124
  chr16:77468256-77469215
  hypo

SEQ ID NO: 245869 - DNA, 104 bp, Homo sapiens; identical to SEQ ID NO: 225125
  chr16:77747330-77747434
  hypo

SEQ ID NO: 245870 - DNA, 861 bp, Homo sapiens; identical to SEQ ID NO: 225126
  chr16:77822068-77822929
  hypo

SEQ ID NO: 245871 - DNA, 40 bp, Homo sapiens; identical to SEQ ID NO: 225127
  chr16:78139962-78140002
  hypo

SEQ ID NO: 245872 - DNA, 105 bp, Homo sapiens; identical to SEQ ID NO: 225128
  chr16:78322868-78322973
  hypo

SEQ ID NO: 245873 - DNA, 32 bp, Homo sapiens; identical to SEQ ID NO: 225129
  chr16:78425003-78425035
  hypo

SEQ ID NO: 245874 - DNA, 103 bp, Homo sapiens; identical to SEQ ID NO: 204305
  chr16:79636191-79636294
  hypo

SEQ ID NO: 245875 - DNA, 180 bp, Homo sapiens; identical to SEQ ID NO: 225131
  chr16:79804255-79804435
  hypo

SEQ ID NO: 245876 - DNA, 251 bp, Homo sapiens; identical to SEQ ID NO: 225132
  chr16:79804534-79804785
  hypo

SEQ ID NO: 245877 - DNA, 259 bp, Homo sapiens; identical to SEQ ID NO: 225133
  chr16:80837325-80837584
  hypo

SEQ ID NO: 245878 - DNA, 180 bp, Homo sapiens; identical to SEQ ID NO: 225134
  chr16:80837617-80837797
  hypo

SEQ ID NO: 245879 - DNA, 180 bp, Homo sapiens; identical to SEQ ID NO: 225135
  chr16:80837952-80838132
  hypo

SEQ ID NO: 245880 - DNA, 96 bp, Homo sapiens; identical to SEQ ID NO: 225136
  chr16:81813402-81813498
  hypo

SEQ ID NO: 245881 - DNA, 843 bp, Homo sapiens; identical to SEQ ID NO: 225137
  chr16:84650988-84651831
  hypo

SEQ ID NO: 245882 - DNA, 97 bp, Homo sapiens; identical to SEQ ID NO: 225138
  chr16:85143894-85143991
  hypo

SEQ ID NO: 245883 - DNA, 240 bp, Homo sapiens; identical to SEQ ID NO: 225139
  chr16:85202730-85202970
  hypo

SEQ ID NO: 245884 - DNA, 240 bp, Homo sapiens; identical to SEQ ID NO: 225140
  chr16:85589963-85590203
  hypo

SEQ ID NO: 245885 - DNA, 860 bp, Homo sapiens; identical to SEQ ID NO: 225141
  chr16:85932120-85932980
  hypo

SEQ ID NO: 245886 - DNA, 180 bp, Homo sapiens; identical to SEQ ID NO: 225142
  chr16:86541882-86542062
  hypo

SEQ ID NO: 245887 - DNA, 749 bp, Homo sapiens; identical to SEQ ID NO: 225143
  chr16:86542208-86542957
  hypo

SEQ ID NO: 245888 - DNA, 110 bp, Homo sapiens; identical to SEQ ID NO: 225144
  chr16:86543364-86543474
  hypo

SEQ ID NO: 245889 - DNA, 180 bp, Homo sapiens; identical to SEQ ID NO: 225145
  chr16:86543660-86543840
  hypo

SEQ ID NO: 245890 - DNA, 900 bp, Homo sapiens; identical to SEQ ID NO: 225146
  chr16:86543870-86544770
  hypo

SEQ ID NO: 245891 - DNA, 499 bp, Homo sapiens; identical to SEQ ID NO: 225147
  chr16:86600291-86600790
  hypo

SEQ ID NO: 245892 - DNA, 180 bp, Homo sapiens; identical to SEQ ID NO: 225148
  chr16:86600829-86601009
  hypo

SEQ ID NO: 245893 - DNA, 540 bp, Homo sapiens; identical to SEQ ID NO: 225149
  chr16:86601394-86601934
  hypo

SEQ ID NO: 245894 - DNA, 420 bp, Homo sapiens; identical to SEQ ID NO: 225150
  chr16:86601970-86602390
  hypo

SEQ ID NO: 245895 - DNA, 105 bp, Homo sapiens; identical to SEQ ID NO: 225151
  chr16:86609633-86609738
  hypo

SEQ ID NO: 245896 - DNA, 151 bp, Homo sapiens; identical to SEQ ID NO: 225152
  chr16:86609895-86610046
  hypo

SEQ ID NO: 245897 - DNA, 563 bp, Homo sapiens; identical to SEQ ID NO: 225153
  chr16:87417701-87418264
  hypo

SEQ ID NO: 245898 - DNA, 696 bp, Homo sapiens; identical to SEQ ID NO: 225154
  chr16:87525805-87526501
  hypo

SEQ ID NO: 245899 - DNA, 504 bp, Homo sapiens; identical to SEQ ID NO: 225155
  chr16:87526561-87527065
  hypo

SEQ ID NO: 245900 - DNA, 180 bp, Homo sapiens; identical to SEQ ID NO: 225156
  chr16:87635357-87635537
  hypo

SEQ ID NO: 245901 - DNA, 720 bp, Homo sapiens; identical to SEQ ID NO: 225157
  chr16:87635682-87636402
  hypo

SEQ ID NO: 245902 - DNA, 660 bp, Homo sapiens; identical to SEQ ID NO: 225158
  chr16:87636490-87637150
  hypo

SEQ ID NO: 245903 - DNA, 780 bp, Homo sapiens; identical to SEQ ID NO: 225159
  chr16:87723365-87724145
  hypo

SEQ ID NO: 245904 - DNA, 490 bp, Homo sapiens; identical to SEQ ID NO: 225160
  chr16:87902836-87903326
  hypo

SEQ ID NO: 245905 - DNA, 130 bp, Homo sapiens; identical to SEQ ID NO: 225161
  chr16:88031994-88032124
  hypo

SEQ ID NO: 245906 - DNA, 276 bp, Homo sapiens; identical to SEQ ID NO: 225162
  chr16:88060796-88061072
  hypo

SEQ ID NO: 245907 - DNA, 474 bp, Homo sapiens; identical to SEQ ID NO: 225163
  chr16:88496876-88497350
  hypo

SEQ ID NO: 245908 - DNA, 271 bp, Homo sapiens; identical to SEQ ID NO: 225164
  chr16:88519038-88519309
  hypo

SEQ ID NO: 245909 - DNA, 390 bp, Homo sapiens; identical to SEQ ID NO: 225165
  chr16:88700834-88701224
  hypo

SEQ ID NO: 245910 - DNA, 91 bp, Homo sapiens; identical to SEQ ID NO: 225166
  chr16:88721558-88721649
  hypo

SEQ ID NO: 245911 - DNA, 133 bp, Homo sapiens; identical to SEQ ID NO: 225167
  chr16:88764923-88765056
  hypo

SEQ ID NO: 245912 - DNA, 105 bp, Homo sapiens; identical to SEQ ID NO: 225168
  chr16:88817839-88817944
  hypo

SEQ ID NO: 245913 - DNA, 105 bp, Homo sapiens; identical to SEQ ID NO: 225169
  chr16:88851818-88851923
  hypo

SEQ ID NO: 245914 - DNA, 143 bp, Homo sapiens; identical to SEQ ID NO: 225170
  chr16:88878527-88878670
  hypo

SEQ ID NO: 245915 - DNA, 294 bp, Homo sapiens; identical to SEQ ID NO: 225171
  chr16:88950011-88950305
  hypo

SEQ ID NO: 245916 - DNA, 1530 bp, Homo sapiens; identical to SEQ ID NO: 225172
  chr16:89007083-89008613
  hypo

SEQ ID NO: 245917 - DNA, 180 bp, Homo sapiens; identical to SEQ ID NO: 225173
  chr16:89189695-89189875
  hypo

SEQ ID NO: 245918 - DNA, 728 bp, Homo sapiens; identical to SEQ ID NO: 225174
  chr16:89267386-89268114
  hypo

SEQ ID NO: 245919 - DNA, 102 bp, Homo sapiens; identical to SEQ ID NO: 225175
  chr16:89268346-89268448
  hypo

SEQ ID NO: 245920 - DNA, 180 bp, Homo sapiens; identical to SEQ ID NO: 225176
  chr16:89614942-89615122
  hypo

SEQ ID NO: 245921 - DNA, 139 bp, Homo sapiens; identical to SEQ ID NO: 225177
  chr16:89627717-89627856
  hypo

SEQ ID NO: 245922 - DNA, 152 bp, Homo sapiens; identical to SEQ ID NO: 225178
  chr16:89894420-89894572
  hypo

SEQ ID NO: 245923 - DNA, 45 bp, Homo sapiens; identical to SEQ ID NO: 225179
  chr16:90087050-90087095
  hypo

SEQ ID NO: 245924 - DNA, 240 bp, Homo sapiens; identical to SEQ ID NO: 225180
  chr17:523675-523915
  hypo

SEQ ID NO: 245925 - DNA, 393 bp, Homo sapiens; identical to SEQ ID NO: 225181
  chr17:576379-576772
  hypo

SEQ ID NO: 245926 - DNA, 78 bp, Homo sapiens; identical to SEQ ID NO: 225182
  chr17:635476-635554
  hypo

SEQ ID NO: 245927 - DNA, 460 bp, Homo sapiens; identical to SEQ ID NO: 225183
  chr17:635798-636258
  hypo

SEQ ID NO: 245928 - DNA, 105 bp, Homo sapiens; identical to SEQ ID NO: 225184
  chr17:850231-850336
  hypo

SEQ ID NO: 245929 - DNA, 84 bp, Homo sapiens; identical to SEQ ID NO: 225185
  chr17:883202-883286
  hypo

SEQ ID NO: 245930 - DNA, 73 bp, Homo sapiens; identical to SEQ ID NO: 225186
  chr17:1132222-1132295
  hypo

SEQ ID NO: 245931 - DNA, 105 bp, Homo sapiens; identical to SEQ ID NO: 225187
  chr17:1588082-1588187
  hypo

SEQ ID NO: 245932 - DNA, 360 bp, Homo sapiens; identical to SEQ ID NO: 225188
  chr17:1613330-1613690
  hypo

SEQ ID NO: 245933 - DNA, 328 bp, Homo sapiens; identical to SEQ ID NO: 225189
  chr17:1954662-1954990
  hypo

SEQ ID NO: 245934 - DNA, 159 bp, Homo sapiens; identical to SEQ ID NO: 225190
  chr17:1958916-1959075
  hypo

SEQ ID NO: 245935 - DNA, 779 bp, Homo sapiens; identical to SEQ ID NO: 225191
  chr17:1961434-1962213
  hypo

SEQ ID NO: 245936 - DNA, 146 bp, Homo sapiens; identical to SEQ ID NO: 225192
  chr17:2156718-2156864
  hypo

SEQ ID NO: 245937 - DNA, 50 bp, Homo sapiens; identical to SEQ ID NO: 204369
  chr17:2302239-2302289
  hypo

SEQ ID NO: 245938 - DNA, 902 bp, Homo sapiens; identical to SEQ ID NO: 225194
  chr17:2627434-2628336
  hypo

SEQ ID NO: 245939 - DNA, 240 bp, Homo sapiens; identical to SEQ ID NO: 225195
  chr17:2756729-2756969
  hypo

SEQ ID NO: 245940 - DNA, 515 bp, Homo sapiens; identical to SEQ ID NO: 225196
  chr17:3599158-3599673
  hypo

SEQ ID NO: 245941 - DNA, 155 bp, Homo sapiens; identical to SEQ ID NO: 225197
  chr17:3778891-3779046
  hypo

SEQ ID NO: 245942 - DNA, 667 bp, Homo sapiens; identical to SEQ ID NO: 225198
  chr17:3867000-3867667
  hypo

SEQ ID NO: 245943 - DNA, 105 bp, Homo sapiens; identical to SEQ ID NO: 225199
  chr17:3867879-3867984
  hypo

SEQ ID NO: 245944 - DNA, 42 bp, Homo sapiens; identical to SEQ ID NO: 225200
  chr17:4647512-4647554
  hypo

SEQ ID NO: 245945 - DNA, 163 bp, Homo sapiens; identical to SEQ ID NO: 225201
  chr17:4853393-4853556
  hypo

SEQ ID NO: 245946 - DNA, 240 bp, Homo sapiens; identical to SEQ ID NO: 225202
  chr17:4890443-4890683
  hypo

SEQ ID NO: 245947 - DNA, 118 bp, Homo sapiens; identical to SEQ ID NO: 204382
  chr17:4901561-4901679
  hypo

SEQ ID NO: 245948 - DNA, 239 bp, Homo sapiens; identical to SEQ ID NO: 225204
  chr17:4938733-4938972
  hypo

SEQ ID NO: 245949 - DNA, 669 bp, Homo sapiens; identical to SEQ ID NO: 225205
  chr17:4981371-4982040
  hypo

SEQ ID NO: 245950 - DNA, 368 bp, Homo sapiens; identical to SEQ ID NO: 225206
  chr17:5000402-5000770
  hypo

SEQ ID NO: 245951 - DNA, 180 bp, Homo sapiens; identical to SEQ ID NO: 225207
  chr17:5000895-5001075
  hypo

SEQ ID NO: 245952 - DNA, 240 bp, Homo sapiens; identical to SEQ ID NO: 225208
  chr17:6459489-6459729
  hypo

SEQ ID NO: 245953 - DNA, 720 bp, Homo sapiens; identical to SEQ ID NO: 225209
  chr17:6616343-6617063
  hypo

SEQ ID NO: 245954 - DNA, 72 bp, Homo sapiens; identical to SEQ ID NO: 225210
  chr17:7146492-7146564
  hypo

SEQ ID NO: 245955 - DNA, 67 bp, Homo sapiens; identical to SEQ ID NO: 204392
  chr17:7146588-7146655
  hypo

SEQ ID NO: 245956 - DNA, 238 bp, Homo sapiens; identical to SEQ ID NO: 225212
  chr17:7199730-7199968
  hypo

SEQ ID NO: 245957 - DNA, 841 bp, Homo sapiens; identical to SEQ ID NO: 225213
  chr17:7254485-7255326
  hypo

SEQ ID NO: 245958 - DNA, 488 bp, Homo sapiens; identical to SEQ ID NO: 225214
  chr17:7255354-7255842
  hypo

SEQ ID NO: 245959 - DNA, 274 bp, Homo sapiens; identical to SEQ ID NO: 225215
  chr17:7340607-7340881
  hypo

SEQ ID NO: 245960 - DNA, 300 bp, Homo sapiens; identical to SEQ ID NO: 225216
  chr17:7486279-7486579
  hypo

SEQ ID NO: 245961 - DNA, 287 bp, Homo sapiens; identical to SEQ ID NO: 225217
  chr17:7486947-7487234
  hypo

SEQ ID NO: 245962 - DNA, 165 bp, Homo sapiens; identical to SEQ ID NO: 204402
  chr17:7571719-7571884
  hypo

SEQ ID NO: 245963 - DNA, 824 bp, Homo sapiens; identical to SEQ ID NO: 225219
  chr17:7572184-7573008
  hypo

SEQ ID NO: 245964 - DNA, 111 bp, Homo sapiens; identical to SEQ ID NO: 225220
  chr17:7573922-7574033
  hypo

SEQ ID NO: 245965 - DNA, 621 bp, Homo sapiens; identical to SEQ ID NO: 225221
  chr17:7576546-7577167
  hypo

SEQ ID NO: 245966 - DNA, 121 bp, Homo sapiens; identical to SEQ ID NO: 225222
  chr17:7577496-7577617
  hypo

SEQ ID NO: 245967 - DNA, 558 bp, Homo sapiens; identical to SEQ ID NO: 225223
  chr17:7578175-7578733
  hypo

SEQ ID NO: 245968 - DNA, 691 bp, Homo sapiens; identical to SEQ ID NO: 225224
  chr17:7579249-7579940
  hypo

SEQ ID NO: 245969 - DNA, 329 bp, Homo sapiens; identical to SEQ ID NO: 204409
  chr17:7590625-7590954
  hypo

SEQ ID NO: 245970 - DNA, 33 bp, Homo sapiens; identical to SEQ ID NO: 225226
  chr17:8759640-8759673
  hypo

SEQ ID NO: 245971 - DNA, 420 bp, Homo sapiens; identical to SEQ ID NO: 225227
  chr17:8868645-8869065
  hypo

SEQ ID NO: 245972 - DNA, 420 bp, Homo sapiens; identical to SEQ ID NO: 225228
  chr17:8906202-8906622
  hypo

SEQ ID NO: 245973 - DNA, 180 bp, Homo sapiens; identical to SEQ ID NO: 225229
  chr17:8906673-8906853
  hypo

SEQ ID NO: 245974 - DNA, 300 bp, Homo sapiens; identical to SEQ ID NO: 225230
  chr17:8907116-8907416
  hypo

SEQ ID NO: 245975 - DNA, 360 bp, Homo sapiens; identical to SEQ ID NO: 225231
  chr17:9548902-9549262
  hypo

SEQ ID NO: 245976 - DNA, 1500 bp, Homo sapiens; identical to SEQ ID NO: 225232
  chr17:10101106-10102606
  hypo

SEQ ID NO: 245977 - DNA, 812 bp, Homo sapiens; identical to SEQ ID NO: 225233
  chr17:10632700-10633512
  hypo

SEQ ID NO: 245978 - DNA, 833 bp, Homo sapiens; identical to SEQ ID NO: 225234
  chr17:11143897-11144730
  hypo

SEQ ID NO: 245979 - DNA, 480 bp, Homo sapiens; identical to SEQ ID NO: 225235
  chr17:12877195-12877675
  hypo

SEQ ID NO: 245980 - DNA, 180 bp, Homo sapiens; identical to SEQ ID NO: 225236
  chr17:13505060-13505240
  hypo

SEQ ID NO: 245981 - DNA, 616 bp, Homo sapiens; identical to SEQ ID NO: 225237
  chr17:14200599-14201215
  hypo

SEQ ID NO: 245982 - DNA, 1980 bp, Homo sapiens; identical to SEQ ID NO: 225238
  chr17:14204383-14206363
  hypo

SEQ ID NO: 245983 - DNA, 331 bp, Homo sapiens; identical to SEQ ID NO: 225239
  chr17:14212387-14212718
  hypo

SEQ ID NO: 245984 - DNA, 243 bp, Homo sapiens; identical to SEQ ID NO: 225240
  chr17:16256906-16257149
  hypo

SEQ ID NO: 245985 - DNA, 513 bp, Homo sapiens; identical to SEQ ID NO: 225241
  chr17:16284605-16285118
  hypo

SEQ ID NO: 245986 - DNA, 256 bp, Homo sapiens; identical to SEQ ID NO: 225242
  chr17:16310308-16310564
  hypo

SEQ ID NO: 245987 - DNA, 57 bp, Homo sapiens; identical to SEQ ID NO: 225243
  chr17:16395229-16395286
  hypo

SEQ ID NO: 245988 - DNA, 760 bp, Homo sapiens; identical to SEQ ID NO: 225244
  chr17:16472054-16472814
  hypo

SEQ ID NO: 245989 - DNA, 180 bp, Homo sapiens; identical to SEQ ID NO: 225245
  chr17:16570369-16570549
  hypo

SEQ ID NO: 245990 - DNA, 109 bp, Homo sapiens; identical to SEQ ID NO: 225246
  chr17:17287173-17287282
  hypo

SEQ ID NO: 245991 - DNA, 180 bp, Homo sapiens; identical to SEQ ID NO: 225247
  chr17:17398735-17398915
  hypo

SEQ ID NO: 245992 - DNA, 720 bp, Homo sapiens; identical to SEQ ID NO: 225248
  chr17:17398971-17399691
  hypo

SEQ ID NO: 245993 - DNA, 104 bp, Homo sapiens; identical to SEQ ID NO: 225249
  chr17:17399948-17400052
  hypo

SEQ ID NO: 245994 - DNA, 283 bp, Homo sapiens; identical to SEQ ID NO: 225250
  chr17:19140730-19141013
  hypo

SEQ ID NO: 245995 - DNA, 424 bp, Homo sapiens; identical to SEQ ID NO: 225251
  chr17:19282073-19282497
  hypo

SEQ ID NO: 245996 - DNA, 180 bp, Homo sapiens; identical to SEQ ID NO: 225252
  chr17:19436923-19437103
  hypo

SEQ ID NO: 245997 - DNA, 404 bp, Homo sapiens; identical to SEQ ID NO: 225253
  chr17:19437229-19437633
  hypo

SEQ ID NO: 245998 - DNA, 180 bp, Homo sapiens; identical to SEQ ID NO: 225254
  chr17:20059204-20059384
  hypo

SEQ ID NO: 245999 - DNA, 507 bp, Homo sapiens; identical to SEQ ID NO: 225255
  chr17:26120457-26120964
  hypo

SEQ ID NO: 246000 - DNA, 397 bp, Homo sapiens; identical to SEQ ID NO: 225256
  chr17:26925694-26926091
  hypo

SEQ ID NO: 246001 - DNA, 568 bp, Homo sapiens; identical to SEQ ID NO: 225257
  chr17:27332301-27332869
  hypo

SEQ ID NO: 246002 - DNA, 180 bp, Homo sapiens; identical to SEQ ID NO: 225258
  chr17:27333095-27333275
  hypo

SEQ ID NO: 246003 - DNA, 567 bp, Homo sapiens; identical to SEQ ID NO: 225259
  chr17:27893179-27893746
  hypo

SEQ ID NO: 246004 - DNA, 360 bp, Homo sapiens; identical to SEQ ID NO: 225260
  chr17:27942986-27943346
  hypo

SEQ ID NO: 246005 - DNA, 633 bp, Homo sapiens; identical to SEQ ID NO: 225261
  chr17:28562625-28563258
  hypo

SEQ ID NO: 246006 - DNA, 864 bp, Homo sapiens; identical to SEQ ID NO: 225262
  chr17:29248999-29249863
  hypo

SEQ ID NO: 246007 - DNA, 511 bp, Homo sapiens; identical to SEQ ID NO: 225263
  chr17:29421876-29422387
  hypo

SEQ ID NO: 246008 - DNA, 144 bp, Homo sapiens; identical to SEQ ID NO: 204486
  chr17:29483000-29483144
  hypo

SEQ ID NO: 246009 - DNA, 91 bp, Homo sapiens; identical to SEQ ID NO: 204487
  chr17:29486027-29486118
  hypo

SEQ ID NO: 246010 - DNA, 191 bp, Homo sapiens; identical to SEQ ID NO: 204488
  chr17:29490203-29490394
  hypo

SEQ ID NO: 246011 - DNA, 109 bp, Homo sapiens; identical to SEQ ID NO: 204489
  chr17:29496908-29497017
  hypo

SEQ ID NO: 246012 - DNA, 68 bp, Homo sapiens; identical to SEQ ID NO: 204490
  chr17:29508439-29508507
  hypo

SEQ ID NO: 246013 - DNA, 88 bp, Homo sapiens; identical to SEQ ID NO: 225269
  chr17:29508715-29508803
  hypo

SEQ ID NO: 246014 - DNA, 163 bp, Homo sapiens; identical to SEQ ID NO: 204492
  chr17:29509520-29509683
  hypo

SEQ ID NO: 246015 - DNA, 174 bp, Homo sapiens; identical to SEQ ID NO: 204493
  chr17:29527439-29527613
  hypo

SEQ ID NO: 246016 - DNA, 123 bp, Homo sapiens; identical to SEQ ID NO: 204494
  chr17:29528054-29528177
  hypo

SEQ ID NO: 246017 - DNA, 75 bp, Homo sapiens; identical to SEQ ID NO: 204495
  chr17:29528428-29528503
  hypo

SEQ ID NO: 246018 - DNA, 140 bp, Homo sapiens; identical to SEQ ID NO: 204496
  chr17:29533249-29533389
  hypo

SEQ ID NO: 246019 - DNA, 135 bp, Homo sapiens; identical to SEQ ID NO: 225275
  chr17:29541468-29541603
  hypo

SEQ ID NO: 246020 - DNA, 136 bp, Homo sapiens; identical to SEQ ID NO: 204499
  chr17:29546009-29546145
  hypo

SEQ ID NO: 246021 - DNA, 80 bp, Homo sapiens; identical to SEQ ID NO: 204500
  chr17:29548867-29548947
  hypo

SEQ ID NO: 246022 - DNA, 124 bp, Homo sapiens; identical to SEQ ID NO: 204501
  chr17:29550461-29550585
  hypo

SEQ ID NO: 246023 - DNA, 156 bp, Homo sapiens; identical to SEQ ID NO: 204502
  chr17:29552112-29552268
  hypo

SEQ ID NO: 246024 - DNA, 250 bp, Homo sapiens; identical to SEQ ID NO: 204503
  chr17:29553452-29553702
  hypo

SEQ ID NO: 246025 - DNA, 74 bp, Homo sapiens; identical to SEQ ID NO: 204504
  chr17:29554235-29554309
  hypo

SEQ ID NO: 246026 - DNA, 84 bp, Homo sapiens; identical to SEQ ID NO: 204505
  chr17:29554540-29554624
  hypo

SEQ ID NO: 246027 - DNA, 441 bp, Homo sapiens; identical to SEQ ID NO: 204506
  chr17:29556042-29556483
  hypo

SEQ ID NO: 246028 - DNA, 140 bp, Homo sapiens; identical to SEQ ID NO: 204507
  chr17:29556852-29556992
  hypo

SEQ ID NO: 246029 - DNA, 123 bp, Homo sapiens; identical to SEQ ID NO: 204508
  chr17:29557277-29557400
  hypo

SEQ ID NO: 246030 - DNA, 84 bp, Homo sapiens; identical to SEQ ID NO: 204509
  chr17:29557859-29557943
  hypo

SEQ ID NO: 246031 - DNA, 117 bp, Homo sapiens; identical to SEQ ID NO: 204510
  chr17:29559090-29559207
  hypo

SEQ ID NO: 246032 - DNA, 514 bp, Homo sapiens; identical to SEQ ID NO: 204511
  chr17:29559717-29560231
  hypo

SEQ ID NO: 246033 - DNA, 411 bp, Homo sapiens; identical to SEQ ID NO: 225289
  chr17:29562628-29563039
  hypo

SEQ ID NO: 246034 - DNA, 136 bp, Homo sapiens; identical to SEQ ID NO: 204514
  chr17:29576001-29576137
  hypo

SEQ ID NO: 246035 - DNA, 63 bp, Homo sapiens; identical to SEQ ID NO: 204515
  chr17:29579955-29580018
  hypo

SEQ ID NO: 246036 - DNA, 159 bp, Homo sapiens; identical to SEQ ID NO: 204516
  chr17:29585361-29585520
  hypo

SEQ ID NO: 246037 - DNA, 98 bp, Homo sapiens; identical to SEQ ID NO: 204517
  chr17:29586049-29586147
  hypo

SEQ ID NO: 246038 - DNA, 147 bp, Homo sapiens; identical to SEQ ID NO: 204518
  chr17:29587386-29587533
  hypo

SEQ ID NO: 246039 - DNA, 147 bp, Homo sapiens; identical to SEQ ID NO: 204519
  chr17:29588728-29588875
  hypo

SEQ ID NO: 246040 - DNA, 111 bp, Homo sapiens; identical to SEQ ID NO: 204520
  chr17:29592246-29592357
  hypo

SEQ ID NO: 246041 - DNA, 433 bp, Homo sapiens; identical to SEQ ID NO: 204521
  chr17:29652837-29653270
  hypo

SEQ ID NO: 246042 - DNA, 341 bp, Homo sapiens; identical to SEQ ID NO: 204522
  chr17:29654516-29654857
  hypo

SEQ ID NO: 246043 - DNA, 203 bp, Homo sapiens; identical to SEQ ID NO: 204523
  chr17:29657313-29657516
  hypo

SEQ ID NO: 246044 - DNA, 194 bp, Homo sapiens; identical to SEQ ID NO: 204524
  chr17:29661855-29662049
  hypo

SEQ ID NO: 246045 - DNA, 582 bp, Homo sapiens; identical to SEQ ID NO: 204525
  chr17:29663350-29663932
  hypo

SEQ ID NO: 246046 - DNA, 215 bp, Homo sapiens; identical to SEQ ID NO: 204526
  chr17:29664385-29664600
  hypo

SEQ ID NO: 246047 - DNA, 321 bp, Homo sapiens; identical to SEQ ID NO: 204527
  chr17:29664836-29665157
  hypo

SEQ ID NO: 246048 - DNA, 102 bp, Homo sapiens; identical to SEQ ID NO: 204528
  chr17:29665721-29665823
  hypo

SEQ ID NO: 246049 - DNA, 141 bp, Homo sapiens; identical to SEQ ID NO: 204529
  chr17:29667522-29667663
  hypo

SEQ ID NO: 246050 - DNA, 127 bp, Homo sapiens; identical to SEQ ID NO: 204530
  chr17:29670026-29670153
  hypo

SEQ ID NO: 246051 - DNA, 141 bp, Homo sapiens; identical to SEQ ID NO: 204531
  chr17:29676130-29676271
  hypo

SEQ ID NO: 246052 - DNA, 142 bp, Homo sapiens; identical to SEQ ID NO: 204532
  chr17:29677200-29677342
  hypo

SEQ ID NO: 246053 - DNA, 158 bp, Homo sapiens; identical to SEQ ID NO: 204533
  chr17:29679274-29679432
  hypo

SEQ ID NO: 246054 - DNA, 123 bp, Homo sapiens; identical to SEQ ID NO: 204534
  chr17:29683477-29683600
  hypo

SEQ ID NO: 246055 - DNA, 410 bp, Homo sapiens; identical to SEQ ID NO: 204535
  chr17:29683977-29684387
  hypo

SEQ ID NO: 246056 - DNA, 143 bp, Homo sapiens; identical to SEQ ID NO: 204536
  chr17:29685497-29685640
  hypo

SEQ ID NO: 246057 - DNA, 47 bp, Homo sapiens; identical to SEQ ID NO: 204537
  chr17:29685986-29686033
  hypo

SEQ ID NO: 246058 - DNA, 217 bp, Homo sapiens; identical to SEQ ID NO: 204538
  chr17:29687504-29687721
  hypo

SEQ ID NO: 246059 - DNA, 3665 bp, Homo sapiens; identical to SEQ ID NO: 204539
  chr17:29701030-29704695
  hypo

SEQ ID NO: 246060 - DNA, 311 bp, Homo sapiens; identical to SEQ ID NO: 225316
  chr17:29718210-29718521
  hypo

SEQ ID NO: 246061 - DNA, 332 bp, Homo sapiens; identical to SEQ ID NO: 225317
  chr17:29718750-29719082
  hypo

SEQ ID NO: 246062 - DNA, 149 bp, Homo sapiens; identical to SEQ ID NO: 225318
  chr17:29719115-29719264
  hypo

SEQ ID NO: 246063 - DNA, 399 bp, Homo sapiens; identical to SEQ ID NO: 225319
  chr17:30592474-30592873
  hypo

SEQ ID NO: 246064 - DNA, 300 bp, Homo sapiens; identical to SEQ ID NO: 225320
  chr17:30592941-30593241
  hypo

SEQ ID NO: 246065 - DNA, 89 bp, Homo sapiens; identical to SEQ ID NO: 204542
  chr17:30813422-30813511
  hypo

SEQ ID NO: 246066 - DNA, 105 bp, Homo sapiens; identical to SEQ ID NO: 225322
  chr17:31203740-31203845
  hypo

SEQ ID NO: 246067 - DNA, 1020 bp, Homo sapiens; identical to SEQ ID NO: 225323
  chr17:31618501-31619521
  hypo

SEQ ID NO: 246068 - DNA, 540 bp, Homo sapiens; identical to SEQ ID NO: 225324
  chr17:31619558-31620098
  hypo

SEQ ID NO: 246069 - DNA, 180 bp, Homo sapiens; identical to SEQ ID NO: 225325
  chr17:32907649-32907829
  hypo

SEQ ID NO: 246070 - DNA, 1020 bp, Homo sapiens; identical to SEQ ID NO: 225326
  chr17:32908017-32909037
  hypo

SEQ ID NO: 246071 - DNA, 506 bp, Homo sapiens; identical to SEQ ID NO: 225327
  chr17:33814244-33814750
  hypo

SEQ ID NO: 246072 - DNA, 540 bp, Homo sapiens; identical to SEQ ID NO: 225328
  chr17:35165416-35165956
  hypo

SEQ ID NO: 246073 - DNA, 180 bp, Homo sapiens; identical to SEQ ID NO: 225329
  chr17:35291819-35291999
  hypo

SEQ ID NO: 246074 - DNA, 480 bp, Homo sapiens; identical to SEQ ID NO: 225330
  chr17:35292051-35292531
  hypo

SEQ ID NO: 246075 - DNA, 300 bp, Homo sapiens; identical to SEQ ID NO: 225331
  chr17:35716510-35716810
  hypo

SEQ ID NO: 246076 - DNA, 180 bp, Homo sapiens; identical to SEQ ID NO: 225332
  chr17:36102291-36102471
  hypo

SEQ ID NO: 246077 - DNA, 180 bp, Homo sapiens; identical to SEQ ID NO: 225333
  chr17:36103475-36103655
  hypo

SEQ ID NO: 246078 - DNA, 660 bp, Homo sapiens; identical to SEQ ID NO: 225334
  chr17:36104135-36104795
  hypo

SEQ ID NO: 246079 - DNA, 62 bp, Homo sapiens; identical to SEQ ID NO: 225335
  chr17:36762346-36762408
  hypo

SEQ ID NO: 246080 - DNA, 137 bp, Homo sapiens; identical to SEQ ID NO: 225336
  chr17:36886754-36886891
  hypo

SEQ ID NO: 246081 - DNA, 37 bp, Homo sapiens; identical to SEQ ID NO: 204569
  chr17:36904350-36904387
  hypo

SEQ ID NO: 246082 - DNA, 240 bp, Homo sapiens; identical to SEQ ID NO: 225338
  chr17:36905157-36905397
  hypo

SEQ ID NO: 246083 - DNA, 960 bp, Homo sapiens; identical to SEQ ID NO: 225339
  chr17:37381233-37382193
  hypo

SEQ ID NO: 246084 - DNA, 1440 bp, Homo sapiens; identical to SEQ ID NO: 225340
  chr17:37761493-37762933
  hypo

SEQ ID NO: 246085 - DNA, 339 bp, Homo sapiens; identical to SEQ ID NO: 204583
  chr17:37774745-37775084
  hypo

SEQ ID NO: 246086 - DNA, 105 bp, Homo sapiens; identical to SEQ ID NO: 225342
  chr17:37782849-37782954
  hypo

SEQ ID NO: 246087 - DNA, 764 bp, Homo sapiens; identical to SEQ ID NO: 225343
  chr17:37783129-37783893
  hypo

SEQ ID NO: 246088 - DNA, 724 bp, Homo sapiens; identical to SEQ ID NO: 225344
  chr17:37823746-37824470
  hypo

SEQ ID NO: 246089 - DNA, 47 bp, Homo sapiens; identical to SEQ ID NO: 225345
  chr17:38024015-38024062
  hypo

SEQ ID NO: 246090 - DNA, 39 bp, Homo sapiens; identical to SEQ ID NO: 204593
  chr17:38228513-38228552
  hypo

SEQ ID NO: 246091 - DNA, 1096 bp, Homo sapiens; identical to SEQ ID NO: 225347
  chr17:38498084-38499180
  hypo

SEQ ID NO: 246092 - DNA, 480 bp, Homo sapiens; identical to SEQ ID NO: 225348
  chr17:39683684-39684164
  hypo

SEQ ID NO: 246093 - DNA, 465 bp, Homo sapiens; identical to SEQ ID NO: 225349
  chr17:39684189-39684654
  hypo

SEQ ID NO: 246094 - DNA, 453 bp, Homo sapiens; identical to SEQ ID NO: 225350
  chr17:40332756-40333209
  hypo

SEQ ID NO: 246095 - DNA, 53 bp, Homo sapiens; identical to SEQ ID NO: 225351
  chr17:40333432-40333485
  hypo

SEQ ID NO: 246096 - DNA, 106 bp, Homo sapiens; identical to SEQ ID NO: 225352
  chr17:40427459-40427565
  hypo

SEQ ID NO: 246097 - DNA, 344 bp, Homo sapiens; identical to SEQ ID NO: 225353
  chr17:40428918-40429262
  hypo

SEQ ID NO: 246098 - DNA, 162 bp, Homo sapiens; identical to SEQ ID NO: 225354
  chr17:40575277-40575439
  hypo

SEQ ID NO: 246099 - DNA, 209 bp, Homo sapiens; identical to SEQ ID NO: 225355
  chr17:40950645-40950854
  hypo

SEQ ID NO: 246100 - DNA, 514 bp, Homo sapiens; identical to SEQ ID NO: 225356
  chr17:41196311-41196825
  hypo

SEQ ID NO: 246101 - DNA, 694 bp, Homo sapiens; identical to SEQ ID NO: 225357
  chr17:41197125-41197819
  hypo

SEQ ID NO: 246102 - DNA, 61 bp, Homo sapiens; identical to SEQ ID NO: 225358
  chr17:41199659-41199720
  hypo

SEQ ID NO: 246103 - DNA, 74 bp, Homo sapiens; identical to SEQ ID NO: 225359
  chr17:41201137-41201211
  hypo

SEQ ID NO: 246104 - DNA, 55 bp, Homo sapiens; identical to SEQ ID NO: 225360
  chr17:41203079-41203134
  hypo

SEQ ID NO: 246105 - DNA, 84 bp, Homo sapiens; identical to SEQ ID NO: 225361
  chr17:41209068-41209152
  hypo

SEQ ID NO: 246106 - DNA, 41 bp, Homo sapiens; identical to SEQ ID NO: 225362
  chr17:41215349-41215390
  hypo

SEQ ID NO: 246107 - DNA, 78 bp, Homo sapiens; identical to SEQ ID NO: 225363
  chr17:41215890-41215968
  hypo

SEQ ID NO: 246108 - DNA, 88 bp, Homo sapiens; identical to SEQ ID NO: 225364
  chr17:41219624-41219712
  hypo

SEQ ID NO: 246109 - DNA, 311 bp, Homo sapiens; identical to SEQ ID NO: 225365
  chr17:41222944-41223255
  hypo

SEQ ID NO: 246110 - DNA, 191 bp, Homo sapiens; identical to SEQ ID NO: 225366
  chr17:41226347-41226538
  hypo

SEQ ID NO: 246111 - DNA, 127 bp, Homo sapiens; identical to SEQ ID NO: 225367
  chr17:41228504-41228631
  hypo

SEQ ID NO: 246112 - DNA, 172 bp, Homo sapiens; identical to SEQ ID NO: 225368
  chr17:41234420-41234592
  hypo

SEQ ID NO: 246113 - DNA, 89 bp, Homo sapiens; identical to SEQ ID NO: 225369
  chr17:41242960-41243049
  hypo

SEQ ID NO: 246114 - DNA, 3426 bp, Homo sapiens; identical to SEQ ID NO: 225370
  chr17:41243451-41246877
  hypo

SEQ ID NO: 246115 - DNA, 77 bp, Homo sapiens; identical to SEQ ID NO: 225371
  chr17:41247862-41247939
  hypo

SEQ ID NO: 246116 - DNA, 46 bp, Homo sapiens; identical to SEQ ID NO: 225372
  chr17:41249260-41249306
  hypo

SEQ ID NO: 246117 - DNA, 106 bp, Homo sapiens; identical to SEQ ID NO: 225373
  chr17:41251791-41251897
  hypo

SEQ ID NO: 246118 - DNA, 140 bp, Homo sapiens; identical to SEQ ID NO: 225374
  chr17:41256138-41256278
  hypo

SEQ ID NO: 246119 - DNA, 89 bp, Homo sapiens; identical to SEQ ID NO: 225375
  chr17:41256884-41256973
  hypo

SEQ ID NO: 246120 - DNA, 78 bp, Homo sapiens; identical to SEQ ID NO: 225376
  chr17:41258472-41258550
  hypo

SEQ ID NO: 246121 - DNA, 54 bp, Homo sapiens; identical to SEQ ID NO: 225377
  chr17:41267742-41267796
  hypo

SEQ ID NO: 246122 - DNA, 99 bp, Homo sapiens; identical to SEQ ID NO: 225378
  chr17:41276033-41276132
  hypo

SEQ ID NO: 246123 - DNA, 213 bp, Homo sapiens; identical to SEQ ID NO: 225379
  chr17:41277287-41277500
  hypo

SEQ ID NO: 246124 - DNA, 521 bp, Homo sapiens; identical to SEQ ID NO: 225380
  chr17:41723353-41723874
  hypo

SEQ ID NO: 246125 - DNA, 321 bp, Homo sapiens; identical to SEQ ID NO: 225381
  chr17:42015411-42015732
  hypo

SEQ ID NO: 246126 - DNA, 104 bp, Homo sapiens; identical to SEQ ID NO: 225382
  chr17:42015758-42015862
  hypo

SEQ ID NO: 246127 - DNA, 523 bp, Homo sapiens; identical to SEQ ID NO: 225383
  chr17:42030245-42030768
  hypo

SEQ ID NO: 246128 - DNA, 300 bp, Homo sapiens; identical to SEQ ID NO: 225384
  chr17:42092220-42092520
  hypo

SEQ ID NO: 246129 - DNA, 343 bp, Homo sapiens; identical to SEQ ID NO: 225385
  chr17:42287964-42288307
  hypo

SEQ ID NO: 246130 - DNA, 35 bp, Homo sapiens; identical to SEQ ID NO: 225386
  chr17:42299435-42299470
  hypo

SEQ ID NO: 246131 - DNA, 384 bp, Homo sapiens; identical to SEQ ID NO: 225387
  chr17:42402728-42403112
  hypo

SEQ ID NO: 246132 - DNA, 139 bp, Homo sapiens; identical to SEQ ID NO: 225388
  chr17:42441055-42441194
  hypo

SEQ ID NO: 246133 - DNA, 600 bp, Homo sapiens; identical to SEQ ID NO: 225389
  chr17:42635137-42635737
  hypo

SEQ ID NO: 246134 - DNA, 1660 bp, Homo sapiens; identical to SEQ ID NO: 225390
  chr17:42906492-42908152
  hypo

SEQ ID NO: 246135 - DNA, 180 bp, Homo sapiens; identical to SEQ ID NO: 225391
  chr17:43044597-43044777
  hypo

SEQ ID NO: 246136 - DNA, 720 bp, Homo sapiens; identical to SEQ ID NO: 225392
  chr17:43044835-43045555
  hypo

SEQ ID NO: 246137 - DNA, 324 bp, Homo sapiens; identical to SEQ ID NO: 225393
  chr17:43298577-43298901
  hypo

SEQ ID NO: 246138 - DNA, 240 bp, Homo sapiens; identical to SEQ ID NO: 225394
  chr17:43325108-43325348
  hypo

SEQ ID NO: 246139 - DNA, 938 bp, Homo sapiens; identical to SEQ ID NO: 225395
  chr17:45810488-45811426
  hypo

SEQ ID NO: 246140 - DNA, 617 bp, Homo sapiens; identical to SEQ ID NO: 225396
  chr17:45928210-45928827
  hypo

SEQ ID NO: 246141 - DNA, 522 bp, Homo sapiens; identical to SEQ ID NO: 225397
  chr17:46089485-46090007
  hypo

SEQ ID NO: 246142 - DNA, 454 bp, Homo sapiens; identical to SEQ ID NO: 225398
  chr17:46124859-46125313
  hypo

SEQ ID NO: 246143 - DNA, 417 bp, Homo sapiens; identical to SEQ ID NO: 225399
  chr17:46570076-46570493
  hypo

SEQ ID NO: 246144 - DNA, 600 bp, Homo sapiens; identical to SEQ ID NO: 225400
  chr17:46659261-46659861
  hypo

SEQ ID NO: 246145 - DNA, 297 bp, Homo sapiens; identical to SEQ ID NO: 225401
  chr17:46683517-46683814
  hypo

SEQ ID NO: 246146 - DNA, 960 bp, Homo sapiens; identical to SEQ ID NO: 225402
  chr17:46687570-46688530
  hypo

SEQ ID NO: 246147 - DNA, 832 bp, Homo sapiens; identical to SEQ ID NO: 225403
  chr17:46690031-46690863
  hypo

SEQ ID NO: 246148 - DNA, 600 bp, Homo sapiens; identical to SEQ ID NO: 225404
  chr17:46691505-46692105
  hypo

SEQ ID NO: 246149 - DNA, 111 bp, Homo sapiens; identical to SEQ ID NO: 225405
  chr17:46696472-46696583
  hypo

SEQ ID NO: 246150 - DNA, 257 bp, Homo sapiens; identical to SEQ ID NO: 225406
  chr17:46696652-46696909
  hypo

SEQ ID NO: 246151 - DNA, 532 bp, Homo sapiens; identical to SEQ ID NO: 225407
  chr17:46723839-46724371
  hypo

SEQ ID NO: 246152 - DNA, 105 bp, Homo sapiens; identical to SEQ ID NO: 225408
  chr17:46724660-46724765
  hypo

SEQ ID NO: 246153 - DNA, 180 bp, Homo sapiens; identical to SEQ ID NO: 225409
  chr17:46805544-46805724
  hypo

SEQ ID NO: 246154 - DNA, 180 bp, Homo sapiens; identical to SEQ ID NO: 225410
  chr17:46805977-46806157
  hypo

SEQ ID NO: 246155 - DNA, 420 bp, Homo sapiens; identical to SEQ ID NO: 225411
  chr17:47073207-47073627
  hypo

SEQ ID NO: 246156 - DNA, 360 bp, Homo sapiens; identical to SEQ ID NO: 225412
  chr17:47074109-47074469
  hypo

SEQ ID NO: 246157 - DNA, 900 bp, Homo sapiens; identical to SEQ ID NO: 225413
  chr17:47074539-47075439
  hypo

SEQ ID NO: 246158 - DNA, 594 bp, Homo sapiens; identical to SEQ ID NO: 225414
  chr17:47301641-47302235
  hypo

SEQ ID NO: 246159 - DNA, 902 bp, Homo sapiens; identical to SEQ ID NO: 225415
  chr17:47307530-47308432
  hypo

SEQ ID NO: 246160 - DNA, 154 bp, Homo sapiens; identical to SEQ ID NO: 225416
  chr17:47547683-47547837
  hypo

SEQ ID NO: 246161 - DNA, 1680 bp, Homo sapiens; identical to SEQ ID NO: 225417
  chr17:47573481-47575161
  hypo

SEQ ID NO: 246162 - DNA, 851 bp, Homo sapiens; identical to SEQ ID NO: 225418
  chr17:47653242-47654093
  hypo

SEQ ID NO: 246163 - DNA, 324 bp, Homo sapiens; identical to SEQ ID NO: 225419
  chr17:47928288-47928612
  hypo

SEQ ID NO: 246164 - DNA, 104 bp, Homo sapiens; identical to SEQ ID NO: 225420
  chr17:47928704-47928808
  hypo

SEQ ID NO: 246165 - DNA, 173 bp, Homo sapiens; identical to SEQ ID NO: 225421
  chr17:47929093-47929266
  hypo

SEQ ID NO: 246166 - DNA, 388 bp, Homo sapiens; identical to SEQ ID NO: 225422
  chr17:48041212-48041600
  hypo

SEQ ID NO: 246167 - DNA, 180 bp, Homo sapiens; identical to SEQ ID NO: 225423
  chr17:48048955-48049135
  hypo

SEQ ID NO: 246168 - DNA, 300 bp, Homo sapiens; identical to SEQ ID NO: 225424
  chr17:48049178-48049478
  hypo

SEQ ID NO: 246169 - DNA, 180 bp, Homo sapiens; identical to SEQ ID NO: 225425
  chr17:48049575-48049755
  hypo

SEQ ID NO: 246170 - DNA, 598 bp, Homo sapiens; identical to SEQ ID NO: 225426
  chr17:48070684-48071282
  hypo

SEQ ID NO: 246171 - DNA, 282 bp, Homo sapiens; identical to SEQ ID NO: 225427
  chr17:48072333-48072615
  hypo

SEQ ID NO: 246172 - DNA, 540 bp, Homo sapiens; identical to SEQ ID NO: 225428
  chr17:48619187-48619727
  hypo

SEQ ID NO: 246173 - DNA, 382 bp, Homo sapiens; identical to SEQ ID NO: 225429
  chr17:49008769-49009151
  hypo

SEQ ID NO: 246174 - DNA, 105 bp, Homo sapiens; identical to SEQ ID NO: 225430
  chr17:49028010-49028115
  hypo

SEQ ID NO: 246175 - DNA, 180 bp, Homo sapiens; identical to SEQ ID NO: 225431
  chr17:50235170-50235350
  hypo

SEQ ID NO: 246176 - DNA, 180 bp, Homo sapiens; identical to SEQ ID NO: 225432
  chr17:50235489-50235669
  hypo

SEQ ID NO: 246177 - DNA, 180 bp, Homo sapiens; identical to SEQ ID NO: 225433
  chr17:50235736-50235916
  hypo

SEQ ID NO: 246178 - DNA, 755 bp, Homo sapiens; identical to SEQ ID NO: 225434
  chr17:53342191-53342946
  hypo

SEQ ID NO: 246179 - DNA, 105 bp, Homo sapiens; identical to SEQ ID NO: 225435
  chr17:54671710-54671815
  hypo

SEQ ID NO: 246180 - DNA, 475 bp, Homo sapiens; identical to SEQ ID NO: 225436
  chr17:54671921-54672396
  hypo

SEQ ID NO: 246181 - DNA, 353 bp, Homo sapiens; identical to SEQ ID NO: 204717
  chr17:54910847-54911200
  hypo

SEQ ID NO: 246182 - DNA, 822 bp, Homo sapiens; identical to SEQ ID NO: 225438
  chr17:54911484-54912306
  hypo

SEQ ID NO: 246183 - DNA, 462 bp, Homo sapiens; identical to SEQ ID NO: 225439
  chr17:56032083-56032545
  hypo

SEQ ID NO: 246184 - DNA, 240 bp, Homo sapiens; identical to SEQ ID NO: 225440
  chr17:56296509-56296749
  hypo

SEQ ID NO: 246185 - DNA, 180 bp, Homo sapiens; identical to SEQ ID NO: 225441
  chr17:56326897-56327077
  hypo

SEQ ID NO: 246186 - DNA, 153 bp, Homo sapiens; identical to SEQ ID NO: 225442
  chr17:56327148-56327301
  hypo

SEQ ID NO: 246187 - DNA, 610 bp, Homo sapiens; identical to SEQ ID NO: 204722
  chr17:56401719-56402329
  hypo

SEQ ID NO: 246188 - DNA, 300 bp, Homo sapiens; identical to SEQ ID NO: 225444
  chr17:56429365-56429665
  hypo

SEQ ID NO: 246189 - DNA, 240 bp, Homo sapiens; identical to SEQ ID NO: 225445
  chr17:56429759-56429999
  hypo

SEQ ID NO: 246190 - DNA, 1080 bp, Homo sapiens; identical to SEQ ID NO: 225446
  chr17:56833075-56834155
  hypo

SEQ ID NO: 246191 - DNA, 104 bp, Homo sapiens; identical to SEQ ID NO: 225447
  chr17:56834206-56834310
  hypo

SEQ ID NO: 246192 - DNA, 659 bp, Homo sapiens; identical to SEQ ID NO: 225448
  chr17:58216876-58217535
  hypo

SEQ ID NO: 246193 - DNA, 801 bp, Homo sapiens; identical to SEQ ID NO: 204729
  chr17:58677543-58678344
  hypo

SEQ ID NO: 246194 - DNA, 242 bp, Homo sapiens; identical to SEQ ID NO: 204730
  chr17:58700868-58701110
  hypo

SEQ ID NO: 246195 - DNA, 125 bp, Homo sapiens; identical to SEQ ID NO: 204731
  chr17:58711213-58711338
  hypo

SEQ ID NO: 246196 - DNA, 191 bp, Homo sapiens; identical to SEQ ID NO: 204732
  chr17:58725252-58725443
  hypo

SEQ ID NO: 246197 - DNA, 250 bp, Homo sapiens; identical to SEQ ID NO: 204733
  chr17:58733952-58734202
  hypo

SEQ ID NO: 246198 - DNA, 1530 bp, Homo sapiens; identical to SEQ ID NO: 204734
  chr17:58740342-58741872
  hypo

SEQ ID NO: 246199 - DNA, 749 bp, Homo sapiens; identical to SEQ ID NO: 204735
  chr17:58742892-58743641
  hypo

SEQ ID NO: 246200 - DNA, 1080 bp, Homo sapiens; identical to SEQ ID NO: 225456
  chr17:59475677-59476757
  hypo

SEQ ID NO: 246201 - DNA, 180 bp, Homo sapiens; identical to SEQ ID NO: 225457
  chr17:59476849-59477029
  hypo

SEQ ID NO: 246202 - DNA, 600 bp, Homo sapiens; identical to SEQ ID NO: 225458
  chr17:59477173-59477773
  hypo

SEQ ID NO: 246203 - DNA, 480 bp, Homo sapiens; identical to SEQ ID NO: 225459
  chr17:59478017-59478497
  hypo

SEQ ID NO: 246204 - DNA, 51 bp, Homo sapiens; identical to SEQ ID NO: 225460
  chr17:60771357-60771408
  hypo

SEQ ID NO: 246205 - DNA, 142 bp, Homo sapiens; identical to SEQ ID NO: 225461
  chr17:60781450-60781592
  hypo

SEQ ID NO: 246206 - DNA, 468 bp, Homo sapiens; identical to SEQ ID NO: 225462
  chr17:60885402-60885870
  hypo

SEQ ID NO: 246207 - DNA, 436 bp, Homo sapiens; identical to SEQ ID NO: 225463
  chr17:61553820-61554256
  hypo

SEQ ID NO: 246208 - DNA, 699 bp, Homo sapiens; identical to SEQ ID NO: 225464
  chr17:61777763-61778462
  hypo

SEQ ID NO: 246209 - DNA, 105 bp, Homo sapiens; identical to SEQ ID NO: 225465
  chr17:61921178-61921283
  hypo

SEQ ID NO: 246210 - DNA, 62 bp, Homo sapiens; identical to SEQ ID NO: 204753
  chr17:62915906-62915968
  hypo

SEQ ID NO: 246211 - DNA, 822 bp, Homo sapiens; identical to SEQ ID NO: 225467
  chr17:63555673-63556495
  hypo

SEQ ID NO: 246212 - DNA, 240 bp, Homo sapiens; identical to SEQ ID NO: 225468
  chr17:63556895-63557135
  hypo

SEQ ID NO: 246213 - DNA, 145 bp, Homo sapiens; identical to SEQ ID NO: 225469
  chr17:63557249-63557394
  hypo

SEQ ID NO: 246214 - DNA, 687 bp, Homo sapiens; identical to SEQ ID NO: 225470
  chr17:64187875-64188562
  hypo

SEQ ID NO: 246215 - DNA, 105 bp, Homo sapiens; identical to SEQ ID NO: 225471
  chr17:64257870-64257975
  hypo

SEQ ID NO: 246216 - DNA, 173 bp, Homo sapiens; identical to SEQ ID NO: 225472
  chr17:64298539-64298712
  hypo

SEQ ID NO: 246217 - DNA, 685 bp, Homo sapiens; identical to SEQ ID NO: 225473
  chr17:64298989-64299674
  hypo

SEQ ID NO: 246218 - DNA, 56 bp, Homo sapiens; identical to SEQ ID NO: 225474
  chr17:65242142-65242198
  hypo

SEQ ID NO: 246219 - DNA, 139 bp, Homo sapiens; identical to SEQ ID NO: 225475
  chr17:66434324-66434463
  hypo

SEQ ID NO: 246220 - DNA, 1399 bp, Homo sapiens; identical to SEQ ID NO: 225476
  chr17:66596140-66597539
  hypo

SEQ ID NO: 246221 - DNA, 1200 bp, Homo sapiens; identical to SEQ ID NO: 225477
  chr17:68164817-68166017
  hypo

SEQ ID NO: 246222 - DNA, 51 bp, Homo sapiens; identical to SEQ ID NO: 204765
  chr17:70270193-70270244
  hypo

SEQ ID NO: 246223 - DNA, 180 bp, Homo sapiens; identical to SEQ ID NO: 225479
  chr17:71161088-71161268
  hypo

SEQ ID NO: 246224 - DNA, 120 bp, Homo sapiens; identical to SEQ ID NO: 225480
  chr17:71161302-71161422
  hypo

SEQ ID NO: 246225 - DNA, 889 bp, Homo sapiens; identical to SEQ ID NO: 225481
  chr17:71161493-71162382
  hypo

SEQ ID NO: 246226 - DNA, 610 bp, Homo sapiens; identical to SEQ ID NO: 225482
  chr17:71306967-71307577
  hypo

SEQ ID NO: 246227 - DNA, 180 bp, Homo sapiens; identical to SEQ ID NO: 225483
  chr17:71307865-71308045
  hypo

SEQ ID NO: 246228 - DNA, 443 bp, Homo sapiens; identical to SEQ ID NO: 225484
  chr17:71639094-71639537
  hypo

SEQ ID NO: 246229 - DNA, 300 bp, Homo sapiens; identical to SEQ ID NO: 225485
  chr17:71639613-71639913
  hypo

SEQ ID NO: 246230 - DNA, 141 bp, Homo sapiens; identical to SEQ ID NO: 225486
  chr17:71641543-71641684
  hypo

SEQ ID NO: 246231 - DNA, 887 bp, Homo sapiens; identical to SEQ ID NO: 225487
  chr17:71948434-71949321
  hypo

SEQ ID NO: 246232 - DNA, 643 bp, Homo sapiens; identical to SEQ ID NO: 225488
  chr17:72208474-72209117
  hypo

SEQ ID NO: 246233 - DNA, 215 bp, Homo sapiens; identical to SEQ ID NO: 225489
  chr17:72270296-72270511
  hypo

SEQ ID NO: 246234 - DNA, 488 bp, Homo sapiens; identical to SEQ ID NO: 225490
  chr17:72322041-72322529
  hypo

SEQ ID NO: 246235 - DNA, 300 bp, Homo sapiens; identical to SEQ ID NO: 225491
  chr17:72450107-72450407
  hypo

SEQ ID NO: 246236 - DNA, 180 bp, Homo sapiens; identical to SEQ ID NO: 225492
  chr17:72920320-72920500
  hypo

SEQ ID NO: 246237 - DNA, 351 bp, Homo sapiens; identical to SEQ ID NO: 225493
  chr17:72920681-72921032
  hypo

SEQ ID NO: 246238 - DNA, 518 bp, Homo sapiens; identical to SEQ ID NO: 225494
  chr17:72983606-72984124
  hypo

SEQ ID NO: 246239 - DNA, 180 bp, Homo sapiens; identical to SEQ ID NO: 225495
  chr17:73008579-73008759
  hypo

SEQ ID NO: 246240 - DNA, 469 bp, Homo sapiens; identical to SEQ ID NO: 225496
  chr17:73073584-73074053
  hypo

SEQ ID NO: 246241 - DNA, 363 bp, Homo sapiens; identical to SEQ ID NO: 225497
  chr17:73084122-73084485
  hypo

SEQ ID NO: 246242 - DNA, 83 bp, Homo sapiens; identical to SEQ ID NO: 204789
  chr17:73422368-73422451
  hypo

SEQ ID NO: 246243 - DNA, 483 bp, Homo sapiens; identical to SEQ ID NO: 225499
  chr17:73511002-73511485
  hypo

SEQ ID NO: 246244 - DNA, 981 bp, Homo sapiens; identical to SEQ ID NO: 225500
  chr17:73584148-73585129
  hypo

SEQ ID NO: 246245 - DNA, 214 bp, Homo sapiens; identical to SEQ ID NO: 225501
  chr17:73585691-73585905
  hypo

SEQ ID NO: 246246 - DNA, 180 bp, Homo sapiens; identical to SEQ ID NO: 225502
  chr17:73585949-73586129
  hypo

SEQ ID NO: 246247 - DNA, 45 bp, Homo sapiens; identical to SEQ ID NO: 225503
  chr17:73874667-73874712
  hypo

SEQ ID NO: 246248 - DNA, 104 bp, Homo sapiens; identical to SEQ ID NO: 225504
  chr17:74072119-74072223
  hypo

SEQ ID NO: 246249 - DNA, 900 bp, Homo sapiens; identical to SEQ ID NO: 225505
  chr17:74072525-74073425
  hypo

SEQ ID NO: 246250 - DNA, 365 bp, Homo sapiens; identical to SEQ ID NO: 225506
  chr17:74235822-74236187
  hypo

SEQ ID NO: 246251 - DNA, 790 bp, Homo sapiens; identical to SEQ ID NO: 225507
  chr17:74533662-74534452
  hypo

SEQ ID NO: 246252 - DNA, 324 bp, Homo sapiens; identical to SEQ ID NO: 225508
  chr17:74581101-74581425
  hypo

SEQ ID NO: 246253 - DNA, 224 bp, Homo sapiens; identical to SEQ ID NO: 204804
  chr17:74732259-74732483
  hypo

SEQ ID NO: 246254 - DNA, 261 bp, Homo sapiens; identical to SEQ ID NO: 225510
  chr17:74732944-74733205
  hypo

SEQ ID NO: 246255 - DNA, 88 bp, Homo sapiens; identical to SEQ ID NO: 204806
  chr17:74864229-74864317
  hypo

SEQ ID NO: 246256 - DNA, 577 bp, Homo sapiens; identical to SEQ ID NO: 225512
  chr17:74864603-74865180
  hypo

SEQ ID NO: 246257 - DNA, 540 bp, Homo sapiens; identical to SEQ ID NO: 225513
  chr17:75368837-75369377
  hypo

SEQ ID NO: 246258 - DNA, 780 bp, Homo sapiens; identical to SEQ ID NO: 225514
  chr17:75369397-75370177
  hypo

SEQ ID NO: 246259 - DNA, 180 bp, Homo sapiens; identical to SEQ ID NO: 225515
  chr17:75370207-75370387
  hypo

SEQ ID NO: 246260 - DNA, 264 bp, Homo sapiens; identical to SEQ ID NO: 225516
  chr17:76227788-76228052
  hypo

SEQ ID NO: 246261 - DNA, 178 bp, Homo sapiens; identical to SEQ ID NO: 225517
  chr17:76228143-76228321
  hypo

SEQ ID NO: 246262 - DNA, 164 bp, Homo sapiens; identical to SEQ ID NO: 225518
  chr17:76337744-76337908
  hypo

SEQ ID NO: 246263 - DNA, 384 bp, Homo sapiens; identical to SEQ ID NO: 225519
  chr17:76338191-76338575
  hypo

SEQ ID NO: 246264 - DNA, 157 bp, Homo sapiens; identical to SEQ ID NO: 225520
  chr17:76349231-76349388
  hypo

SEQ ID NO: 246265 - DNA, 105 bp, Homo sapiens; identical to SEQ ID NO: 225521
  chr17:76921447-76921552
  hypo

SEQ ID NO: 246266 - DNA, 80 bp, Homo sapiens; identical to SEQ ID NO: 225522
  chr17:77070949-77071029
  hypo

SEQ ID NO: 246267 - DNA, 151 bp, Homo sapiens; identical to SEQ ID NO: 225523
  chr17:77071240-77071391
  hypo

SEQ ID NO: 246268 - DNA, 1587 bp, Homo sapiens; identical to SEQ ID NO: 225524
  chr17:77178616-77180203
  hypo

SEQ ID NO: 246269 - DNA, 174 bp, Homo sapiens; identical to SEQ ID NO: 204822
  chr17:77771456-77771630
  hypo

SEQ ID NO: 246270 - DNA, 105 bp, Homo sapiens; identical to SEQ ID NO: 225526
  chr17:77774710-77774815
  hypo

SEQ ID NO: 246271 - DNA, 386 bp, Homo sapiens; identical to SEQ ID NO: 225527
  chr17:77774854-77775240
  hypo

SEQ ID NO: 246272 - DNA, 202 bp, Homo sapiens; identical to SEQ ID NO: 225528
  chr17:77776572-77776774
  hypo

SEQ ID NO: 246273 - DNA, 104 bp, Homo sapiens; identical to SEQ ID NO: 225529
  chr17:77777390-77777494
  hypo

SEQ ID NO: 246274 - DNA, 753 bp, Homo sapiens; identical to SEQ ID NO: 225530
  chr17:77777713-77778466
  hypo

SEQ ID NO: 246275 - DNA, 180 bp, Homo sapiens; identical to SEQ ID NO: 225531
  chr17:77788295-77788475
  hypo

SEQ ID NO: 246276 - DNA, 660 bp, Homo sapiens; identical to SEQ ID NO: 225532
  chr17:77788681-77789341
  hypo

SEQ ID NO: 246277 - DNA, 257 bp, Homo sapiens; identical to SEQ ID NO: 225533
  chr17:77813600-77813857
  hypo

SEQ ID NO: 246278 - DNA, 100 bp, Homo sapiens; identical to SEQ ID NO: 204832
  chr17:78009418-78009518
  hypo

SEQ ID NO: 246279 - DNA, 105 bp, Homo sapiens; identical to SEQ ID NO: 225535
  chr17:78009924-78010029
  hypo

SEQ ID NO: 246280 - DNA, 443 bp, Homo sapiens; identical to SEQ ID NO: 225536
  chr17:78010060-78010503
  hypo

SEQ ID NO: 246281 - DNA, 136 bp, Homo sapiens; identical to SEQ ID NO: 225537
  chr17:78388546-78388682
  hypo

SEQ ID NO: 246282 - DNA, 90 bp, Homo sapiens; identical to SEQ ID NO: 225538
  chr17:78389461-78389551
  hypo

SEQ ID NO: 246283 - DNA, 395 bp, Homo sapiens; identical to SEQ ID NO: 225539
  chr17:78428377-78428772
  hypo

SEQ ID NO: 246284 - DNA, 180 bp, Homo sapiens; identical to SEQ ID NO: 225540
  chr17:78450833-78451013
  hypo

SEQ ID NO: 246285 - DNA, 1260 bp, Homo sapiens; identical to SEQ ID NO: 225541
  chr17:78451102-78452362
  hypo

SEQ ID NO: 246286 - DNA, 188 bp, Homo sapiens; identical to SEQ ID NO: 225542
  chr17:78720009-78720197
  hypo

SEQ ID NO: 246287 - DNA, 319 bp, Homo sapiens; identical to SEQ ID NO: 225543
  chr17:79008242-79008561
  hypo

SEQ ID NO: 246288 - DNA, 224 bp, Homo sapiens; identical to SEQ ID NO: 225544
  chr17:79008841-79009065
  hypo

SEQ ID NO: 246289 - DNA, 240 bp, Homo sapiens; identical to SEQ ID NO: 225545
  chr17:79009197-79009437
  hypo

SEQ ID NO: 246290 - DNA, 258 bp, Homo sapiens; identical to SEQ ID NO: 225546
  chr17:79205174-79205432
  hypo

SEQ ID NO: 246291 - DNA, 105 bp, Homo sapiens; identical to SEQ ID NO: 225547
  chr17:79319199-79319304
  hypo

SEQ ID NO: 246292 - DNA, 1057 bp, Homo sapiens; identical to SEQ ID NO: 225548
  chr17:79761562-79762619
  hypo

SEQ ID NO: 246293 - DNA, 138 bp, Homo sapiens; identical to SEQ ID NO: 225549
  chr17:79885939-79886077
  hypo

SEQ ID NO: 246294 - DNA, 191 bp, Homo sapiens; identical to SEQ ID NO: 225550
  chr17:79917289-79917480
  hypo

SEQ ID NO: 246295 - DNA, 687 bp, Homo sapiens; identical to SEQ ID NO: 225551
  chr17:79988931-79989618
  hypo

SEQ ID NO: 246296 - DNA, 40 bp, Homo sapiens; identical to SEQ ID NO: 204847
  chr17:79989900-79989940
  hypo

SEQ ID NO: 246297 - DNA, 180 bp, Homo sapiens; identical to SEQ ID NO: 225553
  chr17:80009037-80009217
  hypo

SEQ ID NO: 246298 - DNA, 406 bp, Homo sapiens; identical to SEQ ID NO: 225554
  chr17:80186330-80186736
  hypo

SEQ ID NO: 246299 - DNA, 687 bp, Homo sapiens; identical to SEQ ID NO: 225555
  chr17:80186749-80187436
  hypo

SEQ ID NO: 246300 - DNA, 619 bp, Homo sapiens; identical to SEQ ID NO: 225556
  chr17:80189391-80190010
  hypo

SEQ ID NO: 246301 - DNA, 104 bp, Homo sapiens; identical to SEQ ID NO: 225557
  chr17:80190046-80190150
  hypo

SEQ ID NO: 246302 - DNA, 113 bp, Homo sapiens; identical to SEQ ID NO: 225558
  chr17:80277698-80277811
  hypo

SEQ ID NO: 246303 - DNA, 713 bp, Homo sapiens; identical to SEQ ID NO: 225559
  chr17:80329367-80330080
  hypo

SEQ ID NO: 246304 - DNA, 424 bp, Homo sapiens; identical to SEQ ID NO: 225560
  chr17:80332278-80332702
  hypo

SEQ ID NO: 246305 - DNA, 154 bp, Homo sapiens; identical to SEQ ID NO: 225561
  chr17:80503192-80503346
  hypo

SEQ ID NO: 246306 - DNA, 420 bp, Homo sapiens; identical to SEQ ID NO: 225562
  chr17:80655876-80656296
  hypo

SEQ ID NO: 246307 - DNA, 600 bp, Homo sapiens; identical to SEQ ID NO: 225563
  chr17:80656473-80657073
  hypo

SEQ ID NO: 246308 - DNA, 673 bp, Homo sapiens; identical to SEQ ID NO: 225564
  chr17:80692982-80693655
  hypo

SEQ ID NO: 246309 - DNA, 104 bp, Homo sapiens; identical to SEQ ID NO: 225565
  chr17:80693749-80693853
  hypo

SEQ ID NO: 246310 - DNA, 36 bp, Homo sapiens; identical to SEQ ID NO: 225566
  chr17:81009162-81009198
  hypo

SEQ ID NO: 246311 - DNA, 105 bp, Homo sapiens; identical to SEQ ID NO: 225567
  chr17:81037053-81037158
  hypo

SEQ ID NO: 246312 - DNA, 1098 bp, Homo sapiens; identical to SEQ ID NO: 225568
  chr17:81038242-81039340
  hypo

SEQ ID NO: 246313 - DNA, 869 bp, Homo sapiens; identical to SEQ ID NO: 225569
  chr18:500255-501124
  hypo

SEQ ID NO: 246314 - DNA, 215 bp, Homo sapiens; identical to SEQ ID NO: 204856
  chr18:712223-712438
  hypo

SEQ ID NO: 246315 - DNA, 1477 bp, Homo sapiens; identical to SEQ ID NO: 225571
  chr18:811503-812980
  hypo

SEQ ID NO: 246316 - DNA, 145 bp, Homo sapiens; identical to SEQ ID NO: 204859
  chr18:2571378-2571523
  hypo

SEQ ID NO: 246317 - DNA, 1849 bp, Homo sapiens; identical to SEQ ID NO: 225573
  chr18:2846576-2848425
  hypo

SEQ ID NO: 246318 - DNA, 768 bp, Homo sapiens; identical to SEQ ID NO: 225574
  chr18:2906028-2906796
  hypo

SEQ ID NO: 246319 - DNA, 166 bp, Homo sapiens; identical to SEQ ID NO: 225575
  chr18:2907034-2907200
  hypo

SEQ ID NO: 246320 - DNA, 631 bp, Homo sapiens; identical to SEQ ID NO: 204865
  chr18:3447898-3448529
  hypo

SEQ ID NO: 246321 - DNA, 35 bp, Homo sapiens; identical to SEQ ID NO: 225577
  chr18:3448760-3448795
  hypo

SEQ ID NO: 246322 - DNA, 1920 bp, Homo sapiens; identical to SEQ ID NO: 225578
  chr18:3449184-3451104
  hypo

SEQ ID NO: 246323 - DNA, 857 bp, Homo sapiens; identical to SEQ ID NO: 225579
  chr18:3451407-3452264
  hypo

SEQ ID NO: 246324 - DNA, 960 bp, Homo sapiens; identical to SEQ ID NO: 225580
  chr18:3879186-3880146
  hypo

SEQ ID NO: 246325 - DNA, 720 bp, Homo sapiens; identical to SEQ ID NO: 225581
  chr18:4454915-4455635
  hypo

SEQ ID NO: 246326 - DNA, 540 bp, Homo sapiens; identical to SEQ ID NO: 225582
  chr18:5542733-5543273
  hypo

SEQ ID NO: 246327 - DNA, 720 bp, Homo sapiens; identical to SEQ ID NO: 225583
  chr18:5628266-5628986
  hypo

SEQ ID NO: 246328 - DNA, 180 bp, Homo sapiens; identical to SEQ ID NO: 225584
  chr18:5629032-5629212
  hypo

SEQ ID NO: 246329 - DNA, 840 bp, Homo sapiens; identical to SEQ ID NO: 225585
  chr18:5629625-5630465
  hypo

SEQ ID NO: 246330 - DNA, 720 bp, Homo sapiens; identical to SEQ ID NO: 225586
  chr18:5894841-5895561
  hypo

SEQ ID NO: 246331 - DNA, 360 bp, Homo sapiens; identical to SEQ ID NO: 225587
  chr18:5895624-5895984
  hypo

SEQ ID NO: 246332 - DNA, 180 bp, Homo sapiens; identical to SEQ ID NO: 204874
  chr18:6414233-6414413
  hypo

SEQ ID NO: 246333 - DNA, 116 bp, Homo sapiens; identical to SEQ ID NO: 225589
  chr18:7116831-7116947
  hypo

SEQ ID NO: 246334 - DNA, 291 bp, Homo sapiens; identical to SEQ ID NO: 225590
  chr18:7117884-7118175
  hypo

SEQ ID NO: 246335 - DNA, 546 bp, Homo sapiens; identical to SEQ ID NO: 225591
  chr18:7566544-7567090
  hypo

SEQ ID NO: 246336 - DNA, 1320 bp, Homo sapiens; identical to SEQ ID NO: 225592
  chr18:7567260-7568580
  hypo

SEQ ID NO: 246337 - DNA, 50 bp, Homo sapiens; identical to SEQ ID NO: 225593
  chr18:8016761-8016811
  hypo

SEQ ID NO: 246338 - DNA, 270 bp, Homo sapiens; identical to SEQ ID NO: 225594
  chr18:8367259-8367529
  hypo

SEQ ID NO: 246339 - DNA, 43 bp, Homo sapiens; identical to SEQ ID NO: 204885
  chr18:8748272-8748315
  hypo

SEQ ID NO: 246340 - DNA, 463 bp, Homo sapiens; identical to SEQ ID NO: 225596
  chr18:9708048-9708511
  hypo

SEQ ID NO: 246341 - DNA, 386 bp, Homo sapiens; identical to SEQ ID NO: 225597
  chr18:9708784-9709170
  hypo

SEQ ID NO: 246342 - DNA, 780 bp, Homo sapiens; identical to SEQ ID NO: 225598
  chr18:12253760-12254540
  hypo

SEQ ID NO: 246343 - DNA, 360 bp, Homo sapiens; identical to SEQ ID NO: 225599
  chr18:12307802-12308162
  hypo

SEQ ID NO: 246344 - DNA, 836 bp, Homo sapiens; identical to SEQ ID NO: 225600
  chr18:12308216-12309052
  hypo

SEQ ID NO: 246345 - DNA, 673 bp, Homo sapiens; identical to SEQ ID NO: 225601
  chr18:12407708-12408381
  hypo

SEQ ID NO: 246346 - DNA, 330 bp, Homo sapiens; identical to SEQ ID NO: 225602
  chr18:13217136-13217466
  hypo

SEQ ID NO: 246347 - DNA, 300 bp, Homo sapiens; identical to SEQ ID NO: 225603
  chr18:13217553-13217853
  hypo

SEQ ID NO: 246348 - DNA, 120 bp, Homo sapiens; identical to SEQ ID NO: 225604
  chr18:13218083-13218203
  hypo

SEQ ID NO: 246349 - DNA, 282 bp, Homo sapiens; identical to SEQ ID NO: 225605
  chr18:13823998-13824280
  hypo

SEQ ID NO: 246350 - DNA, 117 bp, Homo sapiens; identical to SEQ ID NO: 225606
  chr18:15197987-15198104
  hypo

SEQ ID NO: 246351 - DNA, 104 bp, Homo sapiens; identical to SEQ ID NO: 225607
  chr18:19751236-19751340
  hypo

SEQ ID NO: 246352 - DNA, 458 bp, Homo sapiens; identical to SEQ ID NO: 225608
  chr18:19751579-19752037
  hypo

SEQ ID NO: 246353 - DNA, 300 bp, Homo sapiens; identical to SEQ ID NO: 225609
  chr18:20512674-20512974
  hypo

SEQ ID NO: 246354 - DNA, 157 bp, Homo sapiens; identical to SEQ ID NO: 225610
  chr18:20715480-20715637
  hypo

SEQ ID NO: 246355 - DNA, 540 bp, Homo sapiens; identical to SEQ ID NO: 225611
  chr18:20716332-20716872
  hypo

SEQ ID NO: 246356 - DNA, 240 bp, Homo sapiens; identical to SEQ ID NO: 225612
  chr18:21242427-21242667
  hypo

SEQ ID NO: 246357 - DNA, 247 bp, Homo sapiens; identical to SEQ ID NO: 225613
  chr18:21594467-21594714
  hypo

SEQ ID NO: 246358 - DNA, 105 bp, Homo sapiens; identical to SEQ ID NO: 225614
  chr18:22653839-22653944
  hypo

SEQ ID NO: 246359 - DNA, 1080 bp, Homo sapiens; identical to SEQ ID NO: 225615
  chr18:22929559-22930639
  hypo

SEQ ID NO: 246360 - DNA, 960 bp, Homo sapiens; identical to SEQ ID NO: 225616
  chr18:23806207-23807167
  hypo

SEQ ID NO: 246361 - DNA, 104 bp, Homo sapiens; identical to SEQ ID NO: 225617
  chr18:23807195-23807299
  hypo

SEQ ID NO: 246362 - DNA, 478 bp, Homo sapiens; identical to SEQ ID NO: 225618
  chr18:24127737-24128215
  hypo

SEQ ID NO: 246363 - DNA, 1020 bp, Homo sapiens; identical to SEQ ID NO: 225619
  chr18:25756641-25757661
  hypo

SEQ ID NO: 246364 - DNA, 36 bp, Homo sapiens; identical to SEQ ID NO: 204939
  chr18:29265160-29265196
  hypo

SEQ ID NO: 246365 - DNA, 170 bp, Homo sapiens; identical to SEQ ID NO: 204940
  chr18:29598282-29598452
  hypo

SEQ ID NO: 246366 - DNA, 51 bp, Homo sapiens; identical to SEQ ID NO: 225622
  chr18:29598683-29598734
  hypo

SEQ ID NO: 246367 - DNA, 840 bp, Homo sapiens; identical to SEQ ID NO: 225623
  chr18:30050339-30051179
  hypo

SEQ ID NO: 246368 - DNA, 862 bp, Homo sapiens; identical to SEQ ID NO: 225624
  chr18:30349741-30350603
  hypo

SEQ ID NO: 246369 - DNA, 652 bp, Homo sapiens; identical to SEQ ID NO: 225625
  chr18:31803199-31803851
  hypo

SEQ ID NO: 246370 - DNA, 923 bp, Homo sapiens; identical to SEQ ID NO: 225626
  chr18:32556605-32557528
  hypo

SEQ ID NO: 246371 - DNA, 180 bp, Homo sapiens; identical to SEQ ID NO: 225627
  chr18:32557767-32557947
  hypo

SEQ ID NO: 246372 - DNA, 78 bp, Homo sapiens; identical to SEQ ID NO: 225628
  chr18:33077970-33078048
  hypo

SEQ ID NO: 246373 - DNA, 460 bp, Homo sapiens; identical to SEQ ID NO: 225629
  chr18:33530037-33530497
  hypo

SEQ ID NO: 246374 - DNA, 240 bp, Homo sapiens; identical to SEQ ID NO: 225630
  chr18:33766971-33767211
  hypo

SEQ ID NO: 246375 - DNA, 366 bp, Homo sapiens; identical to SEQ ID NO: 225631
  chr18:35145440-35145806
  hypo

SEQ ID NO: 246376 - DNA, 180 bp, Homo sapiens; identical to SEQ ID NO: 225632
  chr18:35146110-35146290
  hypo

SEQ ID NO: 246377 - DNA, 180 bp, Homo sapiens; identical to SEQ ID NO: 225633
  chr18:35146388-35146568
  hypo

SEQ ID NO: 246378 - DNA, 891 bp, Homo sapiens; identical to SEQ ID NO: 225634
  chr18:42258979-42259870
  hypo

SEQ ID NO: 246379 - DNA, 780 bp, Homo sapiens; identical to SEQ ID NO: 225635
  chr18:42259922-42260702
  hypo

SEQ ID NO: 246380 - DNA, 67 bp, Homo sapiens; identical to SEQ ID NO: 204969
  chr18:42531892-42531959
  hypo

SEQ ID NO: 246381 - DNA, 360 bp, Homo sapiens; identical to SEQ ID NO: 225637
  chr18:43913506-43913866
  hypo

SEQ ID NO: 246382 - DNA, 180 bp, Homo sapiens; identical to SEQ ID NO: 225638
  chr18:43913903-43914083
  hypo

SEQ ID NO: 246383 - DNA, 540 bp, Homo sapiens; identical to SEQ ID NO: 225639
  chr18:43914128-43914668
  hypo

SEQ ID NO: 246384 - DNA, 180 bp, Homo sapiens; identical to SEQ ID NO: 225640
  chr18:43914859-43915039
  hypo

SEQ ID NO: 246385 - DNA, 33 bp, Homo sapiens; identical to SEQ ID NO: 225641
  chr18:43924114-43924147
  hypo

SEQ ID NO: 246386 - DNA, 960 bp, Homo sapiens; identical to SEQ ID NO: 225642
  chr18:44336181-44337141
  hypo

SEQ ID NO: 246387 - DNA, 1184 bp, Homo sapiens; identical to SEQ ID NO: 225643
  chr18:44773598-44774782
  hypo

SEQ ID NO: 246388 - DNA, 360 bp, Homo sapiens; identical to SEQ ID NO: 225644
  chr18:45687972-45688332
  hypo

SEQ ID NO: 246389 - DNA, 451 bp, Homo sapiens; identical to SEQ ID NO: 225645
  chr18:45934525-45934976
  hypo

SEQ ID NO: 246390 - DNA, 180 bp, Homo sapiens; identical to SEQ ID NO: 225646
  chr18:45935034-45935214
  hypo

SEQ ID NO: 246391 - DNA, 1260 bp, Homo sapiens; identical to SEQ ID NO: 225647
  chr18:45935758-45937018
  hypo

SEQ ID NO: 246392 - DNA, 660 bp, Homo sapiens; identical to SEQ ID NO: 225648
  chr18:46065843-46066503
  hypo

SEQ ID NO: 246393 - DNA, 743 bp, Homo sapiens; identical to SEQ ID NO: 225649
  chr18:46067174-46067917
  hypo

SEQ ID NO: 246394 - DNA, 104 bp, Homo sapiens; identical to SEQ ID NO: 204986
  chr18:46501913-46502017
  hypo

SEQ ID NO: 246395 - DNA, 398 bp, Homo sapiens; identical to SEQ ID NO: 225651
  chr18:46502672-46503070
  hypo

SEQ ID NO: 246396 - DNA, 420 bp, Homo sapiens; identical to SEQ ID NO: 225652
  chr18:47721200-47721620
  hypo

SEQ ID NO: 246397 - DNA, 240 bp, Homo sapiens; identical to SEQ ID NO: 225653
  chr18:47792665-47792905
  hypo

SEQ ID NO: 246398 - DNA, 221 bp, Homo sapiens; identical to SEQ ID NO: 225654
  chr18:47813482-47813703
  hypo

SEQ ID NO: 246399 - DNA, 159 bp, Homo sapiens; identical to SEQ ID NO: 225655
  chr18:48494273-48494432
  hypo

SEQ ID NO: 246400 - DNA, 1080 bp, Homo sapiens; identical to SEQ ID NO: 225656
  chr18:53254870-53255950
  hypo

SEQ ID NO: 246401 - DNA, 398 bp, Homo sapiens; identical to SEQ ID NO: 225657
  chr18:53256998-53257396
  hypo

SEQ ID NO: 246402 - DNA, 40 bp, Homo sapiens; identical to SEQ ID NO: 205004
  chr18:53257761-53257801
  hypo

SEQ ID NO: 246403 - DNA, 447 bp, Homo sapiens; identical to SEQ ID NO: 225659
  chr18:56888290-56888737
  hypo

SEQ ID NO: 246404 - DNA, 880 bp, Homo sapiens; identical to SEQ ID NO: 225660
  chr18:56936005-56936885
  hypo

SEQ ID NO: 246405 - DNA, 1140 bp, Homo sapiens; identical to SEQ ID NO: 225661
  chr18:57363792-57364932
  hypo

SEQ ID NO: 246406 - DNA, 240 bp, Homo sapiens; identical to SEQ ID NO: 225662
  chr18:59001251-59001491
  hypo

SEQ ID NO: 246407 - DNA, 39 bp, Homo sapiens; identical to SEQ ID NO: 205026
  chr18:59992691-59992730
  hypo

SEQ ID NO: 246408 - DNA, 2149 bp, Homo sapiens; identical to SEQ ID NO: 225664
  chr18:60189547-60191696
  hypo

SEQ ID NO: 246409 - DNA, 95 bp, Homo sapiens; identical to SEQ ID NO: 225665
  chr18:60191979-60192074
  hypo

SEQ ID NO: 246410 - DNA, 97 bp, Homo sapiens; identical to SEQ ID NO: 205029
  chr18:60194122-60194219
  hypo

SEQ ID NO: 246411 - DNA, 501 bp, Homo sapiens; identical to SEQ ID NO: 225667
  chr18:60263493-60263994
  hypo

SEQ ID NO: 246412 - DNA, 157 bp, Homo sapiens; identical to SEQ ID NO: 225668
  chr18:60264043-60264200
  hypo

SEQ ID NO: 246413 - DNA, 1435 bp, Homo sapiens; identical to SEQ ID NO: 205030
  chr18:60382939-60384374
  hypo

SEQ ID NO: 246414 - DNA, 335 bp, Homo sapiens; identical to SEQ ID NO: 225670
  chr18:63417370-63417705
  hypo

SEQ ID NO: 246415 - DNA, 180 bp, Homo sapiens; identical to SEQ ID NO: 225671
  chr18:63417751-63417931
  hypo

SEQ ID NO: 246416 - DNA, 480 bp, Homo sapiens; identical to SEQ ID NO: 225672
  chr18:67067604-67068084
  hypo

SEQ ID NO: 246417 - DNA, 540 bp, Homo sapiens; identical to SEQ ID NO: 225673
  chr18:67068138-67068678
  hypo

SEQ ID NO: 246418 - DNA, 180 bp, Homo sapiens; identical to SEQ ID NO: 225674
  chr18:67068988-67069168
  hypo

SEQ ID NO: 246419 - DNA, 105 bp, Homo sapiens; identical to SEQ ID NO: 225675
  chr18:67955841-67955946
  hypo

SEQ ID NO: 246420 - DNA, 353 bp, Homo sapiens; identical to SEQ ID NO: 205037
  chr18:67956670-67957023
  hypo

SEQ ID NO: 246421 - DNA, 307 bp, Homo sapiens; identical to SEQ ID NO: 225677
  chr18:70535426-70535733
  hypo

SEQ ID NO: 246422 - DNA, 540 bp, Homo sapiens; identical to SEQ ID NO: 225678
  chr18:70535760-70536300
  hypo

SEQ ID NO: 246423 - DNA, 360 bp, Homo sapiens; identical to SEQ ID NO: 225679
  chr18:70536480-70536840
  hypo

SEQ ID NO: 246424 - DNA, 105 bp, Homo sapiens; identical to SEQ ID NO: 225680
  chr18:71958562-71958667
  hypo

SEQ ID NO: 246425 - DNA, 417 bp, Homo sapiens; identical to SEQ ID NO: 225681
  chr18:72123592-72124009
  hypo

SEQ ID NO: 246426 - DNA, 105 bp, Homo sapiens; identical to SEQ ID NO: 225682
  chr18:72921091-72921196
  hypo

SEQ ID NO: 246427 - DNA, 828 bp, Homo sapiens; identical to SEQ ID NO: 225683
  chr18:74844288-74845116
  hypo

SEQ ID NO: 246428 - DNA, 240 bp, Homo sapiens; identical to SEQ ID NO: 225684
  chr18:74961590-74961830
  hypo

SEQ ID NO: 246429 - DNA, 780 bp, Homo sapiens; identical to SEQ ID NO: 225685
  chr18:74961896-74962676
  hypo

SEQ ID NO: 246430 - DNA, 450 bp, Homo sapiens; identical to SEQ ID NO: 225686
  chr18:75612005-75612455
  hypo

SEQ ID NO: 246431 - DNA, 277 bp, Homo sapiens; identical to SEQ ID NO: 225687
  chr18:77159885-77160162
  hypo

SEQ ID NO: 246432 - DNA, 385 bp, Homo sapiens; identical to SEQ ID NO: 225688
  chr18:77193399-77193784
  hypo

SEQ ID NO: 246433 - DNA, 587 bp, Homo sapiens; identical to SEQ ID NO: 225689
  chr18:77547934-77548521
  hypo

SEQ ID NO: 246434 - DNA, 1440 bp, Homo sapiens; identical to SEQ ID NO: 225690
  chr18:77557781-77559221
  hypo

SEQ ID NO: 246435 - DNA, 158 bp, Homo sapiens; identical to SEQ ID NO: 205049
  chr18:77710773-77710931
  hypo

SEQ ID NO: 246436 - DNA, 35 bp, Homo sapiens; identical to SEQ ID NO: 225692
  chr18:77712073-77712108
  hypo

SEQ ID NO: 246437 - DNA, 135 bp, Homo sapiens; identical to SEQ ID NO: 225693
  chr18:77794468-77794603
  hypo

SEQ ID NO: 246438 - DNA, 31 bp, Homo sapiens; identical to SEQ ID NO: 205051
  chr18:77867028-77867059
  hypo

SEQ ID NO: 246439 - DNA, 41 bp, Homo sapiens; identical to SEQ ID NO: 205062
  chr19:507106-507147
  hypo

SEQ ID NO: 246440 - DNA, 464 bp, Homo sapiens; identical to SEQ ID NO: 225696
  chr19:603555-604019
  hypo

SEQ ID NO: 246441 - DNA, 509 bp, Homo sapiens; identical to SEQ ID NO: 225697
  chr19:639660-640169
  hypo

SEQ ID NO: 246442 - DNA, 179 bp, Homo sapiens; identical to SEQ ID NO: 225698
  chr19:680400-680579
  hypo

SEQ ID NO: 246443 - DNA, 720 bp, Homo sapiens; identical to SEQ ID NO: 225699
  chr19:813414-814134
  hypo

SEQ ID NO: 246444 - DNA, 180 bp, Homo sapiens; identical to SEQ ID NO: 225700
  chr19:814413-814593
  hypo

SEQ ID NO: 246445 - DNA, 278 bp, Homo sapiens; identical to SEQ ID NO: 225701
  chr19:942303-942581
  hypo

SEQ ID NO: 246446 - DNA, 105 bp, Homo sapiens; identical to SEQ ID NO: 225702
  chr19:942807-942912
  hypo

SEQ ID NO: 246447 - DNA, 663 bp, Homo sapiens; identical to SEQ ID NO: 225703
  chr19:1000337-1001000
  hypo

SEQ ID NO: 246448 - DNA, 162 bp, Homo sapiens; identical to SEQ ID NO: 225704
  chr19:1071620-1071782
  hypo

SEQ ID NO: 246449 - DNA, 365 bp, Homo sapiens; identical to SEQ ID NO: 225705
  chr19:1173036-1173401
  hypo

SEQ ID NO: 246450 - DNA, 33 bp, Homo sapiens; identical to SEQ ID NO: 225706
  chr19:1173617-1173650
  hypo

SEQ ID NO: 246451 - DNA, 639 bp, Homo sapiens; identical to SEQ ID NO: 225707
  chr19:1206691-1207330
  hypo

SEQ ID NO: 246452 - DNA, 105 bp, Homo sapiens; identical to SEQ ID NO: 225708
  chr19:1401653-1401758
  hypo

SEQ ID NO: 246453 - DNA, 785 bp, Homo sapiens; identical to SEQ ID NO: 225709
  chr19:1446334-1447119
  hypo

SEQ ID NO: 246454 - DNA, 475 bp, Homo sapiens; identical to SEQ ID NO: 225710
  chr19:1449908-1450383
  hypo

SEQ ID NO: 246455 - DNA, 628 bp, Homo sapiens; identical to SEQ ID NO: 225711
  chr19:1467200-1467828
  hypo

SEQ ID NO: 246456 - DNA, 219 bp, Homo sapiens; identical to SEQ ID NO: 225712
  chr19:1491116-1491335
  hypo

SEQ ID NO: 246457 - DNA, 183 bp, Homo sapiens; identical to SEQ ID NO: 205082
  chr19:1546217-1546400
  hypo

SEQ ID NO: 246458 - DNA, 104 bp, Homo sapiens; identical to SEQ ID NO: 225714
  chr19:1568463-1568567
  hypo

SEQ ID NO: 246459 - DNA, 906 bp, Homo sapiens; identical to SEQ ID NO: 225715
  chr19:1748599-1749505
  hypo

SEQ ID NO: 246460 - DNA, 581 bp, Homo sapiens; identical to SEQ ID NO: 225716
  chr19:1749595-1750176
  hypo

SEQ ID NO: 246461 - DNA, 1243 bp, Homo sapiens; identical to SEQ ID NO: 225717
  chr19:1754362-1755605
  hypo

SEQ ID NO: 246462 - DNA, 379 bp, Homo sapiens; identical to SEQ ID NO: 225718
  chr19:1876315-1876694
  hypo

SEQ ID NO: 246463 - DNA, 507 bp, Homo sapiens; identical to SEQ ID NO: 225719
  chr19:1978630-1979137
  hypo

SEQ ID NO: 246464 - DNA, 540 bp, Homo sapiens; identical to SEQ ID NO: 225720
  chr19:2165005-2165545
  hypo

SEQ ID NO: 246465 - DNA, 180 bp, Homo sapiens; identical to SEQ ID NO: 225721
  chr19:2168929-2169109
  hypo

SEQ ID NO: 246466 - DNA, 272 bp, Homo sapiens; identical to SEQ ID NO: 225722
  chr19:2273764-2274036
  hypo

SEQ ID NO: 246467 - DNA, 1053 bp, Homo sapiens; identical to SEQ ID NO: 225723
  chr19:2289937-2290990
  hypo

SEQ ID NO: 246468 - DNA, 156 bp, Homo sapiens; identical to SEQ ID NO: 225724
  chr19:2329086-2329242
  hypo

SEQ ID NO: 246469 - DNA, 506 bp, Homo sapiens; identical to SEQ ID NO: 225725
  chr19:2488615-2489121
  hypo

SEQ ID NO: 246470 - DNA, 577 bp, Homo sapiens; identical to SEQ ID NO: 225726
  chr19:2702443-2703020
  hypo

SEQ ID NO: 246471 - DNA, 300 bp, Homo sapiens; identical to SEQ ID NO: 225727
  chr19:2944752-2945052
  hypo

SEQ ID NO: 246472 - DNA, 540 bp, Homo sapiens; identical to SEQ ID NO: 225728
  chr19:2950439-2950979
  hypo

SEQ ID NO: 246473 - DNA, 141 bp, Homo sapiens; identical to SEQ ID NO: 205110
  chr19:2977372-2977513
  hypo

SEQ ID NO: 246474 - DNA, 87 bp, Homo sapiens; identical to SEQ ID NO: 205112
  chr19:3094304-3094391
  hypo

SEQ ID NO: 246475 - DNA, 143 bp, Homo sapiens; identical to SEQ ID NO: 225731
  chr19:3094777-3094920
  hypo

SEQ ID NO: 246476 - DNA, 300 bp, Homo sapiens; identical to SEQ ID NO: 225732
  chr19:3361073-3361373
  hypo

SEQ ID NO: 246477 - DNA, 481 bp, Homo sapiens; identical to SEQ ID NO: 225733
  chr19:3367271-3367752
  hypo

SEQ ID NO: 246478 - DNA, 57 bp, Homo sapiens; identical to SEQ ID NO: 225734
  chr19:3573237-3573294
  hypo

SEQ ID NO: 246479 - DNA, 337 bp, Homo sapiens; identical to SEQ ID NO: 225735
  chr19:3585428-3585765
  hypo

SEQ ID NO: 246480 - DNA, 105 bp, Homo sapiens; identical to SEQ ID NO: 225736
  chr19:3606360-3606465
  hypo

SEQ ID NO: 246481 - DNA, 489 bp, Homo sapiens; identical to SEQ ID NO: 225737
  chr19:3606743-3607232
  hypo

SEQ ID NO: 246482 - DNA, 181 bp, Homo sapiens; identical to SEQ ID NO: 225738
  chr19:3670951-3671132
  hypo

SEQ ID NO: 246483 - DNA, 228 bp, Homo sapiens; identical to SEQ ID NO: 225739
  chr19:3671894-3672122
  hypo

SEQ ID NO: 246484 - DNA, 1107 bp, Homo sapiens; identical to SEQ ID NO: 225740
  chr19:3785504-3786611
  hypo

SEQ ID NO: 246485 - DNA, 229 bp, Homo sapiens; identical to SEQ ID NO: 225741
  chr19:3821974-3822203
  hypo

SEQ ID NO: 246486 - DNA, 777 bp, Homo sapiens; identical to SEQ ID NO: 225742
  chr19:4053797-4054574
  hypo

SEQ ID NO: 246487 - DNA, 240 bp, Homo sapiens; identical to SEQ ID NO: 225743
  chr19:4054913-4055153
  hypo

SEQ ID NO: 246488 - DNA, 97 bp, Homo sapiens; identical to SEQ ID NO: 205124
  chr19:4064872-4064969
  hypo

SEQ ID NO: 246489 - DNA, 140 bp, Homo sapiens; identical to SEQ ID NO: 225745
  chr19:4198021-4198161
  hypo

SEQ ID NO: 246490 - DNA, 105 bp, Homo sapiens; identical to SEQ ID NO: 225746
  chr19:4278856-4278961
  hypo

SEQ ID NO: 246491 - DNA, 563 bp, Homo sapiens; identical to SEQ ID NO: 225747
  chr19:4279317-4279880
  hypo

SEQ ID NO: 246492 - DNA, 152 bp, Homo sapiens; identical to SEQ ID NO: 225748
  chr19:4280025-4280177
  hypo

SEQ ID NO: 246493 - DNA, 236 bp, Homo sapiens; identical to SEQ ID NO: 225749
  chr19:4304482-4304718
  hypo

SEQ ID NO: 246494 - DNA, 144 bp, Homo sapiens; identical to SEQ ID NO: 225750
  chr19:4432845-4432989
  hypo

SEQ ID NO: 246495 - DNA, 248 bp, Homo sapiens; identical to SEQ ID NO: 225751
  chr19:4523781-4524029
  hypo

SEQ ID NO: 246496 - DNA, 105 bp, Homo sapiens; identical to SEQ ID NO: 225752
  chr19:4580776-4580881
  hypo

SEQ ID NO: 246497 - DNA, 118 bp, Homo sapiens; identical to SEQ ID NO: 225753
  chr19:4581110-4581228
  hypo

SEQ ID NO: 246498 - DNA, 105 bp, Homo sapiens; identical to SEQ ID NO: 225754
  chr19:5608066-5608171
  hypo

SEQ ID NO: 246499 - DNA, 141 bp, Homo sapiens; identical to SEQ ID NO: 205137
  chr19:5804852-5804993
  hypo

SEQ ID NO: 246500 - DNA, 776 bp, Homo sapiens; identical to SEQ ID NO: 205141
  chr19:6110226-6111002
  hypo

SEQ ID NO: 246501 - DNA, 180 bp, Homo sapiens; identical to SEQ ID NO: 225757
  chr19:6590336-6590516
  hypo

SEQ ID NO: 246502 - DNA, 616 bp, Homo sapiens; identical to SEQ ID NO: 225758
  chr19:6590602-6591218
  hypo

SEQ ID NO: 246503 - DNA, 130 bp, Homo sapiens; identical to SEQ ID NO: 225759
  chr19:7197095-7197225
  hypo

SEQ ID NO: 246504 - DNA, 992 bp, Homo sapiens; identical to SEQ ID NO: 225760
  chr19:7293530-7294522
  hypo

SEQ ID NO: 246505 - DNA, 345 bp, Homo sapiens; identical to SEQ ID NO: 225761
  chr19:7459630-7459975
  hypo

SEQ ID NO: 246506 - DNA, 588 bp, Homo sapiens; identical to SEQ ID NO: 225762
  chr19:7460095-7460683
  hypo

SEQ ID NO: 246507 - DNA, 105 bp, Homo sapiens; identical to SEQ ID NO: 225763
  chr19:7553842-7553947
  hypo

SEQ ID NO: 246508 - DNA, 389 bp, Homo sapiens; identical to SEQ ID NO: 225764
  chr19:7660603-7660992
  hypo

SEQ ID NO: 246509 - DNA, 540 bp, Homo sapiens; identical to SEQ ID NO: 225765
  chr19:7677148-7677688
  hypo

SEQ ID NO: 246510 - DNA, 333 bp, Homo sapiens; identical to SEQ ID NO: 225766
  chr19:7677697-7678030
  hypo

SEQ ID NO: 246511 - DNA, 621 bp, Homo sapiens; identical to SEQ ID NO: 225767
  chr19:7853194-7853815
  hypo

SEQ ID NO: 246512 - DNA, 160 bp, Homo sapiens; identical to SEQ ID NO: 225768
  chr19:7990126-7990286
  hypo

SEQ ID NO: 246513 - DNA, 300 bp, Homo sapiens; identical to SEQ ID NO: 205158
  chr19:7990894-7991194
  hypo

SEQ ID NO: 246514 - DNA, 420 bp, Homo sapiens; identical to SEQ ID NO: 225770
  chr19:8115159-8115579
  hypo

SEQ ID NO: 246515 - DNA, 706 bp, Homo sapiens; identical to SEQ ID NO: 225771
  chr19:8274271-8274977
  hypo

SEQ ID NO: 246516 - DNA, 227 bp, Homo sapiens; identical to SEQ ID NO: 225772
  chr19:8579005-8579232
  hypo

SEQ ID NO: 246517 - DNA, 518 bp, Homo sapiens; identical to SEQ ID NO: 225773
  chr19:9648914-9649432
  hypo

SEQ ID NO: 246518 - DNA, 136 bp, Homo sapiens; identical to SEQ ID NO: 225774
  chr19:10197446-10197582
  hypo

SEQ ID NO: 246519 - DNA, 262 bp, Homo sapiens; identical to SEQ ID NO: 225775
  chr19:10252656-10252918
  hypo

SEQ ID NO: 246520 - DNA, 105 bp, Homo sapiens; identical to SEQ ID NO: 225776
  chr19:10253329-10253434
  hypo

SEQ ID NO: 246521 - DNA, 184 bp, Homo sapiens; identical to SEQ ID NO: 225777
  chr19:10363159-10363343
  hypo

SEQ ID NO: 246522 - DNA, 224 bp, Homo sapiens; identical to SEQ ID NO: 225778
  chr19:10381049-10381273
  hypo

SEQ ID NO: 246523 - DNA, 114 bp, Homo sapiens; identical to SEQ ID NO: 225779
  chr19:10399961-10400075
  hypo

SEQ ID NO: 246524 - DNA, 540 bp, Homo sapiens; identical to SEQ ID NO: 225780
  chr19:10400310-10400850
  hypo

SEQ ID NO: 246525 - DNA, 180 bp, Homo sapiens; identical to SEQ ID NO: 225781
  chr19:10401004-10401184
  hypo

SEQ ID NO: 246526 - DNA, 840 bp, Homo sapiens; identical to SEQ ID NO: 225782
  chr19:10529691-10530531
  hypo

SEQ ID NO: 246527 - DNA, 420 bp, Homo sapiens; identical to SEQ ID NO: 225783
  chr19:10530637-10531057
  hypo

SEQ ID NO: 246528 - DNA, 807 bp, Homo sapiens; identical to SEQ ID NO: 225784
  chr19:10531142-10531949
  hypo

SEQ ID NO: 246529 - DNA, 145 bp, Homo sapiens; identical to SEQ ID NO: 225785
  chr19:10589794-10589939
  hypo

SEQ ID NO: 246530 - DNA, 303 bp, Homo sapiens; identical to SEQ ID NO: 225786
  chr19:10616223-10616526
  hypo

SEQ ID NO: 246531 - DNA, 660 bp, Homo sapiens; identical to SEQ ID NO: 225787
  chr19:10624894-10625554
  hypo

SEQ ID NO: 246532 - DNA, 283 bp, Homo sapiens; identical to SEQ ID NO: 225788
  chr19:10691749-10692032
  hypo

SEQ ID NO: 246533 - DNA, 86 bp, Homo sapiens; identical to SEQ ID NO: 225789
  chr19:10762176-10762262
  hypo

SEQ ID NO: 246534 - DNA, 436 bp, Homo sapiens; identical to SEQ ID NO: 225790
  chr19:11144095-11144531
  hypo

SEQ ID NO: 246535 - DNA, 187 bp, Homo sapiens; identical to SEQ ID NO: 225791
  chr19:11199872-11200059
  hypo

SEQ ID NO: 246536 - DNA, 460 bp, Homo sapiens; identical to SEQ ID NO: 205181
  chr19:11200842-11201302
  hypo

SEQ ID NO: 246537 - DNA, 266 bp, Homo sapiens; identical to SEQ ID NO: 225793
  chr19:11308102-11308368
  hypo

SEQ ID NO: 246538 - DNA, 42 bp, Homo sapiens; identical to SEQ ID NO: 225794
  chr19:11373072-11373114
  hypo

SEQ ID NO: 246539 - DNA, 105 bp, Homo sapiens; identical to SEQ ID NO: 205184
  chr19:11465993-11466098
  hypo

SEQ ID NO: 246540 - DNA, 353 bp, Homo sapiens; identical to SEQ ID NO: 225796
  chr19:11529748-11530101
  hypo

SEQ ID NO: 246541 - DNA, 1477 bp, Homo sapiens; identical to SEQ ID NO: 225797
  chr19:11590499-11591976
  hypo

SEQ ID NO: 246542 - DNA, 1052 bp, Homo sapiens; identical to SEQ ID NO: 225798
  chr19:11592604-11593656
  hypo

SEQ ID NO: 246543 - DNA, 706 bp, Homo sapiens; identical to SEQ ID NO: 225799
  chr19:11959492-11960198
  hypo

SEQ ID NO: 246544 - DNA, 808 bp, Homo sapiens; identical to SEQ ID NO: 225800
  chr19:12146021-12146829
  hypo

SEQ ID NO: 246545 - DNA, 33 bp, Homo sapiens; identical to SEQ ID NO: 205204
  chr19:12204551-12204584
  hypo

SEQ ID NO: 246546 - DNA, 900 bp, Homo sapiens; identical to SEQ ID NO: 225802
  chr19:12266893-12267793
  hypo

SEQ ID NO: 246547 - DNA, 342 bp, Homo sapiens; identical to SEQ ID NO: 225803
  chr19:12595754-12596096
  hypo

SEQ ID NO: 246548 - DNA, 132 bp, Homo sapiens; identical to SEQ ID NO: 225804
  chr19:12707774-12707906
  hypo

SEQ ID NO: 246549 - DNA, 175 bp, Homo sapiens; identical to SEQ ID NO: 225805
  chr19:12807097-12807272
  hypo

SEQ ID NO: 246550 - DNA, 208 bp, Homo sapiens; identical to SEQ ID NO: 225806
  chr19:12900114-12900322
  hypo

SEQ ID NO: 246551 - DNA, 391 bp, Homo sapiens; identical to SEQ ID NO: 225807
  chr19:12900361-12900752
  hypo

SEQ ID NO: 246552 - DNA, 804 bp, Homo sapiens; identical to SEQ ID NO: 225808
  chr19:12995986-12996790
  hypo

SEQ ID NO: 246553 - DNA, 592 bp, Homo sapiens; identical to SEQ ID NO: 225809
  chr19:13029775-13030367
  hypo

SEQ ID NO: 246554 - DNA, 513 bp, Homo sapiens; identical to SEQ ID NO: 205219
  chr19:13049935-13050448
  hypo

SEQ ID NO: 246555 - DNA, 828 bp, Homo sapiens; identical to SEQ ID NO: 205220
  chr19:13050858-13051686
  hypo

SEQ ID NO: 246556 - DNA, 931 bp, Homo sapiens; identical to SEQ ID NO: 205221
  chr19:13054373-13055304
  hypo

SEQ ID NO: 246557 - DNA, 131 bp, Homo sapiens; identical to SEQ ID NO: 205222
  chr19:13094456-13094587
  hypo

SEQ ID NO: 246558 - DNA, 84 bp, Homo sapiens; identical to SEQ ID NO: 225814
  chr19:13106028-13106112
  hypo

SEQ ID NO: 246559 - DNA, 1217 bp, Homo sapiens; identical to SEQ ID NO: 225815
  chr19:13106172-13107389
  hypo

SEQ ID NO: 246560 - DNA, 360 bp, Homo sapiens; identical to SEQ ID NO: 225816
  chr19:13213570-13213930
  hypo

SEQ ID NO: 246561 - DNA, 119 bp, Homo sapiens; identical to SEQ ID NO: 225817
  chr19:13263755-13263874
  hypo

SEQ ID NO: 246562 - DNA, 154 bp, Homo sapiens; identical to SEQ ID NO: 225818
  chr19:13264169-13264323
  hypo

SEQ ID NO: 246563 - DNA, 180 bp, Homo sapiens; identical to SEQ ID NO: 225819
  chr19:13264480-13264660
  hypo

SEQ ID NO: 246564 - DNA, 180 bp, Homo sapiens; identical to SEQ ID NO: 225820
  chr19:13266248-13266428
  hypo

SEQ ID NO: 246565 - DNA, 557 bp, Homo sapiens; identical to SEQ ID NO: 225821
  chr19:13266493-13267050
  hypo

SEQ ID NO: 246566 - DNA, 62 bp, Homo sapiens; identical to SEQ ID NO: 205232
  chr19:13274019-13274081
  hypo

SEQ ID NO: 246567 - DNA, 342 bp, Homo sapiens; identical to SEQ ID NO: 225823
  chr19:13961269-13961611
  hypo

SEQ ID NO: 246568 - DNA, 221 bp, Homo sapiens; identical to SEQ ID NO: 225824
  chr19:13975797-13976018
  hypo

SEQ ID NO: 246569 - DNA, 600 bp, Homo sapiens; identical to SEQ ID NO: 225825
  chr19:14073813-14074413
  hypo

SEQ ID NO: 246570 - DNA, 559 bp, Homo sapiens; identical to SEQ ID NO: 225826
  chr19:14089418-14089977
  hypo

SEQ ID NO: 246571 - DNA, 48 bp, Homo sapiens; identical to SEQ ID NO: 225827
  chr19:14316561-14316609
  hypo

SEQ ID NO: 246572 - DNA, 443 bp, Homo sapiens; identical to SEQ ID NO: 225828
  chr19:14516821-14517264
  hypo

SEQ ID NO: 246573 - DNA, 499 bp, Homo sapiens; identical to SEQ ID NO: 225829
  chr19:14583048-14583547
  hypo

SEQ ID NO: 246574 - DNA, 143 bp, Homo sapiens; identical to SEQ ID NO: 205239
  chr19:14607038-14607181
  hypo

SEQ ID NO: 246575 - DNA, 180 bp, Homo sapiens; identical to SEQ ID NO: 225831
  chr19:14887413-14887593
  hypo

SEQ ID NO: 246576 - DNA, 1039 bp, Homo sapiens; identical to SEQ ID NO: 225832
  chr19:15090050-15091089
  hypo

SEQ ID NO: 246577 - DNA, 290 bp, Homo sapiens; identical to SEQ ID NO: 225833
  chr19:15235678-15235968
  hypo

SEQ ID NO: 246578 - DNA, 601 bp, Homo sapiens; identical to SEQ ID NO: 225834
  chr19:15288255-15288856
  hypo

SEQ ID NO: 246579 - DNA, 540 bp, Homo sapiens; identical to SEQ ID NO: 225835
  chr19:15342749-15343289
  hypo

SEQ ID NO: 246580 - DNA, 72 bp, Homo sapiens; identical to SEQ ID NO: 225836
  chr19:15479836-15479908
  hypo

SEQ ID NO: 246581 - DNA, 511 bp, Homo sapiens; identical to SEQ ID NO: 225837
  chr19:15695278-15695789
  hypo

SEQ ID NO: 246582 - DNA, 960 bp, Homo sapiens; identical to SEQ ID NO: 225838
  chr19:16187016-16187976
  hypo

SEQ ID NO: 246583 - DNA, 192 bp, Homo sapiens; identical to SEQ ID NO: 225839
  chr19:16222515-16222707
  hypo

SEQ ID NO: 246584 - DNA, 105 bp, Homo sapiens; identical to SEQ ID NO: 225840
  chr19:16638141-16638246
  hypo

SEQ ID NO: 246585 - DNA, 278 bp, Homo sapiens; identical to SEQ ID NO: 225841
  chr19:17137103-17137381
  hypo

SEQ ID NO: 246586 - DNA, 76 bp, Homo sapiens; identical to SEQ ID NO: 225842
  chr19:17137592-17137668
  hypo

SEQ ID NO: 246587 - DNA, 388 bp, Homo sapiens; identical to SEQ ID NO: 225843
  chr19:17355714-17356102
  hypo

SEQ ID NO: 246588 - DNA, 265 bp, Homo sapiens; identical to SEQ ID NO: 225844
  chr19:17357470-17357735
  hypo

SEQ ID NO: 246589 - DNA, 336 bp, Homo sapiens; identical to SEQ ID NO: 225845
  chr19:17392399-17392735
  hypo

SEQ ID NO: 246590 - DNA, 240 bp, Homo sapiens; identical to SEQ ID NO: 225846
  chr19:17392798-17393038
  hypo

SEQ ID NO: 246591 - DNA, 292 bp, Homo sapiens; identical to SEQ ID NO: 225847
  chr19:17501236-17501528
  hypo

SEQ ID NO: 246592 - DNA, 392 bp, Homo sapiens; identical to SEQ ID NO: 225848
  chr19:17649952-17650344
  hypo

SEQ ID NO: 246593 - DNA, 420 bp, Homo sapiens; identical to SEQ ID NO: 225849
  chr19:17716723-17717143
  hypo

SEQ ID NO: 246594 - DNA, 180 bp, Homo sapiens; identical to SEQ ID NO: 225850
  chr19:17717367-17717547
  hypo

SEQ ID NO: 246595 - DNA, 868 bp, Homo sapiens; identical to SEQ ID NO: 225851
  chr19:17798531-17799399
  hypo

SEQ ID NO: 246596 - DNA, 180 bp, Homo sapiens; identical to SEQ ID NO: 225852
  chr19:18117978-18118158
  hypo

SEQ ID NO: 246597 - DNA, 177 bp, Homo sapiens; identical to SEQ ID NO: 225853
  chr19:18118523-18118700
  hypo

SEQ ID NO: 246598 - DNA, 163 bp, Homo sapiens; identical to SEQ ID NO: 225854
  chr19:18271898-18272061
  hypo

SEQ ID NO: 246599 - DNA, 180 bp, Homo sapiens; identical to SEQ ID NO: 225855
  chr19:18343415-18343595
  hypo

SEQ ID NO: 246600 - DNA, 417 bp, Homo sapiens; identical to SEQ ID NO: 225856
  chr19:18343799-18344216
  hypo

SEQ ID NO: 246601 - DNA, 330 bp, Homo sapiens; identical to SEQ ID NO: 205279
  chr19:18420497-18420827
  hypo

SEQ ID NO: 246602 - DNA, 571 bp, Homo sapiens; identical to SEQ ID NO: 205281
  chr19:18548568-18549139
  hypo

SEQ ID NO: 246603 - DNA, 300 bp, Homo sapiens; identical to SEQ ID NO: 225859
  chr19:18722131-18722431
  hypo

SEQ ID NO: 246604 - DNA, 360 bp, Homo sapiens; identical to SEQ ID NO: 225860
  chr19:18722467-18722827
  hypo

SEQ ID NO: 246605 - DNA, 561 bp, Homo sapiens; identical to SEQ ID NO: 225861
  chr19:18723430-18723991
  hypo

SEQ ID NO: 246606 - DNA, 104 bp, Homo sapiens; identical to SEQ ID NO: 225862
  chr19:18880093-18880197
  hypo

SEQ ID NO: 246607 - DNA, 911 bp, Homo sapiens; identical to SEQ ID NO: 225863
  chr19:18900004-18900915
  hypo

SEQ ID NO: 246608 - DNA, 105 bp, Homo sapiens; identical to SEQ ID NO: 225864
  chr19:18901141-18901246
  hypo

SEQ ID NO: 246609 - DNA, 561 bp, Homo sapiens; identical to SEQ ID NO: 225865
  chr19:19729186-19729747
  hypo

SEQ ID NO: 246610 - DNA, 1103 bp, Homo sapiens; identical to SEQ ID NO: 225866
  chr19:19738572-19739675
  hypo

SEQ ID NO: 246611 - DNA, 817 bp, Homo sapiens; identical to SEQ ID NO: 225867
  chr19:19843295-19844112
  hypo

SEQ ID NO: 246612 - DNA, 180 bp, Homo sapiens; identical to SEQ ID NO: 225868
  chr19:20162592-20162772
  hypo

SEQ ID NO: 246613 - DNA, 540 bp, Homo sapiens; identical to SEQ ID NO: 225869
  chr19:20162847-20163387
  hypo

SEQ ID NO: 246614 - DNA, 348 bp, Homo sapiens; identical to SEQ ID NO: 225870
  chr19:23258238-23258586
  hypo

SEQ ID NO: 246615 - DNA, 840 bp, Homo sapiens; identical to SEQ ID NO: 225871
  chr19:30015889-30016729
  hypo

SEQ ID NO: 246616 - DNA, 1620 bp, Homo sapiens; identical to SEQ ID NO: 225872
  chr19:30016835-30018455
  hypo

SEQ ID NO: 246617 - DNA, 960 bp, Homo sapiens; identical to SEQ ID NO: 225873
  chr19:30019140-30020100
  hypo

SEQ ID NO: 246618 - DNA, 221 bp, Homo sapiens; identical to SEQ ID NO: 225874
  chr19:30021134-30021355
  hypo

SEQ ID NO: 246619 - DNA, 268 bp, Homo sapiens; identical to SEQ ID NO: 225875
  chr19:30165119-30165387
  hypo

SEQ ID NO: 246620 - DNA, 297 bp, Homo sapiens; identical to SEQ ID NO: 225876
  chr19:30215212-30215509
  hypo

SEQ ID NO: 246621 - DNA, 720 bp, Homo sapiens; identical to SEQ ID NO: 225877
  chr19:30716535-30717255
  hypo

SEQ ID NO: 246622 - DNA, 1440 bp, Homo sapiens; identical to SEQ ID NO: 225878
  chr19:30717640-30719080
  hypo

SEQ ID NO: 246623 - DNA, 180 bp, Homo sapiens; identical to SEQ ID NO: 225879
  chr19:30719269-30719449
  hypo

SEQ ID NO: 246624 - DNA, 505 bp, Homo sapiens; identical to SEQ ID NO: 225880
  chr19:30719535-30720040
  hypo

SEQ ID NO: 246625 - DNA, 307 bp, Homo sapiens; identical to SEQ ID NO: 225881
  chr19:31210545-31210852
  hypo

SEQ ID NO: 246626 - DNA, 840 bp, Homo sapiens; identical to SEQ ID NO: 225882
  chr19:31839564-31840404
  hypo

SEQ ID NO: 246627 - DNA, 480 bp, Homo sapiens; identical to SEQ ID NO: 225883
  chr19:31840512-31840992
  hypo

SEQ ID NO: 246628 - DNA, 180 bp, Homo sapiens; identical to SEQ ID NO: 225884
  chr19:31841073-31841253
  hypo

SEQ ID NO: 246629 - DNA, 480 bp, Homo sapiens; identical to SEQ ID NO: 225885
  chr19:31841354-31841834
  hypo

SEQ ID NO: 246630 - DNA, 1020 bp, Homo sapiens; identical to SEQ ID NO: 225886
  chr19:33166914-33167934
  hypo

SEQ ID NO: 246631 - DNA, 561 bp, Homo sapiens; identical to SEQ ID NO: 225887
  chr19:33555491-33556052
  hypo

SEQ ID NO: 246632 - DNA, 180 bp, Homo sapiens; identical to SEQ ID NO: 225888
  chr19:33717653-33717833
  hypo

SEQ ID NO: 246633 - DNA, 3032 bp, Homo sapiens; identical to SEQ ID NO: 225889
  chr19:33790839-33793871
  hypo

SEQ ID NO: 246634 - DNA, 897 bp, Homo sapiens; identical to SEQ ID NO: 225890
  chr19:34112312-34113209
  hypo

SEQ ID NO: 246635 - DNA, 540 bp, Homo sapiens; identical to SEQ ID NO: 225891
  chr19:34113258-34113798
  hypo

SEQ ID NO: 246636 - DNA, 529 bp, Homo sapiens; identical to SEQ ID NO: 225892
  chr19:34113844-34114373
  hypo

SEQ ID NO: 246637 - DNA, 496 bp, Homo sapiens; identical to SEQ ID NO: 225893
  chr19:34262994-34263490
  hypo

SEQ ID NO: 246638 - DNA, 217 bp, Homo sapiens; identical to SEQ ID NO: 225894
  chr19:34269016-34269233
  hypo

SEQ ID NO: 246639 - DNA, 997 bp, Homo sapiens; identical to SEQ ID NO: 225895
  chr19:34286493-34287490
  hypo

SEQ ID NO: 246640 - DNA, 158 bp, Homo sapiens; identical to SEQ ID NO: 225896
  chr19:34287808-34287966
  hypo

SEQ ID NO: 246641 - DNA, 140 bp, Homo sapiens; identical to SEQ ID NO: 225897
  chr19:34288005-34288145
  hypo

SEQ ID NO: 246642 - DNA, 100 bp, Homo sapiens; identical to SEQ ID NO: 225898
  chr19:34288205-34288305
  hypo

SEQ ID NO: 246643 - DNA, 214 bp, Homo sapiens; identical to SEQ ID NO: 225899
  chr19:35168868-35169082
  hypo

SEQ ID NO: 246644 - DNA, 103 bp, Homo sapiens; identical to SEQ ID NO: 205367
  chr19:35169517-35169620
  hypo

SEQ ID NO: 246645 - DNA, 400 bp, Homo sapiens; identical to SEQ ID NO: 225901
  chr19:35454464-35454864
  hypo

SEQ ID NO: 246646 - DNA, 140 bp, Homo sapiens; identical to SEQ ID NO: 225902
  chr19:35738845-35738985
  hypo

SEQ ID NO: 246647 - DNA, 180 bp, Homo sapiens; identical to SEQ ID NO: 225903
  chr19:36048599-36048779
  hypo

SEQ ID NO: 246648 - DNA, 180 bp, Homo sapiens; identical to SEQ ID NO: 225904
  chr19:36048926-36049106
  hypo

SEQ ID NO: 246649 - DNA, 180 bp, Homo sapiens; identical to SEQ ID NO: 225905
  chr19:36049279-36049459
  hypo

SEQ ID NO: 246650 - DNA, 116 bp, Homo sapiens; identical to SEQ ID NO: 205371
  chr19:36123862-36123978
  hypo

SEQ ID NO: 246651 - DNA, 360 bp, Homo sapiens; identical to SEQ ID NO: 225907
  chr19:36336521-36336881
  hypo

SEQ ID NO: 246652 - DNA, 159 bp, Homo sapiens; identical to SEQ ID NO: 225908
  chr19:36336999-36337158
  hypo

SEQ ID NO: 246653 - DNA, 343 bp, Homo sapiens; identical to SEQ ID NO: 225909
  chr19:36347771-36348114
  hypo

SEQ ID NO: 246654 - DNA, 249 bp, Homo sapiens; identical to SEQ ID NO: 225910
  chr19:36478131-36478380
  hypo

SEQ ID NO: 246655 - DNA, 839 bp, Homo sapiens; identical to SEQ ID NO: 225911
  chr19:36909103-36909942
  hypo

SEQ ID NO: 246656 - DNA, 113 bp, Homo sapiens; identical to SEQ ID NO: 225912
  chr19:37262887-37263000
  hypo

SEQ ID NO: 246657 - DNA, 719 bp, Homo sapiens; identical to SEQ ID NO: 225913
  chr19:37263316-37264035
  hypo

SEQ ID NO: 246658 - DNA, 155 bp, Homo sapiens; identical to SEQ ID NO: 225914
  chr19:37266863-37267018
  hypo

SEQ ID NO: 246659 - DNA, 404 bp, Homo sapiens; identical to SEQ ID NO: 225915
  chr19:37568997-37569401
  hypo

SEQ ID NO: 246660 - DNA, 180 bp, Homo sapiens; identical to SEQ ID NO: 225916
  chr19:37569450-37569630
  hypo

SEQ ID NO: 246661 - DNA, 660 bp, Homo sapiens; identical to SEQ ID NO: 225917
  chr19:37960057-37960717
  hypo

SEQ ID NO: 246662 - DNA, 420 bp, Homo sapiens; identical to SEQ ID NO: 225918
  chr19:38182931-38183351
  hypo

SEQ ID NO: 246663 - DNA, 289 bp, Homo sapiens; identical to SEQ ID NO: 225919
  chr19:38210087-38210376
  hypo

SEQ ID NO: 246664 - DNA, 57 bp, Homo sapiens; identical to SEQ ID NO: 225920
  chr19:38398221-38398278
  hypo

SEQ ID NO: 246665 - DNA, 450 bp, Homo sapiens; identical to SEQ ID NO: 225921
  chr19:38720197-38720647
  hypo

SEQ ID NO: 246666 - DNA, 421 bp, Homo sapiens; identical to SEQ ID NO: 225922
  chr19:38755107-38755528
  hypo

SEQ ID NO: 246667 - DNA, 399 bp, Homo sapiens; identical to SEQ ID NO: 225923
  chr19:38852129-38852528
  hypo

SEQ ID NO: 246668 - DNA, 739 bp, Homo sapiens; identical to SEQ ID NO: 225924
  chr19:38852766-38853505
  hypo

SEQ ID NO: 246669 - DNA, 579 bp, Homo sapiens; identical to SEQ ID NO: 225925
  chr19:38976232-38976811
  hypo

SEQ ID NO: 246670 - DNA, 522 bp, Homo sapiens; identical to SEQ ID NO: 225926
  chr19:39574576-39575098
  hypo

SEQ ID NO: 246671 - DNA, 480 bp, Homo sapiens; identical to SEQ ID NO: 225927
  chr19:39754925-39755405
  hypo

SEQ ID NO: 246672 - DNA, 141 bp, Homo sapiens; identical to SEQ ID NO: 225928
  chr19:39993472-39993613
  hypo

SEQ ID NO: 246673 - DNA, 416 bp, Homo sapiens; identical to SEQ ID NO: 225929
  chr19:39997624-39998040
  hypo

SEQ ID NO: 246674 - DNA, 592 bp, Homo sapiens; identical to SEQ ID NO: 225930
  chr19:40006048-40006640
  hypo

SEQ ID NO: 246675 - DNA, 142 bp, Homo sapiens; identical to SEQ ID NO: 225931
  chr19:40939939-40940081
  hypo

SEQ ID NO: 246676 - DNA, 169 bp, Homo sapiens; identical to SEQ ID NO: 225932
  chr19:40972622-40972791
  hypo

SEQ ID NO: 246677 - DNA, 153 bp, Homo sapiens; identical to SEQ ID NO: 225933
  chr19:40973006-40973159
  hypo

SEQ ID NO: 246678 - DNA, 327 bp, Homo sapiens; identical to SEQ ID NO: 225934
  chr19:41025294-41025621
  hypo

SEQ ID NO: 246679 - DNA, 378 bp, Homo sapiens; identical to SEQ ID NO: 205429
  chr19:41190157-41190535
  hypo

SEQ ID NO: 246680 - DNA, 33 bp, Homo sapiens; identical to SEQ ID NO: 225936
  chr19:41304119-41304152
  hypo

SEQ ID NO: 246681 - DNA, 105 bp, Homo sapiens; identical to SEQ ID NO: 225937
  chr19:41859852-41859957
  hypo

SEQ ID NO: 246682 - DNA, 104 bp, Homo sapiens; identical to SEQ ID NO: 225938
  chr19:41860206-41860310
  hypo

SEQ ID NO: 246683 - DNA, 456 bp, Homo sapiens; identical to SEQ ID NO: 225939
  chr19:42028297-42028753
  hypo

SEQ ID NO: 246684 - DNA, 111 bp, Homo sapiens; identical to SEQ ID NO: 225940
  chr19:42749161-42749272
  hypo

SEQ ID NO: 246685 - DNA, 919 bp, Homo sapiens; identical to SEQ ID NO: 225941
  chr19:42927304-42928223
  hypo

SEQ ID NO: 246686 - DNA, 243 bp, Homo sapiens; identical to SEQ ID NO: 225942
  chr19:43967267-43967510
  hypo

SEQ ID NO: 246687 - DNA, 111 bp, Homo sapiens; identical to SEQ ID NO: 225943
  chr19:43967734-43967845
  hypo

SEQ ID NO: 246688 - DNA, 240 bp, Homo sapiens; identical to SEQ ID NO: 225944
  chr19:44143996-44144236
  hypo

SEQ ID NO: 246689 - DNA, 796 bp, Homo sapiens; identical to SEQ ID NO: 225945
  chr19:45004125-45004921
  hypo

SEQ ID NO: 246690 - DNA, 169 bp, Homo sapiens; identical to SEQ ID NO: 225946
  chr19:45207313-45207482
  hypo

SEQ ID NO: 246691 - DNA, 195 bp, Homo sapiens; identical to SEQ ID NO: 225947
  chr19:45312129-45312324
  hypo

SEQ ID NO: 246692 - DNA, 164 bp, Homo sapiens; identical to SEQ ID NO: 225948
  chr19:45348110-45348274
  hypo

SEQ ID NO: 246693 - DNA, 209 bp, Homo sapiens; identical to SEQ ID NO: 225949
  chr19:45348863-45349072
  hypo

SEQ ID NO: 246694 - DNA, 632 bp, Homo sapiens; identical to SEQ ID NO: 225950
  chr19:45349505-45350137
  hypo

SEQ ID NO: 246695 - DNA, 1024 bp, Homo sapiens; identical to SEQ ID NO: 225951
  chr19:45647787-45648811
  hypo

SEQ ID NO: 246696 - DNA, 38 bp, Homo sapiens; identical to SEQ ID NO: 225952
  chr19:45655081-45655119
  hypo

SEQ ID NO: 246697 - DNA, 46 bp, Homo sapiens; identical to SEQ ID NO: 225953
  chr19:45908810-45908856
  hypo

SEQ ID NO: 246698 - DNA, 230 bp, Homo sapiens; identical to SEQ ID NO: 225954
  chr19:45947821-45948051
  hypo

SEQ ID NO: 246699 - DNA, 262 bp, Homo sapiens; identical to SEQ ID NO: 205479
  chr19:45959073-45959335
  hypo

SEQ ID NO: 246700 - DNA, 721 bp, Homo sapiens; identical to SEQ ID NO: 225956
  chr19:46001721-46002442
  hypo

SEQ ID NO: 246701 - DNA, 197 bp, Homo sapiens; identical to SEQ ID NO: 225957
  chr19:46271418-46271615
  hypo

SEQ ID NO: 246702 - DNA, 33 bp, Homo sapiens; identical to SEQ ID NO: 225958
  chr19:46273813-46273846
  hypo

SEQ ID NO: 246703 - DNA, 105 bp, Homo sapiens; identical to SEQ ID NO: 225959
  chr19:46404950-46405055
  hypo

SEQ ID NO: 246704 - DNA, 104 bp, Homo sapiens; identical to SEQ ID NO: 225960
  chr19:46405191-46405295
  hypo

SEQ ID NO: 246705 - DNA, 480 bp, Homo sapiens; identical to SEQ ID NO: 225961
  chr19:46519213-46519693
  hypo

SEQ ID NO: 246706 - DNA, 105 bp, Homo sapiens; identical to SEQ ID NO: 225962
  chr19:46931909-46932014
  hypo

SEQ ID NO: 246707 - DNA, 271 bp, Homo sapiens; identical to SEQ ID NO: 225963
  chr19:46932091-46932362
  hypo

SEQ ID NO: 246708 - DNA, 685 bp, Homo sapiens; identical to SEQ ID NO: 225964
  chr19:47258852-47259537
  hypo

SEQ ID NO: 246709 - DNA, 270 bp, Homo sapiens; identical to SEQ ID NO: 225965
  chr19:47359761-47360031
  hypo

SEQ ID NO: 246710 - DNA, 105 bp, Homo sapiens; identical to SEQ ID NO: 225966
  chr19:47363328-47363433
  hypo

SEQ ID NO: 246711 - DNA, 363 bp, Homo sapiens; identical to SEQ ID NO: 225967
  chr19:47522920-47523283
  hypo

SEQ ID NO: 246712 - DNA, 136 bp, Homo sapiens; identical to SEQ ID NO: 225968
  chr19:47523636-47523772
  hypo

SEQ ID NO: 246713 - DNA, 104 bp, Homo sapiens; identical to SEQ ID NO: 225969
  chr19:47523884-47523988
  hypo

SEQ ID NO: 246714 - DNA, 138 bp, Homo sapiens; identical to SEQ ID NO: 225970
  chr19:47675975-47676113
  hypo

SEQ ID NO: 246715 - DNA, 180 bp, Homo sapiens; identical to SEQ ID NO: 225971
  chr19:47729864-47730044
  hypo

SEQ ID NO: 246716 - DNA, 152 bp, Homo sapiens; identical to SEQ ID NO: 225972
  chr19:47730760-47730912
  hypo

SEQ ID NO: 246717 - DNA, 170 bp, Homo sapiens; identical to SEQ ID NO: 225973
  chr19:47731298-47731468
  hypo

SEQ ID NO: 246718 - DNA, 550 bp, Homo sapiens; identical to SEQ ID NO: 225974
  chr19:47742713-47743263
  hypo

SEQ ID NO: 246719 - DNA, 330 bp, Homo sapiens; identical to SEQ ID NO: 225975
  chr19:47910407-47910737
  hypo

SEQ ID NO: 246720 - DNA, 402 bp, Homo sapiens; identical to SEQ ID NO: 225976
  chr19:47950995-47951397
  hypo

SEQ ID NO: 246721 - DNA, 275 bp, Homo sapiens; identical to SEQ ID NO: 225977
  chr19:48076347-48076622
  hypo

SEQ ID NO: 246722 - DNA, 271 bp, Homo sapiens; identical to SEQ ID NO: 225978
  chr19:48229020-48229291
  hypo

SEQ ID NO: 246723 - DNA, 105 bp, Homo sapiens; identical to SEQ ID NO: 225979
  chr19:48823631-48823736
  hypo

SEQ ID NO: 246724 - DNA, 643 bp, Homo sapiens; identical to SEQ ID NO: 225980
  chr19:48901493-48902136
  hypo

SEQ ID NO: 246725 - DNA, 105 bp, Homo sapiens; identical to SEQ ID NO: 225981
  chr19:48994476-48994581
  hypo

SEQ ID NO: 246726 - DNA, 204 bp, Homo sapiens; identical to SEQ ID NO: 225982
  chr19:49014628-49014832
  hypo

SEQ ID NO: 246727 - DNA, 584 bp, Homo sapiens; identical to SEQ ID NO: 225983
  chr19:49242360-49242944
  hypo

SEQ ID NO: 246728 - DNA, 48 bp, Homo sapiens; identical to SEQ ID NO: 225984
  chr19:49467050-49467098
  hypo

SEQ ID NO: 246729 - DNA, 196 bp, Homo sapiens; identical to SEQ ID NO: 225985
  chr19:49660928-49661124
  hypo

SEQ ID NO: 246730 - DNA, 617 bp, Homo sapiens; identical to SEQ ID NO: 225986
  chr19:49925606-49926223
  hypo

SEQ ID NO: 246731 - DNA, 273 bp, Homo sapiens; identical to SEQ ID NO: 225987
  chr19:50058957-50059230
  hypo

SEQ ID NO: 246732 - DNA, 352 bp, Homo sapiens; identical to SEQ ID NO: 225988
  chr19:50312465-50312817
  hypo

SEQ ID NO: 246733 - DNA, 198 bp, Homo sapiens; identical to SEQ ID NO: 225989
  chr19:50353784-50353982
  hypo

SEQ ID NO: 246734 - DNA, 180 bp, Homo sapiens; identical to SEQ ID NO: 225990
  chr19:50553765-50553945
  hypo

SEQ ID NO: 246735 - DNA, 180 bp, Homo sapiens; identical to SEQ ID NO: 225991
  chr19:50828991-50829171
  hypo

SEQ ID NO: 246736 - DNA, 564 bp, Homo sapiens; identical to SEQ ID NO: 225992
  chr19:50831535-50832099
  hypo

SEQ ID NO: 246737 - DNA, 407 bp, Homo sapiens; identical to SEQ ID NO: 225993
  chr19:50833793-50834200
  hypo

SEQ ID NO: 246738 - DNA, 180 bp, Homo sapiens; identical to SEQ ID NO: 225994
  chr19:50834230-50834410
  hypo

SEQ ID NO: 246739 - DNA, 154 bp, Homo sapiens; identical to SEQ ID NO: 225995
  chr19:50979534-50979688
  hypo

SEQ ID NO: 246740 - DNA, 164 bp, Homo sapiens; identical to SEQ ID NO: 225996
  chr19:51071280-51071444
  hypo

SEQ ID NO: 246741 - DNA, 83 bp, Homo sapiens; identical to SEQ ID NO: 225997
  chr19:51111319-51111402
  hypo

SEQ ID NO: 246742 - DNA, 499 bp, Homo sapiens; identical to SEQ ID NO: 225998
  chr19:51170581-51171080
  hypo

SEQ ID NO: 246743 - DNA, 420 bp, Homo sapiens; identical to SEQ ID NO: 225999
  chr19:51227677-51228097
  hypo

SEQ ID NO: 246744 - DNA, 600 bp, Homo sapiens; identical to SEQ ID NO: 226000
  chr19:51228232-51228832
  hypo

SEQ ID NO: 246745 - DNA, 117 bp, Homo sapiens; identical to SEQ ID NO: 205552
  chr19:51527588-51527705
  hypo

SEQ ID NO: 246746 - DNA, 44 bp, Homo sapiens; identical to SEQ ID NO: 226002
  chr19:51830366-51830410
  hypo

SEQ ID NO: 246747 - DNA, 501 bp, Homo sapiens; identical to SEQ ID NO: 226003
  chr19:51830799-51831300
  hypo

SEQ ID NO: 246748 - DNA, 714 bp, Homo sapiens; identical to SEQ ID NO: 226004
  chr19:52207092-52207806
  hypo

SEQ ID NO: 246749 - DNA, 388 bp, Homo sapiens; identical to SEQ ID NO: 226005
  chr19:52222530-52222918
  hypo

SEQ ID NO: 246750 - DNA, 814 bp, Homo sapiens; identical to SEQ ID NO: 226006
  chr19:52531292-52532106
  hypo

SEQ ID NO: 246751 - DNA, 105 bp, Homo sapiens; identical to SEQ ID NO: 226007
  chr19:52643396-52643501
  hypo

SEQ ID NO: 246752 - DNA, 35 bp, Homo sapiens; identical to SEQ ID NO: 226008
  chr19:52674677-52674712
  hypo

SEQ ID NO: 246753 - DNA, 134 bp, Homo sapiens; identical to SEQ ID NO: 226009
  chr19:52715132-52715266
  hypo

SEQ ID NO: 246754 - DNA, 240 bp, Homo sapiens; identical to SEQ ID NO: 226010
  chr19:52873065-52873305
  hypo

SEQ ID NO: 246755 - DNA, 405 bp, Homo sapiens; identical to SEQ ID NO: 226011
  chr19:53030696-53031101
  hypo

SEQ ID NO: 246756 - DNA, 462 bp, Homo sapiens; identical to SEQ ID NO: 226012
  chr19:53237997-53238459
  hypo

SEQ ID NO: 246757 - DNA, 530 bp, Homo sapiens; identical to SEQ ID NO: 226013
  chr19:53445362-53445892
  hypo

SEQ ID NO: 246758 - DNA, 104 bp, Homo sapiens; identical to SEQ ID NO: 226014
  chr19:53445963-53446067
  hypo

SEQ ID NO: 246759 - DNA, 137 bp, Homo sapiens; identical to SEQ ID NO: 226015
  chr19:53446345-53446482
  hypo

SEQ ID NO: 246760 - DNA, 436 bp, Homo sapiens; identical to SEQ ID NO: 226016
  chr19:53606066-53606502
  hypo

SEQ ID NO: 246761 - DNA, 131 bp, Homo sapiens; identical to SEQ ID NO: 226017
  chr19:53696533-53696664
  hypo

SEQ ID NO: 246762 - DNA, 493 bp, Homo sapiens; identical to SEQ ID NO: 226018
  chr19:53757805-53758298
  hypo

SEQ ID NO: 246763 - DNA, 45 bp, Homo sapiens; identical to SEQ ID NO: 226019
  chr19:54206968-54207013
  hypo

SEQ ID NO: 246764 - DNA, 1312 bp, Homo sapiens; identical to SEQ ID NO: 226020
  chr19:54371779-54373091
  hypo

SEQ ID NO: 246765 - DNA, 609 bp, Homo sapiens; identical to SEQ ID NO: 226021
  chr19:54382389-54382998
  hypo

SEQ ID NO: 246766 - DNA, 600 bp, Homo sapiens; identical to SEQ ID NO: 226022
  chr19:54385476-54386076
  hypo

SEQ ID NO: 246767 - DNA, 332 bp, Homo sapiens; identical to SEQ ID NO: 226023
  chr19:54411189-54411521
  hypo

SEQ ID NO: 246768 - DNA, 344 bp, Homo sapiens; identical to SEQ ID NO: 226024
  chr19:54411572-54411916
  hypo

SEQ ID NO: 246769 - DNA, 534 bp, Homo sapiens; identical to SEQ ID NO: 226025
  chr19:54412573-54413107
  hypo

SEQ ID NO: 246770 - DNA, 53 bp, Homo sapiens; identical to SEQ ID NO: 226026
  chr19:54413510-54413563
  hypo

SEQ ID NO: 246771 - DNA, 588 bp, Homo sapiens; identical to SEQ ID NO: 226027
  chr19:55865817-55866405
  hypo

SEQ ID NO: 246772 - DNA, 330 bp, Homo sapiens; identical to SEQ ID NO: 226028
  chr19:55953358-55953688
  hypo

SEQ ID NO: 246773 - DNA, 300 bp, Homo sapiens; identical to SEQ ID NO: 226029
  chr19:55953723-55954023
  hypo

SEQ ID NO: 246774 - DNA, 633 bp, Homo sapiens; identical to SEQ ID NO: 226030
  chr19:55954087-55954720
  hypo

SEQ ID NO: 246775 - DNA, 49 bp, Homo sapiens; identical to SEQ ID NO: 226031
  chr19:55954938-55954987
  hypo

SEQ ID NO: 246776 - DNA, 480 bp, Homo sapiens; identical to SEQ ID NO: 226032
  chr19:55962747-55963227
  hypo

SEQ ID NO: 246777 - DNA, 150 bp, Homo sapiens; identical to SEQ ID NO: 226033
  chr19:56112796-56112946
  hypo

SEQ ID NO: 246778 - DNA, 445 bp, Homo sapiens; identical to SEQ ID NO: 226034
  chr19:56159255-56159700
  hypo

SEQ ID NO: 246779 - DNA, 269 bp, Homo sapiens; identical to SEQ ID NO: 226035
  chr19:56159761-56160030
  hypo

SEQ ID NO: 246780 - DNA, 420 bp, Homo sapiens; identical to SEQ ID NO: 226036
  chr19:56728624-56729044
  hypo

SEQ ID NO: 246781 - DNA, 592 bp, Homo sapiens; identical to SEQ ID NO: 226037
  chr19:56879423-56880015
  hypo

SEQ ID NO: 246782 - DNA, 822 bp, Homo sapiens; identical to SEQ ID NO: 226038
  chr19:56904506-56905328
  hypo

SEQ ID NO: 246783 - DNA, 840 bp, Homo sapiens; identical to SEQ ID NO: 226039
  chr19:56915127-56915967
  hypo

SEQ ID NO: 246784 - DNA, 104 bp, Homo sapiens; identical to SEQ ID NO: 226040
  chr19:56987598-56987702
  hypo

SEQ ID NO: 246785 - DNA, 300 bp, Homo sapiens; identical to SEQ ID NO: 226041
  chr19:56988207-56988507
  hypo

SEQ ID NO: 246786 - DNA, 360 bp, Homo sapiens; identical to SEQ ID NO: 226042
  chr19:57617766-57618126
  hypo

SEQ ID NO: 246787 - DNA, 240 bp, Homo sapiens; identical to SEQ ID NO: 226043
  chr19:57831882-57832122
  hypo

SEQ ID NO: 246788 - DNA, 729 bp, Homo sapiens; identical to SEQ ID NO: 226044
  chr19:58038570-58039299
  hypo

SEQ ID NO: 246789 - DNA, 316 bp, Homo sapiens; identical to SEQ ID NO: 226045
  chr19:58071012-58071328
  hypo

SEQ ID NO: 246790 - DNA, 813 bp, Homo sapiens; identical to SEQ ID NO: 226046
  chr19:58125365-58126178
  hypo

SEQ ID NO: 246791 - DNA, 420 bp, Homo sapiens; identical to SEQ ID NO: 226047
  chr19:58238616-58239036
  hypo

SEQ ID NO: 246792 - DNA, 245 bp, Homo sapiens; identical to SEQ ID NO: 226048
  chr19:58385532-58385777
  hypo

SEQ ID NO: 246793 - DNA, 600 bp, Homo sapiens; identical to SEQ ID NO: 226049
  chr19:58609301-58609901
  hypo

SEQ ID NO: 246794 - DNA, 315 bp, Homo sapiens; identical to SEQ ID NO: 226050
  chr19:58629358-58629673
  hypo

SEQ ID NO: 246795 - DNA, 652 bp, Homo sapiens; identical to SEQ ID NO: 226051
  chr19:58661655-58662307
  hypo

SEQ ID NO: 246796 - DNA, 898 bp, Homo sapiens; identical to SEQ ID NO: 226052
  chr19:58665953-58666851
  hypo

SEQ ID NO: 246797 - DNA, 849 bp, Homo sapiens; identical to SEQ ID NO: 226053
  chr19:58694383-58695232
  hypo

SEQ ID NO: 246798 - DNA, 410 bp, Homo sapiens; identical to SEQ ID NO: 226054
  chr19:58858518-58858928
  hypo

SEQ ID NO: 246799 - DNA, 263 bp, Homo sapiens; identical to SEQ ID NO: 226055
  chr19:58874184-58874447
  hypo

SEQ ID NO: 246800 - DNA, 538 bp, Homo sapiens; identical to SEQ ID NO: 226056
  chr19:58907576-58908114
  hypo

SEQ ID NO: 246801 - DNA, 71 bp, Homo sapiens; identical to SEQ ID NO: 226057
  chr19:58920316-58920387
  hypo

SEQ ID NO: 246802 - DNA, 925 bp, Homo sapiens; identical to SEQ ID NO: 226058
  chr19:58951201-58952126
  hypo

SEQ ID NO: 246803 - DNA, 525 bp, Homo sapiens; identical to SEQ ID NO: 226059
  chr19:59010487-59011012
  hypo

SEQ ID NO: 246804 - DNA, 806 bp, Homo sapiens; identical to SEQ ID NO: 226060
  chr20:590308-591114
  hypo

SEQ ID NO: 246805 - DNA, 428 bp, Homo sapiens; identical to SEQ ID NO: 226061
  chr20:644206-644634
  hypo

SEQ ID NO: 246806 - DNA, 873 bp, Homo sapiens; identical to SEQ ID NO: 226062
  chr20:708545-709418
  hypo

SEQ ID NO: 246807 - DNA, 595 bp, Homo sapiens; identical to SEQ ID NO: 226063
  chr20:1783949-1784544
  hypo

SEQ ID NO: 246808 - DNA, 678 bp, Homo sapiens; identical to SEQ ID NO: 226064
  chr20:2187845-2188523
  hypo

SEQ ID NO: 246809 - DNA, 147 bp, Homo sapiens; identical to SEQ ID NO: 226065
  chr20:2444521-2444668
  hypo

SEQ ID NO: 246810 - DNA, 651 bp, Homo sapiens; identical to SEQ ID NO: 226066
  chr20:2674067-2674718
  hypo

SEQ ID NO: 246811 - DNA, 257 bp, Homo sapiens; identical to SEQ ID NO: 226067
  chr20:2820747-2821004
  hypo

SEQ ID NO: 246812 - DNA, 440 bp, Homo sapiens; identical to SEQ ID NO: 226068
  chr20:3063045-3063485
  hypo

SEQ ID NO: 246813 - DNA, 633 bp, Homo sapiens; identical to SEQ ID NO: 226069
  chr20:3073286-3073919
  hypo

SEQ ID NO: 246814 - DNA, 170 bp, Homo sapiens; identical to SEQ ID NO: 226070
  chr20:3154656-3154826
  hypo

SEQ ID NO: 246815 - DNA, 780 bp, Homo sapiens; identical to SEQ ID NO: 226071
  chr20:3220135-3220915
  hypo

SEQ ID NO: 246816 - DNA, 693 bp, Homo sapiens; identical to SEQ ID NO: 226072
  chr20:3229124-3229817
  hypo

SEQ ID NO: 246817 - DNA, 206 bp, Homo sapiens; identical to SEQ ID NO: 226073
  chr20:3451579-3451785
  hypo

SEQ ID NO: 246818 - DNA, 640 bp, Homo sapiens; identical to SEQ ID NO: 226074
  chr20:3641323-3641963
  hypo

SEQ ID NO: 246819 - DNA, 742 bp, Homo sapiens; identical to SEQ ID NO: 226075
  chr20:4129265-4130007
  hypo

SEQ ID NO: 246820 - DNA, 1111 bp, Homo sapiens; identical to SEQ ID NO: 226076
  chr20:4803016-4804127
  hypo

SEQ ID NO: 246821 - DNA, 180 bp, Homo sapiens; identical to SEQ ID NO: 226077
  chr20:5296459-5296639
  hypo

SEQ ID NO: 246822 - DNA, 840 bp, Homo sapiens; identical to SEQ ID NO: 226078
  chr20:5296676-5297516
  hypo

SEQ ID NO: 246823 - DNA, 180 bp, Homo sapiens; identical to SEQ ID NO: 226079
  chr20:5297591-5297771
  hypo

SEQ ID NO: 246824 - DNA, 540 bp, Homo sapiens; identical to SEQ ID NO: 226080
  chr20:5891923-5892463
  hypo

SEQ ID NO: 246825 - DNA, 1140 bp, Homo sapiens; identical to SEQ ID NO: 226081
  chr20:6748234-6749374
  hypo

SEQ ID NO: 246826 - DNA, 255 bp, Homo sapiens; identical to SEQ ID NO: 226082
  chr20:9048355-9048610
  hypo

SEQ ID NO: 246827 - DNA, 480 bp, Homo sapiens; identical to SEQ ID NO: 226083
  chr20:9048883-9049363
  hypo

SEQ ID NO: 246828 - DNA, 360 bp, Homo sapiens; identical to SEQ ID NO: 226084
  chr20:9049856-9050216
  hypo

SEQ ID NO: 246829 - DNA, 180 bp, Homo sapiens; identical to SEQ ID NO: 226085
  chr20:9487280-9487460
  hypo

SEQ ID NO: 246830 - DNA, 180 bp, Homo sapiens; identical to SEQ ID NO: 226086
  chr20:9487658-9487838
  hypo

SEQ ID NO: 246831 - DNA, 144 bp, Homo sapiens; identical to SEQ ID NO: 226087
  chr20:10653880-10654024
  hypo

SEQ ID NO: 246832 - DNA, 934 bp, Homo sapiens; identical to SEQ ID NO: 226088
  chr20:10654669-10655603
  hypo

SEQ ID NO: 246833 - DNA, 540 bp, Homo sapiens; identical to SEQ ID NO: 226089
  chr20:11871347-11871887
  hypo

SEQ ID NO: 246834 - DNA, 360 bp, Homo sapiens; identical to SEQ ID NO: 226090
  chr20:11871901-11872261
  hypo

SEQ ID NO: 246835 - DNA, 465 bp, Homo sapiens; identical to SEQ ID NO: 226091
  chr20:17549573-17550038
  hypo

SEQ ID NO: 246836 - DNA, 187 bp, Homo sapiens; identical to SEQ ID NO: 205715
  chr20:17661564-17661751
  hypo

SEQ ID NO: 246837 - DNA, 455 bp, Homo sapiens; identical to SEQ ID NO: 226093
  chr20:18039560-18040015
  hypo

SEQ ID NO: 246838 - DNA, 180 bp, Homo sapiens; identical to SEQ ID NO: 226094
  chr20:19192854-19193034
  hypo

SEQ ID NO: 246839 - DNA, 616 bp, Homo sapiens; identical to SEQ ID NO: 226095
  chr20:19193278-19193894
  hypo

SEQ ID NO: 246840 - DNA, 180 bp, Homo sapiens; identical to SEQ ID NO: 226096
  chr20:19738195-19738375
  hypo

SEQ ID NO: 246841 - DNA, 180 bp, Homo sapiens; identical to SEQ ID NO: 205724
  chr20:19738432-19738612
  hypo

SEQ ID NO: 246842 - DNA, 116 bp, Homo sapiens; identical to SEQ ID NO: 226098
  chr20:19997780-19997896
  hypo

SEQ ID NO: 246843 - DNA, 3000 bp, Homo sapiens; identical to SEQ ID NO: 226099
  chr20:20347459-20350459
  hypo

SEQ ID NO: 246844 - DNA, 180 bp, Homo sapiens; identical to SEQ ID NO: 226100
  chr20:21086873-21087053
  hypo

SEQ ID NO: 246845 - DNA, 180 bp, Homo sapiens; identical to SEQ ID NO: 226101
  chr20:21494019-21494199
  hypo

SEQ ID NO: 246846 - DNA, 300 bp, Homo sapiens; identical to SEQ ID NO: 226102
  chr20:21494477-21494777
  hypo

SEQ ID NO: 246847 - DNA, 180 bp, Homo sapiens; identical to SEQ ID NO: 226103
  chr20:21494874-21495054
  hypo

SEQ ID NO: 246848 - DNA, 180 bp, Homo sapiens; identical to SEQ ID NO: 226104
  chr20:21495180-21495360
  hypo

SEQ ID NO: 246849 - DNA, 180 bp, Homo sapiens; identical to SEQ ID NO: 226105
  chr20:21502237-21502417
  hypo

SEQ ID NO: 246850 - DNA, 1020 bp, Homo sapiens; identical to SEQ ID NO: 226106
  chr20:21502491-21503511
  hypo

SEQ ID NO: 246851 - DNA, 180 bp, Homo sapiens; identical to SEQ ID NO: 226107
  chr20:21503814-21503994
  hypo

SEQ ID NO: 246852 - DNA, 591 bp, Homo sapiens; identical to SEQ ID NO: 226108
  chr20:21686207-21686798
  hypo

SEQ ID NO: 246853 - DNA, 180 bp, Homo sapiens; identical to SEQ ID NO: 226109
  chr20:22563011-22563191
  hypo

SEQ ID NO: 246854 - DNA, 600 bp, Homo sapiens; identical to SEQ ID NO: 226110
  chr20:22563332-22563932
  hypo

SEQ ID NO: 246855 - DNA, 180 bp, Homo sapiens; identical to SEQ ID NO: 226111
  chr20:22564705-22564885
  hypo

SEQ ID NO: 246856 - DNA, 180 bp, Homo sapiens; identical to SEQ ID NO: 226112
  chr20:22565078-22565258
  hypo

SEQ ID NO: 246857 - DNA, 755 bp, Homo sapiens; identical to SEQ ID NO: 226113
  chr20:23617972-23618727
  hypo

SEQ ID NO: 246858 - DNA, 441 bp, Homo sapiens; identical to SEQ ID NO: 226114
  chr20:26190046-26190487
  hypo

SEQ ID NO: 246859 - DNA, 600 bp, Homo sapiens; identical to SEQ ID NO: 226115
  chr20:30193498-30194098
  hypo

SEQ ID NO: 246860 - DNA, 1108 bp, Homo sapiens; identical to SEQ ID NO: 226116
  chr20:30555564-30556672
  hypo

SEQ ID NO: 246861 - DNA, 247 bp, Homo sapiens; identical to SEQ ID NO: 226117
  chr20:30582821-30583068
  hypo

SEQ ID NO: 246862 - DNA, 879 bp, Homo sapiens; identical to SEQ ID NO: 226118
  chr20:30639838-30640717
  hypo

SEQ ID NO: 246863 - DNA, 574 bp, Homo sapiens; identical to SEQ ID NO: 226119
  chr20:30946061-30946635
  hypo

SEQ ID NO: 246864 - DNA, 83 bp, Homo sapiens; identical to SEQ ID NO: 205766
  chr20:30954186-30954269
  hypo

SEQ ID NO: 246865 - DNA, 109 bp, Homo sapiens; identical to SEQ ID NO: 205767
  chr20:30956817-30956926
  hypo

SEQ ID NO: 246866 - DNA, 386 bp, Homo sapiens; identical to SEQ ID NO: 205768
  chr20:30959966-30960352
  hypo

SEQ ID NO: 246867 - DNA, 295 bp, Homo sapiens; identical to SEQ ID NO: 205769
  chr20:31015930-31016225
  hypo

SEQ ID NO: 246868 - DNA, 104 bp, Homo sapiens; identical to SEQ ID NO: 205770
  chr20:31017140-31017244
  hypo

SEQ ID NO: 246869 - DNA, 153 bp, Homo sapiens; identical to SEQ ID NO: 205771
  chr20:31017703-31017856
  hypo

SEQ ID NO: 246870 - DNA, 359 bp, Homo sapiens; identical to SEQ ID NO: 205772
  chr20:31019123-31019482
  hypo

SEQ ID NO: 246871 - DNA, 106 bp, Homo sapiens; identical to SEQ ID NO: 205773
  chr20:31020682-31020788
  hypo

SEQ ID NO: 246872 - DNA, 634 bp, Homo sapiens; identical to SEQ ID NO: 205774
  chr20:31021086-31021720
  hypo

SEQ ID NO: 246873 - DNA, 4888 bp, Homo sapiens; identical to SEQ ID NO: 205775
  chr20:31022234-31027122
  hypo

SEQ ID NO: 246874 - DNA, 583 bp, Homo sapiens; identical to SEQ ID NO: 226130
  chr20:31350980-31351563
  hypo

SEQ ID NO: 246875 - DNA, 452 bp, Homo sapiens; identical to SEQ ID NO: 226131
  chr20:33464343-33464795
  hypo

SEQ ID NO: 246876 - DNA, 47 bp, Homo sapiens; identical to SEQ ID NO: 226132
  chr20:34359742-34359789
  hypo

SEQ ID NO: 246877 - DNA, 550 bp, Homo sapiens; identical to SEQ ID NO: 226133
  chr20:34652340-34652890
  hypo

SEQ ID NO: 246878 - DNA, 163 bp, Homo sapiens; identical to SEQ ID NO: 226134
  chr20:34680201-34680364
  hypo

SEQ ID NO: 246879 - DNA, 238 bp, Homo sapiens; identical to SEQ ID NO: 226135
  chr20:34680573-34680811
  hypo

SEQ ID NO: 246880 - DNA, 558 bp, Homo sapiens; identical to SEQ ID NO: 226136
  chr20:35491172-35491730
  hypo

SEQ ID NO: 246881 - DNA, 329 bp, Homo sapiens; identical to SEQ ID NO: 226137
  chr20:36775028-36775357
  hypo

SEQ ID NO: 246882 - DNA, 584 bp, Homo sapiens; identical to SEQ ID NO: 226138
  chr20:37274625-37275209
  hypo

SEQ ID NO: 246883 - DNA, 799 bp, Homo sapiens; identical to SEQ ID NO: 226139
  chr20:37302716-37303515
  hypo

SEQ ID NO: 246884 - DNA, 960 bp, Homo sapiens; identical to SEQ ID NO: 226140
  chr20:37351571-37352531
  hypo

SEQ ID NO: 246885 - DNA, 420 bp, Homo sapiens; identical to SEQ ID NO: 226141
  chr20:37352933-37353353
  hypo

SEQ ID NO: 246886 - DNA, 180 bp, Homo sapiens; identical to SEQ ID NO: 226142
  chr20:37353544-37353724
  hypo

SEQ ID NO: 246887 - DNA, 105 bp, Homo sapiens; identical to SEQ ID NO: 226143
  chr20:37433709-37433814
  hypo

SEQ ID NO: 246888 - DNA, 1380 bp, Homo sapiens; identical to SEQ ID NO: 226144
  chr20:37433940-37435320
  hypo

SEQ ID NO: 246889 - DNA, 180 bp, Homo sapiens; identical to SEQ ID NO: 226145
  chr20:37435398-37435578
  hypo

SEQ ID NO: 246890 - DNA, 960 bp, Homo sapiens; identical to SEQ ID NO: 226146
  chr20:39316709-39317669
  hypo

SEQ ID NO: 246891 - DNA, 240 bp, Homo sapiens; identical to SEQ ID NO: 226147
  chr20:39317731-39317971
  hypo

SEQ ID NO: 246892 - DNA, 1158 bp, Homo sapiens; identical to SEQ ID NO: 226148
  chr20:39994655-39995813
  hypo

SEQ ID NO: 246893 - DNA, 267 bp, Homo sapiens; identical to SEQ ID NO: 226149
  chr20:40321459-40321726
  hypo

SEQ ID NO: 246894 - DNA, 1644 bp, Homo sapiens; identical to SEQ ID NO: 226150
  chr20:41817543-41819187
  hypo

SEQ ID NO: 246895 - DNA, 175 bp, Homo sapiens; identical to SEQ ID NO: 226151
  chr20:43438095-43438270
  hypo

SEQ ID NO: 246896 - DNA, 867 bp, Homo sapiens; identical to SEQ ID NO: 226152
  chr20:43438692-43439559
  hypo

SEQ ID NO: 246897 - DNA, 739 bp, Homo sapiens; identical to SEQ ID NO: 226153
  chr20:43726577-43727316
  hypo

SEQ ID NO: 246898 - DNA, 201 bp, Homo sapiens; identical to SEQ ID NO: 226154
  chr20:43976986-43977187
  hypo

SEQ ID NO: 246899 - DNA, 180 bp, Homo sapiens; identical to SEQ ID NO: 226155
  chr20:44099011-44099191
  hypo

SEQ ID NO: 246900 - DNA, 360 bp, Homo sapiens; identical to SEQ ID NO: 226156
  chr20:44099242-44099602
  hypo

SEQ ID NO: 246901 - DNA, 73 bp, Homo sapiens; identical to SEQ ID NO: 226157
  chr20:44462767-44462840
  hypo

SEQ ID NO: 246902 - DNA, 398 bp, Homo sapiens; identical to SEQ ID NO: 226158
  chr20:44518897-44519295
  hypo

SEQ ID NO: 246903 - DNA, 171 bp, Homo sapiens; identical to SEQ ID NO: 226159
  chr20:44540034-44540205
  hypo

SEQ ID NO: 246904 - DNA, 321 bp, Homo sapiens; identical to SEQ ID NO: 226160
  chr20:44540445-44540766
  hypo

SEQ ID NO: 246905 - DNA, 717 bp, Homo sapiens; identical to SEQ ID NO: 226161
  chr20:44642394-44643111
  hypo

SEQ ID NO: 246906 - DNA, 284 bp, Homo sapiens; identical to SEQ ID NO: 226162
  chr20:44660657-44660941
  hypo

SEQ ID NO: 246907 - DNA, 360 bp, Homo sapiens; identical to SEQ ID NO: 226163
  chr20:44803019-44803379
  hypo

SEQ ID NO: 246908 - DNA, 167 bp, Homo sapiens; identical to SEQ ID NO: 226164
  chr20:44803465-44803632
  hypo

SEQ ID NO: 246909 - DNA, 1800 bp, Homo sapiens; identical to SEQ ID NO: 226165
  chr20:44935884-44937684
  hypo

SEQ ID NO: 246910 - DNA, 900 bp, Homo sapiens; identical to SEQ ID NO: 226166
  chr20:45523152-45524052
  hypo

SEQ ID NO: 246911 - DNA, 180 bp, Homo sapiens; identical to SEQ ID NO: 226167
  chr20:45524108-45524288
  hypo

SEQ ID NO: 246912 - DNA, 1469 bp, Homo sapiens; identical to SEQ ID NO: 226168
  chr20:47443692-47445161
  hypo

SEQ ID NO: 246913 - DNA, 1010 bp, Homo sapiens; identical to SEQ ID NO: 226169
  chr20:47934765-47935775
  hypo

SEQ ID NO: 246914 - DNA, 104 bp, Homo sapiens; identical to SEQ ID NO: 226170
  chr20:47935858-47935962
  hypo

SEQ ID NO: 246915 - DNA, 747 bp, Homo sapiens; identical to SEQ ID NO: 226171
  chr20:48100303-48101050
  hypo

SEQ ID NO: 246916 - DNA, 97 bp, Homo sapiens; identical to SEQ ID NO: 226172
  chr20:48194980-48195077
  hypo

SEQ ID NO: 246917 - DNA, 943 bp, Homo sapiens; identical to SEQ ID NO: 226173
  chr20:48598696-48599639
  hypo

SEQ ID NO: 246918 - DNA, 146 bp, Homo sapiens; identical to SEQ ID NO: 226174
  chr20:48771157-48771303
  hypo

SEQ ID NO: 246919 - DNA, 104 bp, Homo sapiens; identical to SEQ ID NO: 226175
  chr20:49225384-49225488
  hypo

SEQ ID NO: 246920 - DNA, 281 bp, Homo sapiens; identical to SEQ ID NO: 226176
  chr20:49226018-49226299
  hypo

SEQ ID NO: 246921 - DNA, 630 bp, Homo sapiens; identical to SEQ ID NO: 226177
  chr20:49639051-49639681
  hypo

SEQ ID NO: 246922 - DNA, 465 bp, Homo sapiens; identical to SEQ ID NO: 226178
  chr20:49639760-49640225
  hypo

SEQ ID NO: 246923 - DNA, 360 bp, Homo sapiens; identical to SEQ ID NO: 226179
  chr20:50383670-50384030
  hypo

SEQ ID NO: 246924 - DNA, 240 bp, Homo sapiens; identical to SEQ ID NO: 226180
  chr20:50384882-50385122
  hypo

SEQ ID NO: 246925 - DNA, 180 bp, Homo sapiens; identical to SEQ ID NO: 226181
  chr20:51589799-51589979
  hypo

SEQ ID NO: 246926 - DNA, 157 bp, Homo sapiens; identical to SEQ ID NO: 226182
  chr20:52209206-52209363
  hypo

SEQ ID NO: 246927 - DNA, 197 bp, Homo sapiens; identical to SEQ ID NO: 226183
  chr20:54934126-54934323
  hypo

SEQ ID NO: 246928 - DNA, 480 bp, Homo sapiens; identical to SEQ ID NO: 226184
  chr20:55206373-55206853
  hypo

SEQ ID NO: 246929 - DNA, 145 bp, Homo sapiens; identical to SEQ ID NO: 205870
  chr20:55966824-55966969
  hypo

SEQ ID NO: 246930 - DNA, 316 bp, Homo sapiens; identical to SEQ ID NO: 226186
  chr20:56784797-56785113
  hypo

SEQ ID NO: 246931 - DNA, 54 bp, Homo sapiens; identical to SEQ ID NO: 226187
  chr20:56785191-56785245
  hypo

SEQ ID NO: 246932 - DNA, 224 bp, Homo sapiens; identical to SEQ ID NO: 226188
  chr20:56811736-56811960
  hypo

SEQ ID NO: 246933 - DNA, 922 bp, Homo sapiens; identical to SEQ ID NO: 226189
  chr20:57224671-57225593
  hypo

SEQ ID NO: 246934 - DNA, 208 bp, Homo sapiens; identical to SEQ ID NO: 226190
  chr20:57414593-57414801
  hypo

SEQ ID NO: 246935 - DNA, 158 bp, Homo sapiens; identical to SEQ ID NO: 205875
  chr20:57415180-57415338
  hypo

SEQ ID NO: 246936 - DNA, 302 bp, Homo sapiens; identical to SEQ ID NO: 205876
  chr20:57415539-57415841
  hypo

SEQ ID NO: 246937 - DNA, 2076 bp, Homo sapiens; identical to SEQ ID NO: 205877
  chr20:57428311-57430387
  hypo

SEQ ID NO: 246938 - DNA, 33 bp, Homo sapiens; identical to SEQ ID NO: 205879
  chr20:57470653-57470686
  hypo

SEQ ID NO: 246939 - DNA, 251 bp, Homo sapiens; identical to SEQ ID NO: 205880
  chr20:57478608-57478859
  hypo

SEQ ID NO: 246940 - DNA, 437 bp, Homo sapiens; identical to SEQ ID NO: 226196
  chr20:57484405-57484842
  hypo

SEQ ID NO: 246941 - DNA, 204 bp, Homo sapiens; identical to SEQ ID NO: 205882
  chr20:57485751-57485955
  hypo

SEQ ID NO: 246942 - DNA, 57 bp, Homo sapiens; identical to SEQ ID NO: 205883
  chr20:57797335-57797392
  hypo

SEQ ID NO: 246943 - DNA, 268 bp, Homo sapiens; identical to SEQ ID NO: 226199
  chr20:57797935-57798203
  hypo

SEQ ID NO: 246944 - DNA, 105 bp, Homo sapiens; identical to SEQ ID NO: 226200
  chr20:57875351-57875456
  hypo

SEQ ID NO: 246945 - DNA, 360 bp, Homo sapiens; identical to SEQ ID NO: 226201
  chr20:57875574-57875934
  hypo

SEQ ID NO: 246946 - DNA, 314 bp, Homo sapiens; identical to SEQ ID NO: 226202
  chr20:57978781-57979095
  hypo

SEQ ID NO: 246947 - DNA, 968 bp, Homo sapiens; identical to SEQ ID NO: 226203
  chr20:58179832-58180800
  hypo

SEQ ID NO: 246948 - DNA, 307 bp, Homo sapiens; identical to SEQ ID NO: 226204
  chr20:58514222-58514529
  hypo

SEQ ID NO: 246949 - DNA, 329 bp, Homo sapiens; identical to SEQ ID NO: 226205
  chr20:58514801-58515130
  hypo

SEQ ID NO: 246950 - DNA, 105 bp, Homo sapiens; identical to SEQ ID NO: 226206
  chr20:58515465-58515570
  hypo

SEQ ID NO: 246951 - DNA, 158 bp, Homo sapiens; identical to SEQ ID NO: 226207
  chr20:59804278-59804436
  hypo

SEQ ID NO: 246952 - DNA, 1731 bp, Homo sapiens; identical to SEQ ID NO: 226208
  chr20:59826957-59828688
  hypo

SEQ ID NO: 246953 - DNA, 240 bp, Homo sapiens; identical to SEQ ID NO: 226209
  chr20:60552103-60552343
  hypo

SEQ ID NO: 246954 - DNA, 243 bp, Homo sapiens; identical to SEQ ID NO: 205894
  chr20:60941671-60941914
  hypo

SEQ ID NO: 246955 - DNA, 180 bp, Homo sapiens; identical to SEQ ID NO: 226211
  chr20:61447619-61447799
  hypo

SEQ ID NO: 246956 - DNA, 211 bp, Homo sapiens; identical to SEQ ID NO: 226212
  chr20:61447928-61448139
  hypo

SEQ ID NO: 246957 - DNA, 207 bp, Homo sapiens; identical to SEQ ID NO: 226213
  chr20:61492810-61493017
  hypo

SEQ ID NO: 246958 - DNA, 449 bp, Homo sapiens; identical to SEQ ID NO: 226214
  chr20:61583882-61584331
  hypo

SEQ ID NO: 246959 - DNA, 111 bp, Homo sapiens; identical to SEQ ID NO: 226215
  chr20:61636765-61636876
  hypo

SEQ ID NO: 246960 - DNA, 1724 bp, Homo sapiens; identical to SEQ ID NO: 226216
  chr20:61637313-61639037
  hypo

SEQ ID NO: 246961 - DNA, 1313 bp, Homo sapiens; identical to SEQ ID NO: 226217
  chr20:61733295-61734608
  hypo

SEQ ID NO: 246962 - DNA, 163 bp, Homo sapiens; identical to SEQ ID NO: 226218
  chr20:61759914-61760077
  hypo

SEQ ID NO: 246963 - DNA, 540 bp, Homo sapiens; identical to SEQ ID NO: 226219
  chr20:61806369-61806909
  hypo

SEQ ID NO: 246964 - DNA, 180 bp, Homo sapiens; identical to SEQ ID NO: 226220
  chr20:61808471-61808651
  hypo

SEQ ID NO: 246965 - DNA, 2160 bp, Homo sapiens; identical to SEQ ID NO: 226221
  chr20:61808702-61810862
  hypo

SEQ ID NO: 246966 - DNA, 1316 bp, Homo sapiens; identical to SEQ ID NO: 226222
  chr20:61884624-61885940
  hypo

SEQ ID NO: 246967 - DNA, 357 bp, Homo sapiens; identical to SEQ ID NO: 226223
  chr20:61886006-61886363
  hypo

SEQ ID NO: 246968 - DNA, 837 bp, Homo sapiens; identical to SEQ ID NO: 226224
  chr20:62103142-62103979
  hypo

SEQ ID NO: 246969 - DNA, 793 bp, Homo sapiens; identical to SEQ ID NO: 226225
  chr20:62119313-62120106
  hypo

SEQ ID NO: 246970 - DNA, 42 bp, Homo sapiens; identical to SEQ ID NO: 226226
  chr20:62152087-62152129
  hypo

SEQ ID NO: 246971 - DNA, 105 bp, Homo sapiens; identical to SEQ ID NO: 226227
  chr20:62273400-62273505
  hypo

SEQ ID NO: 246972 - DNA, 924 bp, Homo sapiens; identical to SEQ ID NO: 226228
  chr20:62283760-62284684
  hypo

SEQ ID NO: 246973 - DNA, 660 bp, Homo sapiens; identical to SEQ ID NO: 226229
  chr20:62383555-62384215
  hypo

SEQ ID NO: 246974 - DNA, 121 bp, Homo sapiens; identical to SEQ ID NO: 226230
  chr20:62384862-62384983
  hypo

SEQ ID NO: 246975 - DNA, 460 bp, Homo sapiens; identical to SEQ ID NO: 226231
  chr20:62461444-62461904
  hypo

SEQ ID NO: 246976 - DNA, 339 bp, Homo sapiens; identical to SEQ ID NO: 205912
  chr20:62495239-62495578
  hypo

SEQ ID NO: 246977 - DNA, 361 bp, Homo sapiens; identical to SEQ ID NO: 226233
  chr20:62525784-62526145
  hypo

SEQ ID NO: 246978 - DNA, 1008 bp, Homo sapiens; identical to SEQ ID NO: 226234
  chr20:62600640-62601648
  hypo

SEQ ID NO: 246979 - DNA, 238 bp, Homo sapiens; identical to SEQ ID NO: 226235
  chr20:62605238-62605476
  hypo

SEQ ID NO: 246980 - DNA, 81 bp, Homo sapiens; identical to SEQ ID NO: 226236
  chr20:62673344-62673425
  hypo

SEQ ID NO: 246981 - DNA, 473 bp, Homo sapiens; identical to SEQ ID NO: 226237
  chr20:62673632-62674105
  hypo

SEQ ID NO: 246982 - DNA, 582 bp, Homo sapiens; identical to SEQ ID NO: 226238
  chr20:62679894-62680476
  hypo

SEQ ID NO: 246983 - DNA, 300 bp, Homo sapiens; identical to SEQ ID NO: 226239
  chr20:62694625-62694925
  hypo

SEQ ID NO: 246984 - DNA, 180 bp, Homo sapiens; identical to SEQ ID NO: 226240
  chr20:62695013-62695193
  hypo

SEQ ID NO: 246985 - DNA, 1077 bp, Homo sapiens; identical to SEQ ID NO: 226241
  chr20:62714666-62715743
  hypo

SEQ ID NO: 246986 - DNA, 105 bp, Homo sapiens; identical to SEQ ID NO: 226242
  chr20:62733382-62733487
  hypo

SEQ ID NO: 246987 - DNA, 420 bp, Homo sapiens; identical to SEQ ID NO: 226243
  chr20:62733537-62733957
  hypo

SEQ ID NO: 246988 - DNA, 680 bp, Homo sapiens; identical to SEQ ID NO: 226244
  chr21:15588318-15588998
  hypo

SEQ ID NO: 246989 - DNA, 105 bp, Homo sapiens; identical to SEQ ID NO: 226245
  chr21:16130747-16130852
  hypo

SEQ ID NO: 246990 - DNA, 447 bp, Homo sapiens; identical to SEQ ID NO: 226246
  chr21:16438267-16438714
  hypo

SEQ ID NO: 246991 - DNA, 83 bp, Homo sapiens; identical to SEQ ID NO: 226247
  chr21:17102748-17102831
  hypo

SEQ ID NO: 246992 - DNA, 180 bp, Homo sapiens; identical to SEQ ID NO: 226248
  chr21:18885533-18885713
  hypo

SEQ ID NO: 246993 - DNA, 282 bp, Homo sapiens; identical to SEQ ID NO: 226249
  chr21:18985373-18985655
  hypo

SEQ ID NO: 246994 - DNA, 960 bp, Homo sapiens; identical to SEQ ID NO: 226250
  chr21:27011572-27012532
  hypo

SEQ ID NO: 246995 - DNA, 236 bp, Homo sapiens; identical to SEQ ID NO: 226251
  chr21:30670774-30671010
  hypo

SEQ ID NO: 246996 - DNA, 351 bp, Homo sapiens; identical to SEQ ID NO: 226252
  chr21:32716148-32716499
  hypo

SEQ ID NO: 246997 - DNA, 256 bp, Homo sapiens; identical to SEQ ID NO: 226253
  chr21:32931603-32931859
  hypo

SEQ ID NO: 246998 - DNA, 105 bp, Homo sapiens; identical to SEQ ID NO: 226254
  chr21:32932326-32932431
  hypo

SEQ ID NO: 246999 - DNA, 32 bp, Homo sapiens; identical to SEQ ID NO: 226255
  chr21:33058221-33058253
  hypo

SEQ ID NO: 247000 - DNA, 508 bp, Homo sapiens; identical to SEQ ID NO: 226256
  chr21:34392154-34392662
  hypo

SEQ ID NO: 247001 - DNA, 497 bp, Homo sapiens; identical to SEQ ID NO: 226257
  chr21:34442192-34442689
  hypo

SEQ ID NO: 247002 - DNA, 960 bp, Homo sapiens; identical to SEQ ID NO: 226258
  chr21:34442822-34443782
  hypo

SEQ ID NO: 247003 - DNA, 304 bp, Homo sapiens; identical to SEQ ID NO: 226259
  chr21:34444198-34444502
  hypo

SEQ ID NO: 247004 - DNA, 540 bp, Homo sapiens; identical to SEQ ID NO: 226260
  chr21:34776217-34776757
  hypo

SEQ ID NO: 247005 - DNA, 160 bp, Homo sapiens; identical to SEQ ID NO: 226261
  chr21:35986819-35986979
  hypo

SEQ ID NO: 247006 - DNA, 900 bp, Homo sapiens; identical to SEQ ID NO: 226262
  chr21:36041535-36042435
  hypo

SEQ ID NO: 247007 - DNA, 180 bp, Homo sapiens; identical to SEQ ID NO: 226263
  chr21:36042511-36042691
  hypo

SEQ ID NO: 247008 - DNA, 1775 bp, Homo sapiens; identical to SEQ ID NO: 226264
  chr21:36160097-36161872
  hypo

SEQ ID NO: 247009 - DNA, 3054 bp, Homo sapiens; identical to SEQ ID NO: 226265
  chr21:36161938-36164992
  hypo

SEQ ID NO: 247010 - DNA, 162 bp, Homo sapiens; identical to SEQ ID NO: 205974
  chr21:36171597-36171759
  hypo

SEQ ID NO: 247011 - DNA, 203 bp, Homo sapiens; identical to SEQ ID NO: 205975
  chr21:36206695-36206898
  hypo

SEQ ID NO: 247012 - DNA, 105 bp, Homo sapiens; identical to SEQ ID NO: 205976
  chr21:36231770-36231875
  hypo

SEQ ID NO: 247013 - DNA, 179 bp, Homo sapiens; identical to SEQ ID NO: 205977
  chr21:36252845-36253024
  hypo

SEQ ID NO: 247014 - DNA, 266 bp, Homo sapiens; identical to SEQ ID NO: 205978
  chr21:36259127-36259393
  hypo

SEQ ID NO: 247015 - DNA, 39 bp, Homo sapiens; identical to SEQ ID NO: 205980
  chr21:36265221-36265260
  hypo

SEQ ID NO: 247016 - DNA, 117 bp, Homo sapiens; identical to SEQ ID NO: 205981
  chr21:36421138-36421255
  hypo

SEQ ID NO: 247017 - DNA, 131 bp, Homo sapiens; identical to SEQ ID NO: 205982
  chr21:36421464-36421595
  hypo

SEQ ID NO: 247018 - DNA, 373 bp, Homo sapiens; identical to SEQ ID NO: 205983
  chr21:37528252-37528625
  hypo

SEQ ID NO: 247019 - DNA, 153 bp, Homo sapiens; identical to SEQ ID NO: 226275
  chr21:38362192-38362345
  hypo

SEQ ID NO: 247020 - DNA, 403 bp, Homo sapiens; identical to SEQ ID NO: 226276
  chr21:38446387-38446790
  hypo

SEQ ID NO: 247021 - DNA, 105 bp, Homo sapiens; identical to SEQ ID NO: 226277
  chr21:39288093-39288198
  hypo

SEQ ID NO: 247022 - DNA, 300 bp, Homo sapiens; identical to SEQ ID NO: 226278
  chr21:39288703-39289003
  hypo

SEQ ID NO: 247023 - DNA, 186 bp, Homo sapiens; identical to SEQ ID NO: 226279
  chr21:39289095-39289281
  hypo

SEQ ID NO: 247024 - DNA, 623 bp, Homo sapiens; identical to SEQ ID NO: 226280
  chr21:40032286-40032909
  hypo

SEQ ID NO: 247025 - DNA, 180 bp, Homo sapiens; identical to SEQ ID NO: 226281
  chr21:40033073-40033253
  hypo

SEQ ID NO: 247026 - DNA, 1120 bp, Homo sapiens; identical to SEQ ID NO: 226282
  chr21:40177485-40178605
  hypo

SEQ ID NO: 247027 - DNA, 88 bp, Homo sapiens; identical to SEQ ID NO: 226283
  chr21:40751598-40751686
  hypo

SEQ ID NO: 247028 - DNA, 70 bp, Homo sapiens; identical to SEQ ID NO: 206012
  chr21:40941233-40941303
  hypo

SEQ ID NO: 247029 - DNA, 944 bp, Homo sapiens; identical to SEQ ID NO: 226285
  chr21:42539420-42540364
  hypo

SEQ ID NO: 247030 - DNA, 87 bp, Homo sapiens; identical to SEQ ID NO: 226286
  chr21:43067058-43067145
  hypo

SEQ ID NO: 247031 - DNA, 437 bp, Homo sapiens; identical to SEQ ID NO: 226287
  chr21:43373386-43373823
  hypo

SEQ ID NO: 247032 - DNA, 369 bp, Homo sapiens; identical to SEQ ID NO: 226288
  chr21:43373996-43374365
  hypo

SEQ ID NO: 247033 - DNA, 480 bp, Homo sapiens; identical to SEQ ID NO: 226289
  chr21:44494898-44495378
  hypo

SEQ ID NO: 247034 - DNA, 594 bp, Homo sapiens; identical to SEQ ID NO: 226290
  chr21:44495431-44496025
  hypo

SEQ ID NO: 247035 - DNA, 614 bp, Homo sapiens; identical to SEQ ID NO: 226291
  chr21:44496297-44496911
  hypo

SEQ ID NO: 247036 - DNA, 110 bp, Homo sapiens; identical to SEQ ID NO: 206026
  chr21:44513219-44513329
  hypo

SEQ ID NO: 247037 - DNA, 208 bp, Homo sapiens; identical to SEQ ID NO: 226293
  chr21:44514586-44514794
  hypo

SEQ ID NO: 247038 - DNA, 261 bp, Homo sapiens; identical to SEQ ID NO: 226294
  chr21:44847473-44847734
  hypo

SEQ ID NO: 247039 - DNA, 179 bp, Homo sapiens; identical to SEQ ID NO: 226295
  chr21:45182012-45182191
  hypo

SEQ ID NO: 247040 - DNA, 108 bp, Homo sapiens; identical to SEQ ID NO: 226296
  chr21:45182717-45182825
  hypo

SEQ ID NO: 247041 - DNA, 397 bp, Homo sapiens; identical to SEQ ID NO: 226297
  chr21:45381212-45381609
  hypo

SEQ ID NO: 247042 - DNA, 63 bp, Homo sapiens; identical to SEQ ID NO: 206032
  chr21:45553436-45553499
  hypo

SEQ ID NO: 247043 - DNA, 144 bp, Homo sapiens; identical to SEQ ID NO: 226299
  chr21:45660255-45660399
  hypo

SEQ ID NO: 247044 - DNA, 196 bp, Homo sapiens; identical to SEQ ID NO: 226300
  chr21:45662515-45662711
  hypo

SEQ ID NO: 247045 - DNA, 329 bp, Homo sapiens; identical to SEQ ID NO: 226301
  chr21:45662726-45663055
  hypo

SEQ ID NO: 247046 - DNA, 227 bp, Homo sapiens; identical to SEQ ID NO: 226302
  chr21:45713546-45713773
  hypo

SEQ ID NO: 247047 - DNA, 1578 bp, Homo sapiens; identical to SEQ ID NO: 226303
  chr21:46351315-46352893
  hypo

SEQ ID NO: 247048 - DNA, 117 bp, Homo sapiens; identical to SEQ ID NO: 226304
  chr21:46686339-46686456
  hypo

SEQ ID NO: 247049 - DNA, 180 bp, Homo sapiens; identical to SEQ ID NO: 226305
  chr21:46800716-46800896
  hypo

SEQ ID NO: 247050 - DNA, 104 bp, Homo sapiens; identical to SEQ ID NO: 226306
  chr21:46800994-46801098
  hypo

SEQ ID NO: 247051 - DNA, 242 bp, Homo sapiens; identical to SEQ ID NO: 226307
  chr21:46801324-46801566
  hypo

SEQ ID NO: 247052 - DNA, 104 bp, Homo sapiens; identical to SEQ ID NO: 206041
  chr21:46950778-46950882
  hypo

SEQ ID NO: 247053 - DNA, 173 bp, Homo sapiens; identical to SEQ ID NO: 226309
  chr21:47050917-47051090
  hypo

SEQ ID NO: 247054 - DNA, 810 bp, Homo sapiens; identical to SEQ ID NO: 226310
  chr21:47062142-47062952
  hypo

SEQ ID NO: 247055 - DNA, 1124 bp, Homo sapiens; identical to SEQ ID NO: 226311
  chr21:47063293-47064417
  hypo

SEQ ID NO: 247056 - DNA, 281 bp, Homo sapiens; identical to SEQ ID NO: 226312
  chr21:47649462-47649743
  hypo

SEQ ID NO: 247057 - DNA, 631 bp, Homo sapiens; identical to SEQ ID NO: 226313
  chr21:47717279-47717910
  hypo

SEQ ID NO: 247058 - DNA, 140 bp, Homo sapiens; identical to SEQ ID NO: 226314
  chr21:47799137-47799277
  hypo

SEQ ID NO: 247059 - DNA, 1077 bp, Homo sapiens; identical to SEQ ID NO: 226315
  chr21:48087126-48088203
  hypo

SEQ ID NO: 247060 - DNA, 579 bp, Homo sapiens; identical to SEQ ID NO: 226316
  chr22:17600945-17601524
  hypo

SEQ ID NO: 247061 - DNA, 540 bp, Homo sapiens; identical to SEQ ID NO: 226317
  chr22:17850263-17850803
  hypo

SEQ ID NO: 247062 - DNA, 152 bp, Homo sapiens; identical to SEQ ID NO: 226318
  chr22:17850879-17851031
  hypo

SEQ ID NO: 247063 - DNA, 664 bp, Homo sapiens; identical to SEQ ID NO: 226319
  chr22:19706043-19706707
  hypo

SEQ ID NO: 247064 - DNA, 823 bp, Homo sapiens; identical to SEQ ID NO: 226320
  chr22:19748301-19749124
  hypo

SEQ ID NO: 247065 - DNA, 676 bp, Homo sapiens; identical to SEQ ID NO: 226321
  chr22:19753298-19753974
  hypo

SEQ ID NO: 247066 - DNA, 156 bp, Homo sapiens; identical to SEQ ID NO: 226322
  chr22:20255237-20255393
  hypo

SEQ ID NO: 247067 - DNA, 205 bp, Homo sapiens; identical to SEQ ID NO: 226323
  chr22:20255494-20255699
  hypo

SEQ ID NO: 247068 - DNA, 180 bp, Homo sapiens; identical to SEQ ID NO: 226324
  chr22:20791607-20791787
  hypo

SEQ ID NO: 247069 - DNA, 180 bp, Homo sapiens; identical to SEQ ID NO: 226325
  chr22:20791892-20792072
  hypo

SEQ ID NO: 247070 - DNA, 288 bp, Homo sapiens; identical to SEQ ID NO: 226326
  chr22:20792309-20792597
  hypo

SEQ ID NO: 247071 - DNA, 104 bp, Homo sapiens; identical to SEQ ID NO: 226327
  chr22:21385911-21386015
  hypo

SEQ ID NO: 247072 - DNA, 397 bp, Homo sapiens; identical to SEQ ID NO: 226328
  chr22:21386501-21386898
  hypo

SEQ ID NO: 247073 - DNA, 780 bp, Homo sapiens; identical to SEQ ID NO: 226329
  chr22:22005810-22006590
  hypo

SEQ ID NO: 247074 - DNA, 332 bp, Homo sapiens; identical to SEQ ID NO: 226330
  chr22:22090486-22090818
  hypo

SEQ ID NO: 247075 - DNA, 105 bp, Homo sapiens; identical to SEQ ID NO: 226331
  chr22:22221216-22221321
  hypo

SEQ ID NO: 247076 - DNA, 372 bp, Homo sapiens; identical to SEQ ID NO: 226332
  chr22:22292760-22293132
  hypo

SEQ ID NO: 247077 - DNA, 216 bp, Homo sapiens; identical to SEQ ID NO: 226333
  chr22:22306476-22306692
  hypo

SEQ ID NO: 247078 - DNA, 105 bp, Homo sapiens; identical to SEQ ID NO: 226334
  chr22:22307262-22307367
  hypo

SEQ ID NO: 247079 - DNA, 757 bp, Homo sapiens; identical to SEQ ID NO: 226335
  chr22:22862550-22863307
  hypo

SEQ ID NO: 247080 - DNA, 199 bp, Homo sapiens; identical to SEQ ID NO: 226336
  chr22:23523110-23523309
  hypo

SEQ ID NO: 247081 - DNA, 229 bp, Homo sapiens; identical to SEQ ID NO: 226337
  chr22:23908684-23908913
  hypo

SEQ ID NO: 247082 - DNA, 47 bp, Homo sapiens; identical to SEQ ID NO: 226338
  chr22:24110159-24110206
  hypo

SEQ ID NO: 247083 - DNA, 458 bp, Homo sapiens; identical to SEQ ID NO: 226339
  chr22:24110419-24110877
  hypo

SEQ ID NO: 247084 - DNA, 240 bp, Homo sapiens; identical to SEQ ID NO: 226340
  chr22:24552184-24552424
  hypo

SEQ ID NO: 247085 - DNA, 380 bp, Homo sapiens; identical to SEQ ID NO: 226341
  chr22:24552731-24553111
  hypo

SEQ ID NO: 247086 - DNA, 646 bp, Homo sapiens; identical to SEQ ID NO: 226342
  chr22:24819901-24820547
  hypo

SEQ ID NO: 247087 - DNA, 91 bp, Homo sapiens; identical to SEQ ID NO: 206073
  chr22:24989196-24989287
  hypo

SEQ ID NO: 247088 - DNA, 1080 bp, Homo sapiens; identical to SEQ ID NO: 226344
  chr22:25348358-25349438
  hypo

SEQ ID NO: 247089 - DNA, 110 bp, Homo sapiens; identical to SEQ ID NO: 226345
  chr22:25678186-25678296
  hypo

SEQ ID NO: 247090 - DNA, 915 bp, Homo sapiens; identical to SEQ ID NO: 226346
  chr22:25678522-25679437
  hypo

SEQ ID NO: 247091 - DNA, 638 bp, Homo sapiens; identical to SEQ ID NO: 226347
  chr22:25816915-25817553
  hypo

SEQ ID NO: 247092 - DNA, 1163 bp, Homo sapiens; identical to SEQ ID NO: 226348
  chr22:26565123-26566286
  hypo

SEQ ID NO: 247093 - DNA, 105 bp, Homo sapiens; identical to SEQ ID NO: 226349
  chr22:26825007-26825112
  hypo

SEQ ID NO: 247094 - DNA, 180 bp, Homo sapiens; identical to SEQ ID NO: 226350
  chr22:27068859-27069039
  hypo

SEQ ID NO: 247095 - DNA, 992 bp, Homo sapiens; identical to SEQ ID NO: 226351
  chr22:28196993-28197985
  hypo

SEQ ID NO: 247096 - DNA, 816 bp, Homo sapiens; identical to SEQ ID NO: 226352
  chr22:29075366-29076182
  hypo

SEQ ID NO: 247097 - DNA, 321 bp, Homo sapiens; identical to SEQ ID NO: 226353
  chr22:29468748-29469069
  hypo

SEQ ID NO: 247098 - DNA, 240 bp, Homo sapiens; identical to SEQ ID NO: 226354
  chr22:29469129-29469369
  hypo

SEQ ID NO: 247099 - DNA, 148 bp, Homo sapiens; identical to SEQ ID NO: 226355
  chr22:29702352-29702500
  hypo

SEQ ID NO: 247100 - DNA, 240 bp, Homo sapiens; identical to SEQ ID NO: 226356
  chr22:29702936-29703176
  hypo

SEQ ID NO: 247101 - DNA, 197 bp, Homo sapiens; identical to SEQ ID NO: 226357
  chr22:29876678-29876875
  hypo

SEQ ID NO: 247102 - DNA, 447 bp, Homo sapiens; identical to SEQ ID NO: 226358
  chr22:30116686-30117133
  hypo

SEQ ID NO: 247103 - DNA, 192 bp, Homo sapiens; identical to SEQ ID NO: 226359
  chr22:30723111-30723303
  hypo

SEQ ID NO: 247104 - DNA, 260 bp, Homo sapiens; identical to SEQ ID NO: 226360
  chr22:30792878-30793138
  hypo

SEQ ID NO: 247105 - DNA, 105 bp, Homo sapiens; identical to SEQ ID NO: 206102
  chr22:31002803-31002908
  hypo

SEQ ID NO: 247106 - DNA, 566 bp, Homo sapiens; identical to SEQ ID NO: 226362
  chr22:31198595-31199161
  hypo

SEQ ID NO: 247107 - DNA, 455 bp, Homo sapiens; identical to SEQ ID NO: 226363
  chr22:32571844-32572299
  hypo

SEQ ID NO: 247108 - DNA, 546 bp, Homo sapiens; identical to SEQ ID NO: 226364
  chr22:33453872-33454418
  hypo

SEQ ID NO: 247109 - DNA, 1096 bp, Homo sapiens; identical to SEQ ID NO: 226365
  chr22:34315937-34317033
  hypo

SEQ ID NO: 247110 - DNA, 256 bp, Homo sapiens; identical to SEQ ID NO: 206114
  chr22:35767978-35768234
  hypo

SEQ ID NO: 247111 - DNA, 191 bp, Homo sapiens; identical to SEQ ID NO: 206115
  chr22:35777069-35777260
  hypo

SEQ ID NO: 247112 - DNA, 159 bp, Homo sapiens; identical to SEQ ID NO: 226368
  chr22:36424337-36424496
  hypo

SEQ ID NO: 247113 - DNA, 146 bp, Homo sapiens; identical to SEQ ID NO: 226369
  chr22:36425195-36425341
  hypo

SEQ ID NO: 247114 - DNA, 222 bp, Homo sapiens; identical to SEQ ID NO: 226370
  chr22:36462014-36462236
  hypo

SEQ ID NO: 247115 - DNA, 240 bp, Homo sapiens; identical to SEQ ID NO: 226371
  chr22:36902259-36902499
  hypo

SEQ ID NO: 247116 - DNA, 479 bp, Homo sapiens; identical to SEQ ID NO: 206124
  chr22:37414885-37415364
  hypo

SEQ ID NO: 247117 - DNA, 589 bp, Homo sapiens; identical to SEQ ID NO: 226373
  chr22:37914844-37915433
  hypo

SEQ ID NO: 247118 - DNA, 123 bp, Homo sapiens; identical to SEQ ID NO: 226374
  chr22:37915687-37915810
  hypo

SEQ ID NO: 247119 - DNA, 558 bp, Homo sapiens; identical to SEQ ID NO: 226375
  chr22:37956436-37956994
  hypo

SEQ ID NO: 247120 - DNA, 206 bp, Homo sapiens; identical to SEQ ID NO: 226376
  chr22:38577938-38578144
  hypo

SEQ ID NO: 247121 - DNA, 125 bp, Homo sapiens; identical to SEQ ID NO: 226377
  chr22:38966056-38966181
  hypo

SEQ ID NO: 247122 - DNA, 351 bp, Homo sapiens; identical to SEQ ID NO: 226378
  chr22:39239093-39239444
  hypo

SEQ ID NO: 247123 - DNA, 105 bp, Homo sapiens; identical to SEQ ID NO: 226379
  chr22:39239935-39240040
  hypo

SEQ ID NO: 247124 - DNA, 248 bp, Homo sapiens; identical to SEQ ID NO: 226380
  chr22:39268982-39269230
  hypo

SEQ ID NO: 247125 - DNA, 565 bp, Homo sapiens; identical to SEQ ID NO: 226381
  chr22:39549058-39549623
  hypo

SEQ ID NO: 247126 - DNA, 47 bp, Homo sapiens; identical to SEQ ID NO: 206139
  chr22:39638593-39638640
  hypo

SEQ ID NO: 247127 - DNA, 477 bp, Homo sapiens; identical to SEQ ID NO: 226383
  chr22:39853588-39854065
  hypo

SEQ ID NO: 247128 - DNA, 205 bp, Homo sapiens; identical to SEQ ID NO: 226384
  chr22:40060785-40060990
  hypo

SEQ ID NO: 247129 - DNA, 700 bp, Homo sapiens; identical to SEQ ID NO: 226385
  chr22:40081595-40082295
  hypo

SEQ ID NO: 247130 - DNA, 233 bp, Homo sapiens; identical to SEQ ID NO: 226386
  chr22:42229858-42230091
  hypo

SEQ ID NO: 247131 - DNA, 693 bp, Homo sapiens; identical to SEQ ID NO: 226387
  chr22:42310037-42310730
  hypo

SEQ ID NO: 247132 - DNA, 300 bp, Homo sapiens; identical to SEQ ID NO: 226388
  chr22:42310741-42311041
  hypo

SEQ ID NO: 247133 - DNA, 105 bp, Homo sapiens; identical to SEQ ID NO: 226389
  chr22:42670075-42670180
  hypo

SEQ ID NO: 247134 - DNA, 327 bp, Homo sapiens; identical to SEQ ID NO: 226390
  chr22:42765054-42765381
  hypo

SEQ ID NO: 247135 - DNA, 248 bp, Homo sapiens; identical to SEQ ID NO: 226391
  chr22:43015553-43015801
  hypo

SEQ ID NO: 247136 - DNA, 300 bp, Homo sapiens; identical to SEQ ID NO: 226392
  chr22:44287478-44287778
  hypo

SEQ ID NO: 247137 - DNA, 180 bp, Homo sapiens; identical to SEQ ID NO: 226393
  chr22:44287840-44288020
  hypo

SEQ ID NO: 247138 - DNA, 180 bp, Homo sapiens; identical to SEQ ID NO: 226394
  chr22:44420338-44420518
  hypo

SEQ ID NO: 247139 - DNA, 403 bp, Homo sapiens; identical to SEQ ID NO: 226395
  chr22:45015983-45016386
  hypo

SEQ ID NO: 247140 - DNA, 917 bp, Homo sapiens; identical to SEQ ID NO: 226396
  chr22:45064150-45065067
  hypo

SEQ ID NO: 247141 - DNA, 420 bp, Homo sapiens; identical to SEQ ID NO: 226397
  chr22:45097962-45098382
  hypo

SEQ ID NO: 247142 - DNA, 2520 bp, Homo sapiens; identical to SEQ ID NO: 226398
  chr22:45403919-45406439
  hypo

SEQ ID NO: 247143 - DNA, 368 bp, Homo sapiens; identical to SEQ ID NO: 226399
  chr22:46465893-46466261
  hypo

SEQ ID NO: 247144 - DNA, 359 bp, Homo sapiens; identical to SEQ ID NO: 226400
  chr22:46468170-46468529
  hypo

SEQ ID NO: 247145 - DNA, 111 bp, Homo sapiens; identical to SEQ ID NO: 226401
  chr22:46658172-46658283
  hypo

SEQ ID NO: 247146 - DNA, 284 bp, Homo sapiens; identical to SEQ ID NO: 226402
  chr22:46658634-46658918
  hypo

SEQ ID NO: 247147 - DNA, 1365 bp, Homo sapiens; identical to SEQ ID NO: 226403
  chr22:48884928-48886293
  hypo

SEQ ID NO: 247148 - DNA, 1970 bp, Homo sapiens; identical to SEQ ID NO: 226404
  chr22:48970901-48972871
  hypo

SEQ ID NO: 247149 - DNA, 289 bp, Homo sapiens; identical to SEQ ID NO: 226405
  chr22:50118499-50118788
  hypo

SEQ ID NO: 247150 - DNA, 105 bp, Homo sapiens; identical to SEQ ID NO: 226406
  chr22:50170510-50170615
  hypo

SEQ ID NO: 247151 - DNA, 343 bp, Homo sapiens; identical to SEQ ID NO: 226407
  chr22:50246433-50246776
  hypo

SEQ ID NO: 247152 - DNA, 349 bp, Homo sapiens; identical to SEQ ID NO: 226408
  chr22:50421921-50422270
  hypo

SEQ ID NO: 247153 - DNA, 407 bp, Homo sapiens; identical to SEQ ID NO: 226409
  chr22:50453234-50453641
  hypo

SEQ ID NO: 247154 - DNA, 289 bp, Homo sapiens; identical to SEQ ID NO: 226410
  chr22:50496690-50496979
  hypo

SEQ ID NO: 247155 - DNA, 580 bp, Homo sapiens; identical to SEQ ID NO: 226411
  chr22:50623255-50623835
  hypo

SEQ ID NO: 247156 - DNA, 84 bp, Homo sapiens; identical to SEQ ID NO: 206187
  chr22:50745645-50745729
  hypo

SEQ ID NO: 247157 - DNA, 183 bp, Homo sapiens; identical to SEQ ID NO: 206188
  chr22:50765110-50765293
  hypo

SEQ ID NO: 247158 - DNA, 44 bp, Homo sapiens; identical to SEQ ID NO: 226414
  chr22:50766078-50766122
  hypo

SEQ ID NO: 247159 - DNA, 180 bp, Homo sapiens; identical to SEQ ID NO: 226415
  chr22:50873960-50874140
  hypo

SEQ ID NO: 247160 - DNA, 104 bp, Homo sapiens; identical to SEQ ID NO: 226416
  chr22:50874285-50874389
  hypo

SEQ ID NO: 247161 - DNA, 80 bp, Homo sapiens; identical to SEQ ID NO: 226417
  chr22:50920028-50920108
  hypo

SEQ ID NO: 247162 - DNA, 639 bp, Homo sapiens; identical to SEQ ID NO: 206191
  chr22:50970392-50971031
  hypo

SEQ ID NO: 247163 - DNA, 350 bp, Homo sapiens; identical to SEQ ID NO: 226419
  chr22:51111996-51112346
  hypo

SEQ ID NO: 247164 - DNA, 152 bp, Homo sapiens; identical to SEQ ID NO: 226420
  chr22:51112399-51112551
  hypo

SEQ ID NO: 247165 - DNA, 738 bp, Homo sapiens; identical to SEQ ID NO: 226421
  chrX:2846678-2847416
  hypo

SEQ ID NO: 247166 - DNA, 35 bp, Homo sapiens; identical to SEQ ID NO: 226422
  chrX:8698481-8698516
  hypo

SEQ ID NO: 247167 - DNA, 344 bp, Homo sapiens; identical to SEQ ID NO: 226423
  chrX:8698837-8699181
  hypo

SEQ ID NO: 247168 - DNA, 115 bp, Homo sapiens; identical to SEQ ID NO: 226424
  chrX:9432816-9432931
  hypo

SEQ ID NO: 247169 - DNA, 180 bp, Homo sapiens; identical to SEQ ID NO: 226425
  chrX:9433026-9433206
  hypo

SEQ ID NO: 247170 - DNA, 420 bp, Homo sapiens; identical to SEQ ID NO: 226426
  chrX:9433352-9433772
  hypo

SEQ ID NO: 247171 - DNA, 44 bp, Homo sapiens; identical to SEQ ID NO: 206208
  chrX:10023769-10023813
  hypo

SEQ ID NO: 247172 - DNA, 161 bp, Homo sapiens; identical to SEQ ID NO: 226428
  chrX:11776190-11776351
  hypo

SEQ ID NO: 247173 - DNA, 134 bp, Homo sapiens; identical to SEQ ID NO: 206213
  chrX:15808573-15808707
  hypo

SEQ ID NO: 247174 - DNA, 99 bp, Homo sapiens; identical to SEQ ID NO: 206214
  chrX:15809046-15809145
  hypo

SEQ ID NO: 247175 - DNA, 82 bp, Homo sapiens; identical to SEQ ID NO: 206215
  chrX:15817994-15818076
  hypo

SEQ ID NO: 247176 - DNA, 122 bp, Homo sapiens; identical to SEQ ID NO: 206216
  chrX:15821797-15821919
  hypo

SEQ ID NO: 247177 - DNA, 87 bp, Homo sapiens; identical to SEQ ID NO: 206217
  chrX:15822233-15822320
  hypo

SEQ ID NO: 247178 - DNA, 39 bp, Homo sapiens; identical to SEQ ID NO: 206218
  chrX:15826355-15826394
  hypo

SEQ ID NO: 247179 - DNA, 122 bp, Homo sapiens; identical to SEQ ID NO: 206219
  chrX:15827322-15827444
  hypo

SEQ ID NO: 247180 - DNA, 214 bp, Homo sapiens; identical to SEQ ID NO: 206220
  chrX:15833799-15834013
  hypo

SEQ ID NO: 247181 - DNA, 56 bp, Homo sapiens; identical to SEQ ID NO: 206221
  chrX:15836709-15836765
  hypo

SEQ ID NO: 247182 - DNA, 110 bp, Homo sapiens; identical to SEQ ID NO: 206222
  chrX:15838329-15838439
  hypo

SEQ ID NO: 247183 - DNA, 535 bp, Homo sapiens; identical to SEQ ID NO: 206223
  chrX:15840848-15841383
  hypo

SEQ ID NO: 247184 - DNA, 180 bp, Homo sapiens; identical to SEQ ID NO: 226440
  chrX:16730116-16730296
  hypo

SEQ ID NO: 247185 - DNA, 167 bp, Homo sapiens; identical to SEQ ID NO: 226441
  chrX:16730791-16730958
  hypo

SEQ ID NO: 247186 - DNA, 201 bp, Homo sapiens; identical to SEQ ID NO: 226442
  chrX:23801081-23801282
  hypo

SEQ ID NO: 247187 - DNA, 70 bp, Homo sapiens; identical to SEQ ID NO: 206227
  chrX:27999798-27999868
  hypo

SEQ ID NO: 247188 - DNA, 1155 bp, Homo sapiens; identical to SEQ ID NO: 206230
  chrX:39910498-39911653
  hypo

SEQ ID NO: 247189 - DNA, 157 bp, Homo sapiens; identical to SEQ ID NO: 206231
  chrX:39913138-39913295
  hypo

SEQ ID NO: 247190 - DNA, 78 bp, Homo sapiens; identical to SEQ ID NO: 206232
  chrX:39913508-39913586
  hypo

SEQ ID NO: 247191 - DNA, 146 bp, Homo sapiens; identical to SEQ ID NO: 206233
  chrX:39914620-39914766
  hypo

SEQ ID NO: 247192 - DNA, 167 bp, Homo sapiens; identical to SEQ ID NO: 206234
  chrX:39916407-39916574
  hypo

SEQ ID NO: 247193 - DNA, 273 bp, Homo sapiens; identical to SEQ ID NO: 206235
  chrX:39921382-39921655
  hypo

SEQ ID NO: 247194 - DNA, 326 bp, Homo sapiens; identical to SEQ ID NO: 206236
  chrX:39921998-39922324
  hypo

SEQ ID NO: 247195 - DNA, 345 bp, Homo sapiens; identical to SEQ ID NO: 206237
  chrX:39922860-39923205
  hypo

SEQ ID NO: 247196 - DNA, 264 bp, Homo sapiens; identical to SEQ ID NO: 206238
  chrX:39923588-39923852
  hypo

SEQ ID NO: 247197 - DNA, 187 bp, Homo sapiens; identical to SEQ ID NO: 206239
  chrX:39930225-39930412
  hypo

SEQ ID NO: 247198 - DNA, 54 bp, Homo sapiens; identical to SEQ ID NO: 206240
  chrX:39930889-39930943
  hypo

SEQ ID NO: 247199 - DNA, 2832 bp, Homo sapiens; identical to SEQ ID NO: 206241
  chrX:39931601-39934433
  hypo

SEQ ID NO: 247200 - DNA, 79 bp, Homo sapiens; identical to SEQ ID NO: 206242
  chrX:39935706-39935785
  hypo

SEQ ID NO: 247201 - DNA, 126 bp, Homo sapiens; identical to SEQ ID NO: 206243
  chrX:39937096-39937222
  hypo

SEQ ID NO: 247202 - DNA, 420 bp, Homo sapiens; identical to SEQ ID NO: 226458
  chrX:39956383-39956803
  hypo

SEQ ID NO: 247203 - DNA, 267 bp, Homo sapiens; identical to SEQ ID NO: 226459
  chrX:40015028-40015295
  hypo

SEQ ID NO: 247204 - DNA, 660 bp, Homo sapiens; identical to SEQ ID NO: 226460
  chrX:40034573-40035233
  hypo

SEQ ID NO: 247205 - DNA, 180 bp, Homo sapiens; identical to SEQ ID NO: 226461
  chrX:40035280-40035460
  hypo

SEQ ID NO: 247206 - DNA, 401 bp, Homo sapiens; identical to SEQ ID NO: 226462
  chrX:40036181-40036582
  hypo

SEQ ID NO: 247207 - DNA, 291 bp, Homo sapiens; identical to SEQ ID NO: 226463
  chrX:41112860-41113151
  hypo

SEQ ID NO: 247208 - DNA, 359 bp, Homo sapiens; identical to SEQ ID NO: 226464
  chrX:73163983-73164342
  hypo

SEQ ID NO: 247209 - DNA, 343 bp, Homo sapiens; identical to SEQ ID NO: 226465
  chrX:123094090-123094433
  hypo

SEQ ID NO: 247210 - DNA, 223 bp, Homo sapiens; identical to SEQ ID NO: 206276
  chrX:123094493-123094716
  hypo

SEQ ID NO: 247211 - DNA, 124 bp, Homo sapiens; identical to SEQ ID NO: 206277
  chrX:123095161-123095285
  hypo

SEQ ID NO: 247212 - DNA, 151 bp, Homo sapiens; identical to SEQ ID NO: 206278
  chrX:123095555-123095706
  hypo

SEQ ID NO: 247213 - DNA, 65 bp, Homo sapiens; identical to SEQ ID NO: 206279
  chrX:123155216-123155281
  hypo

SEQ ID NO: 247214 - DNA, 141 bp, Homo sapiens; identical to SEQ ID NO: 206280
  chrX:123156380-123156521
  hypo

SEQ ID NO: 247215 - DNA, 79 bp, Homo sapiens; identical to SEQ ID NO: 206281
  chrX:123159689-123159768
  hypo

SEQ ID NO: 247216 - DNA, 165 bp, Homo sapiens; identical to SEQ ID NO: 206282
  chrX:123164810-123164975
  hypo

SEQ ID NO: 247217 - DNA, 97 bp, Homo sapiens; identical to SEQ ID NO: 206283
  chrX:123171376-123171473
  hypo

SEQ ID NO: 247218 - DNA, 77 bp, Homo sapiens; identical to SEQ ID NO: 206284
  chrX:123176418-123176495
  hypo

SEQ ID NO: 247219 - DNA, 205 bp, Homo sapiens; identical to SEQ ID NO: 206285
  chrX:123179013-123179218
  hypo

SEQ ID NO: 247220 - DNA, 152 bp, Homo sapiens; identical to SEQ ID NO: 206286
  chrX:123181203-123181355
  hypo

SEQ ID NO: 247221 - DNA, 74 bp, Homo sapiens; identical to SEQ ID NO: 206287
  chrX:123182854-123182928
  hypo

SEQ ID NO: 247222 - DNA, 135 bp, Homo sapiens; identical to SEQ ID NO: 206288
  chrX:123184024-123184159
  hypo

SEQ ID NO: 247223 - DNA, 278 bp, Homo sapiens; identical to SEQ ID NO: 206289
  chrX:123184966-123185244
  hypo

SEQ ID NO: 247224 - DNA, 108 bp, Homo sapiens; identical to SEQ ID NO: 206290
  chrX:123189977-123190085
  hypo

SEQ ID NO: 247225 - DNA, 112 bp, Homo sapiens; identical to SEQ ID NO: 206291
  chrX:123191715-123191827
  hypo

SEQ ID NO: 247226 - DNA, 131 bp, Homo sapiens; identical to SEQ ID NO: 206292
  chrX:123195073-123195204
  hypo

SEQ ID NO: 247227 - DNA, 104 bp, Homo sapiens; identical to SEQ ID NO: 206293
  chrX:123195620-123195724
  hypo

SEQ ID NO: 247228 - DNA, 306 bp, Homo sapiens; identical to SEQ ID NO: 206294
  chrX:123196749-123197055
  hypo

SEQ ID NO: 247229 - DNA, 213 bp, Homo sapiens; identical to SEQ ID NO: 206295
  chrX:123197688-123197901
  hypo

SEQ ID NO: 247230 - DNA, 71 bp, Homo sapiens; identical to SEQ ID NO: 206296
  chrX:123199725-123199796
  hypo

SEQ ID NO: 247231 - DNA, 262 bp, Homo sapiens; identical to SEQ ID NO: 206297
  chrX:123200024-123200286
  hypo

SEQ ID NO: 247232 - DNA, 93 bp, Homo sapiens; identical to SEQ ID NO: 206298
  chrX:123202413-123202506
  hypo

SEQ ID NO: 247233 - DNA, 175 bp, Homo sapiens; identical to SEQ ID NO: 206299
  chrX:123204998-123205173
  hypo

SEQ ID NO: 247234 - DNA, 140 bp, Homo sapiens; identical to SEQ ID NO: 206300
  chrX:123210181-123210321
  hypo

SEQ ID NO: 247235 - DNA, 102 bp, Homo sapiens; identical to SEQ ID NO: 206301
  chrX:123211806-123211908
  hypo

SEQ ID NO: 247236 - DNA, 150 bp, Homo sapiens; identical to SEQ ID NO: 206302
  chrX:123215228-123215378
  hypo

SEQ ID NO: 247237 - DNA, 133 bp, Homo sapiens; identical to SEQ ID NO: 206303
  chrX:123217270-123217403
  hypo

SEQ ID NO: 247238 - DNA, 224 bp, Homo sapiens; identical to SEQ ID NO: 206304
  chrX:123220396-123220620
  hypo

SEQ ID NO: 247239 - DNA, 390 bp, Homo sapiens; identical to SEQ ID NO: 206305
  chrX:123224424-123224814
  hypo

SEQ ID NO: 247240 - DNA, 127 bp, Homo sapiens; identical to SEQ ID NO: 206306
  chrX:123227867-123227994
  hypo

SEQ ID NO: 247241 - DNA, 78 bp, Homo sapiens; identical to SEQ ID NO: 206307
  chrX:123229221-123229299
  hypo

SEQ ID NO: 247242 - DNA, 2083 bp, Homo sapiens; identical to SEQ ID NO: 206308
  chrX:123234423-123236506
  hypo

SEQ ID NO: 247243 - DNA, 136 bp, Homo sapiens; identical to SEQ ID NO: 206309
  chrX:129139163-129139299
  hypo

SEQ ID NO: 247244 - DNA, 91 bp, Homo sapiens; identical to SEQ ID NO: 206310
  chrX:129146553-129146644
  hypo

SEQ ID NO: 247245 - DNA, 3264 bp, Homo sapiens; identical to SEQ ID NO: 206311
  chrX:129146925-129150189
  hypo

SEQ ID NO: 247246 - DNA, 177 bp, Homo sapiens; identical to SEQ ID NO: 206312
  chrX:129154948-129155125
  hypo

SEQ ID NO: 247247 - DNA, 81 bp, Homo sapiens; identical to SEQ ID NO: 206313
  chrX:129156871-129156952
  hypo

SEQ ID NO: 247248 - DNA, 392 bp, Homo sapiens; identical to SEQ ID NO: 206314
  chrX:129158962-129159354
  hypo

SEQ ID NO: 247249 - DNA, 227 bp, Homo sapiens; identical to SEQ ID NO: 206315
  chrX:129162609-129162836
  hypo

SEQ ID NO: 247250 - DNA, 222 bp, Homo sapiens; identical to SEQ ID NO: 206316
  chrX:129168429-129168651
  hypo

SEQ ID NO: 247251 - DNA, 167 bp, Homo sapiens; identical to SEQ ID NO: 206317
  chrX:129171341-129171508
  hypo

SEQ ID NO: 247252 - DNA, 148 bp, Homo sapiens; identical to SEQ ID NO: 206318
  chrX:129173111-129173259
  hypo

SEQ ID NO: 247253 - DNA, 78 bp, Homo sapiens; identical to SEQ ID NO: 206319
  chrX:129184691-129184769
  hypo

SEQ ID NO: 247254 - DNA, 157 bp, Homo sapiens; identical to SEQ ID NO: 206320
  chrX:129185834-129185991
  hypo

SEQ ID NO: 247255 - DNA, 2230 bp, Homo sapiens; identical to SEQ ID NO: 206321
  chrX:129189828-129192058
  hypo

SEQ ID NO: 247256 - DNA, 156 bp, Homo sapiens; identical to SEQ ID NO: 206323
  chrX:133507341-133507497
  hypo

SEQ ID NO: 247257 - DNA, 184 bp, Homo sapiens; identical to SEQ ID NO: 206324
  chrX:133511601-133511785
  hypo

SEQ ID NO: 247258 - DNA, 102 bp, Homo sapiens; identical to SEQ ID NO: 206325
  chrX:133512034-133512136
  hypo

SEQ ID NO: 247259 - DNA, 134 bp, Homo sapiens; identical to SEQ ID NO: 206326
  chrX:133527530-133527664
  hypo

SEQ ID NO: 247260 - DNA, 44 bp, Homo sapiens; identical to SEQ ID NO: 206327
  chrX:133527938-133527982
  hypo

SEQ ID NO: 247261 - DNA, 479 bp, Homo sapiens; identical to SEQ ID NO: 206328
  chrX:133547517-133547996
  hypo

SEQ ID NO: 247262 - DNA, 277 bp, Homo sapiens; identical to SEQ ID NO: 206329
  chrX:133549045-133549322
  hypo

SEQ ID NO: 247263 - DNA, 134 bp, Homo sapiens; identical to SEQ ID NO: 206330
  chrX:133551198-133551332
  hypo

SEQ ID NO: 247264 - DNA, 130 bp, Homo sapiens; identical to SEQ ID NO: 206331
  chrX:133559230-133559360
  hypo

SEQ ID NO: 247265 - DNA, 3132 bp, Homo sapiens; identical to SEQ ID NO: 206332
  chrX:133559690-133562822
  hypo

SEQ ID NO: 247266 - DNA, 900 bp, Homo sapiens; identical to SEQ ID NO: 226522
  chrY:16636256-16637156
  hypo

SEQ ID NO: 247267 - DNA, 7860 bp, Homo sapiens; identical to SEQ ID NO: 58444
  HPV16:0-7860
  hypo

SEQ ID NO: 247268 - DNA, 7800 bp, Homo sapiens; identical to SEQ ID NO: 58445
  HPV18:0-7800
  hypo

SEQ ID NO: 247269 - DNA, 112 bp, Homo sapiens; identical to SEQ ID NO: 206354
  NW_001838402.2_289580-297926:6069-6181
  hypo

SEQ ID NO: 247270 - DNA, 33 bp, Homo sapiens
  chr1:809313-809346
  hypo
acggccgctacctaacggcggctgccattttcc

SEQ ID NO: 247271 - DNA, 35 bp, Homo sapiens
  chr1:834689-834724
  hypo
gagccaccgcgcccggctgggggcaccttctggcc

SEQ ID NO: 247272 - DNA, 42 bp, Homo sapiens
  chr1:851057-851099
  hypo
tgtctctgccccaccccacacgctcaatgcatgttaatttca

SEQ ID NO: 247273 - DNA, 405 bp, Homo sapiens
  chr1:864734-865139
  hypo
cggggcagggtttgcggaacaggggacctgggctggtgagggctcctcgtctggtgacctgtgagccccggggcctgcagtctgcgagggttcagctcagacagttgccagtggccttgcaccaggctgcagctgcccctgagccgggctgtgcgtggcgctgatgaaatagaaaagggcattcgcttgtcaacgttggcatcggtggcagggtgtggtgggcagaagggtcacaaagtacgggtgggattggcaggcagatacacggagggaacgtgcgcatttgagtgcacgtccaccagcaccagccccaggccacaggcagatcccaggagacacgcaggggccctaagaagggagctgggaatgaggggccacacaagcccgggacggaggcctgtcgca

SEQ ID NO: 247274 - DNA, 149 bp, Homo sapiens; identical to SEQ ID NO: 206356
  chr1:872320-872469
  hypo

SEQ ID NO: 247275 - DNA, 37 bp, Homo sapiens; identical to SEQ ID NO: 206357
  chr1:879361-879398
  hypo

SEQ ID NO: 247276 - DNA, 548 bp, Homo sapiens
  chr1:896870-897418
  hypo
gatccgtgcgcacaaagtggtgctggcctcctgcagcccctacttccacgccatgttcacaagcaagtacccgcctgggcggcgctgggggctccgtgggtccctcgggtcagctcgtgtaacccgctgtccccgcagatgagatgagcgagagccgccagacccacgtgacgctgcacgacatcgaccctcaggccttggaccagctggtgcagtttgcctacacggctgagattgtggtgggcgagggcaatgtgcaggtgagggctccctcacccggatcccggtgtcccccgaccctgtgcctccctcacctgcctctcggtgccccgtagactctgctcccagccgccagtctcctgcagctgaatggcgtccgagacgcttgctgcaagtttctactgagtcagctcgacccctccaactgcctgggtatccggggctttgccgatgcgcactcctgcagcgacctgctcaaggccgcccacaggtacgtgctgcagcacttcgtggacgtggccaagaccgaggagtttatgctgctgccc

SEQ ID NO: 247277 - DNA, 282 bp, Homo sapiens
  chr1:897734-898016
  hypo
gttctggaactggtctctagcgacagcctgaacgtgccttcagaggaggaggtctaccgagccgtcctgagctgggtgaaacacgacgtggacgcccgcaggcagcatgtcccacgggtgaggcgcggccgcggggggctcccacagcatccaggagggcatgcaggtggctgagggcctggtgcaccctgaccttccccgagttcagggactccgtgggggtggtgcccccacctgtctgaagaagaatccatcacacaggtggtacgggcatctgggggg

SEQ ID NO: 247278 - DNA, 642 bp, Homo sapiens
  chr1:898243-898885
  hypo
gccgcacacgtccccggcgctgcgagggggccgggcctgtgctttttgctgtgggtatggccccccgcccgtttccctcttgccctgtgccttctactccccaccagcacaagcccaccccacctgtgccggtcaggtcctgacctgcccctccgcccctccattcaggggcctctccaggagcctggggtgtggcccagcagtgggatccactcacgagtcccgtctccacctgccctccccaggcggcgggagcctgtttgccatccacggagactgtgaggcctacgacacgcgcaccgaccgctggcacgtggtggcctccatgtccacgcgccgggcccgggtgggagtggctgcggtggggaaccggctctatgctgtgggcgggtaagcctggaggctggacttgggtcgggtctggcacgtgcccgccaggccagtcttgacctgcagtggcttaattccgctagctatgatgggacctcagacctggctaccgtggagtcctacgaccccgtgactaacacgtggcagccggaggtgtccatgggcacaaggcgaagctgcctgggtgtggccgccttgcatggactcctgtactcggccggcggctatgacggggcctcctgcctgaacagg

SEQ ID NO: 247279 - DNA, 788 bp, Homo sapiens; identical to SEQ ID NO: 206362
  chr1:899137-899925
  hypo

SEQ ID NO: 247280 - DNA, 617 bp, Homo sapiens
  chr1:900230-900847
  hypo
gggagttctcccaacctcagcgagcatgtcccgccaccacccctttttgtggtgcagcccctccccccgcatcccttcctgcagccaggggctcaccccgccttccccccaggagcacgcatgacctggtggccatggacggatggttgtacgccgtggggggtaacgacggtagctccagcctcaactccatcgagaagtacaacccgaggaccaacaagtgggtggccgcatcctgcatgttcacccggcgcagcagtgtgggtgtggcggtgctggagctgctcaatttcccgccgccatcctccccgacgctgtccgtgtcctccaccagcctctgacccacctaccaccagaggcctgcagcctcccacatgccttaaggggaccgtggcccccaccagggacgtcctgcgccatccgttcacgtctctgcatccattccttcatgtctttatttagttgtttatttatttagttatttatcttatttattgaggggtgaggagtgccacggctgcccgtttacacctttagcgtctggtcctcctgcgtgtcctcccctccactgcctgcatggggggcgcggggagtgaccaggcgggggcctcaccgcc

SEQ ID NO: 247281 - DNA, 179 bp, Homo sapiens
  chr1:906924-907103
  hypo
gtcagtctggtctccgctgtgacatggaggagcccctgcccgccctgaggttctcaccctgaggttcttgaccgtcaccctggggcgggcagcatggggctgagagcccctcccggggactcccttgtgtgtgcctgcccgtgaggcgtgtgtgtgcacacgtgcgtgtgcgtgtgtcc

SEQ ID NO: 247282 - DNA, 1247 bp, Homo sapiens
  chr1:913466-914713
  hypo
ttcccccgcaaccccgggaaccacctgccccgcacacggccgccccgggaaccgcctgcctccccctccaaccccaggaaccgcctgccccaccctaaccctgcacactcttggcctgggaactgcctgccccgcacacgcccgccccgggaaccgcctgccccagatacatccatcatgggacatgtctgtcctaagatacatttgtgctggacacgtctaccctggacacgtcttcccgaaacccctctgtcatggacacgtcttcctgagaactggttgccccgggaaccgcctgccccgggaaccgcccgccctggacgcgtctgtcggagtcacatcgcccccgtgcttcttctgcctgagatttgggtgacctggttgagttgggccagtttgggggaactgccagtggaggccccgtgttctggtctgtaaagcatctcccagaggacatcagtgtgagatgggcctcgtagagtgcctgaccctgaaggtagccaggcctgggcgggaaccctgccagaggctgggggagggacgccgccgtcacatgggcccgaacacagggcaacggcggcgcagagccaaccccctgaacaacccgggtgcttggactgggccgccccatctggactgtgtgctgggatgactgggggctggtccccaggctcccctgctaggggatgacccaagcccggcctgcccggcccctgcggccccctgcttggccaagatccctggacagtgtgtgcctgggatctggacgggctgtgggatccgagagcacgtacctgcccgtctaagagccaggtggagccgctctaccacggctggcttgaggggggtcccaggccccgccccctcggaggccgaccggggaggctccagggcctgcagtgggagcgggacagccggccccagcacgccctcaagcctgtcctccccgaagaagaagtgttcatagacctcagggatggagatgggcacggggtctccaggtatgggggccggcacaggatcagctctcgggagcggctccggggacccccgccgcctcgacctctgggctccaacgtctgggaagaagaactcgcacatgtccggccactggacgcctgccggatcctgaccggccgctgccgcctcagcctcttcgttctcctcgatggtgtcacagaagaagaactcgtaggcctccgggagggtcacggcaaagctgctcccgggcccgaccctcgtcacgg

SEQ ID NO: 247283 - DNA, 1005 bp, Homo sapiens
  chr1:915023-916028
  hypo
ggtgggaggccaggcgaggccagcggcgtcggctctgggaacaggtgtagacacaagcccgctggactcggtcatcctcggcacagcctccgagacaggtggagatgaagccacctctagcttagccactgggcctgctgtaggcaaggccacatccaggccatgtttggaggcaggtgtggacacagccacgtccgtgtccaattgtggcttggagatgggtgtagacagagccacactggactgaggctcagaagctggtgtagacacagccgtgtcagattgcggcttggaggcaggtatagacacagccatgtccctgtcaggttgcggctcagaggcaggtgtagacacagccatgtccgtgtcaggttgcggctcagaggcaggtgtagacacagccatgtccctgtcagattgcggctcggaggcaggtgtagacacagccatgtccctgtcaggttgcggctcggaggcaggtgtagacacagccatgtctgacttagcccttgagacatctgggagggcttcccagacagtcgtggacactgtgtgcagcttggctcggcgcggggttctgatttggtctgtgccttgctctgtcacagggacaggtgtagacaggcccaaacctggccctggtctgtcttcctgcacaggggacctggggccaggctcaggagctcctgcaggacctggccccaactcctcctgcccggctttggccatcagctttgccgtctcaggactggccgcagggagcagcggggagcccgtctgggcagaagcagaggctcctgtgtgcccaccccccttggcacccacagctcgcctcttctttcggctggggctccgtggtggggctccagggctatcggggggcctctgggagccagtgctgtggccaggggacttgggactcccagggggctcaccagggggccgtggggcagggccctgcagaagcctctgcatctggtctccagaagacgccggaccagggca

SEQ ID NO: 247284 - DNA, 477 bp, Homo sapiens
  chr1:918153-918630
  hypo
gagagttcagggcacgatactaggagactggggtgtgcgccgtgaggggtggcagtgagagctgggcgtgcagaaagtgcatgcctggtgccatacgatgcttttccagaaagtagctgccacgagaccacaggacaaggcgtcccgccacgcagggccggcctgacttgagctttcacaagtggaatcgcaccctgcatccctttctgcatctgtgtcctcgggcccacgccgtgctctggagacagctgccatgagggccgcgggcgactgcccgggcgggtgaggctgtcctgtgtgaacgtgccacgcggctgtgccgtttcccgtgggtggcgatgtgggtcgtttccagtttgcagctaccacacacggtgcggctgtgaatatctgggaacattcctttcggcgaacctctcacatttccaggacgcttggggtcagcgtcagaaggtgccgccccgttccccaggtggc

SEQ ID NO: 247285 - DNA, 402 bp, Homo sapiens
  chr1:942308-942710
  hypo
gcctccctgagagtccagggcgccaagtcagccctgcacctggcccgggcctcggaccccgacggggctcacccacctgagatcaccctggctctgcgggaaggcaggaagctttggcatgatcctccacgggcgaggatcacgtagagacgtgtagagacgcgacgaagcacgaagacccgtgtttgacgggttgccaggtgcctacatcagagctcattaaattacacattaaatagatgcacgtgtgtgtgtcaagctcccctaattcaagttgtagaaaatcagactcagagttcttacactcgggggtgttttagcagctgcgcctcaagattctaaattcaaacgcacacggaataaaacatttcggtttatcgccaggcgcggcggctcacacct

SEQ ID NO: 247286 - DNA, 206 bp, Homo sapiens
  chr1:959107-959313
  hypo
acatggcaggagagtcaccccggctgaacgaggctctgcatcttaccgaagccgctctacgggtgccaggcactggctctggagcgagtgcccaggcggagcagagcgctgggaggagggtccgtggggagcccctgccaggtgggtgtggcttagcccagctgtgggcagtcgcactcagggacgagctccaggtggggagcctg

SEQ ID NO: 247287 - DNA, 221 bp, Homo sapiens
  chr1:980098-980319
  hypo
acgtccatccggtcgatgtatcacatcaattaggtaaaagtggtgcccggtgtgtgtgatgcgcgtgcacagatgtgtgtctgcagaggggcgttaactgtacggtttggaggaatgtgggtgagaacgcatgctgacgtcttcagatgtctgtttctcgatttgcaaggaagctcgcgtgtgtgtgtgcacagagctgcgtgtccgtgatctttggatgc

SEQ ID NO: 247288 - DNA, 191 bp, Homo sapiens; identical to SEQ ID NO: 206371
  chr1:982294-982485
  hypo

SEQ ID NO: 247289 - DNA, 993 bp, Homo sapiens
  chr1:984139-985132
  hypo
tccgtctcaaaaaaaaaaaaaaaaaaaaaagcagggggcggtttcagggataaaagtggggaatcctcggagcttttccagccggccctcccggtcgccctttgcagtgcttggcgcccctgtgccggccttcgagggccgctccttcctggccttccccactctccgcgcctaccacacgctgcgcctggcactggaattccgggcgctggagcctcaggggctgctgctgtacaatggcaacgcccggggcaaggacttcctggcattggcgctgctagatggccgcgtgcagctcaggtgggcggggaggggacggggccggggcagctcaggtgggcggggaggggacgggcgggggagggggggccggggcagctcaggtgggtggggtggggacgggggcggggcagctcaggtaggcggggtggggacggggccgggcgatggtcctgagcacctgctcctgccctcaggtttgacacaggttcggggccggcggtgctgaccagtgccgtgccggtagagccgggccagtggcaccgcctggagctgtcccggcactggcgccggggcaccctctcggtggatggtgagacccctgttctgggcgagagtcccagtggcaccgacggcctcaacctggacacagacctctttgtgggcggcgtacccgaggaccaggctgccgtgtgagtcccttggagggtggtgtggccccgaccccggccctttggggtcccggtgtacgaggtggctttgcctgtggcccctgagccctgacccggtgtccctcctggtggcagggcgctggagcggaccttcgtgggcgccggcctgagggggtgcatccgtttgctggacgtcaacaaccagcgcctggagcttggcattgggccgggggctgccacccgaggctctggcgtgggcgagtgcggggaccacccctgcctgcccaacccctgccatggcggggccccatgccagaacctg

SEQ ID NO: 247290 - DNA, 1209 bp, Homo sapiens
  chr1:987799-989008
  hypo
ggacatgtagatatgcgtgtgtgactatgcggccgtgtgtgtgcatggctccatgtatgtgtgtgtatatgagggagacatgcaggtatgtgtccgtgtgtgtgtgtgtgcatatgggtccatgtatgtgtgtgtatatgagggagacacgcaggtgtgtgtctgagtgtgtgcgcacatgggtccatgtatgtgtgtgtataggtgagggagacatgcatgtgtgtgtccgtgtgtgtgcatgggtccatgtgtgtatagtgtgtacacatgggtccatgtatgtgtgtgtatatgagggagacacgcaggtgtgtgtccgagtgtgtgtgcatgggtccatgtgtgtatagtgtgtgcacatgggtccatgtatgtgtgtgtatatgagggagacacgcaggtgtgtgtccgagtgtgtgtccatgggtccatgtatgtgtgtgtatatgtgggggagacaggtgtgtgtccgagtgtgtgcatgggtccgtgtatatgcgtgtatatatggggggatatgtagatgtgtgtgtgtatgaacaggtgtaagtggggagcactcaggtgtgtctgtgtgtgttcgtgtacacgtgtgtatgtgtgtgaacatggaggggtgtgtgtgtccgtgtgtaggtttgcgtgcatgcacacatgcatgtgtgtactggggcatccaagcccctggtctccactccataccaccctacgcctacctccttgatctctgcgcccagccttggctgtgctcccctgctgtctgcacgtgggtgtctgcacgtgggtgtctgcatgtgggtgtctgtgccctcaagtgtctcgtgtctgcacgtgggtgtctgcaccctcacgtgtctcgtgtccgcacaagcatgtgtaggtgtccctgctgggctctttggtgggcggccagtgatcctcgaggtcacgcatgtcttctgtgggtgcctgctccttgcaccccacagtgttgagatgggtttgcattggccccgcctgtcccctgctcacccgcctccctctcttcctgcttctaagccccgaaactctggattccggggcccttcacaggtgagcacgtggcagcagtgcctgcagacccctggctggcccatctgtcctcccgcccgtctctctgatctctctctgccaggctgcccctgtctccatccctcttctccctcccactgtcggtgtctgcccacc

SEQ ID NO: 247291 - DNA, 197 bp, Homo sapiens
  chr1:989210-989407
  hypo
caaggccacggagcgggcagactatgtggcactggccattgtggacgggcacctgcaactgagctacaacctgggctcccagcccgtggtgctgcgttccaccgtgcccgtcaacaccaaccgctggttgcgggtcgtggcacataggtgagtagggaacccagcgtgccgagaatagtggcgagggctgcccagac

SEQ ID NO: 247292 - DNA, 207 bp, Homo sapiens
  chr1:990294-990501
  hypo
gcacccgctgcacctgctggaggacgccgtcaccaagccagagctgcggccctgccccaccccatgagctggcaccagagccccgcgcccgctgtaattattttctatttttgtaaacttgttgctttttgatatgattttcttgcctgagtgttggccggagggactgctggcccggcctcccttccgtccaggcagccgtgctgc

SEQ ID NO: 247293 - DNA, 436 bp, Homo sapiens; identical to SEQ ID NO: 206375
  chr1:990531-990967
  hypo

SEQ ID NO: 247294 - DNA, 46 bp, Homo sapiens
  chr1:990997-991043
  hypo
ctgccacaccccaggccctgcgaggggctatcgagaggagctcact

SEQ ID NO: 247295 - DNA, 254 bp, Homo sapiens
  chr1:1018240-1018494
  hypo
gccaagtgcgtggcgtggtctcggcctccaggtcagacattgctgatacgggcctcccccgggaaggcagcgggatccgtggccctgtccaggggccgctcccgcctgacgtagcgcggcttccgtactgaaacgggtcagagacaggcgaggtcagagtgggacctggacagcagggacagtgcaggcctcagccctcaccggaggctctcgggagtgggcatatggcacaggcgcccggggctgtttactct

SEQ ID NO: 247296 - DNA, 127 bp, Homo sapiens; identical to SEQ ID NO: 206377
  chr1:1019320-1019447
  hypo

SEQ ID NO: 247297 - DNA, 92 bp, Homo sapiens
  chr1:1022918-1023010
  hypo
tccgttcccacagcggacgcagctggcgctcccgtccgcgttccagcgcctgtaacagcctgcgtggggcagaggacgggcatgtcagccaa

SEQ ID NO: 247298 - DNA, 413 bp, Homo sapiens
  chr1:1024247-1024660
  hypo
tggaagaatggaagtccacccgctcagtcctaccagggtggagctgcgctctcccagcactgggggcagcctctgtctcccggcatctcctggcacagggctcgggcgacttcagcgaggctctgtctgagagtctctgccccggaggccgaagaacggagtccacggcagggagccaaacaccagcgcagcactgtccccagaagtgcccgctgcctccccgagcggagacgtgacctggcttggggccgcacgcagggggaagcgtatccaacaccgcaggcccggcccctccccacgcgcgccagacggtccccaccctgcgcctgtgcatggggccacctcggcccttggacttcacgacccgctggcctggcccctccatgggcaccgtgactgctgcacagctgcct

SEQ ID NO: 247299 - DNA, 327 bp, Homo sapiens
  chr1:1046072-1046399
  hypo
cgcccgccaaacacgtgcacaaaaataggcccaactcttcagacagcggaaacccacccgggcgccctcagagacgacgagcacgcaacagcgcatcccacacccactccttgtgcagcacctcagaggaagctcaacaacagttctctgcgtgagccgtggcagacgcaaaaccgcccgcacgtgtgactcctaacactcagagtgtcggtaaaatcacagcagcgctcctgtctggcgcggcaggcgggcgctggagcagcctgcgaggcaatctccatggatcacaggcagattctacatcacgacaggagtctggtgaatcct

SEQ ID NO: 247300 - DNA, 1290 bp, Homo sapiens
  chr1:1046997-1048287
  hypo
aaccctgtaaaagcaaccaccggctggggcagtgggtagaccacacccacgctcaccgtaactccagccgcccaggcagcagtaactgaaaaggggaggcgggagggtccactggcgggtttctcacgctgctgaacctcggtaaacacagccccgagggctggctggagcttccactgcatccgtgtagctaatgctggtcatcttcgtagcaagcaaaggaagccaacgtgaaacgtagctttaagggcccaataagaactgtctggggcctctctacctaaagatccctctcgtgctttgatagaaaacaaataccgcaaaccccttgatggggtgtaaaggagacatccccctttgttgacatgcatggtagtcgctgcccacctacccgtgggctcagcacaccggagtcgggcggttgccgtaggtggctcagcagacgtgagcagggcaggatcgggcccatccccccaccgggaatgtcaggccaccatcaggtgatggtcaggtggctgttaactgtctaaaagaactggttgcacccagcgccagggaaagacaggctcccaatagctagaaaacacatgaaatccggtgatgggcagcttcccgatacgatctcaggaactgggcgagttggctcaagcgtgtgcactgagaggcaaaatggcggcgtgtaaccgttctatgaccttctagggacgtttgacaggtaacggaagaacgcctcaggtgagcatgggcactactccagtgaacacacggcgcacggtccctccctccagtgaacacaacgcacacgctccctccctccagtgaacacacagcgcatgctccctccttccagtgaacacacggcacatgctacctccctccagtgaacacacggcacatgctccctccctccagtgaacacaacgcgcacgctccctccctccagtgaacacacagcgcatgctccctccccccagtgaatacacggggcatgctccctccctccagtgaacacaccgggcatgctccctccctccagggaacacatggcgcatgctcccgcccaagtactagcaagatgctgcatgggtggacagcccaccctgaagaaggatcaggggagaaggggtgcaagaccccagaagcctgccaggctataaaaccccaagtcaaaaggtgaaaccgcacacctgatctctcacatcgcccgtctggccctcctccaagggtacttcctttccttcctgctctaaagcttcttcaacaactttcactcctgctctaaaacttgcc

SEQ ID NO: 247301 - DNA, 349 bp, Homo sapiens
  chr1:1049843-1050192
  hypo
aagctcaggtggagagcagccgcaaggcagggagcagctgggaggtatctcaggggttcccgggatgctgcctgtgcaccccagggctgaggtgactgcgtgtggaaacacctgcctgactggcttttaggaggagtactgggggcgggatgtgtgtcaggaaaacaacgtttctgtataattcataaacatgtatgttaaaaacaacgtggccatgacggatcctggctgaatgcaaacggggaacataaacctgagtaatcaggcgcatcactgaacatcccaggcggccgcccctaccctggggctcaaaaccggctccctctgcgagggtttcccaggttaagcc

SEQ ID NO: 247302 - DNA, 670 bp, Homo sapiens
  chr1:1062954-1063624
  hypo
gacagagtggggctgagcagcggccacgggaagccaccggccacccagacccccgtcctccccgggtgctgccctgggcctaggtggccaggtctggggggccgataccacgggctacgcccagccccacccggctcctgtgtggtgtcaggggctctggcatgccggcaggccagtgctctcgtgagaggtgggtccccaagccggccccagcgaaactcagttaaaggacgagtctgcttttgggccttatgtttcccaactccatgggcagagccacagggccgctgcctcctccaccgtggctggagacaaggcggccccgggtctctgtgaagccctggccacgttcagccgcagggccctgggtgtcatcgccaccgccccactgtggcccaggactggggctttggtggcccgtgctgtgggagtgggggcagccagcagccagggtcacaggcctgagcctcggacaagcacagaaggacccccaggtctggtgctcgtgctgactgccaagggcagcgactgcaagacgggggtgcaggtttcgggcgtggcgcgggctgcgtcgggttctggcattcaaacatatcatgcgggaccaggcctggggttacaggtggggcgggcgcgcaggagaggggagccgtcccggagccgctctgca

SEQ ID NO: 247303 - DNA, 266 bp, Homo sapiens; identical to SEQ ID NO: 206381
  chr1:1064886-1065152
  hypo

SEQ ID NO: 247304 - DNA, 587 bp, Homo sapiens
  chr1:1065879-1066466
  hypo
ggtgccaggtccaccgtggccgcctgttctcacccgaactctgagctgtttccctgaagttaataatcgcctttgcttttcttcttgcttagctttctctgaactcattactaattcagcctcagactctcccccatgacttaaattccggcacgccaggtatttctgaggggcctccgggagcctcctgccctgcccggggctggtcggctccctcgggcctggggcagggctggcgtcttgcaggcttcgtggtccgtgtcacaaaggtcccattgcttctcccctgggtgggattttcccgggccccacacctcccctttcttgtcttctcagtgttttggtggaacaagcccctcgcagctccccgtgaggtgcagggggtgggcccccaccacgcccacagctgcagctgcctgtgaagggcacagggcgggcccccaccaaggccttcgcttccctgcgagttgagaaaacctcgccgcagggtccccggctcccgaggctgctgtgggtccggcaatggcatcccaaccccggggccttggtatggaacctgtttctgcgggttttttcctgaaagtttt

SEQ ID NO: 247305 - DNA, 99 bp, Homo sapiens
  chr1:1066721-1066820
  hypo
ccattttctttgccttttcacgtcacgttcggggaacgtcctggctccgtcccttccagcgcttttcgtttctgtcctcggagtcattctttttaagac

SEQ ID NO: 247306 - DNA, 128 bp, Homo sapiens
  chr1:1067697-1067825
  hypo
cctgccaggagggcctcttccgaggtggggtgtcacctgggatgtgtccgctggcaaatgggagaaacaccagggcggctgccggggaggtcgatgtcagggagcccgtagccctgagcccatgtgtg

SEQ ID NO: 247307 - DNA, 316 bp, Homo sapiens; identical to SEQ ID NO: 206382
  chr1:1069739-1070055
  hypo

SEQ ID NO: 247308 - DNA, 57 bp, Homo sapiens; identical to SEQ ID NO: 206383
  chr1:1079129-1079186
  hypo

SEQ ID NO: 247309 - DNA, 149 bp, Homo sapiens
  chr1:1080476-1080625
  hypo
caccccacagccccccgctcctcccctccacacccaaccacagtccctcctggctgacaccgtggcccctcctggcctgtgctccccgggaacctcagtcagtgtcacttgaactccagcaccggacctggccccgtccatccagcctc

SEQ ID NO: 247310 - DNA, 171 bp, Homo sapiens
  chr1:1084062-1084233
  hypo
ccttcctagggccacgaggacctgagccccgcgtgcgacgtcctggcccggaacctgcgagggcgtcggggaatggcccaggcacgtcccgggctgatggagatgaaagaaaataatggctcatcatgtgacccgggtcctgcctacaaatggggacgaggtgtgggaagg

SEQ ID NO: 247311 - DNA, 113 bp, Homo sapiens
  chr1:1091616-1091729
  hypo
tcccagcctccagacgccttgtccccatctccatccaccccctccatttccccggcaccagcaccccagcccgctggttcccaggaatgcctgtgctccggtggctgagtggg

SEQ ID NO: 247312 - DNA, 153 bp, Homo sapiens
  chr1:1094263-1094416
  hypo
gcctcagaactggccatccacggagctcagaggcacccgagggccctggggcctgggtagggactggccagctcggggtcctccagcagccatacccaggttcatccaggatgaaagcagggcagtgggaaccacgtgattggtttaaaagca

SEQ ID NO: 247313 - DNA, 503 bp, Homo sapiens
  chr1:1094749-1095252
  hypo
tgctgccaagctcccgcttctccgagcagctccacacaaggagcagaggcagctccagttccacagccagacacagtcattttccctctactcaggaattaggcaggatggtgtggggcctgagtgtcaccatgaagccgggaagcaggtgttcagccagacgcaaatattcctcctcaaagccaggggagcggccacagtggattttattatggggcgacgggggcacgcccagtgccccgccactctccatgtccacagcagcgagggtggagggccctgtgctgtgcagggcagagctcggctgcacctgggccaggacacagctgcccaggtgggaggaaccgtggacggggctggggccttcctcgtcccagggctggtgagctgctcgctcactgtttctcagttccaggtagacacagtttataattctgcagaaaactctggggccttttgcctttgtgttttcttttttgagacagggtctgactctgtggccc

SEQ ID NO: 247314 - DNA, 563 bp, Homo sapiens
  chr1:1095492-1096055
  hypo
tggtgttttaccactgaggtcagagggcagacgttgctccaagcgtttcgtctgcgggtggagctttggaactgatggagaaggcagagtcctgaccaggggccgccatcagagcgcagggacggtcgggggggatgcgcagggaggagggaagggaaggaaggaggtgccaagccctccgctcagtggaggtcagtggaggtttgcttcctgctcacactgggcctgattgggtcggagggcacgcgggggccgctgtctgtcctccgtggggccttggcttgtgtccaagggagggagacagtagagggacccacggctctgtgaggcgttccctggcatgacctcacctgtgtgctctctctccctgtctcagtcagagctgaacccaggctcctgtggaccaagagggggtccaggaagaactgctcctgggacccggacagagcggaggccgtgtgcacgagcagcgtggaccagaggggcctcgggggccacctgctccgtccgaccaggcaccagtccttccagactcgcctgaggatgcccgtgggccccagcga

SEQ ID NO: 247315 - DNA, 503 bp, Homo sapiens
  chr1:1096415-1096918
  hypo
cgaagcccccagaccgggccctttgcccctcctgccccccggctctccctactgcccagagcctccgccagcacccagggacccacgtccacctcccagagcggccctgcccagggtccttccctgccctccacgattctccgtggcccttggagaaagagcagcttctccccaggctctgcccccagcccttccaccccagagcctctgcccagacgtcccgtcccatcccggggggctgtcacgcttccgccccacctctcgcccattcccggacagtcacagccgtggaacaacgcagcgtgtggacacagccccagggaagcttgactctgcctggtccccatggcgtgcggtggctcaccagccgcccccatcgctccatgaaatctgactacacctgtcccaaaaatcaaccagctcccaggcaggtcccgccgtgcagggggccaagggccacacctgggaccagtgagtgaggcggcgtgcgggtagtgggggtg

SEQ ID NO: 247316 - DNA, 260 bp, Homo sapiens
  chr1:1102201-1102461
  hypo
gaggggtgggggcagagggccgagcggggcgggcagagggcccgtgtcagccccactccgacctagtcctcggccgtctggccaggacacttcggccccccaggtgcccaccccaggacccaaagctggtggctgctggactcggcagggctggcgggtggggctcacccgggcccctgccctccggcgatgctgtcctcagtgccccaggaggacgaggccccccagctactgagcttcccagcgagtcccatgcaacc

SEQ ID NO: 247317 - DNA, 240 bp, Homo sapiens
  chr1:1111233-1111473
  hypo
ggagaggctgctgccgtgcaggtggagagaggctgccgctgtgccggtggagaggctgctgctcccagccgctgtgcaggtggagagaggctgacgctgtgcaggtggaaagaggctgacgctgtgcaggtggagaggctgctgctcccagccactgtgcaggtggagagaggctgacgctgtgcaggtggagaggctgacgctgtgcaggtggagagaggctgccgctgtgcaggtgga

SEQ ID NO: 247318 - DNA, 85 bp, Homo sapiens
  chr1:1114509-1114594
  hypo
tggggcctcgggccgcgcggaggtcccacaggagggtcagagcggcatcttcccttcagggccctcgcccgggcaccccccggcc

SEQ ID NO: 247319 - DNA, 232 bp, Homo sapiens
  chr1:1120556-1120788
  hypo
gcaccaggcacacagatgtccgtggcgtgcgtgggcggctgcgctgaagtgtgacctgaccgtgtggaaccaaacccttccagcgtctctgctcacttagctggcagtgcctgtccccagcagccagcaaaggcccggacggaaagcccagtcgggggtctgtcggcacgagtcccgcgggcagcctcgccgtagggtcaggggacagctcggcttcagtgacagccaccat

SEQ ID NO: 247320 - DNA, 38 bp, Homo sapiens
  chr1:1140775-1140813
  hypo
ggacaagggtggtgccggcaggtcgtgcagcaagggtc

SEQ ID NO: 247321 - DNA, 300 bp, Homo sapiens
  chr1:1145591-1145891
  hypo
agggacacagatgtcgcttagacgcccggggtgtcttccctgcgggaagcctgcagggctgctcccgccttgttcccgagctgtggcctcgggcgtgactggcgctcgggagcaggctctgtgctgctcgaaggataccccactcccagacaccagcttgagaagattcccgcacggccggggacggccccagggccttgggagcgtctgtggacacctgtggtgtgggccgaggagctgggagctcatctgaacacgccagcactcgcgcatccacgctgctggcggatgcctgggttt

SEQ ID NO: 247322 - DNA, 155 bp, Homo sapiens
  chr1:1146763-1146918
  hypo
tatgcatggcatacgtaagcagagagccggaggcagccatcggcacctagaacggtgcagagttggcccaggagcgtggcggggcaggcggcctgcacctgccctgctcgcccagcagaccctccgggctccagcctggcggggcccagcgtcca

SEQ ID NO: 247323 - DNA, 261 bp, Homo sapiens; identical to SEQ ID NO: 206387
  chr1:1151687-1151948
  hypo

SEQ ID NO: 247324 - DNA, 376 bp, Homo sapiens
  chr1:1152900-1153276
  hypo
ctcgtgcacgctgcgcgcgtagtccaccagcttgctgcccgtgaagaactcgctgtacttgagcacctcctcgggctccaggtggtggttctggttctcgtcggcgacggcgatcatctgcttggcctcgttcagcgcgttgtactcgttcatggggtccatgtagctctgcgggcgagcggggcacaggtcagcgtcgcctttccccctccgagctccgcggccagccgcacgaagtggctatttaaggtgcctattggctgcagcgggagtgtgggcacgttctggaaggttcccgaagggaggcggcacaaatgaaaacacagggcagggagaagccgggggccccggaaggcctgcccggggccagcagggg

SEQ ID NO: 247325 - DNA, 68 bp, Homo sapiens
  chr1:1153575-1153643
  hypo
tgtgagaaccctgacgcctccgcaaggggctgaggatggagcccggccaggctcgcctgtctctgatc

SEQ ID NO: 247326 - DNA, 254 bp, Homo sapiens
  chr1:1154786-1155040
  hypo
accccccacacccgcgcctgcccctctggaggagcggaatcaccctgaaggctgacgtgcgcacggcgccgcggggcgaaggactcactgcccttttccgtttccttcacgtgtgacgtcacagggaggaaaacacagtttctagaaatgactgagactggggctgagcagagcttcccaggaaccctcccagccgggacacggcactgcctctgggtgtgtggcccccgctctcctgccgtgcccacccggcc

SEQ ID NO: 247327 - DNA, 578 bp, Homo sapiens
  chr1:1160633-1161211
  hypo
aggtcttgagaccccggctggtgcgtttgccggaggcatccccgagagtagggtgccctggccccttgcctctatgctccgctcaggggcagccgcggccacgttatgaggtggcaagcaggccctcgtcaggcaggtgtggcctctgggacctgggccaggcaagcttcgagggtgcacacaccgcaggcacggctcagaagcactgggcagagatcctcatggaagaaggccaggctgccgctcacacgcgcccctccctcagcagccgcagcagcccagaggtggacgggcctgggaggcaccctcagctccacagtccccaaaacacaccggctggggacggggccacccgggtggccatgtggcaggtggggcacctggtgggtctcacgtggacacgtgcatcctcgaatgctccggtcacgctccacacgcgccacagacacaggccacacgctccacacgccacagacacgggccacacactccacatgccacagacacgggccacacactccacacgctctacacactccacagacacagacacacacgaggcagagcaaaaagcaaaa

SEQ ID NO: 247328 - DNA, 1179 bp, Homo sapiens
  chr1:1168269-1169448
  hypo
actctgcgactactacctgccctacgcgctgggcggcggctacgtgctctcggccgacctggtgcactacctgcgcctcagccgcgactacctgcgcgcctggcacagcgaggacgtgtctctgggcgcctggctggcgccggtggacgtccagcgggagcacgacccgcgcttcgacaccgaataccggtcccgcggctgcagcaaccagtacctggtgacgcacaagcagagcctggaggacatgctggagaagcacgcgacgctggcgcgcgagggccgcctgtgcaagcgcgaggtgcagctgcgcctgtcctacgtgtacgactggtccgcgccgccctcgcagtgctgccagagaagggagggcatcccctgagccgccgcggcccggccctccgggacacctgcttcacccggcggcgccttggggcaggtgccgagcgggcgcactacgcccgggccccaaggcccccgtcccgcagccacgcttgtggtcgctgcgtcccggtctgcgtttgggagacccctgggggttgccggggcagcgcgccgtgtccaggtggaggtgcccgttcctggacctcagcgagcctgagccgggcccggccgcacgctgacccccgtgctgtccccgaccggctcacggggctgggctccgatcttccgtgtctcttatcagtggcgtttctcacgtctgcgtctcagatctaacgtggtttcacatcaatccgctttcatgggattttggtctctgtccagtgacttcgtggtaaatgtaactcagtgtttgcttgcgacttatttataaatattgtaagtttgtgtcgatgagtgtaagttggcagtgcgcacgtctcggtttttttacatgatttaaggaaagacttttatgtcagaacttggtgcctgtaccgtcaaccccgctgctgcccgtgtttaaacgcaggagaactttaaaactggccatctatcttttcagtgtacaagtcactgaacccattgtttctttctgaagagactttcctttcaaggcttcccatgggtccgcgccacacagggccggtgctgctttatttcagactctgccccaggttccaggaatccgaaccccggagtgctgacgcggttccccaacttccgccttaagaaaacaggaccagccggcaccaggcccgt

SEQ ID NO: 247329 - DNA, 866 bp, Homo sapiens
  chr1:1190081-1190947
  hypo
gccgtcactggccccgctaagcctcatcaccacacggccaggccagaccagcacccgcggacgccagctccacccctgggccccgaggttcccacccgctgaggagccgggagctccgagaaacgcgccaggagctccaagaacgcaggagcagcccgcggtcggcagcaagtttgcatttctaagtgaccacatctaataaaatgaaaaacgggtttactaaaacaggtccaaagacaacacggaagataagctacaaatccagcacacaaggcccacccacaccagccccagcggcccgtggccaggacagggctgaggctccagtctcctccaaagcccagtcacacattttggtttttgcttcccctttcaggtttttaaaagctaaacctaggagcctggtgggtctgcctgtgctgggcagtgtgtccagcctgccgaggtcacgctctggtgcgcggtgccctcagtggcgccttgggtctcggcgcctgggcctcactcctgcgcgatgctcctcagcacgtacttgaccgtgtaagcaaaggctgcaaacccaactatcacaaacaagttcgccagggcgccacccaggagtccgtggtgccggttggcctgctggagccctgcgaggtttgggacggcccccggcgcatgcccgttgagcagctgaatcccgttctggacgaggtgcgtctccccgtctggaaccacgtctggcaaggggagagtctggggtctgctactgagttcgtcttgtgctttctgtttttgtttaatctcctaagagaaaaacagcgagaaaagcagctggtctccaaccagcgcctttcaggaccagcactcccgttctcaggagtcca

SEQ ID NO: 247330 - DNA, 402 bp, Homo sapiens
  chr1:1194376-1194778
  hypo
gcatgccatcaggacgcgtgtgtgcgtgtctgagtgtgtgcatgccatcaggacgcacgtgtgtgcatgtgtgtgtgcatgccatcaggacgcacgtgtgtgcatgtgtgtgcatgccatcaggacgcacgtgtgtgcatgccatcaggacgcgtgtgtgcgtgtctgagtgtgtgcatgccatcaggacgcacttgtgtgcatgtgtgtgtgtatgccatcaggacgcatgtatgtgcgtgtctgcatgccatcaggacacgtgtgtgtgcatgtgtatgtgcatgccatcaggacgcgtgtgcacgtgcgtgccatcaggacgcatgggcgtgggcatgtgtgtgcgtgccatcaggacacgtgcatgcgtgtgtatgcgtgtgcatgccatcaggtttg

SEQ ID NO: 247331 - DNA, 209 bp, Homo sapiens
  chr1:1200459-1200668
  hypo
ctgtgcccaacctgcgaaaactgggaagaaatgaagaagtcatcctcttcctgagacagagcccagcagccttggggcggctgagagaagatgggatccacgtggcccatagcgcaccccacaggccttttctgggaaagcagtcttctctcggggaagggagagacacctgccgaggacctgccaggggctctcgcactgacgctgct

SEQ ID NO: 247332 - DNA, 58 bp, Homo sapiens
  chr1:1206788-1206846
  hypo
ctaagtggccaggccgcaggtttaacgaaagttcatggacagccgcgcaaaaataaaa

SEQ ID NO: 247333 - DNA, 67 bp, Homo sapiens; identical to SEQ ID NO: 206393
  chr1:1221510-1221577
  hypo

SEQ ID NO: 247334 - DNA, 31 bp, Homo sapiens; identical to SEQ ID NO: 206394
  chr1:1221607-1221638
  hypo

SEQ ID NO: 247335 - DNA, 751 bp, Homo sapiens
  chr1:1228254-1229005
  hypo
agtggcaaagtggctttatgcgcaggctctgggccgagtaccaggagaaggtgcctccggaggaggccgggatgcggctggggctgtctggcacggggaccttcgtggccagccacgtggccttgggacgcccgcgtccagccagggctgaggacccaggccagagcccctcccgcccagcacccgcgacgccagcctggatgctggggtcactaagtgaggtactcgttggttccctggatgggccaccctttctgccctgggaggaggctctggggtgtgcaggagggagccagctaacaggtcagtgttctgggcagaagtggggcacgaagtaacacaggccctgaggacacagggacacaggtgacacgggccttaaaagtggcttgtgacatgagcaacccaggcccctgaaaaggggtgacctgaagacagaggttccccaggtggggtgagggacacccgacgatgcagcacccccccagggaaacgtgaggcttcaagagactcagtgtggggccctcgctctcctcctgggcgagcagggccgcggcgccccagcactggggctgccaggtatcgacccgcgggtcacacgcagggccgcggccgggtgggcgccagggacttcggggcatgcggggcgtcgggccgggcggggtggcagctgcccggcctgcccggccctagctctcttccaggtggaggctgatgaactcctggatacacctgcggaactggagctccg

SEQ ID NO: 247336 - DNA, 503 bp, Homo sapiens
  chr1:1234770-1235273
  hypo
aagccagtgagtgacggctgccaactcctggtgactggtggacccgtccccaactcctggtgactggtggacccgtccccaactcctggggggctctcccctatcccaaaatagccactcctgcctgcagccaacctctgcccgggatggtggccggggctgctgtcccacaggcaagcaaaggccccgcaaggagccagtgactgaggccacagaggtgaccaccgcctcaaaaggagatcccagcagcggccccacccacacgtgcccctccactgcacacatcaaagggagcagccttggtcccctagagagggtgtgggcagggcaggtgggagacaggcaggaggaaggggcggggagggtgtgccgggcatggggtgaggacgcaggggcctcccaggcgcctggtgtgcagggagccggctgcgcggcctcacccgctgctggatggcggcgtgctttcgctccatctcacgcttttccaccgcagagtcgatcac

SEQ ID NO: 247337 - DNA, 325 bp, Homo sapiens
  chr1:1235846-1236171
  hypo
ctacagctggtccccgccccccagcccatttctggggctgacctggagcacatagtccagtgccaggtggcggaagcacttcctggtgagggtgagggccccggtggcttcctccacctcgtggggccggtgcctcggggcctgggcgttcctcaccagggacagctccaggtcctcccgcaccttgtcaaactgcttctttgtctccttgaacttccgcacatccctggaggccaagtgccaggtggggtgagagatcagggagggcacctgctggatcctggagtctcccacatcgttgtttgtgtgttttttgttttttgag

SEQ ID NO: 247338 - DNA, 477 bp, Homo sapiens
  chr1:1238231-1238708
  hypo
ttcaggtgagccagcgcagctcggttccaggccaggcacagcccacaggtggcagggaggccgcgctcaccatgtggtagttcaccacctcctgtaggctgtcagcgaacctctgcagacattcctggaggagcagatgggaacccgtgctgagatggcaaatccgggcccaggtcacccagccacgccctctgagcccctgggcggtgcagacaccggcctgcttctggcctggacgccctcaaggggctgcctccctcggcctctcccccaaccccaccttgaggtcagaggtcagtcggcccctcaccgagatgacggtgtcgccctggcactgctgggacaggtcgcggacgccgctcacgaaaagcctgctggtgctgacgtaggccttaccggcttccaccatgccactgcacagcttcaccagctgtgggccagcggggcgtggtgagcacagtgggcactggcgcctgc

SEQ ID NO: 247339 - DNA, 752 bp, Homo sapiens
  chr1:1239013-1239765
  hypo
ggggctcatggacacggctcccctctccacggcctgttgccccctctttctcagcccatgtggggctcatggacacggctcccccctccacggcctgttgccccctcccctttctcagccccagccccagccacaccaaggctcagcccacacagcagctgtccccgtgtcaccagcccagcagaggggacgggcagccaccgtgggtcggggactcaccacagcccagcccctcccagatgggacgagactcagggccagccacatgtgtgcatgtgacatgtgcaccctggaacacacatgctaagacacagggaccaggacctggagcaccacacgcatgctccacatatggggggtgtaagtggcttagtaaggcctggagggcgagtctggccatgtggccatcccaagcttggccgggcacagggcgctccaggcccgcccttcaccttgtccagtttggcctcaatctccaccacgtccgtctccacctcgtcaatggtcgccctaaagcaagaacggggctggctggggtcacctgcagcctcagccccctcggggcttcacctccccccgcacctccctgaggggctccaccatgggaaggggctttcaggaaacaggctgggagacagacgcctgcctgctacgggggcaggactgggaccaggttcagtgcacttccccccgcccccccaaccccaggcaggcagaggcagccgctgctgtgccctcggggaagaaggctg

SEQ ID NO: 247340 - DNA, 292 bp, Homo sapiens
  chr1:1246137-1246429
  hypo
ctctgggtcgtgggcggctctgggtcacaggtacggaggatgacggctgtgctggtgggtcacgggcggctctgggtcacaggtacggaggatgacggctgtgctggtgggtcacgggcggctctgggtcacaggtggctctgggtcacaggtacggaggatgacggctgtgctggtggccgtggggctgggggctttggcacctgcccaggtgaagacgattctggagagccaagatcccctgggcaagcaccagacacgtgtagccccagcccacggcttattcctcaag

SEQ ID NO: 247341 - DNA, 642 bp, Homo sapiens
  chr1:1247720-1248362
  hypo
cttgctctgaggacaccagccggaagttctgtggggcagggacaggtcagtgagcgcagcagcggccctcccccctccagagaccgtcctggcactcacgctgtccttcatgatcagggtgccgtgcaggagccgaggcttcttggcctcagggagcagccctgcggaggaggtggcaggagccatcaatgtgagggccgctcccagccgcctgccccgagcaccctgccctgccctgcccagcccgcataccctgcgccatctcccgcttcagcagccccagcgagatgcctacggggatgctggggcttgtgggcagcgtcaccgtctcgccattggccggcatgtagcagttgacccctggaccccgggggaagagagagcctcagcccaggctgcccgtgctgacccgaggtgggccccacgccgcccgcccggctgcctacggagctcctgctcgatcttctgcttcaggaactccatcttcttggcctcgccatgcaccagcagcacgctctccggctctgcctggcccaccagctgcatgatgcccttggcgtccgcgtgtgcgctgaatgacatgtactccacctgcatcttgacctccagctacagaggccacggggcgtggacagtggttac

SEQ ID NO: 247342 - DNA, 136 bp, Homo sapiens
  chr1:1253110-1253246
  hypo
gcccatgcccagagacagaacgttgtttgcaaagtgcagagacaaaatactgtcaacctaaaatcttacacacctaagggaaaaaaagtcctttaagaacgaggataaagtaaatccatttgcaggcaaataaatt

SEQ ID NO: 247343 - DNA, 33 bp, Homo sapiens
  chr1:1258113-1258146
  hypo
gggtagggggaccggcggcggggggggtagcca

SEQ ID NO: 247344 - DNA, 236 bp, Homo sapiens
  chr1:1264863-1265099
  hypo
tgcttgtgccgtttgcgtgtcccaagtgcgagtgtgctatttgcgtgtgccgcacgtgtgccgtttgcatgtgctgtttgcatgtaccatgtgcatgtgtgccatctgtgcaatgtgcaggtgccagttgcatgtgccatgcgtgttggccgtgagcgtgtgctgttttcgtgtatgtgccatgcacgtatgtgctgcgtgttggccgtgcacgtgtgccacgtgcatgtgtgcca

SEQ ID NO: 247345 - DNA, 148 bp, Homo sapiens
  chr1:1265340-1265488
  hypo
tgtgtgccatgcgcgtgtgccatgcacttgccgtgcgtgtgccatttgtgtgtaccatgcgcatgtgccattcgtgtgcaccgtacacgtgtgccatttgcatgtatgctgtgcacgtgtggcatgcatgtgtgccgtttgcatgcca

SEQ ID NO: 247346 - DNA, 31 bp, Homo sapiens
  chr1:1265518-1265549
  hypo
tcccatgcacgtgtgccgtgcatgtgccatt

SEQ ID NO: 247347 - DNA, 1321 bp, Homo sapiens
  chr1:1266864-1268185
  hypo
aggaggctggcctccgcagccggacacggcccagcagccctgtgtgcaccaggtacagaggtgggacggcctgggtcggggtcagggtgaccaggtctggggtgctcctgagctggggccgaggtggccatctgcggttctgtgtggccccaggttctcctcaaacggcctgctctgggcactggccatgaaaatggccgtggaggagatcaacaacaagtcggatctgctgcccgggctgcgcctgggctacgacctctttgatacgtgctcggagcctgtggtggccatgaagcccagcctcatgttcctggccaaggcaggcagccgcgacatcgccgcctactgcaactacacgcagtaccagccccgtgtgctggctgtcatcgggccccactcgtcagagctcgccatggtcaccggcaagttcttcagcttcttcctcatgccccaggtgggcgccccccaccatcacccacccccacccagccctgcccgtgggagcccctgtgtcaggagatgcctcttggcccttgcaggtcagctacggtgctagcatggagctgctgagcgcccgggagaccttcccctccttcttccgcaccgtgcccagcgaccgtgtgcagctgacggccgccgcggagctgctgcaggagttcggctggaactgggtggccgccctgggcagcgacgacgagtacggccggcagggcctgagcatcttctcggccctggccgcggcacgcggcatctgcatcgcgcacgagggcctggtgccgctgccccgtgccgatgactcgcggctggggaaggtgcaggacgtcctgcaccaggtgaaccagagcagcgtgcaggtggtgctgctgttcgcctccgtgcacgccgcccacgccctcttcaactacagcatcagcagcaggctctcgcccaaggtgtgggtggccagcgaggcctggctgacctctgacctggtcatggggctgcccggcatggcccagatgggcacggtgcttggcttcctccagaggggtgcccagctgcacgagttcccccagtacgtgaagacgcacctggccctggccaccgacccggccttctgctctgccctgggcgagagggagcagggtctggaggaggacgtggtgggccagcgctgcccgcagtgtgactgcatcacgctgcagaacgtgagcgcagggctaaatcaccaccagacgttctctgtctacgcagctgtgtatagcgtggcccaggccctgcacaacactcttcagtgcaacgcctcaggctgccccgcgcaggaccccgtgaagccctggca

SEQ ID NO: 247348 - DNA, 131 bp, Homo sapiens
  chr1:1271746-1271877
  hypo
ggccggacgctctcgccagctgctccccaccccactcggtgccgtgtgatccgattcactgccactgcccccagctcccgccgcccgacgctccttctcacggcccggggcccggcggctgctccgggtgg

SEQ ID NO: 247349 - DNA, 108 bp, Homo sapiens; identical to SEQ ID NO: 206401
  chr1:1272384-1272492
  hypo

SEQ ID NO: 247350 - DNA, 161 bp, Homo sapiens
  chr1:1273361-1273522
  hypo
ctctgctgactcccggtgctgccgctgccatagctaaagcccgggtcctggtaggcaggcgggaagcagggtgggggtcccgggtactggtaggggtagccctgacccagaggccagggggcagccgggtggggcagcggggccagcgtgtcctgatccga

SEQ ID NO: 247351 - DNA, 112 bp, Homo sapiens
  chr1:1277898-1278010
  hypo
cccgccttcaggacgcctcctcagggcacccagggaacagggggccagcaagctgccctatccgcacccagcctgccagggcctccccacacccaccgcctcccccaggaag

SEQ ID NO: 247352 - DNA, 430 bp, Homo sapiens
  chr1:1280781-1281211
  hypo
ggtcccaggcagagccctgccgtccccaccccagccagatgggggagggtgctggaggctggccaggcattgggggcgtacccacaacccggggtccccgcgcctctgtagcagcctccgctgaaactcacggcagctgccaggggcgcccctgccggcactgtgcccccaccttgggattccctgtgaggcctggctaacctgtgtgctgcccccacagacccgccccggggaggaatccactcagaggcagcgccctgggagccagcatggccacacaggatgcagagaaccctccagactcccagaggccacagccagctgccctagacgtggcgtggtcccgaatgcaccccattctcccaaggcggagcaggaagctggcaggggtagctggcccaggacaggcggtgcagagccatcctgtgcc

SEQ ID NO: 247353 - DNA, 37 bp, Homo sapiens
  chr1:1329022-1329059
  hypo
cagccaggcaggacgcatgcccgtgagcccagccaca

SEQ ID NO: 247354 - DNA, 410 bp, Homo sapiens
  chr1:1354516-1354926
  hypo
ccccctccaagttcaggcagcgcctggggcaggtccccctcaggcatctgggccacctcggcccactgcgtccgcagagtggggctggcccctcggctcagcagaagccccacggtaggcccatgccctcgctctgcagccaggtgtaggggggtctttcggagccagccggtagcatccacctgggcacccctgtccagcaggcagccggcaacctccacgtggccttcccgagaggcgtgatgcaggggtgtgaggcccagggtgtcccgcgcatccacctcggccccctgggtgaccagcaactggacggcaagcaggtgtcctcgggcggcagccctgtgcagcgcagagcggccatgcctgtccctgatgcctgggtctgccccgtggcccagcagcacctcaat

SEQ ID NO: 247355 - DNA, 412 bp, Homo sapiens
  chr1:1377720-1378132
  hypo
gcagttgcttctagttgagacgagaagagcgacaaggttgtgatccacgtggcaggtgttcagaaggctgggggcgggcagcgctggggagagccctgggtacttcgaggagaccccgaagggaggctgctcccacacctgcgccagtttccaccctctctgtgagcagggctgcggtcacctcccacatctgaagagaaccaacctgaggatttcacgctggctgcgtgccagaccagtccctgacaggttgtgcgaggcccttcgctggacagcccattgctggccactggacggagaggcagagggggctgaaattcgggcccatgcctctgtgagcgatgacggagcaacagctctccagcacgtgaagctctccagacagctgttcgtgagaagccagacagaggcc

SEQ ID NO: 247356 - DNA, 33 bp, Homo sapiens
  chr1:1388341-1388374
  hypo
tgtggtggcgccccacgtcgcacatggctgtgt

SEQ ID NO: 247357 - DNA, 47 bp, Homo sapiens; identical to SEQ ID NO: 206406
  chr1:1389833-1389880
  hypo

SEQ ID NO: 247358 - DNA, 56 bp, Homo sapiens
  chr1:1390129-1390185
  hypo
ggtccttgcaagacccgggatttgggtgtgcggccgtctgtcggggaagctgctac

SEQ ID NO: 247359 - DNA, 158 bp, Homo sapiens; identical to SEQ ID NO: 206407
  chr1:1400495-1400653
  hypo

SEQ ID NO: 247360 - DNA, 87 bp, Homo sapiens; identical to SEQ ID NO: 206408
  chr1:1421578-1421665
  hypo

SEQ ID NO: 247361 - DNA, 307 bp, Homo sapiens
  chr1:1476831-1477138
  hypo
ggagaggggacgccgctccaccacaggcagcagttgtggcaggagcaggcggcttccgcttcaggcagcacaggcacgggtaggcccagaccctgtcagcaccaccaggtctgagctactcctcccaagcagtggtcggaggtcactgagggcggcagggctaggcctctgccacctcctcaggggcgagggtcgggccaggaattcaggaccaggcacaatgacagcagcatctgtttattgacaattccaggtcattcctaacacgccgcagcagggctctgtacagtccggcccggtggggagg

SEQ ID NO: 247362 - DNA, 227 bp, Homo sapiens
  chr1:1487054-1487281
  hypo
tcgcggacgccaacggcccaacctatctctgccccaaatccacgtgggacacagcacccatgtccagggacatcctgaacgttttgcccatccttacgccaacgtcacatcgccccgaaggcctgagggagggtggtggggcccgaggcctgtgctcaccccatgcaggcagggccacgccgggccaccactacctttcccaacaatggcccggtgtgggcagccca

SEQ ID NO: 247363 - DNA, 209 bp, Homo sapiens; identical to SEQ ID NO: 206410
  chr1:1491937-1492146
  hypo

SEQ ID NO: 247364 - DNA, 151 bp, Homo sapiens; identical to SEQ ID NO: 206411
  chr1:1492359-1492510
  hypo

SEQ ID NO: 247365 - DNA, 482 bp, Homo sapiens
  chr1:1494401-1494883
  hypo
aaaatagagaagcctctgcacgtgaccctgggagccaggctcaagcccctcggcaggacacccagcgcaaagctgctctactccacgtgccactgaggctgagcgaggaaaagtcatggcaaagaaacctgggacttagaaatagttccacgcatgctcagcgaaagaacaaaaggctgcatatgaactggacagtgtggaatgagcagacctgtagcacgggaagcagctaaactggacggtgtggaacgggcggacctgtagcacgggaagctgctacaggcactgggaggagaatgggcagcagcaaacggccttgggagacgaaaagcgtctcaaaaccaattgtggtgacggctgcaactccatgaatgtcctgaaacccacagaactggacacgcgactcagggaagtgcatgatttgtacattttatctcaataaaaacaattcttgataaaacggtcagtccacccaaggaaag

SEQ ID NO: 247366 - DNA, 123 bp, Homo sapiens
  chr1:1496748-1496871
  hypo
caccgcgccggcccgtcctttgtcttgacgctgtgaacactcgaccaagtgctgcgtcttatctttgggccgcatcttgaaccccgtcttgcttccactgcagtttacggcgatgacttctgc

SEQ ID NO: 247367 - DNA, 290 bp, Homo sapiens
  chr1:1502409-1502699
  hypo
cctacggacatacacgtgcctctgcaacatggctgcctgcaggatgcccactgccggccttccacagccacaaaagaacagacaagtagaataatccatccatggggcaggacaggccatgcggctccacgcgcacctccgaagatgagtagaggaagcaaaagagcccaagggcaccctgctgcgccaccacacacgtcacccacacacacagagaagatgtgctcatctagtgtacgtgaaacacctgagtcccctgaggctgatgacagctgcgtcagtccttacat

SEQ ID NO: 247368 - DNA, 122 bp, Homo sapiens
  chr1:1519092-1519214
  hypo
tccacgaggttctgcgtctcggctgggcccagcacagatggtggcagctacgtgagcagctcagtggcacgccgtgcacctgggaatgcagcccgactgggcactcccgccctgcacaccgt

SEQ ID NO: 247369 - DNA, 95 bp, Homo sapiens
  chr1:1525408-1525503
  hypo
gctttgtggggcgcgtggccatctaggcgataaatgagggcatcgcccactcctgccctacgtgtacctgagtatttcacgtgcggagcacagag

SEQ ID NO: 247370 - DNA, 206 bp, Homo sapiens
  chr1:1552946-1553152
  hypo
gcttgctggctgcccgtctggtttgctgtgttgtgtctccagtggctttagcttccaacaggaaagcctggtagccgagcgaatctgtgacccaggaagtagcaattaaatgcctgggacgctgcctcgaggctggtgtgtgctctgaggtaagttccgatttgccaaagcacatctgtcgatctgtcgcccgagtcttcacaccc

SEQ ID NO: 247371 - DNA, 572 bp, Homo sapiens
  chr1:1562213-1562785
  hypo
caggccctgggccgcgtcgggaaggtggtgaaagtgtttggagacgggaacctgcgtgtagcagtcgctggtcagcggtggaccttcagcccctcctgcctggtggcctaccggcccgaggaggatgccaacctggacgtggccgagcgcgcccgggagaacaaaagtgcggcacagctcaggcggccagtgggaggtggggctgcccctggccaccactaacctcagccctgcccccaggctcactgagcgtggccctggacaagcttcgggcccagaagagtgacccagagcacccgggaaggctggtggtggaggtggcgctgggtaacgcagcccgggctctggacctgctgcggaggcgcccagagcaggcaagctcctgaccccgtcctcccatactggccagtctgagagtgaggggcagagggccagggactcacctgctggcactcttggcaggtggacaccaagaaccaaggcaggaccgctctgcaagtggctgcctacctgggccaggtggagttgatacggctgctgctacaagccagggcgggcgtggacctgccgga

SEQ ID NO: 247372 - DNA, 874 bp, Homo sapiens
  chr1:1563171-1564045
  hypo
gggccctgtgtgagcgcggctgtgacgtcaacctgcccgtgagtgctgctccctggcctgggtgccccctgcccgtgagtgcttgtccctggcctgggttccctctgcccatgtgtgctgctccctggcctgggtgccccctgcccgtgagtgctgctccctgggtgccctggctcttgacccaagcagaagtcacccccaggtgaccactgactccgccccagcaggacgcccactcggacacgcccctgcactccgccatctcggcgggcactggagccagcggcattgtcgaggtcctcacggaggtgccaaacatcgatgttaccgccaccaacagccagggtttcaccctgctgcaccatgcctccctcaagggtcacgcgctgtgagtgtggggtgggcacacagctgcagccggcctcttgctgtgctgcctgggggcagtcccaggtcccagaccaacctccctgctccacagagctgtgagaaagattctggctcgggcgcggcagctggtggacgccaagaaggaggacggcttcacggcgctgcatctggctgccctcaacaaccaccgcgaggtggcccagatcctcatccgggaggtgcggacgcggcccagtcctgcccaaggaccggggagcgggaggcccactggggtccctgggctgagcccgtccccacccctccccagggccgctgtgacgtgaacgtgcgcaaccggaagctgcagtccccgctgcatctcgccgtgcaacaggcccacgtggggctggtgccgctactggtggacgctgggtgcagtgtcaacgccgaggacgaggagggggacacagccctgcacgtggcgctgcagcgtcatcagctgctg

SEQ ID NO: 247373 - DNA, 222 bp, Homo sapiens
  chr1:1597513-1597735
  hypo
gtggccagcagctcggctgagcctgggtctggaggctgggtggggttgggggactcagcgtcacggtgacatcagccctgcggccagcagctcggctgaccccgggtctggaggccaggatggggcgggggtgctcaacgggacctcggtggtggtgagatcagcccaggggtttgggagctttcagcggggcttgcctgctccctcgtcccttcttttttg

SEQ ID NO: 247374 - DNA, 48 bp, Homo sapiens
  chr1:1610925-1610973
  hypo
cagaaatcacacttcactgacgctgccgttctctgtacatcaagaact

SEQ ID NO: 247375 - DNA, 342 bp, Homo sapiens
  chr1:1611923-1612265
  hypo
tcgtctgtgtctacgtgcaggagtggaactgcccagccctgggacacgcatgctgagccccagccaacgtcacaccgacctgtgctcccacagccctgccccggctctgtgtgggtgactgtcccgtccctgcagttgagcccacgtggtcccggggtctccattcccctcccaatctgcaggacttcactaccatgaaccgtcctcacccccagcatccctgtccccacagctccaaggccgcaggaggaggcgatatctaatcttccccccacgtaaacacctgtccctgcgtaaatgcctgaggctggctgcttattcttttttttttttttttagatg

SEQ ID NO: 247376 - DNA, 42 bp, Homo sapiens
  chr1:1612385-1612427
  hypo
cgcctgccaccacgcccagccgcttcttattcaaacactggg

SEQ ID NO: 247377 - DNA, 272 bp, Homo sapiens
  chr1:1625720-1625992
  hypo
agacttcatctcataaataaataaataaataaatattacttttacgttttgttaaacttccacttgtttttgtttccgttgcatgaaccttcgtaaagcttcaggaggctgatggcagcctccttccccaggcttccccgtggcgcccgcagccgggttgggccagaggctgggactgtttcctcccgtggggtctttggtggggatgtccccagaggagtggggcaggaggaggggcacggagcgcccccgggagccggtcagagcgcagc

SEQ ID NO: 247378 - DNA, 193 bp, Homo sapiens; identical to SEQ ID NO: 206415
  chr1:1647565-1647758
  hypo

SEQ ID NO: 247379 - DNA, 38 bp, Homo sapiens
  chr1:1652607-1652645
  hypo
ggtgagcaagactcttgagacaccgtctcaaaaaaaaa

SEQ ID NO: 247380 - DNA, 134 bp, Homo sapiens
  chr1:1668525-1668659
  hypo
aaattgtgggcaggagaatccgcgtgaaatggacacagcagctcacaagggttcattcggacaaagcccagcagaacaacgtggaacgcaaggtccaaactttttctggtatcgataagaagctcacagccaag

SEQ ID NO: 247381 - DNA, 44 bp, Homo sapiens
  chr1:1671716-1671760
  hypo
ggctttgtggctgccgctgccgggtgcccaggactaattccatg

SEQ ID NO: 247382 - DNA, 128 bp, Homo sapiens
  chr1:1691803-1691931
  hypo
tgcctgggacgcacgctgccgcggggcccacactttgcagagcagctcctcggatgactcccccgtggctcctgggacctgaacttcggtgacagcccagggctggggcctccgtccctgctgtgcgc

SEQ ID NO: 247383 - DNA, 449 bp, Homo sapiens
  chr1:1694219-1694668
  hypo
atgaatgaatgaataaaagacgccagatgaacggctcaacaactttcctagtgatttaaacatggccaggtcacagttaaatcacccagccaggggctgtggcagccgcacgcgtcctggggagaatgctgtcaggaccgctgtgctcctcagggtccagcactgaggctgccctcgtcctaggtgcccgggagcctcccagtcccttcacaaactcagaaaacttgcacacagctggccaggcaacggcccaacaaaatcctcaagtcccaatgcagaagaacggccttccgctgcctcgcagggccagacaaccccaggagagccgtggtgccctgagggctgctccacaggtgacacaggcgtggccatcagtggtcacggacttgtttacctcagccttttaaaaattggtaagtacaggccgggtgcagtgactcacgcctgta

SEQ ID NO: 247384 - DNA, 180 bp, Homo sapiens
  chr1:1706069-1706249
  hypo
tcccacagtgctgggattgcaggcgtggccaccgtgcgcggtcaccactgtattttttgacaagggtgagtcaggactgacacttaattcatttgtttgatatattaactgctttaaaaggacacacaatgctagctgcaccaaagtgcattcaaattcctcatagcatgaatctaattt

SEQ ID NO: 247385 - DNA, 52 bp, Homo sapiens
  chr1:1713455-1713507
  hypo
ctgggattacaggcgtgagccacagcgcccggccacagcctggtacgtttat

SEQ ID NO: 247386 - DNA, 90 bp, Homo sapiens
  chr1:1715002-1715092
  hypo
gcaccttgcctggagcagggcggctgggccctgctccgtgaatcccaagtgccctatgggagcctctccggccagggactgccagcctag

SEQ ID NO: 247387 - DNA, 97 bp, Homo sapiens
  chr1:1717280-1717377
  hypo
tcccgctacccaagcgtgtagagccgcgcgctgtactgcttccgatatgtgccacagagcagcaacgagaagtggacagagccgcaatggttacaac

SEQ ID NO: 247388 - DNA, 72 bp, Homo sapiens
  chr1:1718795-1718867
  hypo
cccaggaccctgtcgccacagccatgccatcgtcagtcacgcccaggcagctgacgcggttgtcatgcccag

SEQ ID NO: 247389 - DNA, 280 bp, Homo sapiens
  chr1:1724694-1724974
  hypo
tccagagctggtgacgatctgattgtcatccaggaatcggcagcaggacaggtaacctggcaaagaacaggcctaagtgatgagctgaatccagcaggccttgcacccagcctcatacatagagaaacacattggcccggtggaagctctacgtctaaggtaagaccagcaccatgctagtgaccttttattcccatctgtgcacacagcagaaggtccacacgcactgctggtgagggtgagagcctggccaggcaggacagcacgtcccacagagacc

SEQ ID NO: 247390 - DNA, 98 bp, Homo sapiens; identical to SEQ ID NO: 206416
  chr1:1729268-1729366
  hypo

SEQ ID NO: 247391 - DNA, 90 bp, Homo sapiens
  chr1:1737718-1737808
  hypo
tccagaggaagagaccgtgacaggtggcacgtgactcagcttctatctcacctgcgcaacttcactactaacaaacagagcttgccgctg

SEQ ID NO: 247392 - DNA, 36 bp, Homo sapiens; identical to SEQ ID NO: 206419
  chr1:1781840-1781876
  hypo

SEQ ID NO: 247393 - DNA, 159 bp, Homo sapiens
  chr1:1848271-1848430
  hypo
tgagggcggcattccgtgtctttgacaaagagggcaagggctacattgactggaacacactcaagtagggcccgggttgggggcgggtggtgggcgggcacgggcagggccgatggagtggctcagcgccaggccccgtaggtacgtgctaatgaacgc

SEQ ID NO: 247394 - DNA, 160 bp, Homo sapiens
  chr1:1861661-1861821
  hypo
tacactgtagccacggaggtgtcgtatagggccgtggcggcaaacttgatctggtagtgggacagctccaggggtgggtggacgcctacagcccggcaagacagcttgaagcacctgcaagcagcagcatgggaggccctcagccgtgcagggcgtccgt

SEQ ID NO: 247395 - DNA, 288 bp, Homo sapiens
  chr1:1874713-1875001
  hypo
gacgatgccggaggcgagcagactccaccgcagacacgccaacacacgcagctggctcccgggtcaccgcaggctgcacattcccggcccatgccgggcccacaggagtccgacagcaggaggacaggcgccgcgggagctgttcctacccaggtcaccggggagaggtggctgtgcctggggccggtgcccggggcctctgtgtccgcacaccctgctccttggtgctggtggcacaggggctccgtcatggaaaccccgcaggcccagcctcgccgtccctctgcg

SEQ ID NO: 247396 - DNA, 195 bp, Homo sapiens
  chr1:1888177-1888372
  hypo
ctaccacgtagctgccgaagtcaatgagctccttgtcgagggacagctgccagaggacatggagtgaactcagggccaccgtgccaggcccacagggtgcccagcgtgaggcctgcacgtggctccaggcagggctgccctgagcatttgtgcgcgttgtgcactgcacaagcaggtacacgattcaacccagaa

SEQ ID NO: 247397 - DNA, 503 bp, Homo sapiens
  chr1:1888803-1889306
  hypo
ggggcaggaccaggggccaccgacgcaaatggacgtggttcgcagagggcggtcggggtccagccaagggaggccgcctccttcccgcctgcaccgcctgggtcctgttctccccttgttcagatggggttttactgtttttacagtccccagcctggacgctcccctgggagaagcaagcccctgctcaggggagccgagggtctcggtgctcctgtcacagaggagcacttgacactgcaaagaccaaatgcgggagaggccggggcagctctggccaggacacctggggcctcgccgggcacgtgctccatgatgctgatccggagtggagcaggccagtaccagactcctgccgggctcccaggctgagcaggagggagccggagcctggctgtctgcgggggggcgggggacttcctgctgcccctggccctggtgctcggtgtcctgggcctgagtcttggctcaccaagagcccgcacagccgagtgccggcccaa

SEQ ID NO: 247398 - DNA, 367 bp, Homo sapiens
  chr1:1901958-1902325
  hypo
ccgtgccccacagccgcctgagtgggcgccctgggagagagagcagctttgctcaatgtgaagccgaacccccttggctctccctgcacccactgactgggcgggtgcctcccggtggcacctctgccaccaccctcacctcttctgggcctccagctcctggcgccggcgctggtggacaaggtgcctgaatgcatccctgccctgggccagaatcgccttcttctcagcctggaccctctgctccgccagctctgccttggcacggtcccatgcttggaacttccgcagtgtgtccttggaaacagagagcactgagatgacagcagcagcacccacgggcacatgcacacgctcacacctgcac

SEQ ID NO: 247399 - DNA, 288 bp, Homo sapiens
  chr1:1910164-1910452
  hypo
gaactgcaagctcataaatccgcgtcctgctgagctgttaggtttgtggatttgtcactgcagcgatgggatacgggtgcagtcagggaagcctcagagcaggccgggacacagcaccagcgccctgccgtgggtcccatgtggccaagcggggtgcacacaaagcctcttcttcgtgctgagctgggcgtgggaaggcatcatgtgacgaggctgcacagaacacgtgtgtcgtgctgagctgggcgtgggaaggcgtcacgtgacgaggctgcacagaacacgtgt

SEQ ID NO: 247400 - DNA, 455 bp, Homo sapiens
  chr1:1914128-1914583
  hypo
ccacaggaggagggcggcaggtgggctccgggcgctcggggccgcctgcgggtagggatggggcaactacctgcccgaaatgagggtggtgggaggcagggttcacaccatcagagaagggggtgaaatagacctgtggctttggttgcaattggaattacagatgtgaacgggtggttttcaatacaggcaggcagagctgcgtgcgtttcccacctctgtctactgacggttaagggtctgggtccaggcaagggcagggaagaagaagggaacctgagcctctcactgtgcccgaaaacgcccacagagcggcagacacgaacgcaggatgcggaaggatgccaccgccaaacgcaaggcggctggagcacccagaccaatcctgatgggccggatcatacccgcagggacacagcacccccagcctacacggagagcgatcacggaggggg

SEQ ID NO: 247401 - DNA, 95 bp, Homo sapiens
  chr1:1923485-1923580
  hypo
aaaaaatgcctgagatcaaaacgctgccaacagtgagcactggcaaggctatggaagggctggcatcgtcacgcgttgctggtgggagtgtaaag

SEQ ID NO: 247402 - DNA, 359 bp, Homo sapiens
  chr1:1974742-1975101
  hypo
tgggggcccaccacccagcagcaactgttggaccccgcagcgcaggagtggcagggcccgtctgcagtgcaggagtggcagggcgtgtccgcggtgctgaccggttggtcttgggccctggcgctgtgtccccgcacaggtctcgggagaggttctccactctgagggcgtgtccagtccagagaaggggacgcgcggcgtgttccccagtggtctggaccctggggtcccgccccatccctgccctgcccaggccctgccccctgctggtgtgtgtccctggaccaggcatggagcgaccccggccctggtgtctcatccacagaatagggtcatgattctcacgtcctagggatggg

SEQ ID NO: 247403 - DNA, 320 bp, Homo sapiens
  chr1:1986095-1986415
  hypo
ttatggaattatttaatccccgccacttcaccgctggcaccgtcgaggtctgggggcaggtctgactggtttcctttaccttagtgaagccggcggcctgcaccgacccggctcgcgcccatcccggggtcacccacatttgggtgaacttgaacgagtgcccgaccaggtaacgttgccggacctcccacaagagggcactttcttttctcccattttgtcctcattctttccagccaggtaggtcgcgcttttttctctgtgcaaggaagttgatggtggtcatttttttttttttttttttaatacggagtctctct

SEQ ID NO: 247404 - DNA, 212 bp, Homo sapiens
  chr1:1990854-1991066
  hypo
gcagtgccacgtgcgccttgcgtgaagtccacgtgctcagcctgactgaggcgggacttcctccgtgagactgttgagtggcagccgcagggtcttgacgctgtctctttctctctcttgtccagttttcccgagcacccctgagcagcctggcctgccatgtccgggagaagacagtgagtactggggtttcctacgccggtctcgcatgt

SEQ ID NO: 247405 - DNA, 121 bp, Homo sapiens
  chr1:1992995-1993116
  hypo
gtttaccaggggtggctccacggcttcggggaccactcagcctggttggggacattccgccagagcctctggggcagcctttgccgaggaggtcagaggcgggtgctgggggtggggagcc

SEQ ID NO: 247406 - DNA, 166 bp, Homo sapiens
  chr1:1999032-1999198
  hypo
ctgccacgtgtgccgggctgcccagggcccatgagggtggtggcacgggggtccgcatgaggggccgcaggtgcctcgggcccctctcccgcttgtttctccatcttcactgtccgttcactgcagtgccgggtgaggccagtgtgtggccggtagattcccgggt

SEQ ID NO: 247407 - DNA, 1090 bp, Homo sapiens
  chr1:2013460-2014550
  hypo
atattaaagcaggcttgatccgggctgccgtggttccgatcgactccgaataggacaccacacagtcgtgccaagaaggcgcctaagtgtctttccacacggccatccgagggcggacgtggtcaggggtgctggacgcgtcagacgggttctttgcagcccttggcagcgtcgcccgctctgtcccgcctgttgtgtgcgccttttccctgctccagggctgtgtatttggcaagagggaggctccgtggcacgatcacacgtgcaggagctgggggctgccagagcggctgttcaagatggacttggcaaatcacctctttcaagttgccggctacccggctgccgtagacagagtgaagtctggtagtttgtgtttatttatttatcttggccagcagagagaattgagtttgcatggagactgtaatttcattctgtgagtgtaagatcacgtccgcgttcctagcgaccggttttgtgatgtgggcagtgccgtgctggtaaatgctctgtgaggaaggaacgatggtgggatttgtcactcagtcgatttccctggtgtaaatgctcccaccacggccgatttcaggctgccgaagtggaggggttcagtgaaggtggagttgggcaagggcgtacacggtcggcttctgagagttggtccccccgcccaaccctcccctggagatgggatgtcaggagacctggttccatttgtttttttgcctgagcgtccgggggtggctttgaggacacctgtcctccttcacaggggcactccggatgtagtagcagggagagggtggaggggcggccaagggcgtgagggagagggtggaggggtggtgtgagggtgcaagggagagggtggagagggtggcagtgagggcgcgagagggtggaggggcggcatgagggagcaagccacctcgggcacaggtgaaggacaggtgtccacaccttgggtgcccccgtcctccctctcctcatgtcctaataggtctgaacaggaagttacatttagggcggctgtacagtgagttttaaataccttggtccaaattttcaaacacgtatcgttagcgtt

SEQ ID NO: 247408 - DNA, 408 bp, Homo sapiens; identical to SEQ ID NO: 206426
  chr1:2016617-2017025
  hypo

SEQ ID NO: 247409 - DNA, 101 bp, Homo sapiens
  chr1:2025268-2025369
  hypo
acagcctgccttggcgggcacgggacgagccgaggatccccgcgtcgacgtggaggtccgcggccgtcagcgttgcagcccttggccgggcactaagggct

SEQ ID NO: 247410 - DNA, 547 bp, Homo sapiens; identical to SEQ ID NO: 206427
  chr1:2025646-2026193
  hypo

SEQ ID NO: 247411 - DNA, 201 bp, Homo sapiens; identical to SEQ ID NO: 206428
  chr1:2039530-2039731
  hypo

SEQ ID NO: 247412 - DNA, 185 bp, Homo sapiens; identical to SEQ ID NO: 206429
  chr1:2041058-2041243
  hypo

SEQ ID NO: 247413 - DNA, 51 bp, Homo sapiens
  chr1:2058200-2058251
  hypo
ctcacccggggttgccttcccgagggccgcggacacctgagcagtccccat

SEQ ID NO: 247414 - DNA, 218 bp, Homo sapiens; identical to SEQ ID NO: 206430
  chr1:2065387-2065605
  hypo

SEQ ID NO: 247415 - DNA, 768 bp, Homo sapiens
  chr1:2065918-2066686
  hypo
agcaaagtgggacacggtgttgaggaaggacaagaccagccgtctggttacaggcttggtgccgcctttctcataagaggcacagtccgcatgggctggactgtcaaatgcatgttataaagatgatgtttttggtaacttgcgaatggaaacgggtgcacggtcggtttggctctcctgccctgagatttattaggttaaaggaaactcgactggagagcccggggcctcgcgccgcttgcgtctggcgagttgttgaagtgaagtcagtggcgctctgcaccttagcctggcccaggctccactgtggcgtccactcttcctcctctgacagtcatgtgtaaatattgaggcccgtttgaactatccctgtgcggaaaaaaaggcctgtttttcacagggctgcctggggaggaggggggtggaaaggaaaacaggcaggggacagacggacccggcctgcgttggcctggggtgacttcacggctccactgtcagcaagcggccgtcccgtggtggatcctgtccgccctgcgaggacacctggctccatccacacctgggcctctgtctccagccgccgaggccgtgacaccatgaggatcatgtgaggaggggcagagagaggcctccgggaggccgtcattccagccctgccttccctgcctgggaggacgctgcggccgccaccacctggacgggagtggcctgtcgcagctgcaccctgcgtgggctcgtggctgccacgctgtttctttacacctttct

SEQ ID NO: 247416 - DNA, 154 bp, Homo sapiens
  chr1:2068692-2068846
  hypo
ctgcttctcccacctgcttccgcctgctttgccccagccgcactggcagctgattggacgccaccgcccacccacattgagggtgggtcttgccctcccagtccactgactcaaataccagtctcagggcagcgccctcatagacacacccaga

SEQ ID NO: 247417 - DNA, 167 bp, Homo sapiens
  chr1:2069360-2069527
  hypo
aggcgagagtggcccgaaagcctgcaacctgactgctcagggagggcggctgccctgcagttcagcctgtccgattcccgcctaattgtgcccgggctctgatctcgccacctgctcgtaacgttctctgtccggacctcagagccgctccatgtagtgctcacttc

SEQ ID NO: 247418 - DNA, 75 bp, Homo sapiens; identical to SEQ ID NO: 206432
  chr1:2103118-2103193
  hypo

SEQ ID NO: 247419 - DNA, 245 bp, Homo sapiens
  chr1:2103460-2103705
  hypo
gcactgcccccatgacggcatccccacccccaggttctacgcggccgagatctgcatcgccctcaacttcctgcacgagagggggatcatctacagggacctgaagctggacaacgtcctcctggatgcggacgggcacatcaagctcacagactacggcatgtgcaaggtgcgtgccttggaccgcctcccctgaccatcccgcatgtgcgtctcggggcgcctgtcccgcggggtagtgtcta

SEQ ID NO: 247420 - DNA, 521 bp, Homo sapiens
  chr1:2107353-2107874
  hypo
agggatctgatagtgggggccggcctagagaagggcgtttgctttggtttcatggccggttttatcagcagttactggacaggaccagcagtcgcagcgttcacggcttgagctttagcgtcgggtattgaaggagagtgagtctgtggacagggtgcgacgtacactggctcgatttaggaatctgatttcggtggtgtgtgagcagggtgcattcggtagaaactactttgagttttgaccgttccccagctggccgtatgaggtcagtactctcctgtgatgaggggcggtgactgcagccccagcgggccacgtgatcaggagggggccgaatgtcccgaggggctctgcgtgcagggggttttgccggactgtaggctggcgtgtgtctgtcaggttaaggcaggtaaggctgcgccgcttggtcgtgggttctgtgtggaagtgcagtctccacccaggatgtttccagcgccgctcggtcgtgggttctgtgtgggaagcgcagtctccaccta

SEQ ID NO: 247421 - DNA, 264 bp, Homo sapiens
  chr1:2111815-2112079
  hypo
acagacgacatggacgcacagacgatgtggatgcacggacgacgtagacacacggatgactcatccacagatgactcagatgcacggacacccagacgacgcggacgcacagacgacgcggacgcacagatgacgtggacgcacagatgacgtggacgcacggacgacgtggatgcatggacgacgtggacgcacagatgacctggacgcacggacgacgtggacgcacggatgactcagatccccagacgactcagatgcacg

SEQ ID NO: 247422 - DNA, 623 bp, Homo sapiens
  chr1:2116358-2116981
  hypo
agggatgccataaagaggatcgaccagtcagagttcgaaggctttgagtatatcaacccattattgctgtccaccgaggagtcggtgtgaggccgcgtgcgtctctgtcgtggacacgcgtgattgaccctttaactgtatccttaaccaccgcatatgcatgccaggctgggcacggctccgagggcggccagggacagacgcttgcgccgagaccgcagagggaagcgtcagcgggcgctgctgggagcagaacagtccctcacacctgggcccgggcaggccagcttcgtgctggaggaacttgctgctgtgcctgcgtcgcggcggatccgcggggaccctgccgagggggctgtcatgcggtttccaaggtgcacattttccacggaaacagaactcgatgcactgacctgctccgccaggaaagtgagcgtgtagcgtcctgaggaataaaatgttccgatgatgtggaagctcctctgatgccttttttccgtgagtggcgcctgccccacatctcagacgcaacccacacgtaggggggcagcttaggagccagcgggacacaggtgggggcgggagttgaagtacctgtggggacacaccgcaatcaagaattg

SEQ ID NO: 247423 - DNA, 33 bp, Homo sapiens; identical to SEQ ID NO: 206435
  chr1:2121714-2121747
  hypo

SEQ ID NO: 247424 - DNA, 64 bp, Homo sapiens
  chr1:2123197-2123261
  hypo
cagtgaccaacccagggcctcgccacatcaacagagacaaaacgcagctctggctctcaacatc

SEQ ID NO: 247425 - DNA, 164 bp, Homo sapiens
  chr1:2123462-2123626
  hypo
gcagctccactccccagacccgcctctgccagggctccaggctcagcaggcgcctgtgcgggacagggcgacggttcaagaccaagtccggctgttagaccagaccctccaatccaggcggcctccctgctggggtcctgtgcggtcaggagtcccagggcatc

SEQ ID NO: 247426 - DNA, 354 bp, Homo sapiens
  chr1:2125161-2125515
  hypo
gccctgcagggatcaggtgccgggcgctggggcagggacctggcgggggattccaggtgccctcctgccccgtgaagcagccggtaggaacggcccgggccccacaggtccggcggaaagggtgtccaggaaaaggtcttgggtccgacagtgaagacttcagtgggctccgggccgcacctgggctcctgcaacacagagttgttgggccttgcccagcgatggctcccgccctggaaaccccttcatcgctaagatgggcccagtgggcacacctgtcctgggaaggcgggcagtgaaggcacctcgtgatccaggatcagctccgggctcaccgtgcgcagtagctcggcc

SEQ ID NO: 247427 - DNA, 285 bp, Homo sapiens
  chr1:2129650-2129935
  hypo
aattcatgtttacaaaagaacgtttcagctgtgggagtttgcatcccaggcagagcagaaggtgatcgagtgggtgggggcatcagagccacccatctcctactcccgcacctgcagaccggtgggctaggaggccccttaccctctgtggcaaaaaaggacacatttatggatgatgaatcaggccccagcccactgagctggtttcagaagccaggctggccgtaggtcagggagccaggcctctccaactccttccaccgcggaagaacaagtgtcccagcc

SEQ ID NO: 247428 - DNA, 380 bp, Homo sapiens; identical to SEQ ID NO: 206436
  chr1:2132534-2132914
  hypo

SEQ ID NO: 247429 - DNA, 248 bp, Homo sapiens
  chr1:2141559-2141807
  hypo
ttgggggctctggagatgggcggctcacctgcctgcctcgtgcccagacctgcgagtgtgcctgcccgtgtcagacagaggcgagttgggacttcacacctgaaatcaagcgggagggtaggaatgtgagcctcgaaaccaccttctttctgtatcgtttctgggagtggcgatgtcggccagtgggacacctgctgagggtcctcttttcccatccgggtgctggcgggacagggggtggctgtgac

SEQ ID NO: 247430 - DNA, 239 bp, Homo sapiens
  chr1:2142328-2142567
  hypo
gggacgcaagctggcgattgctgcgggggacctgggcctgggcttagcgactgctgcccctatccagatgcctgattgggaccagggtgtggggccgggccctgcagcgcctgtcttgcccgggctggagccctagagctgtgcgacctggggccagggtgttctgacagactcactctcaggggctggatgcccttgggcaccacggcgggtgcctagcagaccgtgctgtacaccat

SEQ ID NO: 247431 - DNA, 100 bp, Homo sapiens; identical to SEQ ID NO: 206441
  chr1:2154150-2154250
  hypo

SEQ ID NO: 247432 - DNA, 337 bp, Homo sapiens
  chr1:2167223-2167560
  hypo
ccagatggactgagcacctgcgttggccatggcccggaggtggcgtggtggtgcctggcgcctgtggccctcagcatgtgtcctgccggccgcctagtaggccttcgcttgaagtgcttattcctttgagtaatgctcctgtcttttgtttggggggaaacagataaagggggctttgagaggcgtctcggcgtgatcctgggaaacggccgagattctgttcggtgcttggtgttcgtgtcttctctgattttacctttttgactcataaagatggaaggagtgctctgcctcggtgcctctgcagctgcagatgctgaatcggggcgtttaggcc

SEQ ID NO: 247433 - DNA, 111 bp, Homo sapiens
  chr1:2170934-2171045
  hypo
ccatgtgggtgtagccgttggcggcacctttgtacggggacacaccctggacctgaatggagtcaggaagggtttcaacctggatggcccgcgtgccggggacccgcaagg

SEQ ID NO: 247434 - DNA, 212 bp, Homo sapiens
  chr1:2188826-2189038
  hypo
gtgcgggccagccccgatcctgcttctgcaaggcctcccctcccatggtggcgctttggtgccagagcgcgtcggcgtggctccctagcgtctgcctctgcagctgcttggcccccagccgcctcctcccagctgcctcctgccctatgtgtgcttgagctcgagacaatgcttccttcatccaagagccgggctctcggcgatttttgaga

SEQ ID NO: 247435 - DNA, 496 bp, Homo sapiens; identical to SEQ ID NO: 206444
  chr1:2190967-2191463
  hypo

SEQ ID NO: 247436 - DNA, 131 bp, Homo sapiens
  chr1:2205382-2205513
  hypo
ccctgaccggcagcgccaggatggcagccccacaacagtgtcctggtcgccccagaggcatgctgagcgcccatgcgtgtgcgcaggtcctacgggccgtgtccagacccagccccggggtcaggtgacac

SEQ ID NO: 247437 - DNA, 125 bp, Homo sapiens; identical to SEQ ID NO: 206445
  chr1:2218535-2218660
  hypo

SEQ ID NO: 247438 - DNA, 472 bp, Homo sapiens
  chr1:2234639-2235111
  hypo
gggctggcacccggcgcagcctcagggacatgaagtggcttgtttttctcctggtcactcacacagacaactctttctcgacagagcctgggctgtgttcaccctcgccagcgcctctctgctttccgaccctggtcccccgcagtgtcagcgagtgagaaagagctctccccacacctcccggccctcatccgagacaggtgagtgggcgccattcacaggtgtttctgatcacgggggaggctccacgagggctgtgcatgcggacgcgcccatgtttctgcaggctgggtgcccagacctgccgccttttggtcagggcagtctcggtgttggttcctttggctggcatcagggagagcacacctagagcgttccctgtgttctgggtggagtcgtgggtggagccctgtctgctgggcgcagcttcttgatgtgttggcctgtgtctggccttcgcaagagacccagc

SEQ ID NO: 247439 - DNA, 564 bp, Homo sapiens
  chr1:2237785-2238349
  hypo
cagaagccaggcccgggaccacgttccgtgcgtgcccccccgacgggcacagggtgggtggttgctgggccctgcgtctcgtgagcctgtgtcctagcaggtggaggaggggccggcacgcggcactggggagggacagggagcggcgcaggagcctcgggtgggggaagcagcgtcgggccggggcagggcagcgagcaggcgccgctgaccactcggctccctttcagatcgaagacctgcaggtgaagctgcagcacgcggaggcggaccgggagcagctgcgggccgacctgctgcgggagcgcgaggcccgggagcacctggagaaggtggtgaaggagctgcaggaacagctgtggccgcgggcccgccccgaggctgcgggcagcgagggcgctgcggagctggagccgtagattccgtgcctgccgccgcagcgccgccgacaacgcgggtgcaggggggcgcggctgggcggtgcagctccgcccggctccgcccctgcagcccacacagcacaacgtcttaccgtgcctattaccaagcgagtgtttgtaacca

SEQ ID NO: 247440 - DNA, 162 bp, Homo sapiens; identical to SEQ ID NO: 206447
  chr1:2238918-2239080
  hypo

SEQ ID NO: 247441 - DNA, 595 bp, Homo sapiens
  chr1:2239611-2240206
  hypo
aggagttctttgcttgaatccgttctaacacccgcggcagctgcacgcgctcacagaaggtggaggttacttgcccaggtacagacgacctcggggcagtgacgagcaaagaccagagactgctgagccctcgcatctgggtggcggaattgcctgcggggttttgcccttggtttactgaggggggtcttggttgctgctgaagccccccaccccttctaaagtgcaatgcaaaagggacatcatgtatatgcagcgtttgtttggaattttctttgcttttgttttctttgcggttgttctgtgtgcatggattccacacctctgccgtaggtagatccgtcagcgggcattattaccgtgtcttgtaaagggtcggttttgttatgcaacatgcagaatgctgtttttagccttgttttaccagagttgttttttttttcagttatttcttcaagggaaactaaatgatttagttggagcaaagctttaagtgtgttggcgtgcttctgtgtggctgtcctgtgtcgccaggtcgaagatcacagtgaggtagaggccctgccccatccccagggccgccaggcttgctccg

SEQ ID NO: 247442 - DNA, 204 bp, Homo sapiens; identical to SEQ ID NO: 206450
  chr1:2254568-2254772
  hypo

SEQ ID NO: 247443 - DNA, 474 bp, Homo sapiens
  chr1:2257929-2258403
  hypo
cggtgccccacagacggcgagcaggcccgaggccagtgtccacagggaccgcacatggggaggtggtgcaggagccctgggcggtggactgggggtgcgtctgggcacccactgcgtgcctgggactgcaccttcatgcgggtgctggtccctcactcctgtccctcacgcgctggccatgacggccctggcaccggctgccctctggaggccccagtaagtccgcaccaccccggcgccatctcctgccagttctgcctgaggcagcagctgccaccaccgcgcagacacatcctgctccctcctgactttcggaggcctggcctggcatcggcctggcagtctcggcctccccgtcggggttggtgtctggggatcagggtgaagacacagcgacccgggcctcacccagggtctgtgtgtggctgttctgcagcgctggacgtctgaggcctgtgtcgtccccacagacgc

SEQ ID NO: 247444 - DNA, 522 bp, Homo sapiens
  chr1:2259051-2259573
  hypo
cagaggctgtggacggctgcgagtggcccgtgcggcttttagaagcacagacaggagatggggtggacgaggcggcacagggggagggccacgaggaggggcaggcgcggcgggcaggcggcaccacctctgcaaggctaacaaggtgctgcgcccggctccctcctcttgcctgtgcctctggcggtgaccagaatggcccattggccgaattggccgccctgacgggtgagggccgctttcccaaggccccgcatcgcgcctcggcgtccccgcatgagctcctggtcttggcaacccccttactgcatcttcccaggccagatgctccgagaagccaagaggcctcccgaggagcccgtcacaggcttctgtgtgcagacagcagcgagccaccgagcagagctccagggagcggcatcagagaggccttggccgagtgcaggccgagcaagggacctctggcagcctgtggcccttgaccctgtctacccggacccaccccttcgggcctaggctcgg

SEQ ID NO: 247445 - DNA, 353 bp, Homo sapiens
  chr1:2263174-2263527
  hypo
gtaacaaaggcgcgcgtttctcccgcatgcgccgtccttcttatgtaaccactgccgctcctctcccgcggctgcgcctctcccgccgctgcgcctctccctcgtgcggctctcccgcccctgcgcctctccctcgtgcgcctctcccgcccctgcgcctctccctcgtgcgcctctcccgcccctgcgcctctccctcgtgcgcctctcccgcccctgcgcctctccctcgtgcgcctctcccgcccctgcgcctctcccgccgctgcgcctctcccgccgctgcgcctctcccgaaattacaggctggtgtgtcacttttcatctttgtcgatttttttttcagtcatttc

SEQ ID NO: 247446 - DNA, 420 bp, Homo sapiens
  chr1:2265943-2266363
  hypo
gctgcatggagaggcggggctcccttgggggagcaggcctggttttgggctgcctgtcccaacacgacgagagggccctggctgtgtggccgtggagccggcaggaggcaggggaagtggccgctggtcacagatgtgtgccccgaagagacgacatcatttgaacactgaacactccgactccgcggccaggtcgtcctgggattgaaacaatcctagtccaacgacacttaactcgaggacagtgcgagccctttggctgggaggcccaggctgggagcagacgccgacccctccgttctctcaggtggaaaagaacgaaagccttctttctgctgaaataagacgttccaacatcaccctcagcgcggaggttgccacggttctggagcgaagtggaggtgccgccctgggcgttcg

SEQ ID NO: 247447 - DNA, 839 bp, Homo sapiens
  chr1:2267138-2267977
  hypo
gggtgggagcggggcgggtgctggtcactctgcgagcaacccagcagctcctccacagtgtgcggggccaggcgagggctggtgggacgggtccccagggcacatcagcgggggcctcctcgcctccatagcccagcccagcccagcgcgcagctgcccccaatttgtagacagagtcccgatttgaggtggcagctgttgctggactccgagccccgagccccagcttcctcctggtagaaccggccggttacggccctgcatgtgctgtgcccgtagcactgccaggcccaggatggtgagatgtgacggccacaaaccccccacggtgtccccgcctgcacgtgccgcggtgtgcacctggtcccactcctgtcctccagctcacagagtcccctcaagccactgccctgaaccctggccaccagccgtcttcctctgagaggccccgcacccctcctgcctctctgcttctgcatgcccacagcctggtccgcccggcgggtctgggagttgtggtgatcgaagcagatggaccggctccagctccacccacttcatgccagcccaggcaagtcgcagggcagctgttagccccgcgagaccctggctggcgggggggctctctggagcgaggcccgtgtaggctcactgtcttcccagaccaggcccttggctcccctgggccttccccgtcctcctggcccagctgatgaggaggccacagctgaccctccgaacacctgcaggtggggtgggctcatcctacctgctgcctccaggaggctcctgtgccgtgggtggtgtccccctggggtgcaggccgcctctggatctgc

SEQ ID NO: 247448 - DNA, 443 bp, Homo sapiens
  chr1:2268384-2268827
  hypo
gcagcgggcacagacgccagtcgcgatgccatcttggtgggggcaggtcagggggcagggactgtccatcctgggtgctccctccggccgccgacaggggaggtgggggtcctccgtgtccacggcctctgacgcccccgcccccttctgagtccaccccagcgccagggagcccagcgctttgcagtgggaagggtctcccatcagcagcccccgtcagccgaggcactcgcttccagggtagggccgggaccggggccctggccggagaggctggcgctcaacagtacagctgtgtgccctcctcggagcgcagcatgaggaggaagatggttctgccccagcggcccatcaagatggacctggcgtcaggacccgttctccacaggcgtggagggagacaccgagggtggctgcgagtccctccacgtggcggcagaccc

SEQ ID NO: 247449 - DNA, 145 bp, Homo sapiens; identical to SEQ ID NO: 206456
  chr1:2269856-2270001
  hypo

SEQ ID NO: 247450 - DNA, 426 bp, Homo sapiens; identical to SEQ ID NO: 206457
  chr1:2270534-2270960
  hypo

SEQ ID NO: 247451 - DNA, 463 bp, Homo sapiens
  chr1:2273549-2274012
  hypo
caagataaaggtcaccgtacgacctcgggggcctcgggaaccgagaggctgagccagcccgggacgggatcgggcagcttgaccgctctggagggaaattccaattcattatctttttacggcggactcaattagactccctagtcacctgtgtagggcaccaggcagcaggcagggatgctgcccgaatcaacaaggctgctcgggccaggccagccccaagaatagccgcggcaggcgcaggacctggccagggggagggcaggccgaagcagaaacgttgacttcgtttaagtggattaaaaacataaaacgttattggccctaaggggacgagaacagtctcgtttggaggtgaccagacacagggcattagtctttaagagtccatcagtcagccgagaagcgcggctcattagagacgcagggtggggcctggagaagtcagcgggaacacgcgggg

SEQ ID NO: 247452 - DNA, 1260 bp, Homo sapiens
  chr1:2275775-2277035
  hypo
ccggtgagcacactcgacaaggtggtgcggcgagctggctccgagcgtcccccacagggccacattctcactattggggtggcaggaaggcccagcgaccaggagcatgtgtggggtctgggaaaggcctgggggacggggtgtggggtgcaggagccccaaggccgatgctgctgaggaggccaggagcggggaccgcacagacggcagttcctctggaggggggtcccgtgtgggccgggctgtgcaaaggacacactggtccctgctggcctctcagggcaagcgtgaggaccctggcctgctccggcctccttccctgggggcctcgtccctgcgctgcacagatggggcccggccgccccagtgggaagggaaagggggagcgctgtgccaactcacaggctctacgagccacaacagctgcctgcagagcctgggggcagggctgaagctggccatggaggaccttgggggccacctccaccttccagcagcaaatgccaagtccccgaatgcagaattctgccagagggagcatgaccgtctctctgttggcacaaagcgagagcatcaaagacagcgtcagcccccgcgagggtccacgcatgctcacactctgcgctcatggatggccacacacaccctgaaaacggcgtcagcctccgggagggtccacgcgtgctcacagcactcatagatgaccatatgtgccccgaagacagtgtcagcctccaggagggtccacgcgtgctcacgctctacgctcatggatggccacatgtgccccgaagacaacgtcagcccccgcgagggtccacgtgtgctcacctgcgctcatggatggccacatgtgcccgcaccctcgcacaggcatgggcggtccccaggctgccacactcagggtctgtctgtgccccggcacctccaagccattccttccaccaggccagggccaggcctggacacctgccacctaccacccgctggggcagcagccacgcactcccccactgctccctgttggcggccaggcatgggccggccttgttgggggacacaggacaattcggggcacttgtcttgcctccgtcctccttggagagcctcgggctcaccctacgtggctctgaacaacaagggccaggctctgcaccgggggaccccctgccctgccagccggaccctcaggccgctcagagggccagtcccagcacctgcccctcgccagtggacacaggctgccggcagcattgctac

SEQ ID NO: 247453 - DNA, 693 bp, Homo sapiens
  chr1:2279094-2279787
  hypo
cgtggctgcccgtgcgatgctcccagtggcctcagggttaggttctgactgcgggacagggaggtggactgcacggctgctgcagccttgaggctcctgctcggcccccgctgcccccgtcacccccctgccaccctgcgtgccgggtgcacaggtattttacattttggggtaaatgtttaatcaaacatttacagaaaagtcacaggtagagtacaaagaatgttttcgctgggccatctgaaagtccgctgctgaatttgctcctcactccacatcctcgagtgcattttacaaaccgggaagtttttcgcctcacgtaacccagcacagccgtcccggggcagggcacgcctcggggtcagaccccagcctgggcttccccgtggcccagtgatgtccctcgcaggaaggagatcagcctgggaccacacattgcagcgagctctcattgtgtcttcagtctccgtcggtctggaacattcccgggcctttccctgactgccatggtcctggcgtcttcgaagcttccaggccaggcctttcagggaaggttcccccgtgtggccgtgtctgaggtctcatcacagagagacccgggttacgcatctttggcaggagaggcatggatgcgacgctcatgcctttcatggatggctctgctcagcccacgctgccaggtggggcaggatt

SEQ ID NO: 247454 - DNA, 37 bp, Homo sapiens; identical to SEQ ID NO: 206461
  chr1:2283082-2283119
  hypo

SEQ ID NO: 247455 - DNA, 324 bp, Homo sapiens
  chr1:2288153-2288477
  hypo
acactgtgctgcgcgggagggtttgaatcgcacacactgctcactgcacaggagggtttgatgtgcactgctcgctgcaccggagggattaagctttgattcaactccatgagtaactctggaatgatccctgtgaagtctaggccgcacattctatggaagtgcagttctcactggccccagccttggggggcagagttgggggctggggggttctgccggagcacctgggcctcatctccacgaagaaacgtgaggcaacccgtgcagaagcggagcagcgggaaaccctgacctcgagagagcagtcggcgccgcggcccc

SEQ ID NO: 247456 - DNA, 35 bp, Homo sapiens
  chr1:2303587-2303622
  hypo
gacactctgacacacgtgcacgcgtgcccccccac

SEQ ID NO: 247457 - DNA, 720 bp, Homo sapiens
  chr1:2303823-2304543
  hypo
cacatgcaacatctcgtccgcatcttcactgcttaagaacctgctgcctgtttctcttttggaaacgttaggtcatctccccctggagatgcttactcttggcaatttccccgtggtcctgcagcagctgaacgttcaccgagaagggagacccttgggccacttccatcacctccggacccaagatcacgatcctcgtagcttgttctgggagaggacagagtgtggctttagcggtgactggcatggtcccccacccaccccatggctgagtcagcagtgggcaccccaggaaccgaccagagcccagtgtggcagctggaacacaagcacatgcgggggccgaccctccgcaaaccaccttgcagagcagcgacctgggcagtcgtccacactcagaccgtgaggctcggctctgctggcctggagcactgtggaatcgaaccaagtggaccaccggggccacggagcatgcaagagacacaagtgggcggtgtggggctgttgggttttcctgcccgtggaatgttcccgcacgtcttcccgctggtcgggatttaggccctgcattccctgcatctgagtcagcaccctgaggtgctggacctgggactagggcaaggcctggcaagggtgggtccaccggctggccagtgcctcctggcagccagggccgcccctgctccaccggggcctgcagggcatcgctgtgggtggtgt

SEQ ID NO: 247458 - DNA, 452 bp, Homo sapiens
  chr1:2307733-2308185
  hypo
tcattcacgctggacggggagaggcgcgagtcagcgcacagctgagggctcttcagggcgtccggggcccccgtcaccgtcagtgatgagaatggcgatgtctggtctctgcccccttccacctgctcggcctctggaaggtgccccgggctttcaggaggagggaggtggagctgcggggcagggctgacaccagctgcaatatggcgtccagggtgagtacccagtgaggctgtggctgggcaggggaagccagacacactcgagtcatgagaaatgcagaggtgcagagcccgcctttggggtgagtggctcctcccatggttggtctggggctgcggctcacgtatgtggcacgagcctgcctggcatccccctccctgggtgcgcagcaatcaggtcagggcttggcatcctcggtacccaccgctggtgtccgggtgggagggctg

SEQ ID NO: 247459 - DNA, 482 bp, Homo sapiens
  chr1:2309924-2310406
  hypo
gaggagaggaggctcggggactgcggcaggcaaagccgcccagaaggagccacctgctccgtgcagtgagcaggtgctcggcacccagcggcaactccgggaaagctggcgtgtgagacagccaacactcacggcgcagctgatacagccagggatgcccggagggccgcgctgctgccaacatgggtaggagacactctgatgtgcacacacacgtgtggcctctactctgtctgctccgtctcccaccgaggatgttctggaggacgtgtggggcctgcccaagccctcgggtcctgggaggtcgagcagtaagctgtaaactaggagtgtgggggacggagatggctgaggcgtcacaggctggtgggggtgctcgtggcccaggacctctgtggcttccgggaccggcctgagccgcgtggctcctgtccctgtggaagaggagccttctctgctttgggatccgctgttcttatttt

SEQ ID NO: 247460 - DNA, 76 bp, Homo sapiens
  chr1:2315089-2315165
  hypo
tgtgacctgcgctgcgtttagagacctgcacgcgtggttcctatctgttagtgctgctggacgctcagggggcccc

SEQ ID NO: 247461 - DNA, 87 bp, Homo sapiens
  chr1:2316415-2316502
  hypo
ccttgtaggtggagccgtcggcgcagcgcagcaccccgtgtccctgacgccggtcccggacccagtcgccgtcgtacttgtcaccgt

SEQ ID NO: 247462 - DNA, 619 bp, Homo sapiens
  chr1:2328571-2329190
  hypo
agacaagtccacaccctacacggctgtgcgatgggtcgtgacactgggcctgagctttgtctacatgattcgagtttacctgctgcaggtaggtgtgggctgaagtgacgagacttggctctgtccacgttacctgggcgtgatgtttgtggggatgttgttgatccagtctgtcttgcaggaagtggtctctagtaatcaattttcagctaaacgccaaatgtcagaaagatctcagtgactgtctttaacgaacagggttgtttatgattcacccggagtcgcctcgccaggcttctcagtatacccaggccgtcctgagcccagcctggccctgccctgggcacgtccaggcctggacagtggagccgctggtgtccctccgaccctgctgcatgatgctcaggacaaggttgcgctctgtggctgcctcattccttgggtgaagagtccatgccttgggtgtcatgaatgactcggcgtccaaagggtttatgtagcttttcctgagctctcccttgtgtgaggccaaagcacagtgcaggttgagacgccgagtcaagtaagagagacagtgaccgaagggggtcttgagggtttccttcgtgtgttttcgggc

SEQ ID NO: 247463 - DNA, 201 bp, Homo sapiens; identical to SEQ ID NO: 206465
  chr1:2329575-2329776
  hypo

SEQ ID NO: 247464 - DNA, 122 bp, Homo sapiens
  chr1:2330458-2330580
  hypo
gctctgggccagcatcgctcaggtgcccgggccacccgagcctgtggtgtagcttgagcatgtgcttcttgagaaaagcctccttttctgctgcgctccttgtggggcgtctgtggcttcag

SEQ ID NO: 247465 - DNA, 316 bp, Homo sapiens
  chr1:2331318-2331634
  hypo
aggttaccttttcccgtagccagagggttccacaggcagctcactgtggtgcacagagaccgccgggactctaatgccagcatcgggtcgggtcaggctttgggcggccttctctggtttctgaggagctgtgagctgaagtgttcctggtgcttcgtgctccactattggaagacttacgcagctcctgggcctgcctgggccaggtaggggccctgagttcatgcctgactggccagccccaggcgaggaacaaacaactgcattccaggacgtggtggccattgagggaaaacccacacgcagctccctgcca

SEQ ID NO: 247466 - DNA, 57 bp, Homo sapiens; identical to SEQ ID NO: 206468
  chr1:2331902-2331959
  hypo

SEQ ID NO: 247467 - DNA, 218 bp, Homo sapiens; identical to SEQ ID NO: 206469
  chr1:2334771-2334989
  hypo

SEQ ID NO: 247468 - DNA, 735 bp, Homo sapiens
  chr1:2336000-2336735
  hypo
agtctagagggtcacggcccccccgccctcctccgtctctggcaagctgaccttgactaacccaggaatacagggtcatcctcattcctaagtaagtcaaacagcaagacatggtttgcgcgggtctttgccggaagccggtcctgctggccaggtgttttacgtcagcagggaaatgtggcacacgccctcgaggcattttaacactgcgcttcaggaaatctcaagttccatcttgtgttagtaacgtacccacattttgctggagttagtttattaaagatgcctacggtgaactctctggcgcaggttaaatgcagttttgaaaacctggaaacatcaaatggaggcgggaaataggctggggccgagctgaggggctgaacacagcagtgaccgtgggtcagcaggtcgcctgcccagcaggccccccaggagagggctcgggcgcccctggcagcccccatacccccaggacctggctcgtgagtgcgtctgggtcaggaagagacctctctgtgcgtctcaggctgagatgcagatttctgttttctaaaactggaagcgaccttgacgtgtattgaaggtgtgtgtgccaaatgcttccgacggaggtgctggccttggttggtttctctctgccccgtgtggtcatcaagtcctgggggatgtgctctgcccagccgccctcggggagagcagcgccgcctcccatggggccgtggggctgctgtt

SEQ ID NO: 247469 - DNA, 390 bp, Homo sapiens
  chr1:2337854-2338244
  hypo
tgcagccaggtgcatcttgccggcacagccgctgaccaccccaggacggcagcaggctcccacctcaccttgctgctgcaccacgcggtgatgcactcccagcagaacaggtggccgcagggcgtggctgttgggtgcctgcgctcctccaggcacagggtgcacagggggtttctggaaacggctctctcctccaaggaggccctggggaaggtggggcagagcgtcaaggtgggtgcaccttacaggtccttgtgaagtgcccaggacacccccagcccccatgtgtggcccccgcacgcacctgcggtgagacaggccgcggtgcagcctccactccttcctggctcgctgccgctgcctgaaaccgtacagctgcagccccatgga

SEQ ID NO: 247470 - DNA, 192 bp, Homo sapiens; identical to SEQ ID NO: 206473
  chr1:2341160-2341352
  hypo

SEQ ID NO: 247471 - DNA, 498 bp, Homo sapiens
  chr1:2359880-2360378
  hypo
actgggtgggcaagcgtggactgcatctgtcctgcatggggtcctgcgtctggctcgcccggtgccgtgctgtggggcccacgccaacggctgacctcatggtcctccgtggcctcgcctaggcttgcggcagccgacgtggcgttgttgcctaattaggttggactgtgccagccccagcggagcccacgcccggcccttgcgccggcagacgtgtcggggcacggctcctgcactcccactgccgcaggaactgctcaggaacctgccggtctccggctgggacggtggctggatcagctcaagcctccagggccctgaggctgaggggctgagtgctcattccagccgcctcggggaacccgggctgggagaccccatgcctgggggtgagcctggagccagggcagtgcggtgagaggctccggagagagggctgggcaccaccaggcttgggtgaggagggaggcctctggtcgagagcgagctgggagtcct

SEQ ID NO: 247472 - DNA, 223 bp, Homo sapiens
  chr1:2377213-2377436
  hypo
cacacacggattgccgtaagccgcagcagccaggtctgacaatacgagttgtaattggattttaatttttaatgtccacaacacatgaagagcttcggaccaatttgtgtatcttctgttactctgcgcctaataggaccgcttcattagctgctgtcgcacccacagtgccgtctgtccgggaacggagggagcctggcccgagccccatgccagagcccca

SEQ ID NO: 247473 - DNA, 268 bp, Homo sapiens
  chr1:2384535-2384803
  hypo
acctccacccaggcctgggccgcccatcccccaccgtgctacaagcctcctgcctgtcccccgatcttccagtggggcagccgggacaatttgccaaaacgcaagtctgccccccgacagcgccagtgcccccactgtgctcgagatgtggtctgtgggcgccgtgctccctggggcccttccccgtgtggtgctgcttgggaggtgaagacccctgaggcatatgtttccagtccgccctgttatcgcccattgcaaagatgaggac

SEQ ID NO: 247474 - DNA, 161 bp, Homo sapiens
  chr1:2403083-2403244
  hypo
tcctccccctgctctggggccggtggaaggtggagggcaggtcaggtggcgcggccgatggagtatggctggccatcgagaacctgtccccacgctctaggacactggccgttccagctcccccagggctctgtgcacacggaccaggagccacccaaggg

SEQ ID NO: 247475 - DNA, 54 bp, Homo sapiens; identical to SEQ ID NO: 206475
  chr1:2411364-2411418
  hypo

SEQ ID NO: 247476 - DNA, 275 bp, Homo sapiens
  chr1:2412168-2412443
  hypo
tactttccccatgccgccctcgcccaaccaccctgatgttaggagttatgaaaatgcagccttcagctgagctgcggcctttattgtctgtaattggtttctgtttccggaaagcctgctgggccgggggagagaaactctgcccgtcagcaggtcctggttccgggtggtgctggctgagccagcaaaccaggccctggggccttgctgctttgctgcagcttggaaagcgggttctgtgggtgcaagtgccaggccctggggtctctgacacg

SEQ ID NO: 247477 - DNA, 35 bp, Homo sapiens; identical to SEQ ID NO: 206477
  chr1:2412563-2412598
  hypo

SEQ ID NO: 247478 - DNA, 238 bp, Homo sapiens
  chr1:2428212-2428450
  hypo
gcgccgggcgaggtcgaggactggcagtctgatgcccggtcaccggcgccacagcggcgtccagctggcaggtgtcgtccttcagcgagaccaaggcccaccagattctgcagcagaagccggcgcagtacctacgcttcaaccagcagcagctctcccgcatctacccctcctcctaccgtgtggactccagcaactacaacccgcagcccttctggaacgccggctgccaaatggg

SEQ ID NO: 247479 - DNA, 114 bp, Homo sapiens
  chr1:2430550-2430664
  hypo
ggttttcatggtgcacatgccggagatcgcgctggtccgcttcctcgtctgggaccacgatcccatcgggcgtgacttcattggccagaggacgctggccttcagcagcatgat

SEQ ID NO: 247480 - DNA, 175 bp, Homo sapiens
  chr1:2437269-2437444
  hypo
ttaccaggtgcccgtcggagcctgcgccaggcccagaagacaccccaagaaaagacctggcctgtcctcagagggctgagctggacaggctcccagggtaggctgcaaagcctgctcctcaggacgcaggccctaaccccgggccacaggccccccaacccgggggactgctctg

SEQ ID NO: 247481 - DNA, 149 bp, Homo sapiens; identical to SEQ ID NO: 206478
  chr1:2439887-2440036
  hypo

SEQ ID NO: 247482 - DNA, 200 bp, Homo sapiens
  chr1:2445342-2445542
  hypo
ggacaggatgccccgagccagcgggacagagacaggacacgcggtgccagcgggacggggacaagagcgagcggaaggccagggcacactgcacttactttggagtagggatccgggaagttgaactcgttcagacagtgctccctggtgtccagcaggctgcgcacggtcagggtcccataggcgctggggacagacac

SEQ ID NO: 247483 - DNA, 361 bp, Homo sapiens; identical to SEQ ID NO: 206479
  chr1:2450394-2450755
  hypo

SEQ ID NO: 247484 - DNA, 177 bp, Homo sapiens; identical to SEQ ID NO: 206481
  chr1:2463122-2463299
  hypo

SEQ ID NO: 247485 - DNA, 450 bp, Homo sapiens
  chr1:2468442-2468892
  hypo
cctgtatgcatgtacttatgtgtgtgcacttgagtacgtgtgtgtgcctgtgtctgtacgagtgtgtgtgtgtgcctgtgtcccagtgtgtgtgtgcgctcatgtgtctgtgtaccagtgtgtgcgcttgtgtacgtgtgtgcccatgtgtctgtgtgtaccagtgtgtgtgtgtgtgcatgtgtgcccatgtgtgtctatgcatgcatctgcgtgcatgtgcccaggaatgctcacgcctgctcagatgtcctcagctgggccacccgtccccaccctgccccgctgccctaactcccagagtacccgcattggccgagcactgctctgtgccacgtgagccctgggccctggggtgactgtggggaaaaaccctgacaggagtgcctctgccctgccctgcccagtaggaacggtgctcaaccaggcccctggcggccctccgaggca

SEQ ID NO: 247486 - DNA, 176 bp, Homo sapiens
  chr1:2483772-2483948
  hypo
gcaatgatgtaaacgcttagtattgtcctggaacctgcctccgaaaaggccgtgcgctcccgcctgggatcctgctgctcctccgccggccgccccgcacacgctccgctgcctctctgggctggctcagccgttgcatgttcctgcgtgtgcactgagacgtccaccctggcacg

SEQ ID NO: 247487 - DNA, 232 bp, Homo sapiens
  chr1:2507040-2507272
  hypo
caaggctcacaggctcacagcgggtgtactttattggacgtcatacggaccctgaagcaggtgatgtttccaagtgggaattggtaccaggctgtcctatgtctgtccatcccttgggtccgtctgcacggaacagacccgtggcccacaaccccagtgtggctgcagcctgatgaatccaggagtcttggcccagccccgaagcccctgggaggtccggccccaccctggg

SEQ ID NO: 247488 - DNA, 296 bp, Homo sapiens
  chr1:2520300-2520596
  hypo
atgtggctgtgaggtgcaggcggcctccggggtgccgtgactgcctgcccgctgctacaggtggtgataaagtgctcctgcatttcgtccagaagtccccaggcgactacgtccccaaggagcacatcctgcaggtcctgggcatctctgcggaggtctgtgccagcgacccgcctcaggtgagctgggccttgggggcgctgcctgccagcccacgccctgcccctaggtcccctgggaggagcactcggcttggctgggagctgagccacagcgctgtgggcatcatgccaatt

SEQ ID NO: 247489 - DNA, 193 bp, Homo sapiens
  chr1:2520930-2521123
  hypo
tccacttggaagaactgttccggaggcgctgggtcgggatgccgaacctctcctgatccgccggcagcaacgagccattaaaactgcagttcctgaccacgcactgcttcgcaggctccgagccctgcatcctccacagcccccgccttgctcactgttgggccctcagggcgggcagggtggctgtgagtcc

SEQ ID NO: 247490 - DNA, 89 bp, Homo sapiens; identical to SEQ ID NO: 206485
  chr1:2522316-2522405
  hypo

SEQ ID NO: 247491 - DNA, 214 bp, Homo sapiens
  chr1:2527321-2527535
  hypo
tggggtcctgtctgcgcctcccggggctgccttctccccgtggggaccgtcaggaggctttgtcggggcggtgctgcccgtgcccagatccagtcggggctgccctgacctctgcgagccacataccttctcctgcgccttcttcttggactcctcgtccatccagcccagctcgtccagcgtctccacaaacactgtccgcaccttgtcaatg

SEQ ID NO: 247492 - DNA, 145 bp, Homo sapiens
  chr1:2537288-2537433
  hypo
ggttcaggctgtcccgggcctcgcagcacccgcggctcccccagagtggggcgcgtatttgtttcgtgtgtttctctttggcctccagcccgtggccagcagtggatccctgaggtcaggcctcctgccccggttccagccccgc

SEQ ID NO: 247493 - DNA, 192 bp, Homo sapiens
  chr1:2537660-2537852
  hypo
cccctgcccaccggcgcggctcgtacgtagatgatgtgccggctggagttctggtcgtcgttccagatgaagaggtcgatgaggacgcgcctgttgaactgtgagttcatcagcgccagctgccgctccagctcccactcgagtcctggggagacagtgccccgcactggagactggcgggccctggggccc

SEQ ID NO: 247494 - DNA, 760 bp, Homo sapiens
  chr1:2716539-2717299
  hypo
accatgtggggagggagtggcgggggcagctttcaccctggctctgcaggggccatgccgtcctcctaccttggggttcgctgccggtgggatgggcctcgagggcccggctgcatgctgccaggcagtcctcaaacctgccgctgtggagcagagcttcaggtgacagggtgtcactccgggtgcccctggggtccagagccgccaggagtcgctggccaccggtctcctgctggccggcactgtgcccagcctccgggtgccccgagaggtagtcctggagggcactgagcagcgcggggaggtggggccgctggtgggtgcgaatgaaagctaccgtccggtcggcgctggaggcgaaggcctggagataggcggccacaccatccgctgcctgcaccccggacaggacccaggcgagggcgcgggtcagccgcagctccaggacttgctgtgcatgagagtccagcagggcgctgcagcgttgcaccacttcttcgtgacgcccgcgggccagcagacctgccagcaggtgcaggatggcggcggggtggtccgggcagagggcgccgaggaaggcagaggccagcgaccctgtcagggagaccactgccatgccgtcccagtggatggcggggatctggctgtccccgcggcaccaggactccagggtggccaccaccgccgccccccgagcctgggccagggcagtgcgcacactctgcagggctgagggggcgtggcagctgaatgcagccag

SEQ ID NO: 247495 - DNA, 280 bp, Homo sapiens
  chr1:2719757-2720037
  hypo
gtctcggagggtcccgagctatgatcacagcccctgcctgagagcagcacacctggatgcaggtaatcccagggccgcctccacgccacctcccaatccgcactctcgtctctgattctgccacagacaaaagtgggcggctgagccggacagggaggccgaggccggtgcctggtagtctcagggtctcgtgttcgggtttgtgctgctttagtttatgagtcaaaaggatttccaacatttccaacttgaggctagcggggggcgggggatactgctc

SEQ ID NO: 247496 - DNA, 304 bp, Homo sapiens
  chr1:2725609-2725913
  hypo
gtggcagccggcgccgcgtgtcgccacccacacaggaaaggcgagattggtggcagaggccgtgtccgcgtcatcatgggagctgcagctcttcccttagttccctgcacccacttattgaggggggctggtcctcctgggaaaggacctggcagcatccccgggcgtgggacacatgcctcgcagcagagttgggggacacggggctgtgcccgccctccctgcactagaaccagcagcagcaaacagcccccagctcggccgctgaccatgtcctgctcgggtctcccgggctggccctggc

SEQ ID NO: 247497 - DNA, 224 bp, Homo sapiens
  chr1:2726375-2726599
  hypo
atggcaggcgagtccgattccttggatccggcctggatctgcctgagcgagagcctcctgggagtccagagcagcaagtggagaactcgctctgagaagcgcgtggactccctggcgaggccgtggccccagctgaacctatggcctgggttccaccaccctcacctcccactgctccttggtcacagtgggcccagcaggccacagcacggcattacgggacg

SEQ ID NO: 247498 - DNA, 232 bp, Homo sapiens
  chr1:2726823-2727055
  hypo
ggggggggggtacacgtgctcctggactgaacgctgctaccgtaacttcatcagcaccctccaggcgaggaccacgtgtccagcccctgctgtgcacacgactgagggttgtcggttccccgagctcagctgaactccctcctgccagctagccgtccccatcgcccggactggggaacagtcctcctggggatgccgcactcctctccatcattctcggtgcccctgctag

SEQ ID NO: 247499 - DNA, 151 bp, Homo sapiens
  chr1:2746955-2747106
  hypo
tgctctgcagagcccggggaaacggaggggttggctgtgggtgccggggccatcctcggagctgcctgtgtggagacgtcctatgtccatgggccacgtgagtctactgagcacttgagacgtagttagtgtgactcgggaatggaatttt

SEQ ID NO: 247500 - DNA, 91 bp, Homo sapiens
  chr1:2752977-2753068
  hypo
gggcattcacgctgcgtggctactgagaaggtcctagaacagaccacaaaggtaacagccgaggacagcgcagaggcgcccagcaccgagt

SEQ ID NO: 247501 - DNA, 68 bp, Homo sapiens
  chr1:2798429-2798497
  hypo
gtggcctcagtcagcgcggcttggagagcaccccccaggcttttttgccgtcacggtggtgtagacca

SEQ ID NO: 247502 - DNA, 190 bp, Homo sapiens
  chr1:2810936-2811126
  hypo
gtatctcgggaccccggggccccagggttgttttcaggagatgcggcctcagtggaagggacctttttttctagagggggctcaggcctccccaggccaagggtcctcgcttggctggaggcgtctctgctgctttgcctggtggggagggccccagtctgagtgtgccaccctccggagggcgtctcct

SEQ ID NO: 247503 - DNA, 40 bp, Homo sapiens
  chr1:2823319-2823359
  hypo
gcagtggtggatccacgccatcacacgcctgtccacaccc

SEQ ID NO: 247504 - DNA, 247 bp, Homo sapiens
  chr1:2823836-2824083
  hypo
ctgtgctccccaggtcaccccgagcgcctctgcactctgcgccagggtgagagccggcagagagacgtccctgggggctggtggcgcttggcggttctgggaagcaaaagttggtttggaatctttgttaacagctgggcatacatcttttaaattataaatcgataaatagttaattcaataatagaactcttttgaatatttcatgctgcccatgcgctgcgacgctctgcatagatgatgaagt

SEQ ID NO: 247505 - DNA, 149 bp, Homo sapiens
  chr1:2827813-2827962
  hypo
gcgtgggatgatggcgattcgtctcccatcttcaaggccaacacagataggcggtccactgtcccagtgggacctgacgtggcccagagtggacggtggcccctacccaggcgcgcgcgtggccccagatcccgcgctgagtccctgca

SEQ ID NO: 247506 - DNA, 101 bp, Homo sapiens
  chr1:2828207-2828308
  hypo
ccatccaccagcgccgttcaatatatcccgcgccggcgtttctcacccactgtcaggaggctgcccgagggactccgagggcctgcggcatttagaggctg

SEQ ID NO: 247507 - DNA, 290 bp, Homo sapiens
  chr1:2833832-2834122
  hypo
tcgacgtcgtgtgtcgtggttctcgtacctgcgtgaatatttaaaacatgcaaacatgtgggagatgcatttgctgggaacaaaaggaacacacatatttaacccctgaaataaataaataaggcgaaggtgcgcagctggagacagggcatggagacagggaaggcagaggccatgcatatttaacgtggcggctccacgaggctgcgtgtgagcggacgtgtgggcaaaccaccctgaagcatcgtggcgaggcgggcaggggtgcagggtcccggcagggcagccca

SEQ ID NO: 247508 - DNA, 648 bp, Homo sapiens
  chr1:2846736-2847384
  hypo
catgctcacacacacgtgcacacacatacatgcaaacacatgtgcacacacacacgtgcgcacacatgtgcacgcaggtcccagcatgtgggcttcttccgtgggcaggcacagaggtcgggtgtcggcccagaggttcatggaggcgctaatgagcggctccgggcccgcaggagatgcggctcacacaggtcagatttcggatggatgatgaaggaaatgagggccaggccagcctctggttacagtttaggaaaaacacgaggcgcccttctctagttcaaaaggcagagagaggcagacccaggagctaggggggccggacgggattccagtccggtttcatctccggatgccctgggaacccgcctggcgtagaccgggtgggggcggtgcagacaggaccctggagaacagggctgcggtgcgcagcagggggtggccccggtcacacagtgtcccccatggaggggcctcgatggccgggctgcgcatggcacgtgtcgtgtgtggatccacagcagggccgctgcccccacccagcgccagccgggaggttgggaagtgttagcgccaggagcagctttcagctgaaaaatccccagtttattaactttgctccagaagccagggcgtctgttatttatg

SEQ ID NO: 247509 - DNA, 546 bp, Homo sapiens
  chr1:2850532-2851078
  hypo
cacatggcctgcaccggccagccgggctctaacatgtcctcaactttcaggaaaccagagcctccgagtaagtatcagatgagttgctaatgttggaaaaaaagcgagaaacatgcttgggggctctgttttacggctgcacttgaagtcggaatctgcgatcgtaacccaatgctggcctcgccaacgtgttttcggtattgtcgggataattgaaagtccagacaaatttggctatcagggctccaggcagcggaatcccatggtggcccctggtgtgatgagctcgccgaggccgtctcaggtcctgcgcccaccacggtcttcgggagcagctgtcggctttgcaaaagccccaggactttccgggtggacatggggggcttggctttgtcaccgggacctcttgaaaggcagccggtcctgggcctctcatctggccccgcacccttcttggccaccgacgtggaaggcagggcgccctgtggggtgagcagggccatccgtgcctcggggtctgccctcggcttgtgtcacaggcagaat

SEQ ID NO: 247510 - DNA, 258 bp, Homo sapiens
  chr1:2859551-2859809
  hypo
cacaattccaacctcgggaaaaaatgtaatcaatgcgggagggcttaaggataaaatgcacatccgtgtgcacgcacacgcgcgtgaggccatgcacactacccacacgaagctacgagaaggacccagcggcttgccagggctcgtggtgtttgccgcatcctctccagcccatctaacccttacgatgcaatgtggcatctcttggctggtgctgggctgggcttctgggcaaagaccacccgctacacaggcacc

SEQ ID NO: 247511 - DNA, 276 bp, Homo sapiens
  chr1:2878440-2878716
  hypo
gtctcctgagccggcgattcaggcctggtatggctgtcttcactcctggcccctccatcccggggaaccagcggcctctgctctgtgggacgctaagcctcgcctccactttctctcttcgatcacggccgtttcatctcaaattgccaccaaggactctctgagctgggaaggccaggcttctgtgcctcggtgtgcaggggtgtgtttattccttccaagtaactgcattggcaaaaaatggaaataatcaatggggaacgatgaccggcattt

SEQ ID NO: 247512 - DNA, 186 bp, Homo sapiens
  chr1:2908573-2908759
  hypo
tcttttgtgcacgccgcatcttcgtgaggtgcattgcgtcactgcagggagaaatcgtgcttgttcctctgcagtatcccctcatttcaatgtctatgtatttatccattctaatatgcatggactttcaacaagtttccagttttagactattttgcttaaaagtcttaccgacattcttgtaaa

SEQ ID NO: 247513 - DNA, 215 bp, Homo sapiens
  chr1:2918443-2918658
  hypo
cggcaccgtgtcatcgtcactggctcaagaaatagcctgcaaactaaaggacagcgcccaccttctcggacgtccacattctcggacgcccacattctcggacgcccacattctcgggggcgcccacattctcggacgcccacactctcggacgcccacactctcgggcgcccacactctcgggcacccacactctcgggcgcccacactcttgg

SEQ ID NO: 247514 - DNA, 240 bp, Homo sapiens
  chr1:2936252-2936492
  hypo
cccgtgcacgctatcgaacaggagcggggttgggatggcgcctgcccctggaagatggcgttcaaggggggcaccctctgcccgtgcctgctatcgaacaggagcagggtcgggatggtgcctgcccctgccccgggacactctccgtgtcccccagcacaggcctcaggtgaccttcagcaggacctgcggggtgaccttgatgtgggcagggaggagctccagcgtctgggtcaacag

SEQ ID NO: 247515 - DNA, 743 bp, Homo sapiens
  chr1:2938631-2939374
  hypo
ttcgagaacttcggcgtgcccgctttctacctgtcggaccaggcggtgctggctctctacgcctctgcctgtgtcacgggcctggtggtggacagcggggatgcggtcacctgcactgtccccatctttgagggttactccctgccccacgcagtcaccaagctccacgtggcgggcagggacatcacggagctcctcatgcagctgctcctggccagcggccacaccttcccctgccagctggacaagggtctcgtggacgacatcaaaaagaagctgtgctacgtggccttggagcccgagaaggagctttcccggaggccggaggaggtcctgagggagtacaagctgcccgacgggaacatcatcagcctcggggacccgctgcaccaggcgcccgaggccctgttcgtgccccagcagctgggcagccagagccccgggctctcgaatatggtctccagcagcatcaccaagtgtgataccgacatccagaagatcctctttggggagattgtgctgtcggggggcactaccctgttccacgggctggatgaccggcttctcaaggagctggagcagctggcctccaaggacacccccatcaagatcacggctccccccgaccggtggttctccacctggattggagcctccatcgtcacctctctgagtagcttcaagcagatgtgggtcaccgccgcagacttcaaggagtttgggacctccgtggtgcagagaag

SEQ ID NO: 247516 - DNA, 576 bp, Homo sapiens
  chr1:2997502-2998078
  hypo
tgtagagggggtggcggggcggggggggtctgcacattccgccgagtgtcctcatgaacaaaaggcctaaaaaaaagcagagagtaagggagctcagagaatcggggggcagatagcgtagccacgaggggctctctggtttcatggctgggaatctgaaccgcagggcagaggccccggagtcttaactttccctccgtcgaaggtgttagtcttaccttcccgaggttagataaagccgctaaaagctgctgtttgttattgaatctcatctgctaattacggcggcgggacttgggttcgaggcccctcgcggctgtaccccgagtcccccgtgctggcacctgataaggggtcattctgtgctctttccagagggttttaggttgcgtccgctcctgacaggtgacccttgttcaaagggaacgaggggctggtggccacggtgggcgtgagaggcccattcctgcagcctggcccggccggcccctggagagccccctccttgtcccaccagaccgagctgtggccgtgtgaggagcagggctgaggtggggagaacgccgacttgcattt

SEQ ID NO: 247517 - DNA, 144 bp, Homo sapiens
  chr1:2999262-2999406
  hypo
ggcaccctgttgccgcagcaaggagaggtggggtgcgcttcatctcagctgccccagggctgagctcagctttgcccgctttgtgcggagtccaccgagggggcctgggggacaggcgagattggaaagcgatggggccggcgc

SEQ ID NO: 247518 - DNA, 179 bp, Homo sapiens
  chr1:2999777-2999956
  hypo
caatggctaggagacgcaggggtcgggtctcctggctgcgccccaccaagcagcaacctggcggctgggccccggaactgcacatccctccccatcatagccctgtcctggactgggcggcgcgctcatttcaaggcagtgcggccatctgggctgggcctggcgctggcggggcctgc

SEQ ID NO: 247519 - DNA, 610 bp, Homo sapiens
  chr1:3000539-3001149
  hypo
ggagaccctgttcgcgagagaagagaacaggacccttgttcggagagatgtccctgggtcttggcagacccacacgcttgtggagggagcgagaggagaggtggctggggacgaccgaatcccagcgctgctgtgggctccctggaggagaaagggccttggtgtctgctgggccagaatgcaggcctttcactcctctccttgcctgggactgcggtcctggcgggccctggggcgtctgggggcctgtacccctcgggtggggcaggttgggctggagccccctggatctggtgtcaggcagacccagaggcagggcacaggggccgcctctggccctttcaaagggacattcgatctgaagcatggggcccagtaagaagattccagggaacacagtgctgatggggccgaaagcgctcggcggccggagagagcctctccacagtctgtgctctggcacgaggccctttgtgggattatctgcccccctgggaggcacggaatgctgggggcgaggggccacagcaatattgagcttgcatgggcccccgataaagcggctgcttgctgcagttgctctgtcgccgaaattcgaggtgcagcccca

SEQ ID NO: 247520 - DNA, 153 bp, Homo sapiens
  chr1:3006837-3006990
  hypo
agggctgtgactgccgctttcccgaagcgcttccatccacttccaagggagtccagctgggagactcaggcactggagctggtctcgtgagaagcgccacatggccctgaggctgggtggggattggtggccgccgttcggcaggcctggtgg

SEQ ID NO: 247521 - DNA, 514 bp, Homo sapiens
  chr1:3007587-3008101
  hypo
ccggagacctcagccgcaaactctccctaaccccgagctctagctctggacggggcttcttctctaaatgccaaggcgccatgaagagacacaaatggaaagacaggaatgaccgctaacagggagaccaaatcctgtcccaaggagccaccgaccaatagcagcttaaaccacacagagcgcttccatcagacgtgacctggccaagccagacaggctctctgaaacccagggtatgcggatggggaaactgaggcctagggagaggctggtttggagtggaggtcacctgggacgttaccagcactggacttgacttaagcgggtgcagccaggcccgcaccgagacgacagcatctctttcatcttccaaggcccatcttcctggcaaggcccaggttggcaacgctcagcttttcagcaggactcagatccagggggagttcgtgagaagggcaggggttgggccgaatccactcctcgtgccggctcctctccacgcctgccccgtgcc

SEQ ID NO: 247522 - DNA, 225 bp, Homo sapiens
  chr1:3008424-3008649
  hypo
gggcctccctctaacgggggtgatggacagttcgcaggtggtcagatgcgagagaattcacatcgcagaacctgccaggaaaatcaatgggaccgtgaggactgctaggtttgggaggcccgcgttagccccaggacggcttcatggggaggggacgcaggtccccatgtagaggataagatggagccagccgtgggtaagggtggaccacgcaggatcgcagga

SEQ ID NO: 247523 - DNA, 43 bp, Homo sapiens
  chr1:3013633-3013676
  hypo
ctggggtcagacagcgcttcacccaggccgggattctagggag

SEQ ID NO: 247524 - DNA, 100 bp, Homo sapiens
  chr1:3015909-3016009
  hypo
ggctgccaaggggccgggagagatgtgtgcccgctatgtggcttcagctacaccaataaccagcctcacggaggccccggagccccggatgctcagcacg

SEQ ID NO: 247525 - DNA, 529 bp, Homo sapiens
  chr1:3032637-3033166
  hypo
cctcacacggcaggcgtcaggttgagtccttggggttcagggaggtcaaggtcaggcctagcgtgggtggtcatctcaggggcagcactggtggccgttgaattgttccttaccggggagaacaggtggcagggagggatggttccagaccccatggcacccgtgtctctgcagtgtgtccctctcatggggggacagtaggcagagctccccggctgccctgcgccggcgtgctcactccgcggtgcgtgcttaatacccacagtgtgagaaccgagagccagggccaatgacgggggggacgcgggttcacgggtggcctggagacgtggcaccgtacctccctgctcccttcctgtgagaattttgccctcaagatggcagcccagcctggatgcccagaccccattcccaagccgcaggtcctggtctgggctctgtcactcggggacgcgcctgcttgtctttccccggctggggcagtgcctggtctgctcagcccttcctctctccccgcccgggacagagg

SEQ ID NO: 247526 - DNA, 260 bp, Homo sapiens
  chr1:3034298-3034558
  hypo
cacaggcccgggcccgccttgtccttgtgctccagcgatcaggtgctggctctccatgggaccacagaccccagggctcgctggtcttggggagaggcctccgcacattcatgtttccacttggaatgcaggacaaaggctccaggtggtgccacagattcaccggctacaagaggcagggcttcctggtgccggaaatccatgcaagttgtgcacgtgtgtgtgcatgcatgctcatgctgtgtgtgtgtacatgcacg

SEQ ID NO: 247527 - DNA, 368 bp, Homo sapiens
  chr1:3035077-3035445
  hypo
ggcatgatggcatccgcccccagctcatggcccaggtctccatgaagatgaacaaaacaccaccaggagagggggaggcaaagccgggaaagaaccagggagtctgtgtggctttcaccacatgctcaggtgctctgtggcatatgaccatgtctccaggactggcagtcggggggtgtcagggacccccagagcggacttgatctcagcctgggggccacgtggatggagtccagggagaccccagctgctggcgtgctagggcgtgcgtgtacacgtttgtgtgcaagtgtgtgtgcacgtgcatgcgctgtgtgtgcacttgcaggtgtttggacacagggcccgaggcacctctgtgcccaagt

SEQ ID NO: 247528 - DNA, 126 bp, Homo sapiens
  chr1:3037185-3037311
  hypo
cagccccctgggagcgggaggatgcctgcccttgcgtctctgcgctggagcttctgacacctttcgcagtgaaaggcagggtggatagtcggtgaggagagggtctggaagcggtgggcctcgtgg

SEQ ID NO: 247529 - DNA, 102 bp, Homo sapiens
  chr1:3037697-3037799
  hypo
gaggacagcttgcccgtcacggagcccgcaggtcacaggatcaggcctggcccccgagctgcgtaagatcagctggcctggtcaggacggagcctgccccag

SEQ ID NO: 247530 - DNA, 186 bp, Homo sapiens
  chr1:3050793-3050979
  hypo
ggggattgtgtggagctgtccggagcgccattcagctgggggacggagcttccctggaacatagtgccccgcttgattcttgaagagaggacgtggacagcagaggagacgcaggcctggggacggacagttgggcagcaggcatggcacgggcatgggctgggcgggggccaatgcccccaaagt

SEQ ID NO: 247531 - DNA, 401 bp, Homo sapiens
  chr1:3052580-3052981
  hypo
gagattgtttggctcgctttgtccgggagccacaggacaccaggctggggcggggctgggggcagaacgctcctccagcagcctaggagccacccctgggaagaaagggggtctcgggcagcctcgccatgggaccaccagctttgggccttcgttacaggggtgatgctgccccgctgatagggttgggggcctggggctgcagcgtagctgaagtggaacctgcccagcctgcacttcccagctggccagccccgcgcgatgctccggggtctcggcgaggcacgccaggcactgagtcctcagacccgctgtccggggacctctggtgtcgtccattttacagacgaggcagtggaggcccagaaagatggaccgacagtccccgccttagagtggct

SEQ ID NO: 247532 - DNA, 329 bp, Homo sapiens
  chr1:3059516-3059845
  hypo
cgatgctgatctctcggcaacagcttttccataagggaatccgatgcatttgctgggatgcaggattcgggctgtgttgctgatgagatcacataggggctggagaattcgtacccgcgggcacccatggaagcctgagctctgtcttttcagtcgcctgtcatttaaaatgaaagtaagaagggagaccttgtggcaaccgcagtgctgggccggggggagtcgctggtttgcagcccctcgggggccgagtgttccgggctctgatttttgctggctgagacacagggacccctgggtgtgcgggaccgtgccgggaagtgtggaca

SEQ ID NO: 247533 - DNA, 189 bp, Homo sapiens
  chr1:3063570-3063759
  hypo
ggggggtatgcgcacgtgtgtgctcggtgtggggtgtgtgtgcacgtgtgtgctcagtgtggggtgtgtgtatgtgtgcgctcggtgtggggtgtgtgtacgcgtgtgctcggtatggagtgtgtgtgtgcatgtgtgtgctcggtgtgaggtgtgtgcacgcacgtgtgtgctcggtgtgggtgtgga

SEQ ID NO: 247534 - DNA, 500 bp, Homo sapiens
  chr1:3079872-3080372
  hypo
gagaggggatgtccgcagaagcccctggcatgacccccttctagtgggtcagtcagcacaaccatcaagttccaagctcagattcaggtggaggacacagatctccaaggcgtgcacagccggaggcctgagtgagcacctctgacggtccagcccagagtaggtgttgagtaagagcggtcaagcagtgccagttggtaaaacccacgcggcgttagcttcctggggaggtcctaaccgggtaccccagcctgagtggctgaaacaacagatacttctcctcccacggtcctcagggccagaagtctgggatcagctgtgggcggggcggtcctttggaggctctgagaacccttgtcccggcctccttctggctccctggggctgccggcatctttggcgttccctagtttgtaggagcatcgcccagcctcagcctctgtgtgcatgtcatattctaccccgtgcgtgttcacgtccagagccgtgttttatcagga

SEQ ID NO: 247535 - DNA, 186 bp, Homo sapiens
  chr1:3086477-3086663
  hypo
taatgaccgcggcccgcgcgctccgagtaatcgggtgatgtatgtggactgtgcacacctcgtggcagaggtgaaaatcatttcgacaagtcaaatattgtcacagggaacaaatggctctccctgttaataaaaattaatgaattttttttttctttcttttttcctcgccgctggcctgctaaa

SEQ ID NO: 247536 - DNA, 231 bp, Homo sapiens
  chr1:3094871-3095102
  hypo
tctgaaattcttggcgaatctcccctccctcccgcaggcttccgtctgcctccctcacctccgcacagccccaaacccagaaccgagctctgcggagaggtggttctttaacagccacgtcttcctgggaaggctttggatgggaaaagtgctttgcagcccagctgctgttctcccggaggccggggctcctggaggctgccgcttgcttttctccgcctgggtggcaaa

SEQ ID NO: 247537 - DNA, 50 bp, Homo sapiens
  chr1:3106931-3106981
  hypo
cctcagttgctggtcggaagcctgcattccttctacgctgaggctgacgc

SEQ ID NO: 247538 - DNA, 146 bp, Homo sapiens; identical to SEQ ID NO: 206501
  chr1:3107294-3107440
  hypo

SEQ ID NO: 247539 - DNA, 145 bp, Homo sapiens; identical to SEQ ID NO: 206502
  chr1:3109586-3109731
  hypo

SEQ ID NO: 247540 - DNA, 167 bp, Homo sapiens
  chr1:3110663-3110830
  hypo
cacctgcaccagaccgccgggcaagggacaggtgggagggctgaggaacaagggctcccaaagcactcgtctggccttctgcaacgctcagtgcacactggggggctatttaggatggttgttgagggcatttagtcactcagcagacaaccggctcatctcaggtc

SEQ ID NO: 247541 - DNA, 705 bp, Homo sapiens
  chr1:3111098-3111803
  hypo
aatatcaaggctggactctgcggcaactggccactgtctccccaccacacgccaccgtctccccaccacacgccaccgtctccccaccacacgccaccgtctccccgccacacgccaccgtctccccgccacatgccaccgtctgatcgccacacgccatcgtctccccgccacacgccaccgtctccccgccacacgccaccgtctgatcgccacacattagggcttggtattctcagtcccacgttttatcatctaaacgccaaaactcgttcctggcctgccctttctctccaaggttcccagatgcacgctccactgcccacaccacccccacggttgagtgggctcggccccgggacgtggcctggctctgggcacctctgctgctccactctgcgtggagagttctgcgtgaggccaggaagctttgccgcgcttccccactcaggagcttctggatgtttctatggaggcctcacgtctaaaaccgtgagcgcaccggccagtggatgctctgaggagtgttcccgtggagccagcaccgggcagctcggcgaggcacacagcgtcgggatttggagagagacggggccctgtgggatggtgcggagcctgaggccaccgtggggacagggatgcagagaaacccatgggcctcggcgttgctccgggagaagccggcagtgccgtggaggagtcaca

SEQ ID NO: 247542 - DNA, 692 bp, Homo sapiens
  chr1:3114420-3115112
  hypo
tcaggggatgagcgcgtgaacctcgcactcctcagggggcagtggcaggtcccactgccctcccgccaggcctgctgctggtcagagcttctcctgtggcaggaattctcatgggccgggtcatcagctggggtaggaatgtgctctcagggtgctacgggccaccttggcctcaaccagagatgagggtgacgcaactgctcacaggcccgctgaggggcagcgacctgaggacaactcctgtgggctgcctgtctctgctgcctcctgcacgcgggtagaatctgctcgggtcaggggcgggcactccatgcgttctctggacccccgagctgcagtgtggctgggttgctgtggttgaaggcacctgccttaaggggccaggtcggcgcagggcagcgtctctctggggtgaggagtttatctgagtgccttagagaaggccctttggagaatggctgcaagccggcacccttgctgcatggagggtttgttctgcgtggccttggctgggcctttcctgtcgtttgggacatatgtgagtagaattgcctcaaagtgactattctcactcagctgccaggatgccgtgagtgtgtctgctgtgcaggggagcgtggtctcttcttgcttttgcagctccgggcccacctggagtgcttggcgtggcactgggccgtggccttctggga

SEQ ID NO: 247543 - DNA, 146 bp, Homo sapiens
  chr1:3122495-3122641
  hypo
agggatctgaatgccgaaggagcccccagccccctgccctgactcagggagttgcagaaaacagcagcgcgccccagcgctgccctcccagctgtgtgtgagcgagaccggggctaacagccccctacctgcgttccccatgaccg

SEQ ID NO: 247544 - DNA, 414 bp, Homo sapiens
  chr1:3122848-3123262
  hypo
caccagtgggcctggacccacgcccttggggatgagcaagctctcgtgtatttgctgtgtgtgcaacacggggttcctctcggggcactggggatcccgaaagcgtgtctggtgcagaaggcgtgacctccaggcagctccgagacgggaagtgattggagtgtaggcgtgaggtcccggtgctggatagacgcacacgccttcacgcatcctcagaaagtgatgttgctgagtgaatagaaggtgcacgtggcccttcctgagtctgctcaccctccggacacacacgcatgccttcccacgctcctgtgcacacacccctcccggcccttccatggaggacctgtaggaacccgtggcctagggtgagctgggtctgaggctttgggacccgtgcctggaccagtagcttcc

SEQ ID NO: 247545 - DNA, 164 bp, Homo sapiens; identical to SEQ ID NO: 206506
  chr1:3124782-3124946
  hypo

SEQ ID NO: 247546 - DNA, 199 bp, Homo sapiens
  chr1:3125908-3126107
  hypo
agctccgacgtggccggtcccgactggcacacctgccccgagtcacctgggacggactgcagccagccagctctcccttcttcctggggaggcctgtgaaggtcgcgtgaatgcctgtgtcccccgggacagccagggaggcaggaggccaggcctgggtgtggaataggcctcgctgggaggccgtggttctgctcct

SEQ ID NO: 247547 - DNA, 871 bp, Homo sapiens
  chr1:3127861-3128732
  hypo
ttttctaagtagaccgattgaaaataagtgaaagtcatttccgggcagcagtgtccacctgaaagttgagatatgcacagtgttgaccgaacatctctcgtggtgtctggtccagcagtgtgaaaagccgtgggcttgatctagctggagatgcggccgtgggtggactcctaagaaaagactcaaggcagagtctcttggggcccgtcgggggctgcagcagattcgtgtcttgaaaacaggttgggtccagctccctctgctgtgaggtccctgcctcattgctgggacttttgtctcaaggccccggcctcgtccttggtcgtccagcccactggccgcagcagtgggggccggcgctggtggtcagtgctcgctcaccctgccctgcacagcccctaatgttggcacttcacggacaagccggcctgggtcctcagaggagaataaatgtgcacggaacagcacacggtggcccatggccttgcagcacgagcgtgtccatgcgtgtgcacgtgtgcatgcgtgtgcgtgcgcgtgcatccacgcctggcggcctgggcccggcgtgagtgtgtgggtgggagcgggtgtgtatccgcggctgctccattctgctgtaaaggctcgctgcagtgggcaacatggaggagacatgaaagaggggacaataaatagcttcctaccttgcctggataatgggcgagttctccgggtggattaatcctcgcgtcgtctttgggccgtcagtttgggagtgacagtaacaaggctcccggggaccctgctaatttgcactccattcaccggctcgtgaaaccgtcagggctgcggaaggactgcgcggcgcgggcctccattcactgggagc

SEQ ID NO: 247548 - DNA, 122 bp, Homo sapiens
  chr1:3130375-3130497
  hypo
tcccgaggccaagccggtgccttcccaggaggccttgccaccccccattaatcctgcaattccagatcattatcaaggtcactgcctggtacattaactcagaagcacgcgggtgacagggt

SEQ ID NO: 247549 - DNA, 94 bp, Homo sapiens
  chr1:3147314-3147408
  hypo
ctgtgtggtgcctgcgcaccttccttccccacacctgcccggtgcgaccgcactgcagcctcgggcaccatgaggcattcgaagtgacaacctt

SEQ ID NO: 247550 - DNA, 228 bp, Homo sapiens
  chr1:3172384-3172612
  hypo
cttgtgcccaaagccaatcccgtggccgcaccgacacccgaagccaaccccgtggccgcactgacacccgaagccaaccccgtggccgcaccgacacctgaagccaatcccgtggccacaccaacagtacagggtggaacgagctccgcctctcaggggagggacaggattacgtggcagagagcaggtatgtggcacagtgacagcgcctcacctgggactgggact

SEQ ID NO: 247551 - DNA, 189 bp, Homo sapiens; identical to SEQ ID NO: 206509
  chr1:3179305-3179494
  hypo

SEQ ID NO: 247552 - DNA, 921 bp, Homo sapiens
  chr1:3182322-3183243
  hypo
attatccagctggcacctcacgctctgtcctcaccgcccagaccctaggagcccccagaccctgcctcagtgggtcgtgcccaggtccttcgctctctatgatccctttacggtcgtgcagtgctccccagggctccgcactgctccccagggttccttggtgcgtgtctcataaagcccaggagggcgaggccaggcccagcccccaactcaagggccgccctccagcctagcgacgccacctggcccctctttccattaagtctccgtcgtcttgagtccatccagggcggtgtgcggccggtcgcttagtcagcaagaaccctgtgagctgcagtcatcataaatgcatatttaataactattttcttcctggggaaaatgtgctgcttcagaagttcagaaatgggcttcgctcttcagctggtaatgagaagttaataaaagtgggattttgtgcaacgctggccctctgacatcttaatctttattaaagagacgtaaacttccacggatcgggcgggcctgcctggcacagccggacgccaggagagccgggcaggggtggcccaaggccggccgagcacccgtaatccaccagagaacaatgcgcgccggagccttttcgccccgagagcccctcgcacttacctcagtagacgcgaattaattctctccccctgagagccccagagagactggggaggaccgagcggttcgcatttgcaaagctcttaatcagtgaactgcgttggaggcattgctgctccgctcctccgacgaggagagggccccaggggcaggagccactccctggatctcagacccgcttgtctcgcaggcgggaggcacgggcctgcaccctccgccgctcccacgctccagcagaccacggtggggcatgcattttatttttattta

SEQ ID NO: 247553 - DNA, 413 bp, Homo sapiens
  chr1:3184584-3184997
  hypo
gtgcagacctcaggggcctgcggaccacggctccccggccctcaaaccatgacccccgaatctaacagggtgcccgtttgcacacacgtgggagcgtacggtgagcaggtcctagacttcggctggcccactggtctcaggagaagggcccgacgctcctgctgcggttgcagtcgcccccggctcggcgcgcgtcagaccaggtgcgcgtggaagtgtgtttgtctccgctaatccacgggggaaggagaagggcagagtctttgtcaggctccgagcaattaggataattaaaaaagaaggcttattgggtaaacatgctctgggattgtgaccccttaattaatggactacggggagaaattacagcagtggcaggataattaacgtgtgcacttcgcaaagccggtaga

SEQ ID NO: 247554 - DNA, 191 bp, Homo sapiens
  chr1:3193760-3193951
  hypo
ggctgagtgagactagtggacgtggccggccccatgcctctctgtgcacggctggatcttgcaaacagtcgagtcctggctgctgcgccacccggggatggcatcgtctgtcacacgcttcactctccctgtggcgcactggcatccaccatgcccacctcagaggccaggaggcacgtcagccgggaagg

SEQ ID NO: 247555 - DNA, 133 bp, Homo sapiens
  chr1:3194281-3194414
  hypo
cacacacacacgcgcgcacacacgcacacgcacacacatgcacacacgcgcacacacacgcacacatatgcacacacaaacgcacagttgtgaacacgagcatatgcacatgcacacacgtgcacaggcacat

SEQ ID NO: 247556 - DNA, 498 bp, Homo sapiens
  chr1:3195278-3195776
  hypo
gaaaactggccacccgagaacttttccagtgtgactgctggcctctctggcagacgtgtccaaactcagaaaacctctgctgctctgaccacagggaacgtcagaggggacggggcagcggaacaaagcacaaagcgtccctgcgtcctctcaacgtggcccagctcctgcagacactcagcgagccgtggcctctcccatcctcccacgcttccctccggccggccctggagatccgtggagccacacggtgccgagcgcggcgctggccgtgtgctccgtgtctgtcatcgtcagccctgtccacctttggggcaggggcagctgggctggctccagtttctctccatgtcaactttgcaaaggaaggaggtggatgcagaagctgccaccaatagccacgtgggcagctgtggccccgagtccggggatgcagttggtcatcaggagcctcgaagcgtcgctcaccatgcctggaaagaccggcggcctctcctg

SEQ ID NO: 247557 - DNA, 190 bp, Homo sapiens
  chr1:3204234-3204424
  hypo
aggattgcatttaccggggctggaaccgccccgccacgcggacatccaggattgcatttaccggggctggagctgcccctgccatgcgggcatcgaggattgcatttaccggggctggagccgccccctgccacgtgggcatccaggattgcatttaccgggactgcagccgccccgccacgcgggcatc

SEQ ID NO: 247558 - DNA, 111 bp, Homo sapiens
  chr1:3213732-3213843
  hypo
gcccctccaggtcccggcgtctccttggactcacattaccagcatttctgtccatttcgggtgagacccgaagcagcgagaccctatccaggtcaacgtctggtgagagga

SEQ ID NO: 247559 - DNA, 564 bp, Homo sapiens
  chr1:3228681-3229245
  hypo
cccccaccttcccacgtgtgaaatgggatgtgctgctgggtttaaatgagatctgactccaaagcacagagctcggcctggcccatctcgggccctcagtggacatccatggcgccgtcagcatcctcgccccactgggttattcccacgctcatcctctgaggaggagcagcccagcactcagcggcctgcaggctggcggggttggtagcagcagcctctcactgggccggtgacatgaggatcactgggacaggcacgggtgtggtgggaccacagggccccgagggcagcaggcagcccccagcctcctccgaggtctgtcctggaggctggccgcccacccgccggctgcacctcacagccgctcctccccagcctgctggtgtctgacgttggcatcccctctgtgggatacatcaggagcccatccggatccggggccggcaggtggggttcccgggatgggttgggagttcccagaagtccggtgaggggctttcggaaagggaccgtgcaccctcctgtgcagaacccggcctcggccaagctgcaggctctgac

SEQ ID NO: 247560 - DNA, 196 bp, Homo sapiens
  chr1:3248786-3248982
  hypo
atgagattctgccacgcgctgtgtactcgcttccgagaaaatcatctattaattgattccaattactcttaattgtttctcatacgtttcaattaggcagccctgttgttacagcgggagctggattaggcgagtaatccccaggcctctaatgtcggggtggtgtgggcagtggggggctcggggctgggggagg

SEQ ID NO: 247561 - DNA, 236 bp, Homo sapiens
  chr1:3258153-3258389
  hypo
ccctaacttacgatcgctcaacttaggaatgtttggctttacgacggtggagaagtgatcataataattcaatagaaaacatacgtcgggttttgagttttgatattttcccagctatcaatttgtggcccaacaccctcttgctgtgtggggcaacagcagcagctgccgctcccaggccagccacacagtcatgagggtgaaccgcccgcgctctgcagcgcactgtgtggcca

SEQ ID NO: 247562 - DNA, 246 bp, Homo sapiens
  chr1:3277465-3277711
  hypo
caaacatggggccagatgtgcgggtgccgtcccgcggcgggaacgaggcaggtggctggcggccggagtctatgcactctcgttttctcggcggagccacttgtgtgtgctggagcgaggacactgactaacaacggcggcagtgtctgcggaacagcgttccattgagcgcaggaaaggccttttgaagtggggacagttttaagaggcagcattcctcgcctcacatttcggctctggggcgtg

SEQ ID NO: 247563 - DNA, 201 bp, Homo sapiens
  chr1:3315170-3315371
  hypo
aattgtgaacccctcggctctccggggccattaggcactgatttatttttctgttacattcctgctctgccatgaagattgctgatggaacttcagataggcaagtgaggcgcagatatgacaaacaagatgtgaggtcaccacggcgttggcttagttggcgtaggtgacaggtggatgctgtaccgcggcccacgcacc

SEQ ID NO: 247564 - DNA, 1255 bp, Homo sapiens
  chr1:3321124-3322379
  hypo
tcacagcccggccacggcagagaggaggtgggcagggagacaccagcatgtgctctgatccctcggcagcgtggtgggggctccgaaggggcactgggaacaagctgtatggttggggtcccctcccgggcagagggcaggtagtcgggccccgcagtgagcctcgtcctctgcgcagcctggagcagcacatggtcatccacacggaggagcgcgagtacaaatgcgaccagtgtcccaaggccttcaactggaagtccaacctcatccgccaccagatgtcccacgacagcggcaaacgcttcgaatgtgaaaactgcgtgaaggtaacctgcggggcggccccgtctcagccccggggcagcaggaggctgcagacgggcgcccgcccccgtgctccctacaccccctggtccaaatgtagatggagtgcggcagagtgggtaggaggcccctgcggtggctcgggcccttccgtgtgactaggaaggaaaggaagtctcagggaagaccgtgtcccccaggtcagaaggatcagggccgagaccagaacccaggcccctccagagcgcggctcctgtcctcccgccggtgtggaaggaagaggctggcggggctgagccgagcctccaccccgagcccgccagggtctcagcaccacagctgaaaacgctttctgcagccctgtctcacgcagcctcagttcaggaattgttcttgaggaaagcagccggggaggctctgcggctcacttaaggccctgcagcgggtccttgctacacagagacctgtcccggcctgcttggtgcagactgcaacgtggcaagagagacaggcagggccctgccccccacagccggttggtccgccagccagaaccaggccaaggcgggtgtccaggcagggcacgcgccaacggcatccgtctccccaggtgttcacggaccccagcaaccttcagcggcacatccgctcgcagcacgtgggcgctcgggcccacgcctgccccgactgcgggaagaccttcgccacgtcctccggcctcaagcagcacaagcatatccacagcacggtgaagcctttcatatgtgagtggtcgcccagcctggccgcctgccctccgggtgcgcggatgccgtggcggtcgggccgaggtgggccatcccccaaggtctcccccgatccgaggggccccagtttgttcataaagcactcatggcaggttctgacatctctgccgcgtgcagcctggtcc

SEQ ID NO: 247565 - DNA, 228 bp, Homo sapiens
  chr1:3323791-3324019
  hypo
acctgggctgtgcccgtcccacccacctcccaagccccagcgtccagccgtcctgctaggggtgactccgcccccagcctaacctgggccacatgcccccaccaactgaggaaccaaagggagatggagctctgcctgccggccgttccacaagtactgttttcccatttgctgaccaccgatctcccaggaggagcatgtgtgcagtgtgcccggctccggcacccc

SEQ ID NO: 247566 - DNA, 407 bp, Homo sapiens
  chr1:3327630-3328037
  hypo
cacatgctcatgtgtgcacacgtgtgcacactcagacacgcacgcttgcagaatacacacacgcctgcccagacacggacacttacgcacacagacacacatgcacctgcctgtgtatttgtgtgtacgcacacacgcatgtatgcacagtacacacatatacacccatgcccacgcacatgcacccagacagactgcttccagccccagcctcgcccctccagcggctggctttcccagtaatttcatgtggcgttttcagcagggtttcccggtcatttcatgcgggtttgtcttggcttctgctgatgttttaggtgaggtctgccacaagtcctacacgcagttctccaacctgtgccggcacaagcggatgcacgccgactgccgcacgcagatcaagtgca

SEQ ID NO: 247567 - DNA, 947 bp, Homo sapiens
  chr1:3328319-3329266
  hypo
catccttgtacccccggccgcctctgctacctcccacatcgctgctcaagagccccctgaaccacacccaggacgccaagctccccagtcccctggggaacccagccctgcccctggtctccgccgtcagcaacagcagccagggcacgacggcagctgcggggcccgaggagaagttcgagagccgcctggaggactcctgtgtggagaagctgaagaccaggagcagcgacatgtcggacggcagtgactttgaggacgtcaacaccaccacggggaccgacctggacacgaccacggggacgggctcggacctggacagcgacgtggacagcgaccctgacaaggacaagggcaagggcaagtccgccgagggccagcccaagtttgggggcggcttggcgcccccgggggccccgaacagcgtggccgaggtgcctgtcttctattcccagcactcattcttcccgccacccgacgagcagctgctgactgcaacgggcgccgccggggactccatcaaggccatcgcatccattgccgagaagtactttggccccggcttcatggggatgcaggagaagaagctgggctcgctcccctaccactcggcgttccccttccagttcctgcccaacttcccccactccctttaccccttcacggaccgagccctcgcccacaacttgctggtcaaggccgagccaaagtcaccccgggacgccctcaaggtgggcggccccagtgccgagtgcccctttgatctcaccaccaagcccaaagacgtgaagcccatcctgcccatgcccaagggcccctcggcccccgcatccggcgaggagcagccgctggacctgagcatcggcagccgggcccgtgccagccaaaacggcggcgggcgggagccccgcaagaaccacgtctatggggaacgcaagctgggcgcc

SEQ ID NO: 247568 - DNA, 174 bp, Homo sapiens
  chr1:3331026-3331200
  hypo
ggtatatggtcaggcggggtgggcggctctgtggagcgggtggctcggcggggcgggcggctcggtggggtacgtaaccctctgtgctgttgtccagcagggtagaaaagcggaaggtcacagaccccgtgggagccctgaaggagaagtacctgcggccgtccccgctgctct

SEQ ID NO: 247569 - DNA, 787 bp, Homo sapiens
  chr1:3342032-3342819
  hypo
ctgtgcacggggcacggggcaggggcgcgggctcccttccccccaccctctgtggcccggcctgccatgcagagccggggcctgcactgaggagcgcgtgtgccccttccaggtgtaagtactgcgaccgctccttcagcatctcttcgaacctccagcggcacgtccggaacatccacaacaaggagaagcctttcaagtgccacctgtgcaaccgctgcttcgggcagcagaccaacctggaccggcacctcaagaagcacgagcacgagaacgcaccaggtgggccacgcggggtggggcagcccccagagcacccacacgggcaggccccacagagggggagggggaacagcaggggagtgggcgccgggcagggaagagggccacagactacccctcaggaagccaacaggcacccctcaaaccgtggtcattaaagagaacctcgtgctctccggtgtccctaagaaacctgcctccctaacagcaccccaggtgtaccccgttcgcggttggtttgccccacggagggaggggtccagcgagaggccgccccctgatgctcccgcccctccgcagtgagccagcaccccggggtcctcacgaaccacctggggaccagcgcgtcctctcccacctcagagtcggacaaccacgcacttttagacgagaaagaagactcttatttctcggaaatcagaaactttattgccaatagtgagatgaaccaagcatcaacgcgaacagagaaacggtaagaaaactatcgcgggctggggaaagt

SEQ ID NO: 247570 - DNA, 248 bp, Homo sapiens
  chr1:3343491-3343739
  hypo
cactcatgcacacacgtgtacataacatgtgcgtgcataaacatgcctgcctagatctacacacacgcatatgcacacatgcaagtacatgcacatggacagtgtgtgcacatacacatgcgtgacggacagccgtgtgcgtacacctagagacacatgtacacgcatgggcgcacgtgcgtctagacacacagcagcagaacgatggtggaattcggatccaggaatgtcggcgcatgctctgtgca

SEQ ID NO: 247571 - DNA, 339 bp, Homo sapiens
  chr1:3344507-3344846
  hypo
gtcagacccatgagcgccacaggccaggccttacctacgccccacagccccgtccccaggcacaatcccctaagctgcagctcccagagtaaggccaggcgaggaacaagtgaggattcatcaatggcatccttgccggggtgggcccaggaccaggagcgtgtgcggaggctgaaccacctggaggacagcaaggcccccctaccccgagctagggtgcagcccggccgcactgcaggagacccaccaggaccccgagctagggtgcagcccggccgcactgcaggagacccaccaggaccccgagctagggtgcagcccggccgcgctgcaggagac

SEQ ID NO: 247572 - DNA, 886 bp, Homo sapiens
  chr1:3349849-3350735
  hypo
cctcttccaggctgcggggagaatccgggtcttagtccctcttgttccttctgccccctgtggcccagggcaaggttgagccaggccagggccacgggaggctgggaacggacgaggcttggccctgctggccggggatggcctgtcctgcccacacactcacctgcctgtccaggatggcctgccctgcccatctgctgcctgtctgggatggcccgccctgcccacgcgctcacctgcctgtctgggatggcccgccctgcccacgcgctcacctgcctgtctgggatggcccgccctgcccacgcgctcacctgcctgtctgggatggcccgccctgcccacgcgctcacctgcctgtcctgtgtgtgtgtcatcccctccccgccaggcatatgcaatgatgctgtccctttccgaagacactcctctccacaccccctcccagggttctctggacgcttggttgaaggtcactggagccacgtcggagtctggagcatttcaccccatcaaccacctctgacgggctgggcagccgggggccggtggccagagcgagggcaccagccacgaaggacggaggcgggcggggccccggagaaccctgtccctgcgtgtggccactcctcagcatcctccccacccaccatggttcattccgacttttccaatggaaactcagatcccaaaagtccctaaagcagtcgtagagtctcaccatctccaaggattggtcttgagaacactgttcagtgacggccatgcaggtggccgtccaaagacagccaacggagctgcctcgcagaatcagccagtgggcaggtggacgctctgctgagacagaagctggtggccactgccgggtgcccgcgtggggtcgcgg

SEQ ID NO: 247573 - DNA, 596 bp, Homo sapiens
  chr1:3351130-3351726
  hypo
agtcttaggcagggcgccctgggctgcaggcctgcccgaggctgggatgggaagtgtgcctgccctcgtgtgacatggaattggtgtcaggaccgccacgtggccttcagaggaatccacaggtccccacccaagatccctcaattatatggggaagtcgagggcctgtggcttggatccgccatgcagagatgtggccgggcacccatcttccttccctcctctgtccctgcctcggccaccccacgcgggaacccagcgccgtcctctgaaggcagggccttggccacgtcctgggtctcccacctcccacctgaccccagcggctccggtgtcctccacgtggctgccctggggagcaatcccagcggatcgctccgggccaccaagccgcacctgtgcctgagactccggatggacgacacagtcgtcacgtcgctcttcctgcgggttcttggcgagacacagcttgagaacagaagggcgtcgggggaacctgccgcaaggagcagagacagcacagccccccgggcccagccgcctccctctcttgggacgcaacttcttccccactcggatgggctttaaattattcc

SEQ ID NO: 247574 - DNA, 187 bp, Homo sapiens
  chr1:3361093-3361280
  hypo
atccacgttgggggcgcagacgcaggggactgactgcgatgggcacggcaagacttctaggggtgaccgacgcgtcctatatcacgaccgtggttacacaggtatacattcattaaaactcacctcgctgtatattttaaaaggatgattttattgcacgtaaactgtgcctcgattaacctcattt

SEQ ID NO: 247575 - DNA, 77 bp, Homo sapiens
  chr1:3373241-3373318
  hypo
tctgtgtgtctgtcctacagcgggtgaacgggtggcaggagacctgtcacccacacgggcacctgtcagaggcaggc

SEQ ID NO: 247576 - DNA, 42 bp, Homo sapiens
  chr1:3373606-3373648
  hypo
ctaccagcagtgtccccagacgttggcaaatgtgccctgggg

SEQ ID NO: 247577 - DNA, 63 bp, Homo sapiens
  chr1:3377102-3377165
  hypo
cacatttagaataaaaggaccgcagggccgtagaccgcctacgctggccacccactggagtgt

SEQ ID NO: 247578 - DNA, 128 bp, Homo sapiens
  chr1:3377828-3377956
  hypo
gcatgagcttgtctgtgattcggcaaggccttggtcactgcggcgcagacgcaggcctcacaccggccaggcctgttacacgctttgcacgctttacacttcccaccgtaccttcaggaggtgggcct

SEQ ID NO: 247579 - DNA, 110 bp, Homo sapiens; identical to SEQ ID NO: 206525
  chr1:3378249-3378359
  hypo

SEQ ID NO: 247580 - DNA, 365 bp, Homo sapiens
  chr1:3379761-3380126
  hypo
ccgtggctccccgcgtgttagagacgatgccgccttccagccccaggtcccggcacccccacagcctcggcccccggggcacgaggagccatggcccatcgtcctgagcacagagagcccggcggccctcaagctgggcacccaacagctgatccctaagagcctggctgtggccagcaaggcaaagaccccagcccgccaccagagcttcggggcggctgtacttagcagggaggccgcccggcgggaccctaagctcctcccagcccccagcttctccctggatgacatggacgtggacaaggaccccgggggcatgctgaggcggaacctgcggaaccaatcctaccgggcggccatgaagg

SEQ ID NO: 247581 - DNA, 152 bp, Homo sapiens
  chr1:3384392-3384544
  hypo
tgctcctaccccaggtggaccggcatgtgacccgcaccctgaggcccaagggaggggaccatgtggccgtgggcgtggcgggcagcggggagggcgggcccccacctgtggtacaatggggctccttgttcgccattcagaggggctggcac

SEQ ID NO: 247582 - DNA, 378 bp, Homo sapiens
  chr1:3385465-3385843
  hypo
accagctctccactgaggagcggaaaaggcaggaggtaaaagggccctgggcgggagggctgtcccccatggcctgggccatgcaacacccggggaggggcagcagccacggtggcaccacccagccatccctctgcggccacctccagtgccaggccctgtcacgctgaccagcgcctcacacagccccgggctgtgcttccacctgcgccaggccctgacggagccccttcacgtcaccgggtgaatcctcggagtccaggggctgccatcacccccttctctgacaaggacgggggtcgttgcccagcttcagccggctcataaggcacccagccaggggcatccagggacgtcgggctggcatctccaagctgg

SEQ ID NO: 247583 - DNA, 275 bp, Homo sapiens
  chr1:3387193-3387468
  hypo
cagggatgtctgtgtatctgcgtggtcagggatgtatgtgagtaggtgtgtgtgcgtgggcaagggtgtctgtgcatggctgtgtgtgcgtggtcaggggtgtgtgtgagtgggctggccccaaggcccggagggtggctcgggagcatccggcaccctggtgtgtatgcatgggtgtatgtgcatggatgtgtgtgtgggcaggggtgtgtgtgcgtggacaggtgtgtgtgcgtgggcaggggtgtatgtgcgtgggtgtgtgtgcctggcca

SEQ ID NO: 247584 - DNA, 424 bp, Homo sapiens; identical to SEQ ID NO: 206528
  chr1:3389566-3389990
  hypo

SEQ ID NO: 247585 - DNA, 73 bp, Homo sapiens; identical to SEQ ID NO: 206529
  chr1:3393357-3393430
  hypo

SEQ ID NO: 247586 - DNA, 379 bp, Homo sapiens
  chr1:3406736-3407115
  hypo
tgtgcctgcacctgcgcctgcacccacactggcgcccacacctgtcctcagtccaactcagagccgcggggagagcgggacttcctcagcccaggcccagagcgtgcccctgggttctgcagagccaggccaggaggcgcctctcttccagcggccatgcgaggcttccctcctcaaggccacaccagcctccaagagcgacaggttgctgggctgtccacagccctccacggccctcaaaggaagggcagtaccaggagctctgggcccgtgaagtgtccttctcagtggtcaccaaaggccagggtcccctctggctgggactggagaggcgggctccacgggactgcctctactagtgcctcgctggtccaccgct

SEQ ID NO: 247587 - DNA, 220 bp, Homo sapiens
  chr1:3408566-3408786
  hypo
cattcacacactgatgcacacgtaacacacaggcactggcacgcacaggtgcctgctgcctgtgcaggactgcgtgcgtggactggcacgcacaggtgcctgctgcccgtgcaggactgcgtgcgtggactggcacacactgggtgccacacacatgtactggcacacatgcacacacaccctgctgtacgcactgttgcacgtgcgtgcacagacacac

SEQ ID NO: 247588 - DNA, 695 bp, Homo sapiens
  chr1:3410515-3411210
  hypo
acggggccagggagcgggggttcagggaggcaccaagcactcacccctctcacagaagtggccgtggaagccggcagggcagaggcatcggccactgatggggtcgcagggggctccatgttgacaccagcacaacccctggcagccagccccgtggaagccagggggacaggctgaaggacgccggttaccacgagacaagggcacacggtggcagaaatgtccagtttgcccagagtgagtaaaacccgccaatccaggggcccgagaaaagccccctcctgcccgtcctcgtccctccccactgctgctggctccccacctccccaccacttcactgctgcctggatcacccacacgggaggagtggacagtggctcaaaggggccccagcccagctgcacaggcccccaactcacggtgctcgcaggcctggccatagaagccggggccgcagcggcaggtgcccgtggcaggctcacacgtgctgttgttgtggcaggagcactccagatggcaggcggctccgtagcgcccagggggacaggctggggacagggcagggtgggcagtccttcggcaccagccttgcccagccctatggcagcccagggcacctccctgaggggatgctggggtcccgctggccccgcacactcacccagctcgcagtgccgccccgtccagcccaggcc

SEQ ID NO: 247589 - DNA, 344 bp, Homo sapiens
  chr1:3413536-3413880
  hypo
acgggcagcactcacgttgctggcagctggggccgtggtagccagcagcacatgagcaggtcccggtggcagggtggcaggccgggttctcaccgggacactggcacatctgcgcacagtcctccccaaagctgccgggtgggcaggctgggtggagacaggcagggtcggtcctggcccagccccgccaaggaacaggcagcctctctggattccccctgcccagccgctcctcggggtgggggcttgggagcacctaccctgctcgcagccggagccagtgaagccagggggacagcggcaggccccagtgacgtggtggcaggcagcgccaggcgggcagc

SEQ ID NO: 247590 - DNA, 493 bp, Homo sapiens
  chr1:3422675-3423168
  hypo
gtggcagaagcggccgtagagccctgggtcgcagaggcaggccccgtagaggcggtggcaccggccccggttggcacagttgcatttcttgcgacagtgcttgccatagtagcccttggggcagcctgggggcagcggggctccatgtgaaccttggtggcagccagcctaccacatgtggtccccccatgtggtaggatgcgcgggggcccagggcccagcacaggagctgggagcagcccccgccagggcactaggtgagccttccggatgtggccgtctgccctggctggtctgtcccctacatcccctgcccccagggtttgtggcaagggcgggtggaagagcacattcctcggcccacactggagagatgcacaaagctcacgccccactctccccaaagtctggcccccatcaggagccgcctgacttctgtcccctggtggtcactaagcttgatctcagagcctcaaagcgggaaggacacgtg

SEQ ID NO: 247591 - DNA, 263 bp, Homo sapiens
  chr1:3425528-3425791
  hypo
ggggtccttcctcacgtccccagcctctgattggatggcagcctagcccgaggggtcgctggctgctggccctgcgagcaggagcccccgggggctgggcccgcgctcaccaaacttctctgtgagcgtgtgttcgccccgcaactctgcctcttcctcatcggccccgacgtcgtcatcctggaagagttgcggcagctcgtcctggagcacggcaatgtggggcaggggccgcacgaaaggcagctcgccgtccaggtcca

SEQ ID NO: 247592 - DNA, 646 bp, Homo sapiens
  chr1:3435617-3436263
  hypo
agcatggccaccaggcgtccagaaatggagcagggagggaaacgcccgccaccccccttccatggaccaggctaagctgaccccacaacccacaccccagcaaggcccccacccctggccagggccagatcatcctgcccagcgcccgcctttctgggtggtcagctcggcccatgcttggctgcagtggtccagacccactggccaaggtgacaggtgggtccctatagacaagtgctagcagtgccctattggcctaccaggggcaccgtgtgctttagggagtggcaggcagcagctggaccacacacatggaatgaaggaggccagacggcgggggccaacaggggcactcccaggtgggagctgcacggcgcaccatgggcacccaatgcccgcagtgcttgcaccgccacacgcgcctactcgctgctgagcgtcagctccgacctgccctcctgggggaggccccgacccagggctgcgtgagcatcacacgggttcagcttctccagagcgtttaggaaggcgccttacttgtcaccagagtcccgggagggcaggcctggtctatatcgacagggcagcaacccactgcctacgcagtgcccggctccagcacaccaggcggcggtcagagggcagc

SEQ ID NO: 247593 - DNA, 187 bp, Homo sapiens
  chr1:3436853-3437040
  hypo
caggtacacagaggcggaggcctccagcgcagtgctagaccacatgggagctgctctcctctctgagtgttgcacgctggcactctgcagggtgtcacggaaaaccaagaatgatgcccccagacactcgggccagaccactgctccctacatcaccggggaaggcaagggcgggctcaggtttagg

SEQ ID NO: 247594 - DNA, 160 bp, Homo sapiens; identical to SEQ ID NO: 206533
  chr1:3448901-3449061
  hypo

SEQ ID NO: 247595 - DNA, 75 bp, Homo sapiens
  chr1:3463630-3463705
  hypo
cggtgtcccggcaccgacccgcacagcccccgttggcgttggcacactcacccacatctgcgaggggagaagcag

SEQ ID NO: 247596 - DNA, 252 bp, Homo sapiens
  chr1:3466090-3466342
  hypo
cacatggtcatgctcgggtctgggctggctggcggcaggcaccccgttggttgactgcatgcagaagggtccatcaattcaccgaagacactggcatgggatatccagggcgacttggccccgctgctccccacagctcaccccgctctctggccccacaagggctccagctcgggctatgggcgtcacttatggcctggaatttacctaggcaacactgcagcccagggaaccacccggaggctgaccagc

SEQ ID NO: 247597 - DNA, 276 bp, Homo sapiens
  chr1:3466668-3466944
  hypo
tcagcagaaagtaacggctcccgacacaagacatacccagaggcgccacagacccagcagtcccacccctaagcacctgcccaagataaatagaaacagggactcaaaccacggtgtgtgcacacgctcacagcagacttgtccacagccatcagaaaggggaggccacccgggtgcccaccagcgggtgatgaagacagacatggaggacgacagcgaggaggaacctcaaacctcgtgctgtgtgaaaggagcccatctcgagaggtcacacag

SEQ ID NO: 247598 - DNA, 537 bp, Homo sapiens
  chr1:3467204-3467741
  hypo
ggggtgctccgtgccggatctggccccatgccaggggcctaactcagcagcagtgactgcaatgtcacaagtgcccagcagccacccaaccggggcagggctccgaagacccagcccttgcagccgatccagcaagcacaggctgcagagtgagaacccgaggggagcaagagggggcccacacccccaccgcccgtgcactcaccctgggggagccagtgtcccccgtgtgctagtccattggcaggagaccctaacgggtgtgacagtggggctctcagatcagccgccaggtgtggacagggccaggatccgaggctccagccggccagggctgggcagctgcctgtgtgccttggggcctcggagtgtgaggcaggtgaggaagaagatgtggatcccagctctgagagccgggcccgcgtggccatgtggccaggcagctccccgctagcgatgccagcctcctggcctataccaggccagatgccccacagatgtgaggctgccagacccagcccccgtggtggtgagaca

SEQ ID NO: 247599 - DNA, 36 bp, Homo sapiens
  chr1:3468969-3469005
  hypo
tcctggtaagaccacgcgtggcggctcacgcccgta

SEQ ID NO: 247600 - DNA, 195 bp, Homo sapiens
  chr1:3470763-3470958
  hypo
caggggcactaagacgacacctcaggaggagacggtgaggactctgggttccaacactgggctgggagcatcaaccagcgccccgaccaggcggctccgagagagtgtcgctgggggatggcaggaacactggaaaagccagcggggtctaacaaggggtggggacccagccgggccaggcgggagggggacggc

SEQ ID NO: 247601 - DNA, 137 bp, Homo sapiens
  chr1:3484124-3484261
  hypo
gccagccagcaccgcgcagccctgcaggctctgaccacaggtcccgtttgccggggacacggccagcctggcctagctccttggccatcacaccgtgggccctcggtccctaggagcacctgcgacccagagcgtca

SEQ ID NO: 247602 - DNA, 212 bp, Homo sapiens
  chr1:3512769-3512981
  hypo
gatgggacgggctgcggctgtcactaaggctgagcagaaaatggtaaggccccccaggagacggcagtgtcctgctgggaatgggcagcccgatctggccagcctgagaaggtgcccacagccagagagaccccagctacccagaggacatgacgtccccctccccaagtccagacgctgcctcaggccaccagcaccgtgcagtccacaaa

SEQ ID NO: 247603 - DNA, 89 bp, Homo sapiens
  chr1:3524385-3524474
  hypo
ctcccgagcagagccggggctccacgggcaagagatgggcgggcatgctgcggggtccctccagggcaggcagcgacagtctgggccca

SEQ ID NO: 247604 - DNA, 694 bp, Homo sapiens
  chr1:3548480-3549174
  hypo
gagaaacccttaacaaaaggcgggctgcagtgtgcccagccctgctttctactcagcagagtggagcaagtgagcagggtggaggcctcctgactcatgcgcggacctgcggctgctgcaggacaaaggcccagcgcctccaaggagcttctgtgagcacctcggctactgcagaaacgtgaaaggaggtgacgtgtcggaaacccccaacttcattttcttttccagtcgcttctacacctggggccacaggacacagtaaagggtgagacagcacctgcgtcagcacaactgaccgttccttgtcgccaggaagtagctgtcaggactaaatgccagcattcctatgccgattttcgggtttgctctgtcggtaacaggtttcagtgtctgtaaggagactgggacagaggcgatctcatctagaacaccaacaggaagaacacgccattgtcaccctttcgggaagtacgcacgcggctgagaggctgctgtgcctgcatcgggcatcgcgaacccagctcctctgttcaaaggggaggaaagtgcggcccaagggcaggaagagctaagcaaagcctggcagccgcagcgaggggcctgcccgcaagtgccccggatgagagtggcaccatcacctgccaggcccgactaggtggggggtggaccccacgtgccaggggctgactggaga

SEQ ID NO: 247605 - DNA, 444 bp, Homo sapiens; identical to SEQ ID NO: 206535
  chr1:3552661-3553105
  hypo

SEQ ID NO: 247606 - DNA, 251 bp, Homo sapiens
  chr1:3556469-3556720
  hypo
agtggggccgcagcgtgtggggcacagcatgtccacagtgtcactcctgcaaacgctgccaggttgtcagtataggatattaacaaatgatttaatttaaatgtctacgcatcatctcttcttacaacagaaaagaaaatctgatgtctgtaattgtttctccaaacaacatatacagcgttcaggagagaagtcctgaacacacaggtagtggatcaacgagctccaggggtcacgtggcagcacggaag

SEQ ID NO: 247607 - DNA, 365 bp, Homo sapiens
  chr1:3559616-3559981
  hypo
gacggggacaacacgttcacagccacaccgtccgtggtgacgcacacgtccagcaggcgaggactgaatggcgttcctcacgaggaagggaaggcccagcgatgcctgtcaacacggaggagtctaaaagcagtgacggggaacagcaacagcagagactgcaaagtacaagcccctataaatcaactttacactgcacagcaagcaatgtggtgtttagacacatctgtacagtgagactcaagaacagtgaggatgtgattcacgcaagacgtggggcaaaggtgccctcaggtggggagggcattgctacgaggaagagaagggctctgaaagcgcggcagtgttccgctgcaggcctaggg

SEQ ID NO: 247608 - DNA, 104 bp, Homo sapiens; identical to SEQ ID NO: 206536
  chr1:3562356-3562460
  hypo

SEQ ID NO: 247609 - DNA, 151 bp, Homo sapiens; identical to SEQ ID NO: 206537
  chr1:3576146-3576297
  hypo

SEQ ID NO: 247610 - DNA, 87 bp, Homo sapiens
  chr1:3601859-3601946
  hypo
ctggtccgagcccccgcctgctggaacgtgccactccccagccacagggtgacagtgggagcctcgaacctccgcaaacagcaaggt

SEQ ID NO: 247611 - DNA, 665 bp, Homo sapiens
  chr1:3606851-3607516
  hypo
tcctggcggaccaccgagttccccgcgcagggggcaggtgcgccccacctgggtgccaagggaggcgacaccatctctcccccttggggtggcccagccttgcctaccatgatctccagggccggggctcagccctcatgcctgggaacagaggctgctttacggggtgagggcctggggccccccgagccttccccaggcaggcagcatctcggaaggagccctggtgggtttaattatggagccggcgctgaccggcgtccccgccctccccacgcagcctccttggtgcggtccaacacatcaccgggcaagctgaggcctgccccggacttggatgaatactcatgaggaataaaggggtgggccgcgggttttgttgttggattcagccagttgacagaactaagggagatgggaaaagcgaaaatgccaacaaacggcccgcatgttccccagcatcctcggctcctgcctcactagctgcggagcctctcccgctcggtccacgctgccgggcggccacgaccgtgacccttcccctcgggccgcccagatccatgcctcgtcccacgggacaccagttccctggcgtgtgcagaccccccggcgcctaccatgctgtacgtcggtgaccccgcacggcacctcgccacggtaggtgt

SEQ ID NO: 247612 - DNA, 674 bp, Homo sapiens; identical to SEQ ID NO: 206538
  chr1:3615176-3615850
  hypo

SEQ ID NO: 247613 - DNA, 37 bp, Homo sapiens; identical to SEQ ID NO: 206539
  chr1:3622993-3623030
  hypo

SEQ ID NO: 247614 - DNA, 247 bp, Homo sapiens
  chr1:3623373-3623620
  hypo
ggtgtgtggtcctggcgggggagctgcgggtaggggcctaacgagagaaccccgggccagggggcagcaggggtgaggctttgccggcccctgagcgtggagcggcctttccagtcggggtgaggccgttcaccgagagatgaggccgcccaactgggaaaattgggctcagccattgaacagcagttccaccttatcccaccacctagagggccagacctagtgagagcccggatctggtctccag

SEQ ID NO: 247615 - DNA, 420 bp, Homo sapiens
  chr1:3644396-3644816
  hypo
acaatgtgagcccgcgtcccagggacagggccagtccctgaacggccccccacgcccagactcctccctgacggagcctgagagcagcccccatataagtcgcttgtcctgggccaagggcacctcagaggcctgggtggcaccgcaggtttgcccgtccctgtgggttgctcaccaccggacccacctggagaatcgattggccccaagggtggggcaggtctccctcctcccggaaggaggcctcaccctctggtcctgcctgctcaccccgcctgccctgcctggccttccagccttcaagcagagcccccctgccgtccccgcccttggtgccggtgtgaagaagcggcggcatggagacgaggacacgtactaccttcaggtgagtgtgtgctcctgcacggcagccgggagacc

SEQ ID NO: 247616 - DNA, 226 bp, Homo sapiens
  chr1:3646528-3646754
  hypo
gcttcccacccatgcgagccgttgcttctgagcaggagtcacctacagcccccgtcctacgggccggtcctctcgcccatgaacaaggtgcacgggggcatgaacaagctgccctccgtcaaccagctggtgggccagcctcccccgcacagttcggcagctacacccaacctggggcccgtgggtgagtcccttgggcagtgcgggcccacgggcagggcgggga

SEQ ID NO: 247617 - DNA, 149 bp, Homo sapiens; identical to SEQ ID NO: 206541
  chr1:3651334-3651483
  hypo

SEQ ID NO: 247618 - DNA, 211 bp, Homo sapiens; identical to SEQ ID NO: 206542
  chr1:3655597-3655808
  hypo

SEQ ID NO: 247619 - DNA, 219 bp, Homo sapiens
  chr1:3659498-3659717
  hypo
ctggcttctggtctcgagggaagctactggcgagaagcattggagggttctgggtcacagggaaccacgtgacatggacacagatgccacaacgctgtgcattcccccaaaaacgcagatgcccacctgctctctttagggaagccggagaggccgccgggaacaggcagtgacggcggtgatccagtggatcctccccagggcgtggctgacacaaac

SEQ ID NO: 247620 - DNA, 269 bp, Homo sapiens
  chr1:3664507-3664776
  hypo
ccaggttgcttttccgtgagtacaagaacacaacacctgtgggaggtgtgggcccaggggagggatgccgagctcacacgacccctaggtagcaaatagacgcacgtgtgcctttcacactccaccctcacttcacactggcccacccactccttgttctgggaaatgaggacgcagcaggagatacctgtagctaacacacacacaccttgccccccgcgatggccagacttccagggctgcctcgcttcccagatacattttctggt

SEQ ID NO: 247621 - DNA, 413 bp, Homo sapiens
  chr1:3680096-3680509
  hypo
ctgggacgcccagacgctgcctgctctggtcagtgagctggagcaggggcaggtgtcggcagcctcacccaggctggcagagccctcccagctgccgcagtggcccggccctctccttctgtccctcactgcccctgcttgctcctgctcaccgcctctgcctctgtgcccaggagtgattgcgtctttacaacaacaagtggatttccaagaaacccagctgcgaaagatcaatacggaaaatgagacgctgcagaaggagctccgagagcggaggcagcagctacaagccatgaccgacaaggtggccgtgcgctcagtaccggcctccgctccatgagcatgggccccaggcttcattaacccccggcagctcggggcaggcgctgcccgtcccatctactgatggagac

SEQ ID NO: 247622 - DNA, 95 bp, Homo sapiens
  chr1:3683723-3683818
  hypo
agtggatgggtgccacacatactcaggttgggcgaaatgaccccacctcttttttctccccggctgtccccagcaagtgtcggaactggagagaa

SEQ ID NO: 247623 - DNA, 225 bp, Homo sapiens
  chr1:3684032-3684257
  hypo
gggtctgtcccagcagctggcggccgagcacccaggcctctgcccaccgcccaccgaggtagaaccggggtctgtgtacgctggggctcgggctggttctgccgtgtacaccagcatccacacagagttgacactcaagaaatgtgggtagaggacggagtgagagtgcaacagagtagcccggaaatgttcgtcaatggcagtggtgggcggagccccatgggc

SEQ ID NO: 247624 - DNA, 186 bp, Homo sapiens; identical to SEQ ID NO: 206548
  chr1:3695643-3695829
  hypo

SEQ ID NO: 247625 - DNA, 171 bp, Homo sapiens
  chr1:3696129-3696300
  hypo
ttcacaacggaaacgtctacaacagaaggcgcccaggacccacctttctggcgcataaatgaagatttttggctcaaaaacctaagcatcctccagcttttgctaccatctgtccctcggctggctgaggactgccgatgcttcccaagcagaggcgtctggtccactcct

SEQ ID NO: 247626 - DNA, 152 bp, Homo sapiens; identical to SEQ ID NO: 206549
  chr1:3697565-3697717
  hypo

SEQ ID NO: 247627 - DNA, 893 bp, Homo sapiens
  chr1:3700197-3701090
  hypo
atgatacccaacagcgcacggtatggataaaatgctgtgggttgggctggcatttatgtctgtttcctaatggctagtttatatcctgtcctgtcccatcctgagggccacccgccccctgtggaatggccaatacctccgctcctaacaccttccacttccctcacgtcagggccatctagatgacagactggttccacaacgtctcctttggaaagagaatgctttctttgtaccctgttaagaagcttctgggttctggtagcattaggcggttcctgaggagcacagactaactcagctgaggccagcatgcggcactcccccgggcccggccccaccccaccaggcacgctgcccacctgtgcaggcccgacacactctgccgcttcttctgcttcctctgctcctcggcctccagctgcagctgccgcaccagctccttggccttggcttctttccgccccaaggggacaatctatcgggcagaaacccacaaactccactagggtcacagccacagaactcgcccatcgtgtcgattacggccttaagcctcaatgagccctcccgactcccgccctcattcatctctacagcaggcagggagcatcccacgggaccacgcagcaagaagctgcatgtgggctgccactgcagcgtcccggggagacctgacgcccaaacacaccgatcctactgaggcagggcttaaccttaaagccagctcatgcacaactgtttccagaggtctgccatcctcagaaggccaaaagaggagagaaaggctgagcagccgggacctcgtgcactccacagattcaacagcccaggacagcacgacacagcaactcaccctactgccaaccccacgcaaacggttttactatcgg

SEQ ID NO: 247628 - DNA, 335 bp, Homo sapiens
  chr1:3705390-3705725
  hypo
gaaataaaagggctcgcgtgccctctgggagagaatggggcagtctaagcagcagtgacgcctgctggggaagaacacaaggcaggggctgagaccaagcccagctgctgggcactacctgagccacgcgtccatcggatctaacagaactgccacaattctgtgcttctcagcacagggtgggctgggctgggatagacttgttggactggtggctccagcccagacctcccttccggccccacatgggacgagagccaatctactcctggaatccaggtggcctcacaaagtaccaggagccgtatcaccaatgctgtcgccagcctgcagca

SEQ ID NO: 247629 - DNA, 357 bp, Homo sapiens
  chr1:3731493-3731850
  hypo
aaccgctgctggccgagccacagccctgcggaaattctactgcgtgtggcagagaccgatgtgcaaaaggtttctggtgaatgttttatggaaattgctccaagcactaaggaaagcgggaccgtgcctgtgctgaccgtggccttgcgcgagcgcctcccggcggtgctctctggctctctccaaacaggacgcttccttctctgattctaaggaaggcctgagacagccctgaaggcttaatgtacagtgcggccaggtcctggcactgcacgcaggatctttggttagctgcatccatatcgtttgcacgagagctgacggcacagacgcgtaagaggcgtgcacggcggggag

SEQ ID NO: 247630 - DNA, 45 bp, Homo sapiens; identical to SEQ ID NO: 206551
  chr1:3746112-3746157
  hypo

SEQ ID NO: 247631 - DNA, 64 bp, Homo sapiens
  chr1:3781806-3781870
  hypo
ctcatatggtggatcgcactgatcgatttgcaggtgtgaaccagccttgcgttcccacttggcc

SEQ ID NO: 247632 - DNA, 101 bp, Homo sapiens
  chr1:3786101-3786202
  hypo
atcgagagccagtgcgggttttggggcgctgtgcaccaggctcaccgacgttccttggttcctccaggtgagctcctacccctccacggtgggtgcggagg

SEQ ID NO: 247633 - DNA, 185 bp, Homo sapiens
  chr1:3786685-3786870
  hypo
ctggaagctgagatcaggtccgcactcccccgctgccttcccaggtgtccctgctgcaccgtgctaggcgtggtctggcctttagtggtgatgcatctgtgtctctggcgagtcctgggcacacccctccccctcccatggtgtggggagcaacttgaggcgcctcttggcgtttgcacactgca

SEQ ID NO: 247634 - DNA, 208 bp, Homo sapiens
  chr1:3818733-3818941
  hypo
gccaccgcgctcggcacactgttctgttcttaagaatttcaacatagaaatgaaatccagccttgccttaaaccctccagccctcaagttctctgggctctaggatgtgtgtcttcagaaaagggcgcagggtggaagccacatcagaggccgaggacacctggcccctcccctctccgcccgcaggtggctgcgcagtccagggctg

SEQ ID NO: 247635 - DNA, 255 bp, Homo sapiens
  chr1:4037033-4037288
  hypo
ggcaaagcagaaaggtgtgacgtcttggaggacgcgggaggaaagcacgcccagcggacaggagccatcacgcggctgcgggctgctgctgagaacctggcgtgggccaccgtcgtcagcagcgtggaggtaactgacgaccttggccaagaagttgggtggcagcgtggaggtcatgctcagagtgagtgggcgcaagagacggtggcgggagagggagtggagatcataggcgtggatggctcttatgagcct

SEQ ID NO: 247636 - DNA, 283 bp, Homo sapiens
  chr1:4057085-4057368
  hypo
gggcccttgactgtcatgcacgttcctgggccccaccctagatttgggacacagcgatggtgtaggatggagtgatggcacggcatggagccatggtgtgggacaaagcaatggagcgggactgagcgatggtttgggatggagcaatggtgtgggagggagcgatgttgtggcatggagcgatgttgctgcaggtagtgatggtgcgggatggagtgatgatgtgggatggagtgatggtgcgggatggagtgattctatcgatggagtgatggtgtggggt

SEQ ID NO: 247637 - DNA, 36 bp, Homo sapiens
  chr1:4212157-4212193
  hypo
ggccccccagccttcgattttcttctgagtctggct

SEQ ID NO: 247638 - DNA, 202 bp, Homo sapiens
  chr1:4359785-4359987
  hypo
tttctgtctacacatcgggtggagggggaaaggctgatggatggagttgggggagagtggggcgaggccaggtcagggagtccaagtgggccctgcctggggtgaaacttgcacccttctcctggaagagtcagcgcggctcatcctgtcccttcctccttccctcttccagaaatatggctttgcccgaggttcatggcgg

SEQ ID NO: 247639 - DNA, 35 bp, Homo sapiens
  chr1:4391727-4391762
  hypo
tgatgcgcacgctgcgtagtgcacacacgtcacaa

SEQ ID NO: 247640 - DNA, 34 bp, Homo sapiens
  chr1:4392062-4392096
  hypo
gtcacaactgcagcacacacgtcacaactacagc

SEQ ID NO: 247641 - DNA, 124 bp, Homo sapiens
  chr1:4460854-4460978
  hypo
tattcttctcccaccgccctcggctgaactctccttggcgtctggacgtccttccccatccctctttctctgccatgttgttccgttgtcactcgcctgctggttctgacgttcagccgtttgt

SEQ ID NO: 247642 - DNA, 88 bp, Homo sapiens
  chr1:4468042-4468130
  hypo
aacaggaccgtagacggcagggattccaccgtgcgtagtgtggatgcgccaaaatcgggatgccgctggcgggcgtcagcaatgggtt

SEQ ID NO: 247643 - DNA, 378 bp, Homo sapiens
  chr1:4542624-4543002
  hypo
tgtgtgaggacccccgtcagggaactggctgctgctgccgctgcttctccccaggaagcactccccgaacgctgtcctgcgtggccaccacgtgctcctccctgctgcagccctgccctcccgccgggcctgcatgtccaggaccgcccacgagatgctcgctgccctcccgcaaggctgggagtcgacacagtgggcacggaggggtatggggtgggtcggatcagagaactcaggaggtagctctgcccccatgccttcctctgaccttaggctagcacctctcctctctccgctcggcctctacacctttaaaacaggagcgaagtgttcgatcgaggcccctggagacccagtgcaacacggcagtaggtctcc

SEQ ID NO: 247644 - DNA, 84 bp, Homo sapiens
  chr1:4659113-4659197
  hypo
ataaacctcactcaaaggaacggcagtcccacgggaacgcaaggccctccgggtggctgagtcagtatgctctgtgagaattgc

SEQ ID NO: 247645 - DNA, 373 bp, Homo sapiens
  chr1:4673892-4674265
  hypo
tgcctcactccataagctcacgggcaagcctccccatgaagagacgatccaggtgcgacacaggaggtgcaaacacagcgacatgcattcccgcgtttaaaacacatgctccgccgggcatgcggacgagagcatctgcctggctcgggtgtggcagaggggcaggatctccaggagtgaccaggctctacggaggacggagggccctgagggcagctggggagggcaggcatgggggaaaagggacaatgtgagttaagccctctgagtgggaaacagtgactcgttgtaggagtgtgtccggtctgcagctgggactgaggacttcctaggctgcaggggagaggcggcgtgaccacggggactgagctca

SEQ ID NO: 247646 - DNA, 283 bp, Homo sapiens
  chr1:4675281-4675564
  hypo
cccagaaatcgtaccgagagcagaccaggcggccctgccagccggcacctgccccgcctccacaccccacacctggctgcgcgggagccactcagaggctgttttgattggctcatttcagcggagctcattatttttacagggaacaatttctaaccattttccttgtctctcagggcggttgctactagctgagttactcgggccgttataaatacattatcagacacattcaacaagcgatcgcaggtaaaaataatccctgcagcgctggcagtgtgga

SEQ ID NO: 247647 - DNA, 53 bp, Homo sapiens
  chr1:4696907-4696960
  hypo
ggagagcctctggtgctgtgcggaggatctgcgtcctatcagagcaacaggga

SEQ ID NO: 247648 - DNA, 274 bp, Homo sapiens
  chr1:4726574-4726848
  hypo
tgcggagaggggcccgtgaatcacgggaggggtgcggagaggggcccgtgaatcacgggaggggtgcggagaggggcccgtgaatcacgggaggggtgcggagaggtgcctgtgaatcatgggaggggtgcggagagcgggcctgtgattcaccagagggttgcagagagaggcccaagaatcgcgggaggggtgcggagaggggcctgtgaatcacgggaggggtgcggagaggggcccgtgaatcacgggagggatgcggagaggggcccgt

SEQ ID NO: 247649 - DNA, 98 bp, Homo sapiens
  chr1:4794016-4794114
  hypo
ggagctgaatggagcggttcacgcgaggtgtgtgcgtcgcgagcagggcccttgccggagctccaattagcggcttttgtaagcgatcacgtaccgag

SEQ ID NO: 247650 - DNA, 61 bp, Homo sapiens
  chr1:5371595-5371656
  hypo
tcagcgctgctgcccggagcccagatgacaataccttctggactaacgcacctgttcatta

SEQ ID NO: 247651 - DNA, 95 bp, Homo sapiens
  chr1:5587302-5587397
  hypo
tcaccctccagcaccgtgcgtcacacacctactccaggcagtcgtccacgcttgcatgtattcattcaacaaacaagtggcggactcattccgtg

SEQ ID NO: 247652 - DNA, 335 bp, Homo sapiens
  chr1:5772043-5772378
  hypo
atcagataaataccgcactgtcccccaccggggaaggcaccgtcacagctcccgcacagccggtcaccgcaccgtcccccgccggggaaggcaccgtgtcacagctcccgcacagccggtcaccgcaccatcccccgccggggaagggactgtcacagctcctgcacagccggtcaccgcactgtcccccgccggggaaggcaccgtcacagctcccgcacagccggtcaccgcactgtcctccgccaggaaaggcaccatcacagctcctgcacagctggtcaccgcactgtcctccgccggggaaggcaccgtgtcacagctcccgcacagcc

SEQ ID NO: 247653 - DNA, 289 bp, Homo sapiens
  chr1:5839922-5840211
  hypo
ctgcagcaacgaagcgcagcagctgagagtaacttagaaagcacccagctaatgctggcatcccagatcgaccccctcctcgctgaatgttggcatctctgtgcctcagtttcctcatctgtaaatgggggtgataagaaatgtgtacacacctcccgggcagtggggaggattaaactgtgctctgacacgatccgggcatgttcagggtggtatctgcagtaaaccgcgctcggaaaatggcggcgcatcagggccagcggtgggagctctccgtgcttggcttgac

SEQ ID NO: 247654 - DNA, 714 bp, Homo sapiens
  chr1:5918382-5919096
  hypo
ggcagccacggcatcgccgccccccacgaggactgggctccatgctgacggagggccgggatcagggccggagaactcacgggacatggcacctgtccactccagcccaccagctcctcccctggcccactcgaccccctgccctggcacagccctgcaggcccctcgccagcctcccctgccccgctgcccctttgcagggcccctgccactccattctctctcagctgcctcctacgcagagaggcccgatctccaaactaaagtccctcttcacaccatccccctgctcccctcagaccctcagcgccgcccgacagaccgtgacgggtccccatgtgatcatctgggcccccaagaaagccaggtactgggcgggcagcatccatctcccccggccagggggacctctgtctacactcgggttgaattgagggcgtgaggagcacgtggcaaatagagcttcgctggctgatggcgtctctcttgccaaaggccaggccgctttctcctcgtgggcttgagggatgcccctgtgtcctccagcccacaggctagcctggtcccgtccagaagggcacacgctgcctgctcctcgagcctgggcggcacctcctgcatctgatgctgtggttccctcctgtgccgtgggggtgacaacgcagacgtgagagcccggtaggctggggtggtggccacgttaccaaagcacct

SEQ ID NO: 247655 - DNA, 235 bp, Homo sapiens
  chr1:5922581-5922816
  hypo
gaccaatggggccacgtgctctctgcaaccaccgctgggtgcagcccaccctccgctcaggggcacaggaccctccgcccctcgcacttctacccgactgctgccgtctcagagccggggtctcagcccccacccagggcaggcttgagcggcctctccatgaggacacatggcatgggctgcctgaccggcccccaccatgtctcctcaaggagaaaccgggcttgtgctgtag

SEQ ID NO: 247656 - DNA, 462 bp, Homo sapiens
  chr1:5924108-5924570
  hypo
acagggagacgctgcggccactcacgggaacagccactggcccttcctccaagtattccctgagtctcctgtgcaccgtgcacggggacccccacagagataagacagacgctctctggagcttccatccgggagagacacagcacaggagcaaacactcatgcacccggccctgctgggtcagaacactgtatccagtggtccgagtcacagggccgaggtgggggtcctgcagtgccctggtattgagcccccatcccctcagcctgtgcctgccacacatacagaccttggagatgagcggctggcggcagcagaggcacacgagccaggaggccaccagctggtggcaatccacgtccaccaggttgagatggacaaagcggctgccggccctaaggggcctcacgccaacatgcaggtcctgcaccccacgaggcggcagcacgaagacacctttgg

SEQ ID NO: 247657 - DNA, 51 bp, Homo sapiens; identical to SEQ ID NO: 206556
  chr1:5927906-5927957
  hypo

SEQ ID NO: 247658 - DNA, 73 bp, Homo sapiens
  chr1:5931364-5931437
  hypo
gagggcagttccagcgtctaagagcggtgcctccatgggatgagaaatacaaatataacgcctcggtgtccat

SEQ ID NO: 247659 - DNA, 121 bp, Homo sapiens
  chr1:5931724-5931845
  hypo
tcagcacctgagcacggtgacagccagcatggcctctgtgggtggccttcatggacaacgtggtctgcccactgagcaactccagaggcggagcaccccaggacagcgggtcctgatccaa

SEQ ID NO: 247660 - DNA, 374 bp, Homo sapiens
  chr1:5932999-5933373
  hypo
gctcaaggagtggccgcaggctgtggcagccaccacgggaactgcggcttcacacccggagagccctgggctgtgagaaggcggccaccaaggaggcatttccgaccagataccatgcaggctgtgccagcgcccagacggagctgccctgcccagcgaggacacggaaaaggccattcccaggcccacgccacccctgccctgacctggccccagccctcccctccaggaggggagagaaggacacaagggtcaggccctgggaatacccaggaagccccgagatcagtttgtcctccgttgcccctttaccttggcgtgtttagtgggcactgcgctggacttccaaggtgacacggcgtccatgcccttct

SEQ ID NO: 247661 - DNA, 69 bp, Homo sapiens; identical to SEQ ID NO: 206559
  chr1:5935554-5935623
  hypo

SEQ ID NO: 247662 - DNA, 529 bp, Homo sapiens
  chr1:5940499-5941028
  hypo
tcttcattctcctgccgtgtcagtggcagcctccgtttcctggtgacgaatgaaagcgtgtggcactcacagttcgctgcacatggattcttacttctggatctctgggtcgcaaggcgggctgcctcacaaactctaacctcggcctctcgatggccacattgatcaaggataggcctgtgtgcatttacacgtgcaaatgtctggctccacacacacccagggtgaaagagcccccataaactggagccttcaccagagttgtgttcataacagaaggctttggcaagcaagtggtgtggcctcgggacaagcgtgtctcacggccggtgggtgtggcaccctacaaacttgcaacttgcaaacctgagtgtcctgggggaagccgtgcttgcccacggcacactctcctgcaaggatgggacccacaacctcggtgtggcctttacttccccaaggggcgaggcagagcaccgccaacgaagctgtgtcccaaaatgaaccacccagggtacgcacaaaatgcttg

SEQ ID NO: 247663 - DNA, 199 bp, Homo sapiens
  chr1:5941341-5941540
  hypo
tgagccatatcctccgtccaacccaggttctcctggtgacaaaaccagagctggctgacggaggtgtctctctagaatgggtctgagctgaggctggaaagggagtgcccgtcctaccaagggagccaggcaggtctccgagctgctctacctgagttcagcccctctacatcccagggaacagcgcctggattttgga

SEQ ID NO: 247664 - DNA, 709 bp, Homo sapiens
  chr1:5942073-5942782
  hypo
ctgtagggtcaagccgcctgctcacctgtgctgagaattcggccctcaaggccaggttctgacggccacgctcacagccgtcactgcgaaggatgggaaggctggctgcctcctcccacgccctaggtggcaaccagaaaggccagtggtgcacttacccagccatctctcagtggcgcgcttacccagccatctctcagtggcgcgcttacccagccatctctcagtggcgcgcttacccagccatctctcagtggcgcgcttacccagccatctctcagtggcgcgcttacccagccatctctcagtggcgcgcttacccagccatctctcagtgacgcgcttacccagccatctctcagtggtgcgcttacccagccatctctttccaggggaattaatttcgttcttgccaatgtcccagtagctgacaccccccgcctcttgttctttctccttgacctcgacgtcagcaccatgctgtgcagcaggacagccgtgctgacttccccctcggcccaggtccctgctacatccccataaagacgcagcctccatgtcgcccacatgccctacactgtgcttctgccttcgggctaccaaccgcctcctggcacctgcagcgtccactcagtcctcactccaagccagcttcctgggaacgagcacctagaacaagggctatttcggtcctctccctgttgctctc

SEQ ID NO: 247665 - DNA, 244 bp, Homo sapiens; identical to SEQ ID NO: 206562
  chr1:5943159-5943403
  hypo

SEQ ID NO: 247666 - DNA, 222 bp, Homo sapiens
  chr1:5944299-5944521
  hypo
agctggaccaaagcccgccaccgccaaccgtgtgaccccacagcctggccatctgtcagaacccatcaccacccagttctcctaggatgtcctgtgagaacacagacgcttagcctgtggggccatctgtcctgacgcctgcctcccccaggaaaggtcacagaacacaagtaacacacaagctcccagccgaacccccgtcctactcgacaaccaagatca

SEQ ID NO: 247667 - DNA, 85 bp, Homo sapiens
  chr1:5946366-5946451
  hypo
ccaagtcgacttaacgagctgtgcacttgagcccctccgccaggccccccaccaacctctgcgctgccagcgtcgggtggatgtg

SEQ ID NO: 247668 - DNA, 216 bp, Homo sapiens
  chr1:5946683-5946899
  hypo
tctgccctgaggtgcgcacaggcaggcacccagccttgtgtcccttgacaccccatcagcagcccctatcccagcataggcctcagtcgaagcccctggaacgtcccaggtgggaccctcctgagccacccaacccacctgtcccacccaccacagtcctggacgtggagtgaagtccagggctttgctcaggccctctaacgagcaatcccgggg

SEQ ID NO: 247669 - DNA, 263 bp, Homo sapiens
  chr1:5947296-5947559
  hypo
aggggttgggcggccgctggagaaatggcacaaggctggggactcttacccacgttggccaaagtcaggtgcagccggcccttcaccaccgagtggacgccgatgggcttgacgcggccaaaccccagcatgtctccactcaccaccatgttgtcctgctcgtattcagttgccacgacctcaagctcgtgggaggcctgcacagccggccggccttggcggaggagatgctgcagaagagaaaagcgcgttcagaggctgga

SEQ ID NO: 247670 - DNA, 220 bp, Homo sapiens
  chr1:5950822-5951042
  hypo
tgcgggatagcgcccgctccttccaagcagacagacgctggaagcgtgactcgtcccatgagggacgcagcacccactgtgcctgtccttccagagagccgctaccttcatctggacggcagcagatccgatgagcagcagggagtctccgtcccagacgtcaatctgcagggtctgcacggccaggtagcgggcaaagcagcgccgctcacctggcttc

SEQ ID NO: 247671 - DNA, 145 bp, Homo sapiens; identical to SEQ ID NO: 206565
  chr1:5958567-5958712
  hypo

SEQ ID NO: 247672 - DNA, 78 bp, Homo sapiens
  chr1:5977997-5978075
  hypo
aatattcaagatggcgaacaccctctgggaccaggacgagcagagccaccaccaactgcaatgcgcacgcagcgagag

SEQ ID NO: 247673 - DNA, 129 bp, Homo sapiens
  chr1:5987704-5987833
  hypo
ttactcgaaggggacgtgggtggtttcctggaaggccgccgctccactttggggccactgacaggctccgtgggtgcatccaggtgttcttctgagcccagcgagaactggaaccggagtgtacccgac

SEQ ID NO: 247674 - DNA, 91 bp, Homo sapiens
  chr1:6007181-6007272
  hypo
agggctgctgaacacgtactccagctggaagatgaccgcaaatgcagggtggccgaccatctctgggaggcggaggcggcttctcaaaacc

SEQ ID NO: 247675 - DNA, 253 bp, Homo sapiens
  chr1:6046166-6046419
  hypo
gtcagctaagagcaataacacgcatttgctaacagcacattttgttacctgcctaattaccggtccgtccagccacttgaggacacactggaatgccgtggattccttccaaggctggcgcgctctctgtgggtggggagggacaagcacgttttgggtgaagatcctgtgccagtcgttcatcctgcccgcctgagggtcccgtgggcttcccggatgatctgtgccagtcgtattcaaataaagagaagag

SEQ ID NO: 247676 - DNA, 394 bp, Homo sapiens
  chr1:6047768-6048162
  hypo
gcaacagtcatccccggggaagcctggctgtgactgggctgcatgctgaacacaccgcttttattattcaacaccattttcactaagaagaatgactgagagacaaacatgggtacttggcagacatcttctcaaacgtgaacaaagttagcatgtcacttccgggaaaacaactgcaacaaaaatggagtttccaagcaaaaatgagaattaagaacatttgtatcctctaccatgagcctactagcttcacacttcttcaagactttcctgatgagaggggcagtgatataacgtgatcttctaaggttacaccattaaatgtgtcaatagttggaaggtctgcatgactccgtgaaccaatattttctgaacaatgcgtaatggtacaaaa

SEQ ID NO: 247677 - DNA, 134 bp, Homo sapiens
  chr1:6056053-6056187
  hypo
ctcctttgtcgtggcgtgggaagccccacactgctctttccttggtgacgggtgacccgccatgttcaggcccctcctggtctatcttcgggtgagtctattaagggatacaccatctccgctcagccagtccc

SEQ ID NO: 247678 - DNA, 297 bp, Homo sapiens
  chr1:6056508-6056805
  hypo
ccctgctggccagcgtctcaggaggctactccctgctctgcgcagtgaccacatggttagccccagagacccaggttctgcgtgtcttcagtgacagagcaaccccatgcccaccctgccggcttccccggcacctgtctccttgcaggcagcctcctccacttctccagcacacaggtacccacagagctaactgctttgacgccatgctggttgtagacaaaacaggattgggaaaaggggaaaagtggagaaatggtggggaccaccttcctggccgtccgcctttacctggac

SEQ ID NO: 247679 - DNA, 320 bp, Homo sapiens
  chr1:6059781-6060101
  hypo
caggagccagtcctcgccaccctgttcctgaccatacagagtctgtcacctgcctgtgccctgattgtaccccatctgcaccgtgtctgcaccctgcctgcgccctgtctgtaccccatgtgcgccccatccgtaccctgcctgcgccatctgcgccctctccgcaccctgtctgtgtcgtctgtgccctgtctgtgccccgtccgcatcccgcctgcgccctgtctgtgccccgtccgcaccctgcctgcaccccatccatatcctgctctgctgtctgcaccctctctgcaccctgtctgcgccgtccgtgccccgtc

SEQ ID NO: 247680 - DNA, 299 bp, Homo sapiens
  chr1:6076558-6076857
  hypo
aagtactgaatttgatgaggcgttttcacgaggcctgtgtgaaacacttaaaaattgtgcataacatgtgactggacaggcgtctaccagaaaacagtgcaaggagcttttaagccatgaggtttgcatctgtaggaaggctttggggtgctgctcacacgcggtgtgactcgggcggggcaggcagtagacggcagcggtgacactgcagtgacgctatggagcatggacactaatacgtcccactggacttctgcgtgggccccagacaggagcttgaccagcgtcaactggacctg

SEQ ID NO: 247681 - DNA, 68 bp, Homo sapiens
  chr1:6111618-6111686
  hypo
agagtctgcggagcgtgagcagcaggtgccactctgaatgggccctgcaccccgtccgccagacggac

SEQ ID NO: 247682 - DNA, 148 bp, Homo sapiens; identical to SEQ ID NO: 206568
  chr1:6129708-6129856
  hypo

SEQ ID NO: 247683 - DNA, 187 bp, Homo sapiens
  chr1:6131662-6131849
  hypo
ggaatcgatgtcacgacaagcaaggcgcctgctgcgtagggcacctgccgcttaggactcctgccaccgcgtagggctctgctgcgtaggactcctgccgccgcatagggctctgctgcgtaggactcctgcggcgagggctccctcctgccgcgtgggctcctcctgccgcgtgggctcctcctgc

SEQ ID NO: 247684 - DNA, 243 bp, Homo sapiens
  chr1:6133884-6134127
  hypo
atggttaagtctgccgcgtggaccagtgagcacgtgctcccgggagccagcgcagcagcctccctccctctttctgttttgtgagggcgccctgccccaggggagagtagaaaggtgagccaggtggccatggccagaggggatgccgagtctggtgccatcacccagcagtggatgcctcgggcctcagcatgtcccttaagctccccaggactcagatttcccacacgcgtgacccccatt

SEQ ID NO: 247685 - DNA, 43 bp, Homo sapiens
  chr1:6134427-6134470
  hypo
gcctctgggtctctcggaaggacagggacggcacacgcccaga

SEQ ID NO: 247686 - DNA, 38 bp, Homo sapiens; identical to SEQ ID NO: 226526
  chr1:6137223-6137261
  hypo

SEQ ID NO: 247687 - DNA, 714 bp, Homo sapiens
  chr1:6148940-6149654
  hypo
aatccgactccacacggcatttgctgaccctgtttttgcgtctaacattgcatcgtaaacgttttttgggaggggccagggtgccaaaaccgctggtgacatcacacgcggtcggcctgttttccagggcggagacggagcggggcctgtccaggaagcacataatcgaaggtgaggacgcgctcgggcacctcagggcccccatacctgtgggatcatcctcggaggccaaagtgatggcagcacagggcccgacccccccagttaacccactgagggcccaatcccggggcacccggtgctctggcctgaccttctccttccacccaggtagcacagcgggacgctgcagagaacgagggcagcccggtggctgagcacagaccacagaccagcctgggtttcaatccaggtttggccccacactggctgagtgggtcttcagcaggggcaccctgccccatgcctctgccacagtatctgtgcaatagggacagtaagagcgcacccggcgagggtggctgggatgcctgcagcgcccaggagaaggtgccacacagcccggggctcagcactcgcaggcaccggagcaaggcaccggggtgtctggctcttgctgtatctttattgtcttcatgcctttcctgtccgtgttcattttcttcgaggtaatagatcattccattgaaaatcacctggcggggcaagccaccc

SEQ ID NO: 247688 - DNA, 221 bp, Homo sapiens
  chr1:6155344-6155565
  hypo
caggcaagggccctcggggtccctttctgccttcacaggaggcctactccgtggcccggcagttcaacctgaccccgcccatctgcgagcaggctgagtaccacatgttccagcgtgagaaagtggaggtgcagctgccggagctgttccacaagataggtgggcaccctcgggcccctcgccccgccccaccccacccctgctctcgggcccagggcttg

SEQ ID NO: 247689 - DNA, 136 bp, Homo sapiens
  chr1:6166322-6166458
  hypo
ggaagtctcgaggacggctagatatctgtcaaaaaaagaggagagccgggcttgcctgacgttggcagcagcaggcaggccgggcccggcgggcacccgtgtgcatgctgcccggagcggacgggcacctaccggt

SEQ ID NO: 247690 - DNA, 394 bp, Homo sapiens
  chr1:6171634-6172028
  hypo
gagacacataaggaagaagccgggatgacagcggcggggagcgggcgacacagcaatgccgaggatttctagccaccgccagaagtgaggaagattgaggaagaacgaggaaggcttcccccggagctctcagagggctctccccgaggtccacggaggaacgggcaagtccctgcccagcccggcctggccaaggatacgtcacgatgcccgccagcagccagtagtcatggcgccggtgccagatgtcgtagattttcccagaggatacagcagcccgctcctcgttctgccacagcgtgtgcaactctgggaaacaagccaaggtgagcagggtgagaagtgccccagctctcacgcacaggcaggcttggagagccgctccctccctact

SEQ ID NO: 247691 - DNA, 163 bp, Homo sapiens
  chr1:6188971-6189134
  hypo
cccgacttggagccgaggccgggccgcaccaccaggtgggtgagcatcatcttgcgcttggccacctgcgtgatgcgctcctccaccgaggcccgagtcacgaagcggtagatcatcaccttcttgttctggccgatgcggtgggcgcggctgaaggcctggg

SEQ ID NO: 247692 - DNA, 416 bp, Homo sapiens
  chr1:6202201-6202617
  hypo
ccttcttcccactccgaatggcgttgtcctcaaaggaaaactcgttctcccgaatcaccgagcggctctccttgtcccccgtgtaggtgaccacgtagaagtcgggcgcccacatctcaaactcgcgttcccagttgatgatggtggagaggggcgcgctaaccaggtagggccctttggagtggccctggagagagaggccgatgccgtgagaccacctgcccttggccaggaccagccacccctcctggccgcctgccccgcctgcccacctccttgtagagggagtaaaggaacacgatggtctgcaccgtcttgcccagacccatctcatcggccaggatggtgtcagtgccctgggcccaagagaagcgcagccagttgaggccctccagctggtacgggtgcagtgtgcc

SEQ ID NO: 247693 - DNA, 64 bp, Homo sapiens
  chr1:6243323-6243387
  hypo
acctgctgcaccaagactttcgttgcacttgaaggctttttccgaaagtgtggaccctgcacca

SEQ ID NO: 247694 - DNA, 329 bp, Homo sapiens
  chr1:6278215-6278544
  hypo
tgaggagcaaaagaatgaaacgctaggtgggtgcatgagtggtggcagagtctggttctgaggtttctgagcttaaggccgtgcagcagctggctctgctcccttgagattctggtgcccactcccttgccaggtttcaggcacccgtggatgagcagtcagagagtctacagaacacgcacgacgacagcaggaacaacgcggcctcagccaggtaaagcaagtctctccactggagagtgtgcacgcgatgtggcttctgaggccaacaggacgacaaaggaaactccaggcttttcccctttggcgccagctctggggccctggct

SEQ ID NO: 247695 - DNA, 571 bp, Homo sapiens
  chr1:6280174-6280745
  hypo
gtaatcatttgtcaagagtaaaacccagaagctctgacaggccataatttcagatcctttggcttgggcagttttgattttccccgtgtttgcatggcatgaagtcttcgtccttgtcacagtagcttgggatgactcccagtccacatggaaaacatcagggagtgacaatccagcaagaaatccctcgctagttccacacctacgcaccgagcgtcggtgtgccaggccctgtgctgggcagagtgtggtatgtcagggtgtgccggttttaggtaacaagactccaccactgagtggcacctgccctattgcaaaggaatccagttcctccggaataacagtcccactgttaacctggtgctactgggaagttccacacagtaatctgagcagtgactcatggaaggatgaggaacgtttgctccagcttctctccctttccagcaagggcagagctcctaaagccaggggttagcacctggccagcttatgtggcagatggtctcagttacaacttcgctgctttcccaaactcctgcagccctcctgagtccgacttccgttgata

SEQ ID NO: 247696 - DNA, 259 bp, Homo sapiens
  chr1:6281662-6281921
  hypo
ttacaaagcctgatcggctaacgcagcttcctggtttaggaacattttccccggtcgtatcaatcccccaggttggtaaatgaacagaagggatgaataaagcctactttttaggctcaaggagcagctcgtgaaggggtggcaggtgcgctgctgccttgttttctgtcctgctaagaggctcaccccgcgacctcttctgtaaactgccactcagcagcggcctgcaagccctcacgaaaggcttcactctatgctg

SEQ ID NO: 247697 - DNA, 363 bp, Homo sapiens
  chr1:6284776-6285139
  hypo
acagagtccatctctcccagcgagtcctggttatcctttacttacactctggcctcgggggcagtggcgtgtggcctcggtcctccccaggtaactctggagggcgctgtggaatattgctgtgatttgccccttactcgtctttcacccatgttccgccttgattcggcataaggacagactgctccagtggggccttgggtcctcaggccttctgaccgcttggtcttgagtgacattccagaagagtgactaatgacataaaacgattaagaaaatccatgtggcagcggccaaccggaaacagttttgtcccaggctgcacagggtcggaggccccaaggtcaccggggccactgcccg

SEQ ID NO: 247698 - DNA, 82 bp, Homo sapiens
  chr1:6297113-6297195
  hypo
gacgtgagccaccgcgccctgcctatattaggtttttaaatagcaggaggcaaagcttttcggtgtgatcctgacttcactt

SEQ ID NO: 247699 - DNA, 39 bp, Homo sapiens; identical to SEQ ID NO: 206577
  chr1:6313883-6313922
  hypo

SEQ ID NO: 247700 - DNA, 133 bp, Homo sapiens; identical to SEQ ID NO: 206578
  chr1:6313952-6314085
  hypo

SEQ ID NO: 247701 - DNA, 101 bp, Homo sapiens
  chr1:6329524-6329625
  hypo
ggccaccaggccatcgagcattcccaatgccacaggccgagggctgtgactgcttctctcgaggtcagttaatacacagcctgaggcgggcacgagcccag

SEQ ID NO: 247702 - DNA, 534 bp, Homo sapiens
  chr1:6331651-6332185
  hypo
tagcggagcctgtccgccatccgctgtggcctctccgccatccgctgtggcctctcccagcagctgcaggcctgggttaattacctcctcctccacacccacccaggactgcaccagcctccagcagaaagcagccggaagtctcaaataatgagatcattgtggagagtcataaacaccctcaccaggggctcccctcacccagcagcaccggctcagactccgaaagaactgcccccaagtggggccaagaaaggaggcgtaaaggccaacgggaggctgctggcggaggcagggagatcgtcaccacaaaggggagaaaaggcattgggacttgggcctgggtggtggcctctcaggagcccctcctgcaggcacggagtgccgtggtcccgggacgctcggctcacagctcttgtgccggagtgtggacatggcggtccccaccctacaacaccaataatgatcatagctgtcacctgctgagtgcccactgtgggctaggcctgggccagaagccgcgtgctcatggca

SEQ ID NO: 247703 - DNA, 255 bp, Homo sapiens
  chr1:6333299-6333554
  hypo
gggctcaggcagagggaaggcgagagccaggctggaggggagggctacatgctctcatctgcgccaacctccttctcagcacccatgctcgggttctaggcacatgggactcactggccaccggatgttcctaagcgctaaccaatgaggcgacaggggcagcttcaggatgcaggtattttcccatcacaagactgactcccgctaaatgcaggcaaaaggaacagagagcacgacactggattctgagcctca

SEQ ID NO: 247704 - DNA, 403 bp, Homo sapiens; identical to SEQ ID NO: 206581
  chr1:6333775-6334178
  hypo

SEQ ID NO: 247705 - DNA, 178 bp, Homo sapiens; identical to SEQ ID NO: 206582
  chr1:6334536-6334714
  hypo

SEQ ID NO: 247706 - DNA, 247 bp, Homo sapiens
  chr1:6338580-6338827
  hypo
agcagcacagaggcggagagggatttttttgcgggtgtgataatgagttccattcaggacaaactgtatttgtgatgcttttgggaaccctgttgaggggcagcactggccaagtcaatttgggagtcaatacaacacacaggcgatgctcgaggcacagaccatggatctgaccaccccaggagagaagggccacaggttaggacatgtcaaagccaagggttcggggaccgtgtggtggccgggg

SEQ ID NO: 247707 - DNA, 85 bp, Homo sapiens
  chr1:6340040-6340125
  hypo
agatttcagtgcacgctcctctccgggaggctgagcagcaaatgcttgcggatctgcgtggggagcagacgccgcgggggcaggg

SEQ ID NO: 247708 - DNA, 330 bp, Homo sapiens; identical to SEQ ID NO: 206584
  chr1:6345508-6345838
  hypo

SEQ ID NO: 247709 - DNA, 153 bp, Homo sapiens; identical to SEQ ID NO: 206585
  chr1:6347156-6347309
  hypo

SEQ ID NO: 247710 - DNA, 586 bp, Homo sapiens
  chr1:6360424-6361010
  hypo
cacatagaggaactcggctgcaaagtcagtgccatgagccgtgaactttgtctgttcactgaggcagcctgagtccatgactcacagctggcccctcccctctccacaaacacggaatctcaccggaccccacccgatcctgtgatgcacaaggccggccctctccacaaacacagaatctcaccggaccccacccgatcctgatgcgcggccggccctctccacaaacacggaatctcaccggaccccacccgatcctgacgcgtggccggcctctctccacaaacacagaatctcaccggaccccacccgatcctgatgcgcagccagcccctcccctctccacaaacacggaatctcaccagacagcaccctatcctgatgtgtggccggcccctcccctctccacaaacacggaatctcaccggacagcaccctatcctgatgcgcggccggtccctctccacaaacacagaatgaccaacaccgggtctcactggacaacacccgatgaggcagcagcctccctgtctccattctacaagtcaggaaccagacacatggagagtcacgcttccaaagtcac

SEQ ID NO: 247711 - DNA, 111 bp, Homo sapiens
  chr1:6361454-6361565
  hypo
gtgacagtcaaccccgaggggaagatgtgagcggctattgagtgcctggtgtgcgaataccctcttcaccacccccatgctcctgcaggctccacacggcacccccagacc

SEQ ID NO: 247712 - DNA, 254 bp, Homo sapiens
  chr1:6361805-6362059
  hypo
gagggcaggaaaagctcatccggtcccagaaaccccaaagccaggtgagcttgatgaccggccaaaaaaccaagcccacactcaaaatgatcttgctgtgtgagctggacggtgacatttacagggacagcctcctccagccccagcagccagcacacacgcaccggcctgggaaaccacgcagagtttagatcagcggcagacctgctatgaaacaacaactttatactaacgatggaaaaggccaagactgg

SEQ ID NO: 247713 - DNA, 35 bp, Homo sapiens; identical to SEQ ID NO: 206586
  chr1:6363866-6363901
  hypo

SEQ ID NO: 247714 - DNA, 138 bp, Homo sapiens; identical to SEQ ID NO: 206587
  chr1:6382126-6382264
  hypo

SEQ ID NO: 247715 - DNA, 153 bp, Homo sapiens
  chr1:6385813-6385966
  hypo
aagccatgctctcatctgtgcgcccactgggttttcaccagtcccctttggtgcttatgtggactaagcaagggaggtgagcggccataacaatgccccgagtccaggttagcaggggccagggcgcctctcggcagggctaggagcaggtgg

SEQ ID NO: 247716 - DNA, 295 bp, Homo sapiens
  chr1:6391354-6391649
  hypo
gaggtcacagcagaatgggacgggccctgagcccagtgacccgtactccggtaagcaggccgtgcgaagatggaggcagaagcttcagtgacgcagcctcagccaagggacgcctggagccacccggcgctggagacgccaggagggatcctcgcctggggccaatggagggcgcagggccttgcccatacctttgcacttctggcctccagaactgtgacagaatcaacttctattgtttgagagctacccagtcagtggcactttgtcacagcagccccgggacactgtcagg

SEQ ID NO: 247717 - DNA, 65 bp, Homo sapiens
  chr1:6397255-6397320
  hypo
ggaggaggagaaggccgagggctgtggtggccaggacacagctgggaggccgagaagctcccagc

SEQ ID NO: 247718 - DNA, 282 bp, Homo sapiens
  chr1:6405497-6405779
  hypo
acacaacctctccacgtctcagtctctgtaaacacagataataaatggtcccaacaggctgctgcagagattcgaggggataacgaatgggaagaactcggtgcttaggaaacgcccaggagaggcagggatagctgtctctctctgacatgcggggataaggcaattgacaaacgtcaagtgcgtggaccatgcccggcatccagtgagggcccagagagggtgcggtctcatcaccatgcccagccccggccgtcttctggctgacggcagctctgagga

SEQ ID NO: 247719 - DNA, 179 bp, Homo sapiens; identical to SEQ ID NO: 206589
  chr1:6409753-6409932
  hypo

SEQ ID NO: 247720 - DNA, 31 bp, Homo sapiens
  chr1:6410433-6410464
  hypo
gcgcctgcccactgcgcgctaagctcctctg

SEQ ID NO: 247721 - DNA, 240 bp, Homo sapiens
  chr1:6415193-6415433
  hypo
acctgtcccagcaacgcctgacccaccctttgtgaaggacagggaaccattcacaaataggggagtgtaagcgaatacccactcacagagggcacccggcaccacccacccaaaccccagatgcacagggacaccctgacccaggattccactcgcagaaatttaccccacagctgtttccacacacggttaaacgaagcactgcaagggtactcactgcacagccgtgtataacgcagg

SEQ ID NO: 247722 - DNA, 199 bp, Homo sapiens
  chr1:6422666-6422865
  hypo
ggagaactccgcaacgacatgccctagaatgggaggccacatccctctccccaaccgaaactcactgcctcatgctagaggaagctggtagggtcagaaacttacatccaggctccagaaagatctctcagagctcaatgtgaaaaaaacaaatgacctttggctaggcgcggtcgtgcacgcctgtaatcccagcact

SEQ ID NO: 247723 - DNA, 141 bp, Homo sapiens
  chr1:6434929-6435070
  hypo
agtttggcatctgctgaaaacgatggcttcccctgttcatcctgatcagttacatggctgaagttcccactttattgatttaaagatttcagctctgagaaagacactgttaagataatggagacaggccgggcgcggtgg

SEQ ID NO: 247724 - DNA, 290 bp, Homo sapiens
  chr1:6445425-6445715
  hypo
gctcatccaacacccgaccctactaccctccccaaaactcctccaagttatgcggcccaaggccctggctgcccagtcggcgtcgcaagtgagacaccatgggcacaaaatattcccagtcatcctaccttccagtaatgcaggctccacagggtgggagatcagccctgggcccaaccacctggacgggagcgcagcaccctcgccggggccccacacatccctggccagccaccagcctcctggaagatgcctgcctcccaaactcacagagccggagagccctggca

SEQ ID NO: 247725 - DNA, 229 bp, Homo sapiens
  chr1:6446079-6446308
  hypo
caggaccttaaacctcgcaccactcaggctggccctcaggcaagtagaagaatgagttccacctgggcggagttccacctgggcagagaggtcttggctcacaggcaccgggagagctggaaggctgcggggaagccgaggaaggccaacacaccgcacaacacggcaggtgcctggccctcctctgacagtggccctcaagctccaggagggccgaggaaaatgcaga

SEQ ID NO: 247726 - DNA, 328 bp, Homo sapiens; identical to SEQ ID NO: 206590
  chr1:6486768-6487096
  hypo

SEQ ID NO: 247727 - DNA, 55 bp, Homo sapiens
  chr1:6504649-6504704
  hypo
actttgacctcagctcgcctaccagcaccctctccaactacgactcctgctcctc

SEQ ID NO: 247728 - DNA, 115 bp, Homo sapiens; identical to SEQ ID NO: 206591
  chr1:6527795-6527910
  hypo

SEQ ID NO: 247729 - DNA, 242 bp, Homo sapiens; identical to SEQ ID NO: 206592
  chr1:6528247-6528489
  hypo

SEQ ID NO: 247730 - DNA, 368 bp, Homo sapiens
  chr1:6530601-6530969
  hypo
gtaggcgtcgatgcggctcaccacggccgccagccgctgccgctcctgccgctgccgcatgcacgcgttcacgtggtggatgaagcgctccacggagccgatctaggggcaggtgagggagcttcaggtccagggtcatgacggagcagagagccgcgcaggggggacggctcccgctggccatcagggttaccatggcgacgacggcctccttggcgcgcggctcctcggtcttcctcagcaccgacttgagcagcagcgggtacttggtgagccgctggtggggtttggccagcatgtcgctcagcttcagcctctggcactgtgggtgcttctccgcccactgcggtgggggagtgggggcgggc

SEQ ID NO: 247731 - DNA, 70 bp, Homo sapiens
  chr1:6534098-6534168
  hypo
tctgggcgtccacacgctccagggcggggggcccggtcccagctggccgcagaatcggcaaactcaggga

SEQ ID NO: 247732 - DNA, 372 bp, Homo sapiens
  chr1:6534593-6534965
  hypo
tccactttgcccagcgcaatgcccttcctttcaaatacaggcagcagcacctccctgcccccaggacaggaggcatgtgtgttagaaccaggcggccagtcgcttcagcttgggccccgcccccacgagcccccgccccacccacagccccagctgcccccaccttcccaacggaaaagggaagcccgcatgggatcacacgcaggtccacagacacctgcccgcagaggtgctcacacaggcgcatctgcataccacggcagacctgtcacacgcctgcccacacgcaggcctggctcctgcatacatgattaaaatgcacaagtacacagaccccaccgcactccctcacactggcgtgcacaccagcac

SEQ ID NO: 247733 - DNA, 288 bp, Homo sapiens
  chr1:6537439-6537727
  hypo
acatttggaacaaaaggaaccgtaacatactcgggtttcattatttacagtcgacttgtccttatgacgccctagcacgtttccgacagttactgaaacactgacacaggagctctgggggccgagctgcggctcccgcctgtgctcaccttgtgggggaaggtcgaagcggacatgcccatcataatgcatggtgctgtggaacttgctgtcacaggcctcgcagaggttgaggggcccccggcggtgcagctgctggcagtcggcgtggtgacatacctggggtgg

SEQ ID NO: 247734 - DNA, 160 bp, Homo sapiens
  chr1:6562949-6563109
  hypo
ctgtgtgcagccccccggcgcctctctgccggccccggggagagctggggcaggcacacacgggtgaacaggtctcagttctggtgctcaggctgagggtgtgcatggtgcatctgggtgccaccacttgggatctcaaaggcctcgccacacctcacca

SEQ ID NO: 247735 - DNA, 73 bp, Homo sapiens
  chr1:6565119-6565192
  hypo
gccagctcctgggcccgaggatgaggctaatggagaagagaacccaggcccaggccccggccccagacagttc

SEQ ID NO: 247736 - DNA, 135 bp, Homo sapiens
  chr1:6623398-6623533
  hypo
cagaccggtgccggcggccacagggccgtgaatgggcttgtcattacttgtatattgggtaaggctggagatataggagcgtaaaagttgtactatgcgccgtgtcagagtgttttctgtcgtatctatgataga

SEQ ID NO: 247737 - DNA, 32 bp, Homo sapiens; identical to SEQ ID NO: 206595
  chr1:6639452-6639484
  hypo

SEQ ID NO: 247738 - DNA, 348 bp, Homo sapiens
  chr1:6648178-6648526
  hypo
tcaacatgcacctgcgcacacacacgggtgagaagcccttccagtgccacctctgtggcaagaccttccgaacccaaggtgaggtacgccctgcccctcccctcgcctccccatcctgaggccaaggccacaggctgagctcttgccttgtgcctgcagccagcctggacaagcacaaccgcacccacaccggggaaaggcccttcagttgcgagttctgtgaacagcgcttcactgagaaggggcccctcctgaggcacgtggccagccgccatcaggagggccggccccacttctgccagatatgcggcaagaccttcaaaggtacctgggcggccctgggagagc

SEQ ID NO: 247739 - DNA, 89 bp, Homo sapiens
  chr1:6653433-6653522
  hypo
ctcatcggggtcccgcggcggccggggtcggcctgggtccatgtcatcgctgccactgtccaactcgaagccacgcccacccgagaagg

SEQ ID NO: 247740 - DNA, 40 bp, Homo sapiens; identical to SEQ ID NO: 206596
  chr1:6672155-6672195
  hypo

SEQ ID NO: 247741 - DNA, 141 bp, Homo sapiens; identical to SEQ ID NO: 206597
  chr1:6675989-6676130
  hypo

SEQ ID NO: 247742 - DNA, 94 bp, Homo sapiens
  chr1:6688528-6688622
  hypo
gggcctcacaccccgtgcctctgcccttaggtttccgttcagccgcccggagctgctgaaggaatgggtgctgaacatcggccggggcaacttc

SEQ ID NO: 247743 - DNA, 41 bp, Homo sapiens
  chr1:6707158-6707199
  hypo
ttttgacggagtttcgctcgtccaggctggagtgcagtagc

SEQ ID NO: 247744 - DNA, 352 bp, Homo sapiens; identical to SEQ ID NO: 206598
  chr1:6711963-6712315
  hypo

SEQ ID NO: 247745 - DNA, 576 bp, Homo sapiens
  chr1:6713809-6714385
  hypo
ggctgggaatgaagcgctttcttttttaagtggctaattgcatcctttcataaataaagatgagaaaaaccctgggcagactctcattccagctgcttggtgtgctgtgcctcattaactcgagcccttgctgtactcggagaggtggttgtgtgctttacctcaatggactgggatatgtgcattttattaatttcaatctgcggaaagctactgccggacacatcttcatactcctcatcatagcgatcaaaaaggtcggtggcatctactccaacgctgatcgttccctggggcagaaaaacaagccgtcagcagaacgggtggtatttgtggaatgaaagacaatgctacacttcaacagccagctcgctttaattgaacaagtcatttgacttcagggttcactgggtttaggtaggacactccaccaggaagcccacaaagcatgaatgtcacagtccgaaccaaactgcagagcaccacagacgtccagagctagaaaacatcatttgaccaggagagccggtccgcatgtctgcagagcaatgacacgccaaagacaaaagtgttagt

SEQ ID NO: 247746 - DNA, 155 bp, Homo sapiens
  chr1:6720536-6720691
  hypo
gcatttactgcagcttctctgtccctcaactagattattcagcttcatggcaggattaggttgtctgttttattctctgcggaatgttcacattcctaaagtgtctggcacattacaggcacccaaattaaattactttgcgaataaatcaacca

SEQ ID NO: 247747 - DNA, 134 bp, Homo sapiens; identical to SEQ ID NO: 206602
  chr1:6738112-6738246
  hypo

SEQ ID NO: 247748 - DNA, 125 bp, Homo sapiens
  chr1:6750366-6750491
  hypo
attcatttgacagtcgcatatccactgctatgtcaagcatttccatgcactcccacttcattcccacaaaagctctacgacagtaaaactgtctggattttctggatgaacgggctcagacaggt

SEQ ID NO: 247749 - DNA, 77 bp, Homo sapiens
  chr1:6776385-6776462
  hypo
gagaggggataatccatgagttttaagctgtgcaccattctgggcagcgtgatgagatctctcgctgtaagcttgat

SEQ ID NO: 247750 - DNA, 83 bp, Homo sapiens; identical to SEQ ID NO: 206603
  chr1:6871010-6871093
  hypo

SEQ ID NO: 247751 - DNA, 83 bp, Homo sapiens
  chr1:6964967-6965050
  hypo
tattgcacgctgaacactccgactcgctgtgtgtccaaagccaaacattctttctccaacaggttattcgtgtggtttgctgt

SEQ ID NO: 247752 - DNA, 135 bp, Homo sapiens
  chr1:7279268-7279403
  hypo
cgtttctgtgtttacggttggactcaacgagccttttactattgtggcatatgggagggagcgttgccattctgctgccaggggtgagtgtgatctggtggctgttacattgtgtatatgcgagtaggtctctat

SEQ ID NO: 247753 - DNA, 45 bp, Homo sapiens; identical to SEQ ID NO: 206604
  chr1:7407200-7407245
  hypo

SEQ ID NO: 247754 - DNA, 84 bp, Homo sapiens; identical to SEQ ID NO: 206605
  chr1:7550323-7550407
  hypo

SEQ ID NO: 247755 - DNA, 144 bp, Homo sapiens; identical to SEQ ID NO: 206606
  chr1:7550707-7550851
  hypo

SEQ ID NO: 247756 - DNA, 523 bp, Homo sapiens
  chr1:7560633-7561156
  hypo
cccctgggtgggcccgtgggtcctgcccgcttctgtagcagcagcagcctcctctcaagggccctctgttgctcaggccgtgttcctgcctgtggtcgcccagcttcaattaccacggctcaaagtcagaggcgtgggctggctccgtccagatggagggagggccggtgttcccttgcctcagagtctgcgggtggcttcagagagaagggagcagaacctctttcctttgctgccttaaagcagcaagtctcggtgacatcaggcagttccagggcagagcttgtggccgctgtcaagcccaggagacatcagggcttcatgctcaactggtcacacccaactggcaagaggggtcccaggcagaaactctgggaaccgtagcccaggccgagagccatccccaggggactgaggtagggtctgcaggaccaaagctgcctcacacagacctttcaggaaagcaagcacagatcctcggaagcggttaccacccacctgtgccacgcgccacccctcgtcc

SEQ ID NO: 247757 - DNA, 164 bp, Homo sapiens
  chr1:7562782-7562946
  hypo
gggggattcaatgccgacggagatgtgaagtcagcgcaagaatagaaatggcctcgctgggcttagtgggggatgtgtagtacgtttccagagatcacccctgtacttcattcgctcagcacacaagagctcccctacaagggctgaagcgaggcaggcagccc

SEQ ID NO: 247758 - DNA, 125 bp, Homo sapiens
  chr1:7567307-7567432
  hypo
catatttgcacactcgcacacaccctgccttttgcacacggctgcacacacccctaccagctccagctctccggctctccctgcctcctggctgctctgatgtgaggagccgtctctgcacaggt

SEQ ID NO: 247759 - DNA, 237 bp, Homo sapiens
  chr1:7700371-7700608
  hypo
tctgcctgcacctgcggggttgggggcggccctgaccctggtgggctccatgccaccctcatgctgccagtctctgctctccccacagaaccccgacatcgtcctggtgcactacctgaacgtgccggccatcgaggactgcggcaagccttgcggccccatcctctgctccatcaacaccgacaagaaggagtgggcgaaatggacgaaagaagagctcatcgggcagctgaaacc

SEQ ID NO: 247760 - DNA, 139 bp, Homo sapiens
  chr1:7710594-7710733
  hypo
ccttttccagaggacgtgtgatgttgggacgaagcccatgccccctggcagagggaggactgtgatgccccaacagcgagcaccagaaatgacaggctcactggggacacggcagataggtccccgcatgtgcacacgg

SEQ ID NO: 247761 - DNA, 110 bp, Homo sapiens
  chr1:7717013-7717123
  hypo
gccactcccagcctcggctctgcaagccgatcctcacacaggccgcgctgcaggcagccctgtccgcgagaatgcagtccccggcctgtgtttcacggggcagccgcagg

SEQ ID NO: 247762 - DNA, 1614 bp, Homo sapiens
  chr1:7723194-7724808
  hypo
caaaggggcgtgggacggcccccgggcttggggtacgtgtccaagggctgagagtctgtggcctgcctggggtaccgggcctggactttgccagggaccccagccgctgtggggcaggtccaccacggtcctagctctgactctcttttgtgtgtgcatgtgtgtgtgcacatgtgtgcctgcgtgtgcgtgcgcgtgttgtgttccgatctccgcaggagctggcggcagcgtgcatcacaagtgtaacagcgccaaacaccgcatcatctcgcccaaggtggagccacggacaggggggtacgggagccactcggaggtgcagcacaatgacgtgtcggagggcaagcacgagcacagccacagcaagggctccagccgtgagaagaggaacggcaaggtggccaagcccgtgctcctgcaccagagcagcaccgaggtctcctccaccaaccaggtggaagtccccgacaccacccagagctcccctgtgtccatcagcagcgggctcaacagcgacccggacatggtggacagcccggtggtcacaggtgtgtccggtatggcggtggcctctgtgatggggagcttgtcccagagcgccacggtgttcatgtcagaggtcaccaatgaggccgtgtacaccatgtcccccaccgctggccccaaccaccacctcctctcacctgacgcctctcagggcctcgtcctggccgtgagctctgatggccacaagttcgcctttcccaccacgggcagctcggagagcctgtccatgctgcccaccaacgtgtccgaagagctggtcctctccaccaccctcgacggtggccggaagattccagaaaccaccatgaactttgaccccgactgtttccttaataacccaaagcagggccagacgtacgggggtggaggcctgaaagccgagatggtcagctccaacatccggcactcgccacccggggagcggagcttcagctttaccaccgtcctcaccaaggagatcaagaccgaggacacctccttcgagcagcagatggccaaagaagcgtactcctcctccgcggcggctgtggcagccagctccctcaccctgaccgccggctccagcctcctgccgtcgggcggcggcctgagtcccagcaccaccctggagcagatggacttcagcgccatcgactccaacaaggactacacgtccagcttcagccagacgggccacagcccccacatccaccagaccccctccccgagcttcttcctgcaggacgccagcaaacccctccccgtcgagcagaacacccacagcagcctgagtgactctgggggcaccttcgtgatgcccacggtgaaaacggaggcctcgtcccaaaccagctcctgcagcggtcacgtggagacgcggatcgagtccacttcctccctccacctcatgcagttccaggccaacttccaggccatgacggcagaaggggaggtcaccatggagacctcgcaggcggcggaagggagcgaggtcctgctcaagtctggggagctgcaggcttgcagctctgagcactacctgcagccggagaccaacggggtaatccgaagcgccggcggcgtccc

SEQ ID NO: 247763 - DNA, 117 bp, Homo sapiens
  chr1:7728679-7728796
  hypo
tacagcctcaggcacgcgcgtcaccaccagttcagcgcagccaggcgggctgttgccatgggaaccatcccttgaatggatggatgctgagctgtcctgcggcggtttccatggaga

SEQ ID NO: 247764 - DNA, 162 bp, Homo sapiens
  chr1:7742818-7742980
  hypo
tgggcctgggccggccgctcctaggctggctccctccctcagatccacccagcccacctccgagcaaccctcagctggcccatgaacacatcgcatgacatgggatgctgtaagagaacatacacagagttggctgggtgcggtggctcacgcctgtgatcc

SEQ ID NO: 247765 - DNA, 267 bp, Homo sapiens
  chr1:7777934-7778201
  hypo
cttgttcttcttgaagttcacgttgtgtatttccgatagttgaaattaaatcatttcgtcaataaatatttacagagggcctactgtgcaccaggaatttctgctaggcctcaggaatgtagcggtgactgggatgaacgtagtcactggcctcactgagccaacacaatttctctttacgttcatgtatatgagaccgagtttctggtgacaaaggctcatatcgtgttgggtttttgtagtcccggtggctaacaacttgagttg

SEQ ID NO: 247766 - DNA, 190 bp, Homo sapiens
  chr1:7842588-7842778
  hypo
ctttctcaataaaacgtcaactccctgggtggcagggactttgggccactgttctatccgctgggattccaagcgtccctacccagatctgcacgcaataaatgcttgctgaacgaatgcagtttgacaaaacccagcttcggaggagagcaagccaacctagagtatcgcttggaagatataaggtggt

SEQ ID NO: 247767 - DNA, 57 bp, Homo sapiens; identical to SEQ ID NO: 206612
  chr1:8044539-8044596
  hypo

SEQ ID NO: 247768 - DNA, 255 bp, Homo sapiens; identical to SEQ ID NO: 206613
  chr1:8044977-8045232
  hypo

SEQ ID NO: 247769 - DNA, 34 bp, Homo sapiens
  chr1:8106657-8106691
  hypo
agttttaggccgggcgtggtggcgcatgcctgta

SEQ ID NO: 247770 - DNA, 147 bp, Homo sapiens
  chr1:8148903-8149050
  hypo
ctgtgcaccaatagtccatcccctgcattgctgtatggcgtttcagtgcatgaatatagtacagtttattgttaatccatttttgaaatgcaggcttgaaaagcgaagcatttccatttatgtgcagttagtcgttttttcacctga

SEQ ID NO: 247771 - DNA, 116 bp, Homo sapiens
  chr1:8152858-8152974
  hypo
ctggtgtgaccgcacgtgccgtctttccaccccgttcatactcagctgctgcagctgactcaaagactttatatttttgagcagcctgttcaagaggctagcgaggttgacctctg

SEQ ID NO: 247772 - DNA, 170 bp, Homo sapiens
  chr1:8212952-8213122
  hypo
ctggctctaggactcgcattgatgtcggttaattgatatacctgaccccgctactagtgcacaattactgccctgcgtcaggccaaatcaggggcatggatcatcatgttggggacactaccccaaaggaggagatgacatggctgtccacaaaccgggagcccagttgt

SEQ ID NO: 247773 - DNA, 42 bp, Homo sapiens; identical to SEQ ID NO: 206616
  chr1:8385723-8385765
  hypo

SEQ ID NO: 247774 - DNA, 105 bp, Homo sapiens
  chr1:8385999-8386104
  hypo
tttagcgccgactcggcggacaaccccagccacgcctacatgatggacgtgtgcagccccgcagaccaggaccgaggcctgaacatccacgccctcctggcaggt

SEQ ID NO: 247775 - DNA, 69 bp, Homo sapiens
  chr1:8395503-8395572
  hypo
atatcctgctcaacggcgtgaagtatgagagcgagctgacgggctccagcgagcgcgcggagcagcctc

SEQ ID NO: 247776 - DNA, 213 bp, Homo sapiens
  chr1:8399490-8399703
  hypo
ggaagctgaatccccggaggctctggccgtgtggcactgctcaccctctctgtggcccgcagctatcctggagaagctggaggagttcctcagcgtccgcaccctctacttcatcgcctatctcgccttcggcctggggaccgggcttgccaccctctccaggaacctctacgtggtcctgtcgctctgcataacctacgggattttattttc

SEQ ID NO: 247777 - DNA, 206 bp, Homo sapiens
  chr1:8427365-8427571
  hypo
gtggggtggcttccgcaaggcaggggatgccgtgccttgagtacttgactgcccacagctgcatcttatgcctgggcatttttgtaagaagtgggaccacggctgcggtccctaaaggagggctggaatgccttgaaggagggctgactggcctataaagcccatcacatgtatctcctggagcactggacgtgtctcaacctccc

SEQ ID NO: 247778 - DNA, 300 bp, Homo sapiens
  chr1:8437575-8437875
  hypo
gtgggatttcactgccgttggttctatcgccacctcacctttcttgatgttttctaccagcaaagggggaggagacgaaagaaaaaacgaaagccataaaactgttaaaactaccattctctatctcgtaaacatttttctatttattggcctttcattatatgtgcaatcttattatccctgcacagcatcaaagtgacatccgtcagggtcaccttataaaatatacatcggcaatgtaacgtttaatgacgggagcgggacgaacgatgaaggatgagagagcgaggcctgccgcag

SEQ ID NO: 247779 - DNA, 61 bp, Homo sapiens; identical to SEQ ID NO: 206617
  chr1:8442482-8442543
  hypo

SEQ ID NO: 247780 - DNA, 41 bp, Homo sapiens; identical to SEQ ID NO: 206618
  chr1:8540771-8540812
  hypo

SEQ ID NO: 247781 - DNA, 38 bp, Homo sapiens
  chr1:8627113-8627151
  hypo
ctgggatttctggtgtgaggcaccgcacccggccagaa

SEQ ID NO: 247782 - DNA, 120 bp, Homo sapiens
  chr1:8693558-8693678
  hypo
ttactagaaatcacaacaatcccgtgagtgatttttcttcttgagtgattactctttcatggaagaggaaacatccacacagctgtgtaagacatgcttaaagcagaaaaaagcatgcaa

SEQ ID NO: 247783 - DNA, 98 bp, Homo sapiens
  chr1:8694712-8694810
  hypo
ttgttgttttcattcgggtttttgttgtcattgctgttgtttgggcaggtcttacttcttctaattgaagtcaaagaataaagatttacttatttatt

SEQ ID NO: 247784 - DNA, 146 bp, Homo sapiens; identical to SEQ ID NO: 206619
  chr1:8746806-8746952
  hypo

SEQ ID NO: 247785 - DNA, 89 bp, Homo sapiens
  chr1:8748134-8748223
  hypo
acaacagtccaaaagtgatacgcattcagtggaaaacatactctaggtaaccacacaactattccatttttcactttcagttcagggca

SEQ ID NO: 247786 - DNA, 130 bp, Homo sapiens; identical to SEQ ID NO: 206620
  chr1:8781130-8781260
  hypo

SEQ ID NO: 247787 - DNA, 32 bp, Homo sapiens; identical to SEQ ID NO: 206621
  chr1:8781290-8781322
  hypo

SEQ ID NO: 247788 - DNA, 35 bp, Homo sapiens; identical to SEQ ID NO: 206622
  chr1:8941149-8941184
  hypo

SEQ ID NO: 247789 - DNA, 32 bp, Homo sapiens
  chr1:8997092-8997124
  hypo
gcctgagccactgcgcccggccacaagactgt

SEQ ID NO: 247790 - DNA, 123 bp, Homo sapiens; identical to SEQ ID NO: 206623
  chr1:9004947-9005070
  hypo

SEQ ID NO: 247791 - DNA, 152 bp, Homo sapiens; identical to SEQ ID NO: 206624
  chr1:9027898-9028050
  hypo

SEQ ID NO: 247792 - DNA, 150 bp, Homo sapiens; identical to SEQ ID NO: 206625
  chr1:9074712-9074862
  hypo

SEQ ID NO: 247793 - DNA, 81 bp, Homo sapiens; identical to SEQ ID NO: 206626
  chr1:9084938-9085019
  hypo

SEQ ID NO: 247794 - DNA, 223 bp, Homo sapiens
  chr1:9165435-9165658
  hypo
cagctgtgccttggccgacactggggtgcagccactgtgctgcgggaaggaatcaggctgtgcctcctctgggggcagggacgacaagggccagggagggcagacctacatgcagaaccaccagcaccggcgtctgcacggccggggagccacagagggtcagcacgaaccgcacggtgctccagaccctgaggccgatgaagatgagcgggatgagcaccag

SEQ ID NO: 247795 - DNA, 52 bp, Homo sapiens; identical to SEQ ID NO: 206629
  chr1:9205248-9205300
  hypo

SEQ ID NO: 247796 - DNA, 77 bp, Homo sapiens
  chr1:9324850-9324927
  hypo
aagtggcccatctcgggtgtcctgccgcactccggccagctggtgtggtacatggactacgacgccttcctgggatg

SEQ ID NO: 247797 - DNA, 48 bp, Homo sapiens
  chr1:9332433-9332481
  hypo
aaatcagagtgaccccgaggactcaggctgaagcggcaccatttctct

SEQ ID NO: 247798 - DNA, 87 bp, Homo sapiens
  chr1:9357986-9358073
  hypo
tccctgaagagctccgtgatccagcccttacagtgggagccgcagtcactcaaatggaaaacttaaatgcaacgggagtaattgcat

SEQ ID NO: 247799 - DNA, 194 bp, Homo sapiens
  chr1:9361976-9362170
  hypo
ttctggatacagattcgtcttccctgcacacagtgcttctgccaaagtcaccatccattgattgacagaacacctttcccactgtcacgctgtccgtgtagcactgcttccagggagctcacttcacaaccaaggaagtgtggcactgggatcatgtgcagggaattggccggtgagcacgagcccactggttt

SEQ ID NO: 247800 - DNA, 203 bp, Homo sapiens
  chr1:9384384-9384587
  hypo
tggtgtgccatctgcggctctgctctggtgagttctgctgcgatcctgtggctcagcacgtggtaggtcctcagtgaggctgtgatgagcgtgggggcgtctggtgcctgggtgcacatccctggctgtcctccatggtgtctctctgtgcccagcctctggagggtcggctcggagggctgtgggcccgggactcggtgtgt

SEQ ID NO: 247801 - DNA, 368 bp, Homo sapiens
  chr1:9384863-9385231
  hypo
ccaacactgggccagacagtcgtgtttgcgacaagtctgttcgcctggccgtggagccagcacggtcttgtcggatccagaccagacaaatgctttcttggaaaagcgagtggggtgggggagcagggacacccggcctggcgggctggtggatcggaggcgcctgtgagcgggtcagtactgggtaggcagccccattgggagccacagccactcactggctgctgcctcctgaatgggcagccggtgtggatgcagtggctgcactcgctggaagctgggactccagagctcagcacgtggagttggatgaagcttcctgtgctctcactgtagactgggcttcccccagccggggcgctgggcat

SEQ ID NO: 247802 - DNA, 187 bp, Homo sapiens
  chr1:9396673-9396860
  hypo
ctggggcagaggcaggggcaggaggccgctgcctgagttcacccgtggcgctgggctagtgaggacgcaactcctggccggctcgggcaggtccctcactctgagacaataaaagggcatagttgctgtgttcagggagccactgccctttgctgccttttcattcggtgatgaaactgcactgctc

SEQ ID NO: 247803 - DNA, 62 bp, Homo sapiens
  chr1:9399461-9399523
  hypo
aggtaattccggggcgagtctggaggcgacggagaggtgctctgagacggctgcagtggagg

SEQ ID NO: 247804 - DNA, 224 bp, Homo sapiens
  chr1:9400677-9400901
  hypo
ctggggagggtccccgcagcacctgggtctgcggtctgagccgcctgtgctgtgatgtggccggccttccctgccaccgaggggcgtgggatgcacccgtcccctgctcgcccctctgcctgcaaaggtaacatgctgctgttttttattttatggaaagtccagcttgcagaggaaatacctttctcaacgcagcctgtctgatgtcgcggagcagctctgcc

SEQ ID NO: 247805 - DNA, 479 bp, Homo sapiens
  chr1:9402328-9402807
  hypo
agtgacgatccctccgtgagaatgaagaaatgcaacccatgagaagaggtttgcgtagtgacaagtccagaaactgtgtgcatcagcctggggcacccctagctgtgggcagaagctccatggtgcagctcatagtggcagtcaggccccagcgtcaaccgtgggagagcacggaggatcccagtggcttgtcaattcgctgatagcagaaggtagggcctttgccagtttggagctgcctcagggtgttgacctgctcagtgagaaagtaggcgcctaggaatccaaacgtccctctcccgcctcatcctgccttgttcccagtgtagtgatcaccctgacatcggttctcccatgtcctcatcccccgccagcccgcggggtcatcccctccccagaccacagtttgggcccaggggtctggggcacacatccgagatgcaggcacacatcccggactcctccggagaaactccatc

SEQ ID NO: 247806 - DNA, 252 bp, Homo sapiens; identical to SEQ ID NO: 206635
  chr1:9420430-9420682
  hypo

SEQ ID NO: 247807 - DNA, 425 bp, Homo sapiens
  chr1:9427427-9427852
  hypo
aatattgctgctgtggttagcgctgtttgctgaacacccacccaagctgcgctgacctgcagtttctctgtctccccagccgagccgctgccgctcatggatttgtgccgtcgctcggtgcgcctggccctggggagggagcgcctgggggagatccacacgctgccgctgccggcttccctcaaggcctacctcctctaccagtgacgttcgccatcataccgccagcgcgacagccacctggtgccaactcactgagccgcctgccgctggggccgccgcaccctgcaccttggaccggcatccgtagccatggacagaggtccctggtcttccctcatcctccgtggctgcctccatgggacaaggaccgattccaacacaggctcctctttcccccttcccgacatcagcagaaggcagca

SEQ ID NO: 247808 - DNA, 92 bp, Homo sapiens; identical to SEQ ID NO: 206637
  chr1:9539439-9539531
  hypo

SEQ ID NO: 247809 - DNA, 37 bp, Homo sapiens
  chr1:9549417-9549454
  hypo
ccatattctaaagtgcgtaattcgctggtttttagca

SEQ ID NO: 247810 - DNA, 32 bp, Homo sapiens; identical to SEQ ID NO: 206638
  chr1:9579431-9579463
  hypo

SEQ ID NO: 247811 - DNA, 152 bp, Homo sapiens
  chr1:9579703-9579855
  hypo
ctcaaaaaaaaaaaaaaagagggaggttggggagggcacaccttccacaatcctgttagctgttcatgttacacaggcggtgcaataaaaaccagagcaggagagacacagaaacaaatgcgtctccactgggacatcgctggggcattgag

SEQ ID NO: 247812 - DNA, 80 bp, Homo sapiens
  chr1:9654069-9654149
  hypo
tccctggctgttcatgtagtcggcgcccggtggcgctgtcctaatgccgagcactgagcgcctccctgcattctcctgta

SEQ ID NO: 247813 - DNA, 218 bp, Homo sapiens; identical to SEQ ID NO: 206639
  chr1:9655906-9656124
  hypo

SEQ ID NO: 247814 - DNA, 219 bp, Homo sapiens; identical to SEQ ID NO: 206640
  chr1:9664191-9664410
  hypo

SEQ ID NO: 247815 - DNA, 111 bp, Homo sapiens; identical to SEQ ID NO: 206641
  chr1:9664794-9664905
  hypo

SEQ ID NO: 247816 - DNA, 127 bp, Homo sapiens; identical to SEQ ID NO: 206642
  chr1:9666790-9666917
  hypo

SEQ ID NO: 247817 - DNA, 246 bp, Homo sapiens
  chr1:9667250-9667496
  hypo
ttgagtgcctggcacggggctgggcatttttgcttcaaggcgaaagggttggcatgaggttggcaaaggcgacagtgtcactttaataccgagactcgtagtggagatagtttgctgtgagccgagggggtaggagggggcatgtggggagggccgggtcttgctggcacctcccagccacccgctcctaatggcgtgaatgtggtcggattgcttttctgctttaactaacgcacgcctcctctg

SEQ ID NO: 247818 - DNA, 132 bp, Homo sapiens; identical to SEQ ID NO: 206643
  chr1:9670774-9670906
  hypo

SEQ ID NO: 247819 - DNA, 110 bp, Homo sapiens
  chr1:9725448-9725558
  hypo
ctacaggcgcacgccgccatgcccggctaattttttgtattttggtagagatggggagcgctcacaagctcttgccgtagctctggtttacattccgcacagggctgtgg

SEQ ID NO: 247820 - DNA, 428 bp, Homo sapiens
  chr1:9775701-9776129
  hypo
tggaggacgagcaacggcgtctgtgtgacgtgcagcccttcctgcccgtcctgcgcctggtggcccgtgagggcgaccgcgtgaagaagctcatcaactcacagatcagcctcctcatcggcaaaggtagctctgccgagtgggccgtgtggccgggctggccctgcctgccccacccgctgacccagccctccccaccccgcaggcctccacgagtttgactccttgtgcgacccagaagtgaacgactttcgcgccaagatgtgccaattctgcgaggaggcggccgcccgccggcagcagctgggctgggaggcctggctgcagtacagtttccccctgcagctggagccctcggctcaaacctgggggcctggtaccctgcggctcccgaaccgggcccttctggtcaacgttaagtttgaggg

SEQ ID NO: 247821 - DNA, 177 bp, Homo sapiens; identical to SEQ ID NO: 206645
  chr1:9780744-9780921
  hypo

SEQ ID NO: 247822 - DNA, 149 bp, Homo sapiens; identical to SEQ ID NO: 206646
  chr1:9781134-9781283
  hypo

SEQ ID NO: 247823 - DNA, 143 bp, Homo sapiens
  chr1:9787397-9787540
  hypo
agcaaagactgttctcctcccgagggaaccttcttcccaggcctcccgccagactgcctgggtcctggcgcctggcggtcacctggtgcctactgtccgacaggatgccttgatcctcgtgcgacccaccctgtgtatcctcc

SEQ ID NO: 247824 - DNA, 252 bp, Homo sapiens
  chr1:9795910-9796162
  hypo
tgagtggtgtgcagtcgagcgctcggtgttacctgcacgcctctgccactgtcttcgaggacctgcaggtccagcccctccttgcaggtatacagacagtcgatcaccttcttatccgcgagtttcccggaacggagagttaagccagccagattgcctcggaaaaactgggtcatgtgcaggtcgccacctttgggtcaggggagaaaaggcgaagtcaggcgtgcaacccagcatcgcccaactcacttc

SEQ ID NO: 247825 - DNA, 38 bp, Homo sapiens
  chr1:9841766-9841804
  hypo
ctgggactacaggagtgagtcaccgcgcccagcttatt

SEQ ID NO: 247826 - DNA, 165 bp, Homo sapiens
  chr1:9867158-9867323
  hypo
gttggttttacccccggctcagcaattcctccaagtgcactcaagcctgtgagaagccctgcagtaacgaaacctgtttaacgttaacagcgcttcccaagcttacatgaccgagacctcattgacctaacagcacctgtccacgtcacacacctagggagaccc

SEQ ID NO: 247827 - DNA, 145 bp, Homo sapiens
  chr1:9897056-9897201
  hypo
ggtccaattatgtgcgattagtggatttgttctttgttctgtggcatattaattgcagatctggtattctggcaattaacacaattatggggtccgtttctcttccggcaggtcgtaagccacatgctttcggccagggagttcg

SEQ ID NO: 247828 - DNA, 347 bp, Homo sapiens
  chr1:9929961-9930308
  hypo
ggggcgggagccgacgccacatagaacaggctgccgcatgatccaggaggcacacctgggcagacacacccaggcaggttgtgcgtggtgagctgctgtcccagggagctgcctgagccactgcctggaaggtttctgctgagttgggtgcacaagccaggtcacacccagcatcggtgcttgggaacaggcccctgtgccaggacagagccctaagacatccaggagaacaagggctggctggtgatctaggtcaggccccgcatgccagcctcaaagcacagcaaacgcagccgtcagcactctgctttcgggggcccgctcgcgtctggacatgccacaggttg

SEQ ID NO: 247829 - DNA, 43 bp, Homo sapiens
  chr1:9938566-9938609
  hypo
catgctagaaacacacgaaaagcacagtcgcagcttgttcaca

SEQ ID NO: 247830 - DNA, 120 bp, Homo sapiens
  chr1:9981142-9981262
  hypo
tactctgaggctaccgattctacagtgggttccaaatgaaagaagagaaagtcatagcaggtactcaagtttatgatggatgggtctggcataatgctttgtactctcattaatgttggg

SEQ ID NO: 247831 - DNA, 145 bp, Homo sapiens
  chr1:10091839-10091984
  hypo
tccaatccacttatagtcttcgtcagcggcaaaatctggaatttcatggtactgttactttgatcgctcaacttagatttatattttataaatatatatatacatacatatatatatattttttgagatggagtcgcgctctgtc

SEQ ID NO: 247832 - DNA, 86 bp, Homo sapiens
  chr1:10103747-10103833
  hypo
agtgctgggattacaggcgtgatccaacgcgctgggccgggatgcttcttataaatagatggtgtaatcaccgttggccaggtggc

SEQ ID NO: 247833 - DNA, 43 bp, Homo sapiens; identical to SEQ ID NO: 206651
  chr1:10123669-10123712
  hypo

SEQ ID NO: 247834 - DNA, 82 bp, Homo sapiens; identical to SEQ ID NO: 206652
  chr1:10150449-10150531
  hypo

SEQ ID NO: 247835 - DNA, 389 bp, Homo sapiens
  chr1:10166302-10166691
  hypo
tcccgtgatgggcccgtctcttgcctcaccttcccgtgcagccagccagttggctgtgccttccactcccctcagtcctcacagtgcagcctctggaactgctgcgggaagccagccttcatccccgcggtatcgcccctacactgtcactcacccatgggcgtcctcaggcgtctccattctgtcgagctccccaagtccccctgccctcgccagtagcccccaagcagtgcccgccagcagttccagacagaggcccagcagcacgggtccacccctaccacccgcctcacccagtgccacgagcagacgcccctcctccctgaggatctctcctaggtatttatcccacaggagagttgcatgtgtgtttgcggtgcagggaaagg

SEQ ID NO: 247836 - DNA, 360 bp, Homo sapiens; identical to SEQ ID NO: 206653
  chr1:10174923-10175283
  hypo

SEQ ID NO: 247837 - DNA, 104 bp, Homo sapiens
  chr1:10189656-10189760
  hypo
atttttgttagacacgttatatcctgcattacagttgttcatttctatgatttttttcccttttttttctaagaatctcactctgtcacccaggctggatggag

SEQ ID NO: 247838 - DNA, 120 bp, Homo sapiens
  chr1:10190000-10190120
  hypo
caccgggcctgttttttttcccttgacaagtattgtacaactaaactaacaagaggtatggaaaagttattcgagtcctttggtggtataagaagagttcatttgaacttcatccaatag

SEQ ID NO: 247839 - DNA, 164 bp, Homo sapiens
  chr1:10190420-10190584
  hypo
gagccaccatgcctggctgaaacataaaagttttaataatatcttgtgaaaatacagaggagctggagagttttcattacatttttaccccaccggcctgttcagcggcttgactggctcttccatcttctgcctaggttgcttctttgcggttgtggttgccg

SEQ ID NO: 247840 - DNA, 36 bp, Homo sapiens
  chr1:10232964-10233000
  hypo
caccattgtgttacaactgccgacaggattcagtac

SEQ ID NO: 247841 - DNA, 213 bp, Homo sapiens
  chr1:10238658-10238871
  hypo
ctgacgtacatttacgtctcacattgccattcctcctttgcagagatcctacagtaaggaattgtttgaagaagttatttcaaagatgcggaaggcagggatcaaatccacaatagcaatagaaaaatttaagctgctcgccgagaaagtggaggagatagtggccaagaacgcacgcgcagaaatcgactacagcgacgctcctgatgagtt

SEQ ID NO: 247842 - DNA, 97 bp, Homo sapiens
  chr1:10240002-10240099
  hypo
agcgatcactaaaccgttccgccgcccaccctctgctagacacagccaaggccaacgaggcaagcagaagcagcggccgcagcgaagctgccgttca

SEQ ID NO: 247843 - DNA, 43 bp, Homo sapiens
  chr1:10310921-10310964
  hypo
ttctaaaagcagcttgggggcgggtgcagtggctcacacgtgt

SEQ ID NO: 247844 - DNA, 52 bp, Homo sapiens
  chr1:10355725-10355777
  hypo
aagcagatgctgagcggcgccaggacatagtgctgagcggggctcacattaa

SEQ ID NO: 247845 - DNA, 385 bp, Homo sapiens; identical to SEQ ID NO: 206655
  chr1:10495105-10495490
  hypo

SEQ ID NO: 247846 - DNA, 113 bp, Homo sapiens
  chr1:10556160-10556273
  hypo
ccccttctggcagtcgcgggaggagatgacgtgagggacttagcgggtatgaacacgtctgaattccagtgtgtacgaaggctttcccaggctgagggcgagttggatccagt

SEQ ID NO: 247847 - DNA, 109 bp, Homo sapiens
  chr1:10591535-10591644
  hypo
ctttagtgtatgaacgtaggaacctttcacaggcaatttaatcttctgagcagcgcacgtggagcagtgcggcgctggaatggggtttcgggcccgtagattatattgg

SEQ ID NO: 247848 - DNA, 123 bp, Homo sapiens
  chr1:10597301-10597424
  hypo
acaggcagctgcttcgcggcagccccaaggctgggtccctgcgacagagttggtaaggagcactgcacggctgctcactggctgcattgtgccagcaccccccccccccgccatcattaggag

SEQ ID NO: 247849 - DNA, 199 bp, Homo sapiens; identical to SEQ ID NO: 206656
  chr1:10653908-10654107
  hypo

SEQ ID NO: 247850 - DNA, 90 bp, Homo sapiens; identical to SEQ ID NO: 206657
  chr1:10659098-10659188
  hypo

SEQ ID NO: 247851 - DNA, 365 bp, Homo sapiens
  chr1:10676484-10676849
  hypo
cggccgtgttgtgacgttccttcccagagttcagaacgctgctgattttccctctccccctttctcccagatgagcagcacactgtgggggcgccttccggatagctctccactggtgctgtgatcgccttccccgctggtctgtgtcccacccacgcccctcctgatgacagatccttcggggggaggcagagcacccgccacgtggcctggagatggccgctccagaaaggtgttcgcagtggagacggggctctcccgcgtgccttggaggatcagatgaggttgtggacgtgggagcactttgtgaactgggcatgggaaagagtgaaggtggaaactctccccacgtcaagtagaattgc

SEQ ID NO: 247852 - DNA, 406 bp, Homo sapiens; identical to SEQ ID NO: 206659
  chr1:10680890-10681296
  hypo

SEQ ID NO: 247853 - DNA, 85 bp, Homo sapiens; identical to SEQ ID NO: 206660
  chr1:10692421-10692506
  hypo

SEQ ID NO: 247854 - DNA, 194 bp, Homo sapiens; identical to SEQ ID NO: 206661
  chr1:10692785-10692979
  hypo

SEQ ID NO: 247855 - DNA, 173 bp, Homo sapiens; identical to SEQ ID NO: 206662
  chr1:10699817-10699990
  hypo

SEQ ID NO: 247856 - DNA, 263 bp, Homo sapiens; identical to SEQ ID NO: 206663
  chr1:10703773-10704036
  hypo

SEQ ID NO: 247857 - DNA, 227 bp, Homo sapiens
  chr1:10706750-10706977
  hypo
gaggccctggctggcgtggcatgggcgccaccgtggatgtggctgacagactgcagatgggtgctcggccccaccaggaagcgctgctgccacaggcccttagcaagcaggagcgcgtgcctggtgtcagctcctgggggctcacagctgctgggctccccaggatcaactcggggcccatggtgcccacccactcagacctcacttgccggcggagtgggagagct

SEQ ID NO: 247858 - DNA, 423 bp, Homo sapiens
  chr1:10707636-10708059
  hypo
ccaccatcggcccacgcgggctggcctgctctgggacaggcagtgaggtaggagcagcagcatctttggctagaaggacatcacccgatggccatgccccagagaggctggggacagcagcaccatccgcagtgaggaacagggcctcctagcgcccttgctagcacctactcccgagacgcgaggggaacgcgggactcccggctcatcgagggactcacttctcctggaactggaggaatccgggtttgacctggggcttggcgttctctagagaagtcgttgccaagggcgaggcgggcaggtgaggcactgacgctgggatctgaggcatctggggtatggtggaagccagctgcttccaggcgagcagggtgggggtggagggcacggaggccgggctgggagcgggcccctccagag

SEQ ID NO: 247859 - DNA, 309 bp, Homo sapiens; identical to SEQ ID NO: 206665
  chr1:10708278-10708587
  hypo

SEQ ID NO: 247860 - DNA, 86 bp, Homo sapiens
  chr1:10713572-10713658
  hypo
tgagtctccagctcccgaggcgaccagcgtgggtgtgtcaggggtggctgaggctgctgacccagacgacacggcacccaggaggc

SEQ ID NO: 247861 - DNA, 146 bp, Homo sapiens
  chr1:10713965-10714111
  hypo
ctccgtgtccttggcgcccagcagcgagggcggcagccccagcgcgcccgaggagcggatgtgccggcgctcatgcttgcgcttgtgagaggtcatctggctggtggaggtgaaggtgaagccgcagccggcgcggatgcagtgga

SEQ ID NO: 247862 - DNA, 186 bp, Homo sapiens; identical to SEQ ID NO: 206666
  chr1:10714453-10714639
  hypo

SEQ ID NO: 247863 - DNA, 224 bp, Homo sapiens
  chr1:10715676-10715900
  hypo
tgcccagtgggcccgggtgcgggaggcacctgcatgcagtgatagtgggtgctcttcccattgaggtggcagccgtggtagtagacgctgcagtcgtccagcgggctgaaacgcatgaagccgtgctgcagggagttgtcgcgcttcttgtgcatgttgtagtggcggatcacgtcctgcttactcgtgaacctctgccaggagacagcgccacgtgggcagga

SEQ ID NO: 247864 - DNA, 149 bp, Homo sapiens; identical to SEQ ID NO: 206668
  chr1:10716607-10716756
  hypo

SEQ ID NO: 247865 - DNA, 1349 bp, Homo sapiens
  chr1:10719285-10720634
  hypo
ccccagccagggtggcgccttctcagccaaccacaggcctgcattcagcacccatggcagcaggtagagaaagcctgtcatgggcagatggggtgtgctgtcatgggcagtcccggtgtgcatgctagcaaaaggcagagcacacttgtgcctgggagtgtgggcgtgtgtgggtggcgtgtgtggggggcgtgtgcgaggtgcacgcgcaggtccaggagcgggggggcgctgcaggagggctcacgcatggttctgtaggtgcaagagtgaatgtgagtgcggcgcgcacctgtgtgtgtggaagcgcatggatgggagcctgagtgtgcacgcgcctggatgcacagtggatgtgtataaggtgtgagcggcaggtgtgtcctcaagcacgggcaaccctggtgaggaaggaggcctcctgtctagtctggctcctggctctgggcattgtggggtggggagcgccttacttgacagtggagacggtccccgtggtgatggagtctgttttggagaaggttgacttcaggtactcgggagtgttgaaggacagggaggcaggaggctctggccctggcccgggggcgctgggggcactgggcacgctggcgaggggtgcgggagccaggctgggggtgggcggaaccttggcggggcctggcttctggatgccccggacgtcgtacttggaagggcgccccaccttgcctgtcttgaaggcgatggccccgcccatgtcggggctgccctccccgggtttgaagaggtgcaggtacttgacattctccaggtcgtacttggatggcttcttgtaggtgctcccgttctggggccgcagattctcgccggtcttcagtttttggatgaagaagtcgtacttggaggcccgggctaccaggttctgcatctggacactgctgtgcgacggcaggggcaggatggtggccttggtctccaggtgggccgtgctgctgggcagccgcaggccgggcagggtgcccaccacctccttgcccacccgctcctcggtcttggtgctgggggccggccaggagagctgctcgccagccttgagcttgcggatgtactcctcatacttagagaaccgcgcccgcttgctgagggtatcctcggaggtgggcagcatggaggaggtggctgcctccggggtggagcccgcgtgcagcttctcaaagctgatcttcctggccagctcgtcccgcgtgttctggtcatcatagccaaacatgccgaggaactcggtcatggtggaggccgcgtagtcccgcagcgaggaggcctctcctgcagaggaggatgggggcgcatcacctctgggagggagt

SEQ ID NO: 247866 - DNA, 46 bp, Homo sapiens; identical to SEQ ID NO: 206671
  chr1:10725222-10725268
  hypo

SEQ ID NO: 247867 - DNA, 107 bp, Homo sapiens; identical to SEQ ID NO: 206672
  chr1:10725478-10725585
  hypo

SEQ ID NO: 247868 - DNA, 183 bp, Homo sapiens
  chr1:10729047-10729230
  hypo
tcggattcctaggttcgggaccttccctctcagggcgccacgagcagcaggtctccccgcaggtctctgagctgaggagaccctgcacagggttggggaaaacgggcatggactggaccgtccacctttccgggcactaaggcatgacttgtaacggcccagcggagccggcactgtcattgt

SEQ ID NO: 247869 - DNA, 250 bp, Homo sapiens
  chr1:10741779-10742029
  hypo
gctcgttagggtggcgctgggccccagggacgtggcctggcttctggactgaccccctcggggctccaggaacctttcctggaggggtggggtggggactccctgggtgggactgagctgaagccccttctcttgggtctctggccctcttgagccccaggctcacctccaaacgcccttcacagggctctacccagagaacaaaagaggccccagttgttcgaacatttctcggcgagaggaacaactg

SEQ ID NO: 247870 - DNA, 365 bp, Homo sapiens
  chr1:10757887-10758252
  hypo
actgcgtgtgcctgcgaacaagcatgttcgcacctgcgagggagtccgtgtgtttgcgtgtgagcccgctccggggccgatggagggagggtgtcgggaaagctgtgagccagcgaagtggacgggaagcatgggggccgagggagggcagagccaaggcaccacggcatggccacgggcacgggaggtcgtgggccacagacaggtgggtgttggggcagggggtcaacaggatgagaaggaaacaaaggggagaaaggagccacagagtgggtggcggagcgagggccgcgccgagtgtaaggcagacgcagggattgcattatggcaggagaggggctggcacagccgcacgctcggccccg

SEQ ID NO: 247871 - DNA, 216 bp, Homo sapiens
  chr1:10765349-10765565
  hypo
aggggatcctactggcgggagggcatcttttcccatcagggcggaatgggtggggtggctgcagttccccatctccaccttctcatctccccctgggtgctcagcaggactgaagccagcccagggtgacacgtgcattaggtgagtggtcaccagtcggggagaggacgcgaggctcagggaggggctcaggccttacctcgtagcaggtcctag

SEQ ID NO: 247872 - DNA, 316 bp, Homo sapiens
  chr1:10765943-10766259
  hypo
tgaagtggcctgcacgctcccgtggagctgcagcggcctagcagggatgcctggggacaatgacagaatacagcagcaactgctcctttactctcttccccggggcccctgaacataaaaatgacaaatgccaaactgttcgctctagcaagttggtgacagaggggcaagggcgggccaggggccaaggcatcaggaagcctccatgccccaggatcaggctgccgacagcaccttccaccccggggtcctacccatgagtcatcacagcccatgtccagagaccgtgcagggagagggacgatggtcagacaac

SEQ ID NO: 247873 - DNA, 105 bp, Homo sapiens
  chr1:10775033-10775138
  hypo
tgccgccgctcagccgcgggcctaaccttggtccaggttcccttccttccattagctgactttagggagcacacgggctccacctttcctcggctccagggacta

SEQ ID NO: 247874 - DNA, 50 bp, Homo sapiens
  chr1:10775892-10775942
  hypo
acccaatccactccccgcagcacccaatcctctcccggcagcacccaatc

SEQ ID NO: 247875 - DNA, 102 bp, Homo sapiens
  chr1:10779504-10779606
  hypo
tcctaaggctgcacacgccatgcatttagaatctgagtgcttgggagaagggatccctaagaagcagcgctgtggggaaggtggcaccgaacaagtttctaa

SEQ ID NO: 247876 - DNA, 76 bp, Homo sapiens; identical to SEQ ID NO: 206674
  chr1:10780357-10780433
  hypo

SEQ ID NO: 247877 - DNA, 240 bp, Homo sapiens
  chr1:10782910-10783150
  hypo
cccccaaaaaggcctgcccccgcaccccagaaacaggcccaacaggatgccatccgggggagcttggaagccttccgggaagagcactgccctggcaccagtcctgcgggaaggaggtgagccgggtctgccactgtctgcgctcacctgatgtgcgcccacggcagctgagcaccaatggggtgtgcgtgggtgcagacgggaggtgcgcatcatggcgccaggagccagaggaggaag

SEQ ID NO: 247878 - DNA, 41 bp, Homo sapiens; identical to SEQ ID NO: 206675
  chr1:10810301-10810342
  hypo

SEQ ID NO: 247879 - DNA, 75 bp, Homo sapiens; identical to SEQ ID NO: 206676
  chr1:10815561-10815636
  hypo

SEQ ID NO: 247880 - DNA, 51 bp, Homo sapiens
  chr1:10819916-10819967
  hypo
ttccacccctagaccttgcccgtgaacttcgcaaacacccaatccctctgg

SEQ ID NO: 247881 - DNA, 204 bp, Homo sapiens; identical to SEQ ID NO: 206677
  chr1:10823336-10823540
  hypo

SEQ ID NO: 247882 - DNA, 168 bp, Homo sapiens
  chr1:10838657-10838825
  hypo
cccaactcccctctcgcggtctttcttcctgaatctgattcctaaaatgtcttccagtggacacgaggaggagagctcccatccaaactgttcccaggcaaacgtgtccttgctcttgatccgtgtggaattccaagtccccctggcagagagcggcttctgggactc

SEQ ID NO: 247883 - DNA, 254 bp, Homo sapiens
  chr1:10901208-10901462
  hypo
gtacatgtgtgccccgggctgtatctgcacacgtgtgtgagtgcagggggtgtgcgtgactgtgcgcagtaggtgtgtgtacagtacagcatgtgtttgcatatcgggagttggggatgtttagtaattaaatcccttttcatccttctgcacctgtctcctgaaagctgagagaacagacgtcaaacgggacaagggctggattgaatacagccaattctgaaatatttattagcttgcgactccgctcaatg

SEQ ID NO: 247884 - DNA, 211 bp, Homo sapiens; identical to SEQ ID NO: 206680
  chr1:10997239-10997450
  hypo

SEQ ID NO: 247885 - DNA, 363 bp, Homo sapiens
  chr1:11018648-11019011
  hypo
tccacgacactctccggaggacaagcaaactcaaaagctgcctcagagcatcctgagcacccaccagtcctagcagaaacttccagagagttgctcctgctacttcaatggggcccgcttacctgtctattgtccctccacaggggcaggggccgggagacctgcagagacaaagaggaagcaatgtctcctgcaagcggtgagcaaaggtgagcaaacatccctgcctgtgcccatcagcaccggcaattaccccagcaggaggccggtgagagagctgtgccgcagggttgtttgctcattaagacaagaaaatcatttatgttctgggactcgagtgtcaacagacgcagggaaatgtca

SEQ ID NO: 247886 - DNA, 280 bp, Homo sapiens
  chr1:11020521-11020801
  hypo
cgtgccctttaagtcgccaggaggaggctatatttagggcccgtggacattccgcaggagctcgggcagccttcactgggagcaatcgctaatcactgcattgagtttacgggtgcccctgggcacacttaacccagggcaatgaatagttattgcgcggcctcccgctcggggcctgtgggcacacttaagcgagctcgcagatcgctgcgagcagggcacggctcgggtacacccttgggcaccctgcgccatcagcggggagaggcagagtattaaa

SEQ ID NO: 247887 - DNA, 38 bp, Homo sapiens
  chr1:11070724-11070762
  hypo
cagcaatgtgaaacattggccggtcgcggtggctcacg

SEQ ID NO: 247888 - DNA, 143 bp, Homo sapiens
  chr1:11091175-11091318
  hypo
tggctgaactgagggggagtcgtccatgtggaggaagaggtgtgctgcctttcctagagaaagggaatttgaaaccacccagagctccttagcaccctcatgtcaaatataagaaagatctgcggccgggcgcgatggctcat

SEQ ID NO: 247889 - DNA, 180 bp, Homo sapiens
  chr1:11092943-11093123
  hypo
tgacagaacaagactccgtctcaaaaaataaataaatattaaaaagtaatgattatacttgcatatggtggtattacaggtattaagatgttcataattttctgtattttccatcttctaccatgaatattgttgctttcatacttagaaaaatattgtcggccgggcgcggtggctcat

SEQ ID NO: 247890 - DNA, 69 bp, Homo sapiens
  chr1:11115037-11115106
  hypo
agcacaaaggcggcgcggtgcacgtcggagttgtagtacttcagctgcatctgcgccacctgctgctgt

SEQ ID NO: 247891 - DNA, 43 bp, Homo sapiens
  chr1:11118320-11118363
  hypo
aaaatcagcttagtcggctgggcgtggtggctcacgcctgtaa

SEQ ID NO: 247892 - DNA, 376 bp, Homo sapiens; identical to SEQ ID NO: 206681
  chr1:11130959-11131335
  hypo

SEQ ID NO: 247893 - DNA, 251 bp, Homo sapiens
  chr1:11131824-11132075
  hypo
agggcctctgggctcgctgtgctgtggctccagaactcttctctaggtcactgcaggtctcgtcaatgtcgcattcattagactgccttctccaaccaccaacgagacagctacagcacctccagcactccccaccaatctctctgcacagcacctgctgccatctgccaggatagatactgattgcccaccatccctcagcagaagggaagccccacaggggcttcattcatcgccgtatctggcacttg

SEQ ID NO: 247894 - DNA, 99 bp, Homo sapiens
  chr1:11139755-11139854
  hypo
aaagcttcttaccttgagcaggggcatctctcgggcctgctggattaaaaggtgcatttcgttgatctgctgccgcacaaggggcggtactgggttgca

SEQ ID NO: 247895 - DNA, 296 bp, Homo sapiens
  chr1:11140985-11141281
  hypo
aacattcaaaatcaacgggaatcaaaattgtgccctgggctctggaaaatgtttggctcttttcatgaatgtaaggagcaaacctaagaactagaacctggccagacacagagcccaagtgtcgcggtctgtgtgactgcggctgaggtgtaccttgaggcagatgtccctgctccgttgccacaccacctgcagctgcaccggctgcccgttgccgcgctcccacatctccagcctcattttgtcatagatatatagcaggtaatgggtgtcatcccgggcgtagctgagcatct

SEQ ID NO: 247896 - DNA, 38 bp, Homo sapiens; identical to SEQ ID NO: 206683
  chr1:11141852-11141890
  hypo

SEQ ID NO: 247897 - DNA, 33 bp, Homo sapiens
  chr1:11178562-11178595
  hypo
attacaggcgtgaaccaccgtgcctggtcttgt

SEQ ID NO: 247898 - DNA, 90 bp, Homo sapiens
  chr1:11236360-11236450
  hypo
cagtcttggtgccgcgtgacctctggggttcagagcaaagtgatgcaagcctcttccacacaaggcggcgcctgtcggaaagtcctcagg

SEQ ID NO: 247899 - DNA, 76 bp, Homo sapiens; identical to SEQ ID NO: 206684
  chr1:11264689-11264765
  hypo

SEQ ID NO: 247900 - DNA, 204 bp, Homo sapiens; identical to SEQ ID NO: 206685
  chr1:11308057-11308261
  hypo

SEQ ID NO: 247901 - DNA, 567 bp, Homo sapiens
  chr1:11313404-11313971
  hypo
gacatcacattattcgcctgtgtgcatacttccaatgtttacccctgtgaaagctcgtgtttactgtgaaccgtgggcctattaatttggcccctccttccctctcccttgctcccggtacaccagccatacttccctttcttctgtttcatcaatgtctcacactcttccacctcaaagcctcagcctggaacacagtcccccggcctgctgcaaggtagctccttcgtgtcatgtggacccccgtcaaataacaccacctcagggagggccttccttgaccctccactcaccccctccccatcactctctattctattctggtttgactttcttcatagaacttgctgctatctgaaattatcttatttacttatttattatgtttcctgccacaaaatgtcagctccatgaggacatggatctcgccttgcctcgctcacagaatggtacacggggagcctggactcccctctgccgtggcttctcacctctccctccatgctgctgattcggaccagctcgttaaggatcaacaaggctccatggatccgatcatcccgattc

SEQ ID NO: 247902 - DNA, 262 bp, Homo sapiens; identical to SEQ ID NO: 206687
  chr1:11315988-11316250
  hypo

SEQ ID NO: 247903 - DNA, 44 bp, Homo sapiens; identical to SEQ ID NO: 206688
  chr1:11323832-11323876
  hypo

SEQ ID NO: 247904 - DNA, 603 bp, Homo sapiens
  chr1:11596362-11596965
  hypo
ctctcctcttgcccccaggacgcccgaacgcagcgccagtggcgtacgctggaggccgtgcggcacgtgggcgtggccatcgtctccagtgccctcaccacggtcatcgccacagtgcccctcttcttctgcatcatcgccccatttgccaagttcggcaagattgtggcactcaacacgggcgtgtccatcctctacacgctgaccgtcagcaccgccctgctgggcatcatggcgcccagctctttcactcggacccggacttccttcctcaaggccctgggtgccgtgctgctggcaggggccctggggctgggtgcctgcctcgtgctcctgcagagcggctataagattcccctgcccgcaggggcctccctatagcccgggacgggctctggacacttgcacctttggtcccatgggtgggggacaggagctgcttcccagctcgacttcagctagctgtgtccccaggcctgggcccagggcgccctgcgggccagcgtggaggctgacacccacacagatggtgtggaccatgctgccttgtggagctgggagttggagacagccgccaccccacaggccgggctactggcagcc

SEQ ID NO: 247905 - DNA, 73 bp, Homo sapiens; identical to SEQ ID NO: 206692
  chr1:11809703-11809776
  hypo

SEQ ID NO: 247906 - DNA, 148 bp, Homo sapiens
  chr1:11825794-11825942
  hypo
tcttagctccctcccgctgctggggccctgtcccctccctggctccgaggcctggagagcttcgcctgtcccacctgagtgccagccacccaagtcatgactgtctctcctctctttagagcaacgaagattccggaggagcctgggc

SEQ ID NO: 247907 - DNA, 76 bp, Homo sapiens
  chr1:11848614-11848690
  hypo
ctggtgcagcagtgtcgggggagaaaggcagaagggctggggactgcgggggagcgtgagcacaagaggccttctc

SEQ ID NO: 247908 - DNA, 136 bp, Homo sapiens
  chr1:11852475-11852611
  hypo
gccagacgccctttcgcagacacctaaggtatcaggactactggcagccatgtgggcggaataatgaactgtggcgttggcacgtccataagcaaagggtgaggggagtggggacgtgagtttctcagtctggaca

SEQ ID NO: 247909 - DNA, 244 bp, Homo sapiens; identical to SEQ ID NO: 206693
  chr1:11856146-11856390
  hypo

SEQ ID NO: 247910 - DNA, 283 bp, Homo sapiens
  chr1:11861094-11861377
  hypo
ctgcggatcctcagcgtggggcccaggaagaagtaaaggaccatttcaggaaccaagttcaggctaccaagtggcctccgggaaagccagaacccagagtgtaggggagtgctggctccacacctccccgcagcgccatgatgttcttcaggcccagctgcttagctttgtgcagatggcccgtgatctcctccaggcgctgacggcagcaggtcatgtgcaggatggtctccaggccacagtagttcacggcggtgctggcgatcatcatggaggaggtctc

SEQ ID NO: 247911 - DNA, 31 bp, Homo sapiens
  chr1:11936743-11936774
  hypo
aaaataccatttgggctgggcgcagtggctc

SEQ ID NO: 247912 - DNA, 333 bp, Homo sapiens
  chr1:11940052-11940385
  hypo
ctcagcctggacagcgaccagagtagtggctcgaccgcttctggctcctgccaggctgcccgccacagcaccagcaccctgtgcagccagttccagagagctgagagtgagaacgggtccaacgagggcactctgtagaagaaggaggccttcatgaagccttggaaggcccgctggttcatgttggacaagaccagcaccagctgtgctactgcaaccactgtgtggacacagagtgcaagggtgtcatcgactggcggaggtggaggctgtggcaggggcacgccctaagaccatggatgagaaggctttctttgacgtgaagacaacact

SEQ ID NO: 247913 - DNA, 137 bp, Homo sapiens
  chr1:11982508-11982645
  hypo
tttcccttcctcgtcgtctcctctcaaaacacttgtgcgcgctctctggtgtcaagggctgagggcatcaggacacccattcctgcccaggcctcaccccccctcgccaggctagccccttccgagacacagggctg

SEQ ID NO: 247914 - DNA, 342 bp, Homo sapiens
  chr1:12004452-12004794
  hypo
agaatcctgaattgcgcatgcacgcgtacacacacacacacacacacacacacacacactcactcacatgctctcacgctggctttttccatccatgaaatgtgacactcttcctgtccccagcagccccctgttgccaagagggcctcagagctggtggctctggttctcttcacctggggagagacttcaccgtcctggcaggagctcgggggagcccttccccaagtgtgagcagcatccctcgtttctggatcccaggttcaggtagtgaggcctctccttcccacacctgcctggtgtatccaccccctcctcccccagcaccgcagctaatccctg

SEQ ID NO: 247915 - DNA, 157 bp, Homo sapiens
  chr1:12030699-12030856
  hypo
ctaaacattcacctcggtcacctccaggacaaccgcatccagggtggctacgagaacgtgccgactattgacatccacatgaaccagatcggctttgagcgggagtggcacaaattcctgctggagtacattgcgcccatgacggagaagctctacc

SEQ ID NO: 247916 - DNA, 143 bp, Homo sapiens; identical to SEQ ID NO: 206695
  chr1:12041765-12041908
  hypo

SEQ ID NO: 247917 - DNA, 42 bp, Homo sapiens; identical to SEQ ID NO: 206696
  chr1:12075718-12075760
  hypo

SEQ ID NO: 247918 - DNA, 180 bp, Homo sapiens
  chr1:12078706-12078886
  hypo
gcgccggccacctcgcccggctaatttttgtatttttaggtttactggcgtgagcaaccgcggccggccccaatactacactttcttgtttactgtgtagtccttatcttctggcgcaaagcgggcactcgctaaaaacctgaatgaaagtataaagcaggccgggcgcagtggctcatg

SEQ ID NO: 247919 - DNA, 33 bp, Homo sapiens
  chr1:12183828-12183861
  hypo
cccaaccagcgctcccgtcgctctctcctccac

SEQ ID NO: 247920 - DNA, 42 bp, Homo sapiens; identical to SEQ ID NO: 206699
  chr1:12188609-12188651
  hypo

SEQ ID NO: 247921 - DNA, 174 bp, Homo sapiens
  chr1:12194139-12194313
  hypo
ctagtgtccacacagcgtgttcaaatggtcagtcttgcgtatactttatcctacttgttgactgagcactggtgagcatatctgtgaggactcagggctggtggctctccagagctgctgaagtcagagatgtgtgcaggaggcggcgtggctgacatacgggcatcttggtgg

SEQ ID NO: 247922 - DNA, 75 bp, Homo sapiens
  chr1:12205428-12205503
  hypo
tagcaattctcaggctgtgacgacacccccacacacctcttcctaaacatttgcgatcagagagggacagcaagt

SEQ ID NO: 247923 - DNA, 142 bp, Homo sapiens
  chr1:12218910-12219052
  hypo
aggcaccgggcaggcgcagcaccgagtagcagcagcagcaggtagaaacaataagcggatctgaactcatcaatatggaaagttctcagaaacacagccgaggggaaaaaagcaaggggcaggacggcgcacctggtgtttc

SEQ ID NO: 247924 - DNA, 170 bp, Homo sapiens
  chr1:12241595-12241765
  hypo
ccctgacctcctggcggtgcacagagcatgccacgcacctctccatatgcacatagaccctctaacctaagtcagcgccccttctacaaggccggtgtccagcacacctgggaaaggggacatttctggccctttcctctcagaagtcgcctgctcgagctgccctccct

SEQ ID NO: 247925 - DNA, 758 bp, Homo sapiens
  chr1:12251314-12252072
  hypo
aaagcctcttcacagccccacggggcaggcggtgggagaactgtgcccacgtgagggttgaggaggtggtgcgtgggagagtggtgcgcatgctcgtgctgcgaggagcaggactgcggggaggagcgaaactgctgggaagagcgggactgcggggaagagcgggacttcggggaggagcggcactgcggggaggagcaggactgcagggaggagcgggactgtggggaggagcgggacttcggggaggagcgggactgcgggggacgagcgcgactgcgggggacgagcaggactgcggagagtagcgggactgcggagagtagcgggactgcggagagtagcaggactgccggtcctgcccctggactctggccggtgttgtgtgtgccccatgctgaggcggtccgccagcctcctggagatccgctgtctgagagtgctgggctgtctgggagggcagcgtgggtgtggcggaggcaggcgtgaccgtttgccgccctctcgctgctctagaccaggtggaaactcaagcctgcactcgggaacagaaccgcatctgcacctgcaggcccggctggtactgcgcgctgagcaagcaggaggggtgccggctgtgcgcgccgctgcgcaagtgccgcccgggcttcggcgtggccagaccaggtacggggtggggctcaggtccttggggacgcccatgggcctctcctttgtagacatccttgcagtgtcacgggcatcaacccattaattag

SEQ ID NO: 247926 - DNA, 215 bp, Homo sapiens
  chr1:12252961-12253176
  hypo
agtctgcacgtccacgtcccccacccggagtatggccccaggggcagtacacttaccccagccagtgtccacacgatcccaacacacgcagccaactccagaacccagcactgctccaagcacctccttcctgctcccaatgggccccagccccccagctgaagggagcactggcgacttcgctcttccagttggtaagtcgcaagaagtctcat

SEQ ID NO: 247927 - DNA, 373 bp, Homo sapiens
  chr1:12260317-12260690
  hypo
ataatattattattattctacgggaagaagacatcaggggaagttgcagagcagcctgtgggcggactctggaacaagaggctgaggcagtgcagcagagggtctcagacgtgagcgctctctgccccggaatgattgactgagcgcaaaggtctgcacgctttctctgtaaagggccagatggtaggaatttcaggctttgtggactgtatggtctcagtgacagctactcaaacctgcctctgtagcaagaaagcagctacatgcatagacagcacacacccaactgagagtggtgtgttcctatctaattgtgctactggacacccaaacttgagcttcccaccattccatgtgccgcaaattattcttt

SEQ ID NO: 247928 - DNA, 37 bp, Homo sapiens; identical to SEQ ID NO: 206703
  chr1:12267963-12268000
  hypo

SEQ ID NO: 247929 - DNA, 218 bp, Homo sapiens
  chr1:12285722-12285940
  hypo
gggcatgattgactgaataattggccattggtgattgaactcaatctccaatcctccccgcaggtcggaggcggtcaaagagtgtgtgtttttgcgtgagataggcccaccctctctctaataacatggttgctccctctggaaaccagccccattctgaagctgtctagggactttcagccaccagtcgtctcaggaacctacgaaaagacactctt

SEQ ID NO: 247930 - DNA, 339 bp, Homo sapiens
  chr1:12304438-12304777
  hypo
gttggaaagggaacgtaagaaagcactacttcaagccctggaggagaaatggaaggcaaggcagagatcttctgggccataagagcagttgtggtgacacgtgtaagatgagcaagaacactagattgagctaatgctgactcttgtctttgtagaatgaccgccagcagaaaggggagtcctattggtattcagttaccgcctccgtagttacaaggattgtggagaatattgaagtaagtcctgctgacttttataaaagtatcaacgtgaaagggatttctcaggtttaaacgtgtttctcctcttagtttctcatttctcgtgggctcagctgat

SEQ ID NO: 247931 - DNA, 90 bp, Homo sapiens
  chr1:12333008-12333098
  hypo
aaagctgttgggtttcggcagttatggttaatgactgttttatttgtacaggaggagagtaaacgatggaccgtgcggctggatatttct

SEQ ID NO: 247932 - DNA, 71 bp, Homo sapiens
  chr1:12368222-12368293
  hypo
ccgtagaactgtgacgcggtctgtgcttggagtggaggcgggtgggcagggtgtgtcgagcacatggagct

SEQ ID NO: 247933 - DNA, 212 bp, Homo sapiens
  chr1:12368504-12368716
  hypo
ctggattgcgttgtcgtggatctccaggacatggacatctttgctgcagagagacatccgagagaatactcgaaggcaccagaggatagtagtggagatctgatcttcccttcctattttgtgcgacagacaggaggaagcctcttaaccgagccttgtaggctgaaattgcaggtggaaaggaatttggacaagtgagtgttttttttttt

SEQ ID NO: 247934 - DNA, 31 bp, Homo sapiens
  chr1:12440114-12440145
  hypo
gcccagccccgcatttgtgtatgtttacatg

SEQ ID NO: 247935 - DNA, 202 bp, Homo sapiens
  chr1:12460133-12460335
  hypo
ttctgagcaacctgcgcattatgaggccccactcaagcgtaaaaatgaaaactgagccactggtctgtttttgtttttgctttgctacctttccatggccgtaggtggacaatcagctcattggtaccacgcagcccttcatgctctatgtgactcccctgagcaatgagaatgaggtcatcgagaccggcccagctgtgca

SEQ ID NO: 247936 - DNA, 46 bp, Homo sapiens
  chr1:12510816-12510862
  hypo
aacttaaaaatgggcttacccggacgtaatcccatcataagtcaag

SEQ ID NO: 247937 - DNA, 106 bp, Homo sapiens; identical to SEQ ID NO: 206706
  chr1:12565969-12566075
  hypo

SEQ ID NO: 247938 - DNA, 65 bp, Homo sapiens
  chr1:12567168-12567233
  hypo
ggctcctgaggggcggggccagggcctcgatgcctctgccctgcttccccgtcctcagcaggaac

SEQ ID NO: 247939 - DNA, 215 bp, Homo sapiens
  chr1:12573215-12573430
  hypo
aggcaagaatgaatacagggcgggaagtgatgctgatttggagagagagaaggtgcacgtagtcatgtagggtaacgggaaagggaataggccacagaagcatggtatgtttgccgggcgacattaaggacccatttgacgttgatgaccgtgaatgtacagtggaatcgggcagcctggctgtattcttgtccggccacatgtagctgcacagc

SEQ ID NO: 247940 - DNA, 165 bp, Homo sapiens; identical to SEQ ID NO: 206707
  chr1:12607962-12608127
  hypo

SEQ ID NO: 247941 - DNA, 83 bp, Homo sapiens
  chr1:12628466-12628549
  hypo
aagaaaagaagatagcgatggttagtggggcaggatccaggggctgggtcgctggtggccatgtgagacggggcagcagaggg

SEQ ID NO: 247942 - DNA, 35 bp, Homo sapiens; identical to SEQ ID NO: 206708
  chr1:12629954-12629989
  hypo

SEQ ID NO: 247943 - DNA, 214 bp, Homo sapiens; identical to SEQ ID NO: 206709
  chr1:12630200-12630414
  hypo

SEQ ID NO: 247944 - DNA, 343 bp, Homo sapiens
  chr1:12638789-12639132
  hypo
cagcactgtggtggcgctgactcccggacagtccagcagccccagggtcaggctctccatgaaggcgaaggctgacgctttggatgtgcagtagtcgatggcaccggggatggcagacagtgccagcacggagttgaggcacacgatgtggccattctgcagctccagcatacgtggcaggaaggccttggtggtctgagggcagatggggtgtcagggtggagcagccgcagctctgacaacccctccacctttctttcggggagaacagcccaccccggacacacatgatgctctagggcccgagccttcctgcgagggagagggccgagggctccctgcc

SEQ ID NO: 247945 - DNA, 35 bp, Homo sapiens
  chr1:12639822-12639857
  hypo
atggcttactcctaagtgaacgagtaatttctgag

SEQ ID NO: 247946 - DNA, 173 bp, Homo sapiens; identical to SEQ ID NO: 206710
  chr1:12663579-12663752
  hypo

SEQ ID NO: 247947 - DNA, 191 bp, Homo sapiens; identical to SEQ ID NO: 206711
  chr1:12711251-12711442
  hypo

SEQ ID NO: 247948 - DNA, 78 bp, Homo sapiens
  chr1:13852559-13852637
  hypo
caggcgtgagccaccgcgcctggcccgggtgtgcattttagggagctgacactggacgcagtataggggttgaactgg

SEQ ID NO: 247949 - DNA, 224 bp, Homo sapiens
  chr1:13881447-13881671
  hypo
ggtcaggcctcggcggggcctacacgcttcgctggatcactggctcccgcctcccgccccgtgcccggccgtggcagagcccttgtccgcccagcgcctatcgcggagtcaaagctgtacttcctcatcgcccggtacctatcggcgggcccgtgtcagagagcggcccaggtactggtgcaggagctggagcagtggcagttgttgccgaaggggttggactg

SEQ ID NO: 247950 - DNA, 38 bp, Homo sapiens
  chr1:13937414-13937452
  hypo
tggtgcaagaatctgttctccgcctggcgcggtggctc

SEQ ID NO: 247951 - DNA, 32 bp, Homo sapiens; identical to SEQ ID NO: 206714
  chr1:13952169-13952201
  hypo

SEQ ID NO: 247952 - DNA, 31 bp, Homo sapiens
  chr1:13952441-13952472
  hypo
gagccactgcgcctggccagggaagttattt

SEQ ID NO: 247953 - DNA, 115 bp, Homo sapiens
  chr1:14021890-14022005
  hypo
aagtgcctatgacgcggtaagatgtatctttagcccccagagttgctatgtctggacttcatgcgtgaagagcgcaagtttcagatcttttagtggctggcgtgcttgcttggat

SEQ ID NO: 247954 - DNA, 120 bp, Homo sapiens
  chr1:14025409-14025529
  hypo
ttacaggctgagccaccgcgcccggcctagcctcattcttttacaataagataacatgatatatgttgatacaacacgttttctttcttttttgagatggagtctgtctctgtcgcccag

SEQ ID NO: 247955 - DNA, 223 bp, Homo sapiens
  chr1:14087920-14088143
  hypo
cgataccagttttccgggaagaaatgtcccgatgatctgtgcagcatcttgactgggctttctgaggagttggagttctttttcagcagtcgcacaggtacattccttctgttgatacacaatgcttgtacaaactcacagcttaactttgtaataacacaggagtccctgacccccagtgttgtctaccaaatgttgtgtttacgtccgtttgtgactgggg

SEQ ID NO: 247956 - DNA, 130 bp, Homo sapiens
  chr1:14105492-14105622
  hypo
acagattaaccggcggcgacatgagcggcgccatgaagcagggttaaagcggaaacccagccaaacactacagccgtcagaggatctggctgatggcaaagcatctggagaaaacgttgcttcaaaagat

SEQ ID NO: 247957 - DNA, 149 bp, Homo sapiens
  chr1:14114662-14114811
  hypo
ctaatttaaaagtgcggcgtctactcagcccacctggcgtctgttcacttgtttctatttgacagtaactgaatatgtgctcattccagttggatttctatgtagagggtggacgtgtagtcagacaacggtgccgagaagtaccttgt

SEQ ID NO: 247958 - DNA, 194 bp, Homo sapiens; identical to SEQ ID NO: 206715
  chr1:14121945-14122139
  hypo

SEQ ID NO: 247959 - DNA, 201 bp, Homo sapiens
  chr1:14125477-14125678
  hypo
agatttctccttcaccgtggtgagtcagagctgctgggtaatgtgacttagtcagctggatcaaagggtaacaaacacaagcactccaggcaaacacagaggtctccgccacttacttcgtcactaagtccggcatgttcaccattgcctaaggaagaacagagaattaagaattgtgaggccgggcgcggtggctcacgc

SEQ ID NO: 247960 - DNA, 99 bp, Homo sapiens
  chr1:14139501-14139600
  hypo
ccccaggtctccagcggccatactgcatcctcctggggtgatgacttctccatatgagtccaccaaccgcaactgctgcagtcacgacactgtgctgat

SEQ ID NO: 247961 - DNA, 117 bp, Homo sapiens
  chr1:14149750-14149867
  hypo
agggagtgcatgtgcgcgcgtgcatgtgtgcgtgcgtgtgtgttcacgtgttctcgtgcgggcgcgtgagtggtcttcaaacgagggtcccgatccccggggcggcaggaagggggc

SEQ ID NO: 247962 - DNA, 120 bp, Homo sapiens; identical to SEQ ID NO: 206716
  chr1:14746304-14746424
  hypo

SEQ ID NO: 247963 - DNA, 299 bp, Homo sapiens
  chr1:15042013-15042312
  hypo
ctccaaaacctcagcgctccgaaaacaggctgcgtgtgtagcttgatgttcgggggctggcagatgagccagtaatggatgtttcctatcctgagagcacatttttctccgaggaccatatcacctcttagggcctaatacaggttgatatttttcctttaccctgaaagtctctgcagcaaatgtgcagtcagaaccatttttctgattgaactaaaagtatcgcagcttcattttcttttccctttgggttaagtcggtatttaaaaggcctctccgaagagtgaaactatctctaa

SEQ ID NO: 247964 - DNA, 31 bp, Homo sapiens
  chr1:15095851-15095882
  hypo
tcttttttcttttcttgagacggagtcgtgc

SEQ ID NO: 247965 - DNA, 154 bp, Homo sapiens
  chr1:15102332-15102486
  hypo
ctaaagggagggtccgggccaccgggtccagtctttacacttgaaggcgtcacaggccctttcctacagcggtcgacacccaggtctcttccacatggaaccaccatagtgagtgtggtcctgcgtgatcactgcgaccctctcctggacttcc

SEQ ID NO: 247966 - DNA, 90 bp, Homo sapiens; identical to SEQ ID NO: 206717
  chr1:15107455-15107545
  hypo

SEQ ID NO: 247967 - DNA, 108 bp, Homo sapiens; identical to SEQ ID NO: 206718
  chr1:15110198-15110306
  hypo

SEQ ID NO: 247968 - DNA, 35 bp, Homo sapiens
  chr1:15127830-15127865
  hypo
ctggcgctcactgtcggtttcgtgacgaggggtgg

SEQ ID NO: 247969 - DNA, 104 bp, Homo sapiens
  chr1:15128488-15128592
  hypo
aactttttctctgcgctgaagagagctgtcctctgagcccttcctctgtcatgccctgctttttagaatgatctcgtccagaaagctttcgtcgactctctcca

SEQ ID NO: 247970 - DNA, 210 bp, Homo sapiens; identical to SEQ ID NO: 206719
  chr1:15129598-15129808
  hypo

SEQ ID NO: 247971 - DNA, 116 bp, Homo sapiens
  chr1:15149165-15149281
  hypo
acagcgggtcctgacgtaggatgccccagtggccttctctggaggctccgtcgtgttccggcatctggtctatcccgtctttccttcccactcacctccatcgctggctctgtggc

SEQ ID NO: 247972 - DNA, 160 bp, Homo sapiens
  chr1:15149510-15149670
  hypo
atggaggttctcttcgaaagcaggaaggggtgcctgggagtgtttgctggggagacaactcggcttccccctgcaaccagccccgttctcctccctctgtagagcagccttctgggcatgtggcaccacacctgggaaggcccgtcgcctcggccacaca

SEQ ID NO: 247973 - DNA, 187 bp, Homo sapiens; identical to SEQ ID NO: 206720
  chr1:15151515-15151702
  hypo

SEQ ID NO: 247974 - DNA, 208 bp, Homo sapiens
  chr1:15178286-15178494
  hypo
cagctcttcctgacattggacgccttctcatagcagtcatcacactgtgtagcgatcgctccactaaccacccctgcaactgcaggtcactgggggagggacctagtccagctcacccggaatcctcagggcctagacatggagacccaggtcctccggaagagtttgtgagaggaatgagaaatgcgcctggactttggaacaagcc

SEQ ID NO: 247975 - DNA, 337 bp, Homo sapiens; identical to SEQ ID NO: 206721
  chr1:15194448-15194785
  hypo

SEQ ID NO: 247976 - DNA, 244 bp, Homo sapiens
  chr1:15262964-15263208
  hypo
ggtctcaggcaaaccgggctggttgatcactgggtgccctgctccactgtgccagccatactcggctacttttgccatatagaaagggatccctccaccctcccagcagttaaggcctcacctacctgctccgcccccttttagattccctgatcactttgatccttcctcatcccataagtacttaccaggcccccactgggcgcctggaactgacagctgagcaggacgaaccctactttca

SEQ ID NO: 247977 - DNA, 261 bp, Homo sapiens; identical to SEQ ID NO: 206722
  chr1:15283870-15284131
  hypo

SEQ ID NO: 247978 - DNA, 35 bp, Homo sapiens
  chr1:15344012-15344047
  hypo
attctggccaggcgcggtggctcacgcctgtaatc

SEQ ID NO: 247979 - DNA, 137 bp, Homo sapiens
  chr1:15356675-15356812
  hypo
ttcccattcatcagcgacagcggggccccggctcttccttaaggagccttctgaccgggatgcatctttatttttattttgatttttatgtattactttattttttgagacagagtctcactctgtctcccaggtgg

SEQ ID NO: 247980 - DNA, 403 bp, Homo sapiens; identical to SEQ ID NO: 206723
  chr1:15374955-15375358
  hypo

SEQ ID NO: 247981 - DNA, 152 bp, Homo sapiens
  chr1:15397055-15397207
  hypo
gcacctgtgacaaacggtatcgtgcccgtcactcaacctgggctcctggggaatccaggcagagtgagcctgaaccgtgggggacatcagtcgtttgacaaaatgatttttaaaatacctctgggccaaaagttagccaagtgtggtggcac

SEQ ID NO: 247982 - DNA, 42 bp, Homo sapiens
  chr1:15524065-15524107
  hypo
gaggctctctccaaaagccccgtactgaatcactcacctcat

SEQ ID NO: 247983 - DNA, 494 bp, Homo sapiens
  chr1:15541161-15541655
  hypo
ttttccttttcagggagtagcgggctgggcagaccggcctcccttctcgcagcctcgcacaaggagcctgagcacgtaagacatctggaatgcatcaaaggcgaggcccagccagagccggcgtgctcggtgctgctgcctaactccttcaagagcagagccgccacattcacaaagcgtctggaatcggaactgatcgtcctctctgctctttctgctttccttccaggcccttccaccgcagccatccgcacgggaggcctcgcgattgctcggaaccatcccgcaggagttcagctgatattttctagtgtggggcgagagattttgtggagcgcatttaaggggtttttgttgtgactgctgccttgtatacatttattttctttcttggaactgggcctcgccctcctcccactgacatgatggcccagtccaaggccaatggctcgcactatgcgctgaccgccatcggcctggggatgctggtcctt

SEQ ID NO: 247984 - DNA, 236 bp, Homo sapiens
  chr1:15556611-15556847
  hypo
tgtggcaatcaaaaatgtcccgaagcattgtcaaaagtctcctgggggcctgggtcagggcgcaaaatgcccgtggttaaaaactgtacaaactgaagctttaggtctactggctacggggggttgcggggagaatgtagtatggagaagtggaaaaaaagattgtcatctgagcggcaatttccatgtttgaaaaacgaaatattgattattgcgttgggccacaagactgggag

SEQ ID NO: 247985 - DNA, 35 bp, Homo sapiens
  chr1:15751733-15751768
  hypo
ttctcggccaggcacggtggctcatgcctgtaatc

SEQ ID NO: 247986 - DNA, 118 bp, Homo sapiens
  chr1:15755172-15755290
  hypo
aagcagcggaaagcggccttcaaggagctgcagtccacctttaagtagcgggggctgcagccgaccgccctgctccggccccagtgtggtgggcgagggtggcgcatgggaggccgag

SEQ ID NO: 247987 - DNA, 300 bp, Homo sapiens
  chr1:15836139-15836439
  hypo
aaaaagaaagaaaacgtgctgcgtgaaaaaagccagacaccagagagtatagaaatagtgtggtctcattgagaagaaattccagagcagaaagaggtgagagaagctcaggagagcggatgctcactgtctgcgagtccacaggggcccagcacacagcaggtcctcaggaaatacttgcagaatgaataaatgaataaagatgattattttccatcaacatcaaaagagttttcatttccgttagcaagaagttgactggccaccagcctaaaaggttatgagatgttttttcttttt

SEQ ID NO: 247988 - DNA, 242 bp, Homo sapiens
  chr1:15844705-15844947
  hypo
aggttttctagggttggcttcgacaactttgctgcttgcctgttagttcgcagaaacgaagccagcatgtcctggcctgtgtcctctaagcaggagatgaacaaaggaagagcctgactccctcgagtctccagatctatgatcagctgcctggcctgatcccgccgagatccagagcctgcccgctgtttggaaagaaaggcaggatactaattatccacgtacttttatatggctctcac

SEQ ID NO: 247989 - DNA, 92 bp, Homo sapiens
  chr1:15885334-15885426
  hypo
tttaattgcccagttcgctacaaatcctgaatggaaataattttgcctaaaattcaaaatgattgacttttcgttttgggtttttgttttgt

SEQ ID NO: 247990 - DNA, 155 bp, Homo sapiens; identical to SEQ ID NO: 206725
  chr1:15892452-15892607
  hypo

SEQ ID NO: 247991 - DNA, 88 bp, Homo sapiens
  chr1:15904689-15904777
  hypo
ggtcttgtcatacacgtctatctgagagccattctgcctagagggtacgaggaccagaactaagaaggtggcaactcatcttgggtcc

SEQ ID NO: 247992 - DNA, 47 bp, Homo sapiens
  chr1:15905373-15905420
  hypo
agggatccaaggtcgtggaagagccccggatgccaatctgcaccaca

SEQ ID NO: 247993 - DNA, 213 bp, Homo sapiens
  chr1:15919084-15919297
  hypo
agaaatgatcctgccgcaactccagcctccccaggctgcctggctgggggctttctgtgacactcattcgccttgctacaacctcaacactcatcttcaccttctttgtcccctagccctaaataaaaatatattgtttagcatgttcagaatgctttcatctgttaaaggaaaaaatttcctggccgggcgcggtggctcacgcctgtaatc

SEQ ID NO: 247994 - DNA, 133 bp, Homo sapiens
  chr1:15929094-15929227
  hypo
ccaatccaaatataaattaaatacacgtgaaataccaaaccctctagtaaacagcgagctacatacaagtcccagacactccacgaccgtttctagattgaaaatcctaggccaggcgcagtggctcacacct

SEQ ID NO: 247995 - DNA, 104 bp, Homo sapiens; identical to SEQ ID NO: 206727
  chr1:15930726-15930830
  hypo

SEQ ID NO: 247996 - DNA, 110 bp, Homo sapiens
  chr1:16049774-16049884
  hypo
gcaggagcctgctttgggaccgagagacgcggttttctgtatcttagaacttaggctctgagatccccggaaatctggaaaaagtccccgatgttgctggtcttttctgg

SEQ ID NO: 247997 - DNA, 156 bp, Homo sapiens; identical to SEQ ID NO: 206728
  chr1:16053711-16053867
  hypo

SEQ ID NO: 247998 - DNA, 96 bp, Homo sapiens
  chr1:16058408-16058504
  hypo
agagccaacaccacggatcggccccacgccttccaggtcattctctccgaccggccctgcctggagctaagtgccgagagcgaggccgagatggcc

SEQ ID NO: 247999 - DNA, 207 bp, Homo sapiens
  chr1:16058893-16059100
  hypo
tcctcacggatgaccgcctctttacgtgccatgaggattgccagaccagcttcttccgctctttgggcacagccaagctgggcgacatcagcgccgtctccaccgagccgggcaaggagtactgcgtcttggtgagctttgagtgggggcggggctgcaaggcctgcagaaggaaagctctggctgctcacccgggggcctggctct

SEQ ID NO: 248000 - DNA, 104 bp, Homo sapiens
  chr1:16059342-16059446
  hypo
gccatgtaccagggcgctcctgcctcagccccgggggtgagtgcctgctgctcttaaaacaaacccagaagagtcctcactgtccttgccgtctcttgctgcgc

SEQ ID NO: 248001 - DNA, 124 bp, Homo sapiens
  chr1:16092326-16092450
  hypo
tcttgaattcctgcccgcccatcatagcctatgggccctgcaccgggaggcaggcactgggagaggccacagcactcttactgcctctccaagacctggttcctgactccgtgagctcatcgga

SEQ ID NO: 248002 - DNA, 120 bp, Homo sapiens; identical to SEQ ID NO: 206729
  chr1:16101036-16101156
  hypo

SEQ ID NO: 248003 - DNA, 34 bp, Homo sapiens
  chr1:16138131-16138165
  hypo
gataaagtcctgaggcgagcgtaagcattgtgta

SEQ ID NO: 248004 - DNA, 85 bp, Homo sapiens; identical to SEQ ID NO: 206730
  chr1:16165179-16165264
  hypo

SEQ ID NO: 248005 - DNA, 40 bp, Homo sapiens
  chr1:16250432-16250472
  hypo
gattacaggcgtgagccaccgcacccggcctacctggtgt

SEQ ID NO: 248006 - DNA, 425 bp, Homo sapiens
  chr1:16254608-16255033
  hypo
actataaccaagatcgtacatattatgagagtgttcgaactccaggcacttatcctgaggattccaggcgggactatccagctcgagggagagagttttattcagaatgggaaacttaccaaggagactactatgaatcacgatactacgatgatcctcgggaatacagggattacaggaatgatccttatgaacaagatattagggaatatagttacaggcaaagggaacgagaaagagaacgtgaaagatttgagtctgaccgggacagagaccatgagaggaggccgattgaacgaagtcaaagtcctgttcacttgcgacgtccacagagtcctggagcgtctccctctcaggcagagaggttgccgagtgattctgagaggaggctttacagccgatcctcagaccggagtggaagctgt

SEQ ID NO: 248007 - DNA, 223 bp, Homo sapiens
  chr1:16259177-16259400
  hypo
cagagaaagaagacgtgtctgcctctgggccgtccccagaagccacccagttagccaagcagatggagctggagcaggccgtggaacacatcgcaaagctcgctgaggcctctgcctctgctgcctataaggcagatgcaccagagggccttgccccagaggacagggacaagcctgcacaccaagcaagtgaaacagagctggctgcggccatcggctccat

SEQ ID NO: 248008 - DNA, 42 bp, Homo sapiens
  chr1:16264532-16264574
  hypo
cccacctacagggaggaagacgtaggtagtccctgccagccc

SEQ ID NO: 248009 - DNA, 131 bp, Homo sapiens
  chr1:16270113-16270244
  hypo
cgctgcagagcgccggggtctgcaaactgtcgctggcagtggatgcacacgtagggcttctccccgctgtggatccgaaggtgccgcttcaggttccctgtggcgagaccgagggcgaacctggcgtgggg

SEQ ID NO: 248010 - DNA, 206 bp, Homo sapiens
  chr1:16272642-16272848
  hypo
actcaccgctggccgcactctgggcctgaccgccgcgctcctccttgaggtccctgctggggcctatgggtgtgctgcgtcctgcctgctccagcctgctcagcgtgctggtggccaccttctcctctttggctctcttgtcccctcctggagatggaacagggcagacctgccgtttcccatcaagtgcccgccatctggaggtg

SEQ ID NO: 248011 - DNA, 698 bp, Homo sapiens; identical to SEQ ID NO: 206731
  chr1:16273064-16273762
  hypo

SEQ ID NO: 248012 - DNA, 378 bp, Homo sapiens; identical to SEQ ID NO: 206732
  chr1:16274647-16275025
  hypo

SEQ ID NO: 248013 - DNA, 63 bp, Homo sapiens
  chr1:16276737-16276800
  hypo
ctatctgtgacctgaaggaacgcaagggagaatcgtggctgcgctgctcctatgcactggaca

SEQ ID NO: 248014 - DNA, 219 bp, Homo sapiens; identical to SEQ ID NO: 206733
  chr1:16283816-16284035
  hypo

SEQ ID NO: 248015 - DNA, 156 bp, Homo sapiens
  chr1:16314583-16314739
  hypo
aacgatccacacattctgtacgtacctgttttcccagggcttgggtaccccagctaaaggagtgtggttctgatctatctcctttattataggtataatccagttactgagaatgtgactatcaagagcgaaggcgctattcagttcaacttcacg

SEQ ID NO: 248016 - DNA, 148 bp, Homo sapiens; identical to SEQ ID NO: 206734
  chr1:16457640-16457788
  hypo

SEQ ID NO: 248017 - DNA, 56 bp, Homo sapiens; identical to SEQ ID NO: 206735
  chr1:16458832-16458888
  hypo

SEQ ID NO: 248018 - DNA, 514 bp, Homo sapiens; identical to SEQ ID NO: 206736
  chr1:16464269-16464783
  hypo

SEQ ID NO: 248019 - DNA, 102 bp, Homo sapiens; identical to SEQ ID NO: 206737
  chr1:16466891-16466993
  hypo

SEQ ID NO: 248020 - DNA, 686 bp, Homo sapiens
  chr1:16474842-16475528
  hypo
ccttccctgcaacccagaaccgtcactcaccctggcaggcatcctccaccttctcgtagcctgcctggcacaggcactgcccaatgggcaccagccactcgccatccactgcacagtgcatacggggctcttcaccccccggtggcaccacggcatggtccacacaggtgccggccacagtggccagggaaggtgcatcagagccggcgatggtctcagggaagtgggccaggccctgcagcagctcggggcacttcttgtagtagacacggacggagagcagcgccacacaggcaccgatatcctggaaggccaggtagaagcctttgcgggtgagcggccccacggagcgctcctccacgttcagcttcacgtggcgtgcctcgaagtcgctgctgacggtgatctcatcgggcgcaatggtgtcaatcttggtgaacaggcgcttctggaagttggtgccgtagtccaggtccgactcggcatagtagaggttgaaagtctccttgcaggagctggcgccaccagggaagctgttgcagtcacgtacagtaaacttgagctcaatgaagatacgctcagcctctcctcggtacacccagttggtgcggagccagttgtcctggtcgccagacatcacgttgcacacggagtacatgtagatcggcatgtcattcatgatgttc

SEQ ID NO: 248021 - DNA, 39 bp, Homo sapiens
  chr1:16485264-16485303
  hypo
cagcctgggtgacagagcgagagccaaaaacaaaaaaag

SEQ ID NO: 248022 - DNA, 79 bp, Homo sapiens
  chr1:16509214-16509293
  hypo
tgcttggtacctggagactacggagccagcctgccggggttctagtctgaactcagtcacttcccagctgtgtaacttt

SEQ ID NO: 248023 - DNA, 453 bp, Homo sapiens
  chr1:16534317-16534770
  hypo
tggggcctgggccccggcccaggcaccctgacggcctcaggcggccggtgagtgggcatcgcccacccccacccccacccggcatctggctgccctcagggcccatgggaggagctggtaccttcccgggctgctccggtgcctgacccagagatgagtgcccgggctgctgaattccgccccaggcgcagagaagagtgcagccgggtcatcagctccgatgccgagaagcgcctccgctcaggaccttcgaggctcactcgggtggacccagacaactccaccctgggctcctctgtgctcagggcctgctcttgcactacctggccaggctctaggaagacagcgtgggcctcggggcagccggggacctcttcacgctggtacacccgcatcttgcgccctagggttgggggcaaggagtgagagcacgggctggggtctcccccaacc

SEQ ID NO: 248024 - DNA, 139 bp, Homo sapiens
  chr1:16535158-16535297
  hypo
cgtggctggcccggcgctgtggctgtgtgtgtcggggactccagggtccctccagagctgggggctgggcaccaggacagtgtggccagctgccagccctgctgggccgcatccccccgctggtgatctctgtatctga

SEQ ID NO: 248025 - DNA, 54 bp, Homo sapiens; identical to SEQ ID NO: 206742
  chr1:16567830-16567884
  hypo

SEQ ID NO: 248026 - DNA, 274 bp, Homo sapiens
  chr1:16577954-16578228
  hypo
gaagagccacccacagctgccgttcctggagacaaactcccaccattgaggataggagagccgtctcctctggctggggaaaggctcccttcccgggaacctgaaggagtctgcctttgagccctgggtctcagtgttccccagcggccgttaacacaaggagcttcatccatgcttcttactggagactgagagcggtactctcgggtttcaggaacgagagctggaggagtggcactgataggtgatgggcgagagttcaaactggggctga

SEQ ID NO: 248027 - DNA, 32 bp, Homo sapiens; identical to SEQ ID NO: 206743
  chr1:16624057-16624089
  hypo

SEQ ID NO: 248028 - DNA, 360 bp, Homo sapiens
  chr1:16640766-16641126
  hypo
aaagatgtatatagggtctttgctgtttagagataaaatcaagtgacaaatgttttcaagaaagcagttgctaaaagtagctactcagagacaatctgtagccttaataagagcatggactttaaagccagatcgcctgaacgtgaatctttaatcctgcatttactatccgtgtaaataagttaactgtgtttcactcagttctgtcatctataaaatgcaggatcttctagtcagagtttgctgtgagaatgtaaagcagttacaatagtgcttgacacgtgataaaagctatgttcacattggctattactattatcccatatccatttctattttgcccattcaagaacaatacaa

SEQ ID NO: 248029 - DNA, 37 bp, Homo sapiens
  chr1:16676066-16676103
  hypo
aattcagggccgggcgcagtggctcaagcctgtaatc

SEQ ID NO: 248030 - DNA, 33 bp, Homo sapiens
  chr1:16689684-16689717
  hypo
cggtgccaggccgccactgcctcaactttttgg

SEQ ID NO: 248031 - DNA, 86 bp, Homo sapiens
  chr1:16782820-16782906
  hypo
gatttggatgttttcaagctagccagaggacagagccccagcgtgcctgctttgggtggcacacgtctttccgtggaggttttgct

SEQ ID NO: 248032 - DNA, 135 bp, Homo sapiens; identical to SEQ ID NO: 206744
  chr1:16810656-16810791
  hypo

SEQ ID NO: 248033 - DNA, 329 bp, Homo sapiens
  chr1:16943749-16944078
  hypo
tggggaggaatcggcgtagagatgagaggagcagcagagacagagtctcacgcagaggtgtgcccagacaccctgaaccaagttacttaacctcgtccaccaccgtggcacccgtggggtccgtgggcccgtcggtcttccaggagggattctgtgtccctgttattgtgtgtcaacatgtgttagcctgatatttatatttttaatgagagaaaacgaactctggaatttgcgaactgttttttcgttttgctttatacctcttggacactccttccgaaggattgggtctcaagggcagtggggtgtgactacggtagacagggctg

SEQ ID NO: 248034 - DNA, 35 bp, Homo sapiens; identical to SEQ ID NO: 206745
  chr1:16957469-16957504
  hypo

SEQ ID NO: 248035 - DNA, 137 bp, Homo sapiens
  chr1:17256389-17256526
  hypo
ccagggggctggtacggcagagcgtggagttgcggaggcagctgcaggaggagcaggcctcctaccggcgcaagctgcaggcctaccaggagggccagcagcggcaggcccagcttgtgcagcggctgcagggcaag

SEQ ID NO: 248036 - DNA, 152 bp, Homo sapiens
  chr1:17256874-17257026
  hypo
aggatggccccctgcgcgagcgcctactgatcccctgtgccccattcaggagtgccagcctggcccaggtgaatgccatgctccgagaacagctggaccaggcaggctcggccaaccaggctctgagtgaggacatacgaaaggtgaccaat

SEQ ID NO: 248037 - DNA, 44 bp, Homo sapiens; identical to SEQ ID NO: 206746
  chr1:17270869-17270913
  hypo

SEQ ID NO: 248038 - DNA, 138 bp, Homo sapiens
  chr1:17280804-17280942
  hypo
atggagcggcagaaacgagatgcccagagccggcaggagcaggaccgggtagggcaggctgggcagctgggcctctgtctcatagagaggcacatccctggctgaggagcccccaccacggggcggcatggccctgtc

SEQ ID NO: 248039 - DNA, 215 bp, Homo sapiens
  chr1:17292894-17293109
  hypo
ggctacagcccggcgcagtgtggatgggcggctgagcggggtccaggcggagctggcgctgcaggaggagagtgtgcggcgcagtgagcgggagcgccgggccacgctggaccaggtggccacactggagaggagcctgcaggccaccgagagcgagctccgggccagccaggtgggcaggagctgagggccagcggggcgacggggaatctgtg

SEQ ID NO: 248040 - DNA, 49 bp, Homo sapiens
  chr1:17294738-17294787
  hypo
gggcgacaagcggcgcctgaaggaggttctggacgcctccgagagccgc

SEQ ID NO: 248041 - DNA, 37 bp, Homo sapiens; identical to SEQ ID NO: 206747
  chr1:17330879-17330916
  hypo

SEQ ID NO: 248042 - DNA, 146 bp, Homo sapiens
  chr1:17331872-17332018
  hypo
ttgtctcttatttcgataacgagtgtttcggcgtgggccaggttgcagggccggagccgcagccgcaccccccacaggggcttccaacggaagagcagcaaagggatcccagccatcatccagaccacgacgtgatagccgatgac

SEQ ID NO: 248043 - DNA, 81 bp, Homo sapiens
  chr1:17384527-17384608
  hypo
tgagccactgcgcccagccaaaatttaggattttatttgcctttggccagtgggcttcgtcctttccgtctccctggctgt

SEQ ID NO: 248044 - DNA, 341 bp, Homo sapiens
  chr1:17431216-17431557
  hypo
tgcgcccggcctctttttgccttttcaatgtggttactgcagaactgaaaatgacacatggcccacgtgcagtttctatgggacagggctggtccaccctgcctctatcctggcatggtcccgggcccgcagaggctggacttcccgccgtggtaccttgtcactgctggcctcggtgctcgcctggctcatggtgacccgcagggtggtgctgggcgagagaagccagcgctgcttgccattggtggccacctcctcagcctccccatcacgcaccacctccacccacacgtgttccgagtgcttcaggctgaaggtttgggccccggctggggccgcgc

SEQ ID NO: 248045 - DNA, 95 bp, Homo sapiens
  chr1:17574315-17574410
  hypo
cagagctctaccaacgctggcccctgaggcctcacagcaaccatttttcagacgagaaaagtgaggcacgaacaattaagaaagttgcccggccg

SEQ ID NO: 248046 - DNA, 145 bp, Homo sapiens
  chr1:17575586-17575731
  hypo
aggggcagtgttggggttggcggccacagctaagtccaacaccagcatgtcgctgcagagaatcgtgcgtgtgtccctggagcatcccaccagcgcggtgtgtgtggctggcgtggagaccctcgtggacatttatgggtaagag

SEQ ID NO: 248047 - DNA, 60 bp, Homo sapiens
  chr1:17631994-17632054
  hypo
ccatgcccaccccccgcccttccctcagccttccctgcccagctgcgggcagccccatcc

SEQ ID NO: 248048 - DNA, 114 bp, Homo sapiens
  chr1:17674435-17674549
  hypo
gatgaaatggagatcggctacatccaagccccacacaaaacgctgcccgtggtcttcgactctccaaggaacagaggcctgaaggagtttcccatcaaacgcgtgatggtacct

SEQ ID NO: 248049 - DNA, 200 bp, Homo sapiens
  chr1:17702234-17702434
  hypo
aacagccagaacttccgtgtcgctgccatctacccacctacgcctgtctagtgcctaccttcttcctttgttactaattgacgcatctggtccaaagttagtctttcttgtctcactagatcctttcttattcaagaacattcctttgtcaattcttaccaatgtaagaagccgccacccttccccgccctctagatcac

SEQ ID NO: 248050 - DNA, 324 bp, Homo sapiens
  chr1:17733440-17733764
  hypo
gcccgcagggtcagcgccaagcacattcccaaccgggcaactgtgtacctttctctaggagtgcacgacacccttcccccacaactccttgttttaaaggatttaacccattaggaagcccatttttcaatctaagccagaaggagctgcgggacaaggcagtcttcactttgaaggtccctttcctgctccagtccctgggctagggttctagaagaggctggctgccacgtttacatgaggccaccgaagatctaagtccagctaagcccagggaggctcctgcaaaggctgggacctcgggtgctgcgtcctcaaccctct

SEQ ID NO: 248051 - DNA, 44 bp, Homo sapiens; identical to SEQ ID NO: 206749
  chr1:17734378-17734422
  hypo

SEQ ID NO: 248052 - DNA, 505 bp, Homo sapiens; identical to SEQ ID NO: 206750
  chr1:17736189-17736694
  hypo

SEQ ID NO: 248053 - DNA, 252 bp, Homo sapiens
  chr1:17738623-17738875
  hypo
cccaaaggtcggtgacggaccccagctgatggtgctctcatcggcggccacaatgatgctgctcttcctgcaaacaggcaggctgtcactgcagggccagcagccccagacctgcacccacgcagctatggctcaagggcatgagtgtgagctgccacttttcccttggcgtactcattccaagtagcaaacacaataacagggccaacaggtttctcctcaatcctaagattgttccgtgcaggccactca

SEQ ID NO: 248054 - DNA, 454 bp, Homo sapiens
  chr1:17813199-17813653
  hypo
cgccgctatatgtttcgtccctgcaaaattcgtatgttgaaacgtaccccacaatgtgacggtattagaaggtgtggctttgggagatgattatgtcacagccctcatgaatgagatcagtgcccttataagagaactttgctgctcccaagagcttgctcacccttctgccatgtgaggacacacagaggaagcgccatctatcaaccagaagaggggcccttggcagacaccgaacctaccaatgccttgatcttggacttttcagctgccggaacagtgagaaataaatttctgttgtctatggtattttgttatagcagagtcgattataactgagctgattaagatgctggtcccaggtcacgtatctgggtgatgacaaagttaggaataagacgttgttggcaagaccagcacccattcccacacccagtttgttattgcttttctt

SEQ ID NO: 248055 - DNA, 130 bp, Homo sapiens; identical to SEQ ID NO: 206752
  chr1:17897819-17897949
  hypo

SEQ ID NO: 248056 - DNA, 230 bp, Homo sapiens
  chr1:17898658-17898888
  hypo
ggggtcagtccacccgatgtgggagggtgcggcctgggagagaccaccagggcaccggcagaggagaacgccttgtactgggtccattttgggagcccgggacgccctcctcagccccctgctccatggggccttgtgggaatatcagggtagaaaactctgcaggcatggagagtttagctgtgggttagctcccacctgtgaccgatggagagcgtggtgcgggcccc

SEQ ID NO: 248057 - DNA, 213 bp, Homo sapiens
  chr1:17919150-17919363
  hypo
gcaggtcagcaaggccggagtgggtccgcagcgtctggaggaaatcttcaagatttcccagattgccgcagacctagtctggagttgtttggaatcctgggcttctccttacatgtgctgtttcccaaatccggaacatttgagcctcctgcgtcctgtcccgcagggtccatgcgggacgtgaggcatggcagataccggctctccgcccat

SEQ ID NO: 248058 - DNA, 121 bp, Homo sapiens
  chr1:17925973-17926094
  hypo
ctcttctaagctcacgtctgttccagccggaagagtttggttctgtctgagcaattccgagcaactgatgtggcgccttcaggatgtttctgtgttgaggaggtggcggctcagcgaagca

SEQ ID NO: 248059 - DNA, 41 bp, Homo sapiens
  chr1:17933052-17933093
  hypo
tggtgggattacaggtgtgagccaccgcgaccagtcagatt

SEQ ID NO: 248060 - DNA, 51 bp, Homo sapiens; identical to SEQ ID NO: 206754
  chr1:17934561-17934612
  hypo

SEQ ID NO: 248061 - DNA, 225 bp, Homo sapiens
  chr1:17949438-17949663
  hypo
agggagagaggctgcggcctggcctgcggcctcaccccgccctccccggcaggactaccgcaaccccctgatggagatggagcccaaggcgctgagcgcccgcaagtgccaggtggtgttcttccgcgtgaaggagatcctgcactgccactccatgttccagatcgccctgtcctcccgcgtggctgagtgggattccaccgagaagatcggggacctcttcgt

SEQ ID NO: 248062 - DNA, 169 bp, Homo sapiens
  chr1:17972154-17972323
  hypo
ggcagcatggcgagcgctggcacactagcagaggctaggagagccgtgctgccccgggacaaggtgcgtcgcaggcaccgtgcaaggcgcccccgtgggttagttccttggcatctggatcttcccctgctttcccctttcctctgctggccagcgtggagtgcggata

SEQ ID NO: 248063 - DNA, 225 bp, Homo sapiens
  chr1:17994585-17994810
  hypo
cgagaacattcaagcgaaagggccgtttcacacggtcttggcacgtggcgagggcagggtgaacattatttgctgtcattgtaataatttacctatcttaaatccgcattgctgtatatgtcgtttatttggaaaatcaagctgctcccggggtcggtgttgtcagtgggtgtggggcatcgagcccacactgcaggtctgccatcctctcgcctcactggaaga

SEQ ID NO: 248064 - DNA, 67 bp, Homo sapiens; identical to SEQ ID NO: 206756
  chr1:17996867-17996934
  hypo

SEQ ID NO: 248065 - DNA, 35 bp, Homo sapiens; identical to SEQ ID NO: 206757
  chr1:17997213-17997248
  hypo

SEQ ID NO: 248066 - DNA, 262 bp, Homo sapiens
  chr1:18006381-18006643
  hypo
tgatctctgggcccacgactgtgtctcccagggccagctcggtggtgactgggccgggaatgggtggcacagccccttcatgctcacattcagctctggtgctcagcgttgagagtcccccatgagaccctcggaggacagcatgtgagcttggagcgaggtgcacgcttctgccccgccttgccccaccctgcccctgcccctgccctgccctgcccctgcccatctgggccacccggggttggttcgctctcttttcata

SEQ ID NO: 248067 - DNA, 56 bp, Homo sapiens; identical to SEQ ID NO: 206758
  chr1:18021388-18021444
  hypo

SEQ ID NO: 248068 - DNA, 338 bp, Homo sapiens; identical to SEQ ID NO: 206759
  chr1:18023466-18023804
  hypo

SEQ ID NO: 248069 - DNA, 261 bp, Homo sapiens
  chr1:18026183-18026444
  hypo
gatcgaatggagcccgttaaatcacgtcacggagaaaacgactgactttgctacttcagtgaaattatcacatcagtcaccagctcatctcccatgcctccgacaacagagcgagggagggtcgggggcgccgcgaatggctcctgagacccactgaggacgtgcatcacatgtgagtggaggcctggccttagatattgataagagtaataatacccagagcgctccgggtgcctgagctcctttcgtcggtacaactgc

SEQ ID NO: 248070 - DNA, 35 bp, Homo sapiens
  chr1:18044920-18044955
  hypo
gcgaccacacacaccgctcacgcctgtgagtgttc

SEQ ID NO: 248071 - DNA, 91 bp, Homo sapiens
  chr1:18606300-18606391
  hypo
tttgccggtgcacccgcccctcgtttagcaggtgggcaggctggcgcaggccactgatctgccacgggtctgccggcggccgatcatgctg

SEQ ID NO: 248072 - DNA, 131 bp, Homo sapiens; identical to SEQ ID NO: 206762
  chr1:19203883-19204014
  hypo

SEQ ID NO: 248073 - DNA, 379 bp, Homo sapiens; identical to SEQ ID NO: 206763
  chr1:19208520-19208899
  hypo

SEQ ID NO: 248074 - DNA, 137 bp, Homo sapiens
  chr1:19217051-19217188
  hypo
acaaaaacccaccttgggggtccacaacccaaggttcaagtcccagtcccacggttgtgtgtccttgagcctgtgagttgcctcctgtgaacgtggttctacgtctatcaagtaagaataatcgcaccgaactcacg

SEQ ID NO: 248075 - DNA, 143 bp, Homo sapiens; identical to SEQ ID NO: 206764
  chr1:19245955-19246098
  hypo

SEQ ID NO: 248076 - DNA, 107 bp, Homo sapiens
  chr1:19246819-19246926
  hypo
tattcaaccttttccttctacgcattgacaattatcttaatctgtctctaactgtcttagacgacaaatgctttcagtatcagaacgcaatttctagacatttttgg

SEQ ID NO: 248077 - DNA, 361 bp, Homo sapiens
  chr1:19258523-19258884
  hypo
caacgagctggggccggcacgtggtgagcaagaaaggcaccaagctctggagctggacggaacaaggctcaaatcccagtggtaccaaccacacgctcccgggcaagtgatttccaatccctaagcctccccatttggtcatcataaagatcccccctgcctctggaggctgctacagtttgtgaaaaggagggtatacacaggctccgaataaacggaggctctcgtcccttctccgccttccctgtcactggctccagggtctgagagagcagcaaccttgtttctctggtctgtaaaatggtctgtttctttctggctccactgcgctatggaaatcgtggggttgcggggaggctgc

SEQ ID NO: 248078 - DNA, 57 bp, Homo sapiens
  chr1:19403632-19403689
  hypo
aagtggctgcattccctccccgtacacttcccattcgcattccccagagcaaaggga

SEQ ID NO: 248079 - DNA, 194 bp, Homo sapiens
  chr1:19426355-19426549
  hypo
tcaggggctgctaacgtccctaacccacacacaggctccagcttagacacacccaccggggaccttctcctgcaggctcagcaccagaaaaggcttttcactatgtaaaaatgtcagaccctcaacggtctgccagaaagtaactgacacggggacataaacctgcacagggggtaaaacgccaatatttaggg

SEQ ID NO: 248080 - DNA, 152 bp, Homo sapiens
  chr1:19436864-19437016
  hypo
ctaactcaccacagcgtaaccggagctcccagcagctgtcctccttggagatagaatccgtcagcagcagcatttcatactgcaggctacttgcctagaaggcaatgggaagagacatgagtcaagagggtcagctccggtccagcgactct

SEQ ID NO: 248081 - DNA, 54 bp, Homo sapiens
  chr1:19449490-19449544
  hypo
agatgaagagcagaagtttgcggacttgacggcgcacaaatggagtctgctgga

SEQ ID NO: 248082 - DNA, 232 bp, Homo sapiens
  chr1:19491254-19491486
  hypo
gttgctagggaaacacgacagaaatgtagttgttctacctgttttcccgaacaatgtatgtggtcagtaactgcagcagctgccggttctcctgaattacatccagctgatcagaatcttttgggggcgatgtagtcatgcgggtgagccaggcctgcaggcgcacaggttccacacaggccagttgtgccagggagccacagagatgcaacaggctcgggttagggctctt

SEQ ID NO: 248083 - DNA, 54 bp, Homo sapiens
  chr1:19517994-19518048
  hypo
actctccggcccctcgctctgacatctttttcttcacaacgtttatatatgatt

SEQ ID NO: 248084 - DNA, 241 bp, Homo sapiens
  chr1:19659425-19659666
  hypo
cccccagaggtccccgccttggcaggttctgttttacctgttgaacgagacactgtatggggaagtgacatgcgcagtgcctggcccagtgctgtgcacacacgctgcttcgcttcctcaggttccggggatgggatgggacagaaaagctggttgcttagctggtggcgttctccagcaaagcagaagggatggtcctggcagccctgtgccgagcactggaccccgcgccctccctggc

SEQ ID NO: 248085 - DNA, 517 bp, Homo sapiens
  chr1:19676377-19676894
  hypo
ggtcagggtcggctcggtggcaataccaacccaccaaaaacagaaccatttgtgcactgcatatattattacatccttataaaagtggctgccggaaggaaaacattttcatgtgttgtggctgcagatgttccacgaggtggttccaatggcgtctgaagccggagcctggcccgtgtgtccccagcaggcgcctctcctcctccccatggccctaacacaggcaagtgtttggaagctggcagcctttcccccagaggggatgtattacacctcccactgccacgtggcatcttctagcgcgacccgcagggcgtggccctaaggcatgggccccactcaccggcgctgaggccccgcagctcctgtgctgcagcccgagaggaaagggcctgggcttgtctaggcctccatgtctttgccttcacctcgcactaaataaacaaatgtacacaaaaggcctagagcgggacttgccagaatggcagctctcaccgattgtcaaagcacagctcca

SEQ ID NO: 248086 - DNA, 31 bp, Homo sapiens; identical to SEQ ID NO: 206768
  chr1:19680339-19680370
  hypo

SEQ ID NO: 248087 - DNA, 57 bp, Homo sapiens
  chr1:19683186-19683243
  hypo
agccacagcatcaccgtggaggtcaacttgtaatgggcggtgcgaccgctggatttc

SEQ ID NO: 248088 - DNA, 341 bp, Homo sapiens
  chr1:19687681-19688022
  hypo
taataaagaaacaacggcgacagagttagaggcggcgtggtcaatctctcacttcgaatctgttccctctctgaatcggggtgttccaactgaggtgagtcagacgtgctgagacctggcctctgcaggtacagctcaaacactacaataattcaagaatggacttgcattccattcaccaaaagggatctccagggactggagcagccacaagtctcaacctgacattccgagacaaagggagcagaggactgcatggttagaaaggcctgtttcagaattgcccagaagcaccagcctctcctgcgagtgccatcagggcgctccggcaccttcaggag

SEQ ID NO: 248089 - DNA, 357 bp, Homo sapiens
  chr1:19705019-19705376
  hypo
agaaaatgactcacaggtctcgatactggtcaaaggcattgttggcttccacctccagctttctcagccgagctgacggcatggccccatcctccaagggagggtcatacttgttactccatggtgacctggagggaaggaaggaaaagtatataccatgaatcgttccatgaagacacggccagcgagcagggagcctgagccctggctatctgaaatctcggaggcaaagccgctaactccagcaaagatttttctgggtcctggcaacaaacagggctttctggaggtttggagaacaagggctctgatgcgggcagactggggcacacgcccgtgctccacctctcactggct

SEQ ID NO: 248090 - DNA, 304 bp, Homo sapiens
  chr1:19711506-19711810
  hypo
tagttatttacagccttgggcgaggtgacggaaagagagaggagagttgtgtatctgacagagctgcgttcgtagatcccttaccacagagaccctcccagccctcaggatccccatcatatgcgcaccctgtacactgccctccgcaggactgaatgcaattataatagaacagttgtttttgaacaacatccctctcccgttagactggaagatccatgaaggcagggggcctttggtccgctgctctatctctcatgcttgtgggtggcactcttcaaacgtctgctgcatgattggaata

SEQ ID NO: 248091 - DNA, 146 bp, Homo sapiens
  chr1:19720385-19720531
  hypo
ctagtgagaaactggccccccgcctgccagggccacacacaagaggacacttccaggtccagcctctctcctctttaagaagtcacttggcgctgagggccatatttttttgttttgttttgtttttgagacgaagtctcgctctg

SEQ ID NO: 248092 - DNA, 72 bp, Homo sapiens; identical to SEQ ID NO: 206769
  chr1:19721243-19721315
  hypo

SEQ ID NO: 248093 - DNA, 139 bp, Homo sapiens
  chr1:19767162-19767301
  hypo
ttagtgtctggataggcatccgtgcacccaacgctactgacttactccagttcatcctgaagacagactattacagtaaaagccatgttttaaaaaagttatagctgctaggccgggcgcggtggctcacgcctgtaat

SEQ ID NO: 248094 - DNA, 106 bp, Homo sapiens
  chr1:19774209-19774315
  hypo
ggagctggtggaggagggcacggctcactgacgccatccgacccagccccagcagctcgcaggccacactgctcctctccgcctcggtggccttgccagaatgctg

SEQ ID NO: 248095 - DNA, 36 bp, Homo sapiens
  chr1:19950665-19950701
  hypo
gcttcaccatgttggccaggccgtggttctgctttt

SEQ ID NO: 248096 - DNA, 87 bp, Homo sapiens
  chr1:19981388-19981475
  hypo
aagtgggagagctggggttgcgccaaggagtcggatgccagagtccatgctgtaacaccactacccggccccctgcaccttgctgtg

SEQ ID NO: 248097 - DNA, 31 bp, Homo sapiens
  chr1:19984768-19984799
  hypo
gcccagcactgtctgcgtctgctcttctgtg

SEQ ID NO: 248098 - DNA, 388 bp, Homo sapiens; identical to SEQ ID NO: 206770
  chr1:20060808-20061196
  hypo

SEQ ID NO: 248099 - DNA, 224 bp, Homo sapiens
  chr1:20070441-20070665
  hypo
aggcgctcactgaacgctagtgacctctgtgcatgggtggtgcccggcggtcacacaccaataagaccctggcgcctggtgacacctctaaatgtttctcactggctttcttctgtgtggtttggcagatctgtgacttctgcccttaggtcagagacttgggaacccaggaggctctgggcaggcgtgcctgagtggtcaggttgggacgtttaggattcccg

SEQ ID NO: 248100 - DNA, 156 bp, Homo sapiens
  chr1:20090954-20091110
  hypo
ctcagtgcctcacacggggccgggcatacacagcaggtgtcagttcttatttgcggaatagatggaccaggctgtttggatacggattataaactgtatgagtctcaaggatgttgggctgggcgtggtggtggctcacgcctgtaatcccagcac

SEQ ID NO: 248101 - DNA, 31 bp, Homo sapiens
  chr1:20097098-20097129
  hypo
gatatacgatacagcgcgctcatttgacaaa

SEQ ID NO: 248102 - DNA, 39 bp, Homo sapiens
  chr1:20110731-20110770
  hypo
aaggctaagctcaggctgggcgcggtagctcacgcctgt

SEQ ID NO: 248103 - DNA, 83 bp, Homo sapiens
  chr1:20127456-20127539
  hypo
cgcagccccaactagactttaaaagccctggaggtgggcgggtttaggctgccttgctctccgctgtgtgcccagccccaggg

SEQ ID NO: 248104 - DNA, 205 bp, Homo sapiens
  chr1:20204369-20204574
  hypo
accctgtctcaaaaaaacaaaaaagtaaaaaacacacccctaggtggttttatatgctaaggatacacgttatgcgtgttagagcacgtcgatgctaagcgcatgtgccaactgcaggtctgtctttgcatgtttgacctcagcagtatttcatgaatatgcatgtacagctcccataaagggaattccccgtaaggtactaggg

SEQ ID NO: 248105 - DNA, 98 bp, Homo sapiens
  chr1:20205020-20205118
  hypo
tgaacatgtctagtcggtagttccctgtggcatttacccgtgcaagctcccagcttgtttgtgtctgcagctccactttacaggctactctgttagaa

SEQ ID NO: 248106 - DNA, 420 bp, Homo sapiens
  chr1:20205178-20205598
  hypo
actatctgcctacgcgatttcttcttaactcctgtatcacttttgctttgcaataaacttctttgcctgctctttggagtactttggactcactctcaaattcttttacgtggctaagtcaagaacctgaacgggccaactgccaacacttggacataccttctagtgcacgtgcatgtaatttgctttaggactatctgcgtctgagagtgtacttttgaaggagctacattgtccggagtatataccctggggttcatcgtcttgcacgaggaaaatttagaatacggatacacacgaggagtttaggaggagatgtaatatttctatttttaggatagatcacgagatgtagacactagacatttaaaatgttaccagatacaggccaggtgcagtggttcatgcctctaatcccag

SEQ ID NO: 248107 - DNA, 44 bp, Homo sapiens
  chr1:20210240-20210284
  hypo
ctagattacaggcatgagctaccacccccggccaggaattgcct

SEQ ID NO: 248108 - DNA, 152 bp, Homo sapiens
  chr1:20214381-20214533
  hypo
ttactgcagtctagagagcacgttaggttttttggtgcgtgtgttgcaatattgtctaatagtaaattattgcgcactcaaaacatttgcgtgctctttatgtaattggttgtttttgtgaactcaaatgcgagacctgccatatatcccta

SEQ ID NO: 248109 - DNA, 289 bp, Homo sapiens; identical to SEQ ID NO: 206772
  chr1:20230247-20230536
  hypo

SEQ ID NO: 248110 - DNA, 118 bp, Homo sapiens
  chr1:20247673-20247791
  hypo
ccctcttgaagttgagccttcgtctcccgtcagggctctgcccacgcccgctatgtcagcaacacccagggttggaagggactcttaacgccgagccggtcagcctcttttggggggc

SEQ ID NO: 248111 - DNA, 199 bp, Homo sapiens; identical to SEQ ID NO: 206773
  chr1:20554750-20554949
  hypo

SEQ ID NO: 248112 - DNA, 34 bp, Homo sapiens; identical to SEQ ID NO: 206774
  chr1:20680360-20680394
  hypo

SEQ ID NO: 248113 - DNA, 34 bp, Homo sapiens; identical to SEQ ID NO: 206777
  chr1:20920113-20920147
  hypo

SEQ ID NO: 248114 - DNA, 156 bp, Homo sapiens; identical to SEQ ID NO: 206779
  chr1:20977499-20977655
  hypo

SEQ ID NO: 248115 - DNA, 136 bp, Homo sapiens; identical to SEQ ID NO: 206780
  chr1:20983634-20983770
  hypo

SEQ ID NO: 248116 - DNA, 256 bp, Homo sapiens
  chr1:21037714-21037970
  hypo
aaagaggatgaggtcgccatctcgggcctgagcaaccccaggagacaacacctcacccgaggggtctcccgccacgatattttccagcctaggaaggctctctgctcccacacttgtgatggcctcaggggtccccctccaccgcgctcccaaccccactccacccccgacgcctggggaggcgctgagtgacagccctcagccgcgcaccaggttccttggtaactgctcatctctgctgcggagaggccagagc

SEQ ID NO: 248117 - DNA, 157 bp, Homo sapiens; identical to SEQ ID NO: 206781
  chr1:21062548-21062705
  hypo

SEQ ID NO: 248118 - DNA, 41 bp, Homo sapiens; identical to SEQ ID NO: 206782
  chr1:21122639-21122680
  hypo

SEQ ID NO: 248119 - DNA, 79 bp, Homo sapiens
  chr1:21339357-21339436
  hypo
aaattccacaagacaggtgagaaaccgtgagttccccaagtgtaaaagcaggaaaacccgcctccgaacacacattccc

SEQ ID NO: 248120 - DNA, 159 bp, Homo sapiens
  chr1:21568226-21568385
  hypo
atttgaactcagaaagtccggctccaatgtcttccttcaaagaggccacgctctctgcctacaggtcacgaagtcctggaagtactacaggatggtgagaaaatctccaaaaggagcgagggtctgatcgatctgaccggtcaggaagcctgcatcttg

SEQ ID NO: 248121 - DNA, 518 bp, Homo sapiens
  chr1:21573388-21573906
  hypo
ggatcctcctgcctctgtctcccaaaagtcccgcaattacgggcgttcatgcccggccacaggtgatatttgtatcaccattttatgaaggaggagaatgaacttaagaaaggttacgaaatttgcccaaggctacaaagctggtagtttgaaagaggctgggatttaaacctgtgcctgtaaccaggatgtcctgctgcctctcgtaaaagcccgcccaggtcccactctcctgagtcagactgtcatccccacccctgcccacctgcccaagaagagggctgtctgtgagaggcgtgccccaggccactgggggtcctcttaccatctgtcggtggtgttgatgagagtggagatctgctcaaggtattccttgtcatagaccacaataggctcggattcattgatctccacggggtagaagatggtgttgagaaaaggcaaccagttgatggcgggtgccaaggtctgcaagggaaaaggacagtgtgaccctgtggggctgctcctcctcacag

SEQ ID NO: 248122 - DNA, 274 bp, Homo sapiens
  chr1:21573936-21574210
  hypo
agcaaaggaaagagcttgggcttggcgccatctgacagcgcaccgggcagagagtcaagcggagcctggcgggcttttgtcagagatgctgtaggtagaattctaaggagtccaacaccaaaatttaacctgaaatggaatgaggatgcaatgagaagatgcagcagctgccgctaccattcagcaagcgtctcctgtgtgccaggagccgtggcaaatgattgatgcatatgattccacctggtcctcacgcgagtccaagcagtaggtacta

SEQ ID NO: 248123 - DNA, 313 bp, Homo sapiens
  chr1:21585135-21585448
  hypo
gaagaggtcgtgcccgccccctcgaccgctgcaggttcaagctagctcacctggatcacgttgctgttggagttcttggaatcggcactgacatagacagagaagaagggtgaggtgcggtagtgggcggtgaccacctgcagggtgtcctggaagttgtccttggcccagggacctgtgatgttccagcccccgagctgtggggagggagagcaggcagggaggtgatgaggtggcggggagacccagatgtgaattctggttctgccgctgacttgctctgtgaccctggagcagtcgcctgacctctctg

SEQ ID NO: 248124 - DNA, 220 bp, Homo sapiens
  chr1:21610541-21610761
  hypo
tgcaatggaaagggctgggccgtgagtcagggcaccgatctgcttccaatggccgctggcctcggctgagtctcttctttgcatccctgtcgcacctgcccagcctccttcatgggactgtggaggggatccgtgagatgaggtcacagcatggggagatgtgactggtttcttacgtttcttttggaaatgaggtcccgtcaagcatgggagactggcc

SEQ ID NO: 248125 - DNA, 178 bp, Homo sapiens
  chr1:21635873-21636051
  hypo
gtgaatcacagtacccgtcccaccaagttgttgggaggatgcagttagttacccagaaagtgtttggagtagtgcctggtatgcagtgagcgctggcttggttgggtgaatgaatgggtgcatgaaggaatgagtcaatgcgtcggagctctgctctgtggcacgaggcccttcagga

SEQ ID NO: 248126 - DNA, 110 bp, Homo sapiens
  chr1:21690439-21690549
  hypo
attgttggatcatacgttaagagtatgtttgttttgtaagagactatcatactgtattccaaagaggctgtaccgtttcgcattcccatcagcaacgaatgagcattccc

SEQ ID NO: 248127 - DNA, 42 bp, Homo sapiens
  chr1:21786548-21786590
  hypo
ggctgtagatagaggcgtccacctggccgttgcgcggctgcg

SEQ ID NO: 248128 - DNA, 114 bp, Homo sapiens
  chr1:21848420-21848534
  hypo
gaatgaatgaatactcgcagcgagttaacatttcttagagactgagagtccctaagtgaaaggtcacttgcatgacctctgtgcctcagtttcatgtgtcgactccgtgagagg

SEQ ID NO: 248129 - DNA, 124 bp, Homo sapiens; identical to SEQ ID NO: 206785
  chr1:21889588-21889712
  hypo

SEQ ID NO: 248130 - DNA, 252 bp, Homo sapiens
  chr1:21902093-21902345
  hypo
agagtggtgcccggcgaaggttcctgtccttccctagctaacaaaggttaatccagcagcagtgttgtggggctggggagcagatcttcctcccctcctccctcaccgaggcctttgccttggtgtcccaaggaggcagaattgaccacgggcaccatgaaggaaaagccaagcaggccctgcatgaggcggtggagatggaccgggccatcgggcaggcaggcagcttgacctcctcggaagacactctga

SEQ ID NO: 248131 - DNA, 166 bp, Homo sapiens; identical to SEQ ID NO: 206786
  chr1:21944017-21944183
  hypo

SEQ ID NO: 248132 - DNA, 409 bp, Homo sapiens
  chr1:21953296-21953705
  hypo
ggctaccgctattacgaatgacagtgaccgtgaccataactgacgctcattgggcctaccacatgccaggccctgtgctgagccctcgttctaggcccgagggcatggcctcctcaccacactggtattcccactttacagacaggacccagctgtgcacagaggtcacacggctggccggcagcaaagctagcatctgcatgagacctgcctgagtctaagcccggactctctgcccacaccacacccttccctgaggaaagaaagcaggtctggcgagggtgaagtcagctcctatcaccctaaaaagcctgccgaggccacctctggggcagggagaggaaatgcccagtggttcccgggatcctggggctgggcaagcaggcctggcttccgctgctgcctaggg

SEQ ID NO: 248133 - DNA, 133 bp, Homo sapiens; identical to SEQ ID NO: 206787
  chr1:22001538-22001671
  hypo

SEQ ID NO: 248134 - DNA, 211 bp, Homo sapiens; identical to SEQ ID NO: 206788
  chr1:22003571-22003782
  hypo

SEQ ID NO: 248135 - DNA, 66 bp, Homo sapiens; identical to SEQ ID NO: 206789
  chr1:22023365-22023431
  hypo

SEQ ID NO: 248136 - DNA, 223 bp, Homo sapiens; identical to SEQ ID NO: 206790
  chr1:22023679-22023902
  hypo

SEQ ID NO: 248137 - DNA, 193 bp, Homo sapiens; identical to SEQ ID NO: 206791
  chr1:22032531-22032724
  hypo

SEQ ID NO: 248138 - DNA, 120 bp, Homo sapiens
  chr1:22092121-22092241
  hypo
ggggacagcccgaagctgaacaaggcatgagacgttccgaagctaaacaaggtgtgagacataactaacaatttttctagtggaagatgaggtcttaaaaagccaatttaggccgggtgt

SEQ ID NO: 248139 - DNA, 49 bp, Homo sapiens
  chr1:22166018-22166067
  hypo
cagtggatggtgggcgcggggctgcctgtggagtcgagtggaagatgac

SEQ ID NO: 248140 - DNA, 257 bp, Homo sapiens
  chr1:22191349-22191606
  hypo
cgatgtagcctggcgggcagcggcactcctccacctcgagggcgcggggtctgtttgagggccccggctgggcgacctccaggctgactgcgctgatgctggccgccagcggcacggaggagaacgtggcccggatcaggagctcatccaggtcggccagtgccatcaggaggtgctcgcgtgtggccggctgcccatcgggccggcgccagaattcctgggttgggggtggcaacgtgggcgggggcagtgggctt

SEQ ID NO: 248141 - DNA, 42 bp, Homo sapiens
  chr1:22192126-22192168
  hypo
aaaggacaaaggacaaatgccgagggtgcccctggcttccat

SEQ ID NO: 248142 - DNA, 162 bp, Homo sapiens
  chr1:22196201-22196363
  hypo
acagaaaggacgtccgtgaggcttcacctccccacgggcccagccagccacccgctctgcactgtctgctcacaagtgctgatacctggcactctggcccttgtacccactgccctcttgttcctcctgagctaggcggggatatcccgggatgggtttggc

SEQ ID NO: 248143 - DNA, 709 bp, Homo sapiens
  chr1:22198753-22199462
  hypo
gagctgggcaccctcgggcacgggttccacagtgaattctcctgtcaggcggctgtttcgctgtgggttcaccagggcaaagccttggaagtccccaggggcaaagtgggtggagatctggcaggggaaaaaggagggggcgtcagcctgagcaccggggtgccttggtgggggatggggcacgggagggtgttaaggtgcggaatggggtcctgttgagatcaggactgcgagagaaataatgggggcatgtgagggtactgaggcggggatgagggtcgctgggctcagtgctcagatggacagtaacaggcagcaggtggcaacaccgcctggggctgggcagcacaggctctcaccaggtggcgtgtgtaggcagagctggcgcactgctgggtgatgcccatacagaagcagggcaggcagccgtctgggttgctggcactcaggtggaagtggtggggccggcagtggctgcaagtgaggccttccacctgggcctgggtagacggatggaaggaggcaggcaggggactcagtgggtctcctgcacccccagcagcctgaggccagcctccctggccacttccagcagccccgggcagcccctgccctgtcccccatgccctgccccccatgcccaggtctcggcttccaccagatgctgcctgatttccccgcagggtctgggcagcggggcagagcaggc

SEQ ID NO: 248144 - DNA, 513 bp, Homo sapiens
  chr1:22200941-22201454
  hypo
cctgtggtgtcccccgctgggcgtccccgtagtatcctggctggcactgctcacaccgagggccctccgtgtgatgctggcagccctggaggagcaggatgtgagttgaggctgggcctccagaggccacagattgctggggtgggcggaaggagggcgggacttacctggcaggcacctgtttctggctcgcaggcctctgagtggccatggcagctgcagcgttcacaggtacccaggtagaggccactgggcgtgcgtgtgtagcctgtgtcacagtcctgggggcagaaagatggcagtgggagggacttccgaacacggcccattcaggtaggggcactggatggccagggctggggaggtgtggagggctcatggagaaggagcgggaagcaccatggagggggctggctgggctggcgtggggcccaggactcacctggcaggacggcccacggtacccgggtgggcaggagcactgttccacttccagcgcggggtcctggccgg

SEQ ID NO: 248145 - DNA, 46 bp, Homo sapiens; identical to SEQ ID NO: 206793
  chr1:22202047-22202093
  hypo

SEQ ID NO: 248146 - DNA, 118 bp, Homo sapiens; identical to SEQ ID NO: 206794
  chr1:22202123-22202241
  hypo

SEQ ID NO: 248147 - DNA, 272 bp, Homo sapiens
  chr1:22211060-22211332
  hypo
gtcccggaagcggcgggtgctctggcacacgctggtgatgccaaagcagaagcagggcaggcaggcggcgctgtgctccaggtagaagtggccgtcagggcaggggcctgctgggcggcatgggcgggggctgcagccggctgtggtgggcagcccggctctgcccccacacccggtgacacctgccctccggcagtacctcgttgtgggacgagctcaaggacaccgtcaggaatgccaaacaccatgccccgggcgttcatggcctcaca

SEQ ID NO: 248148 - DNA, 55 bp, Homo sapiens
  chr1:22213894-22213949
  hypo
acccctgccggtgcgcaccacagtctagctcatcgctgccgtcctcgcagtcctc

SEQ ID NO: 248149 - DNA, 35 bp, Homo sapiens
  chr1:22335485-22335520
  hypo
cctttgggaggccccggcaggtggatcacctgagg

SEQ ID NO: 248150 - DNA, 41 bp, Homo sapiens
  chr1:22422720-22422761
  hypo
ggattataggcatgagtcactgcgcccggcctattcattca

SEQ ID NO: 248151 - DNA, 157 bp, Homo sapiens; identical to SEQ ID NO: 206795
  chr1:22465799-22465956
  hypo

SEQ ID NO: 248152 - DNA, 79 bp, Homo sapiens
  chr1:22498374-22498453
  hypo
cctgacctcgtgatcctcccgccttggcctcccaaagtgggaatcttatttttaaacgttgcctcgacttttaaaagag

SEQ ID NO: 248153 - DNA, 179 bp, Homo sapiens
  chr1:22498768-22498947
  hypo
gagctatggacagaacggagagagtgggggccagcggcgctgctgccttcagacaccggttgatgaaccgtcccatgtggtcctgcccagggagtggagcccagcgcacaaggcctggcaggttcagacttgggttttcaccaaatgccctactggccctggggcgctggcttggccga

SEQ ID NO: 248154 - DNA, 187 bp, Homo sapiens
  chr1:22566065-22566252
  hypo
gccagcacagtggccgctccctctaccctccagcctatcggagggcagcctatgccaggctggggatgccagcctcacattctgggagtgtcagagaagcccgaggaggggcacggtgggcaggcccgggccaggcccttctctctgatttcgaatctcagcatcccagctgcgtgacctcaggcga

SEQ ID NO: 248155 - DNA, 218 bp, Homo sapiens; identical to SEQ ID NO: 206796
  chr1:22584478-22584696
  hypo

SEQ ID NO: 248156 - DNA, 102 bp, Homo sapiens
  chr1:22777190-22777292
  hypo
taaatatgatcgaccgggagacagcaacaatgcaagtgacagttctgcccagtagattgaatttgtgatgtaaaacggtgatggggtgagtcagtcagccag

SEQ ID NO: 248157 - DNA, 532 bp, Homo sapiens
  chr1:22777322-22777854
  hypo
attgcagatggaaaaggtataaccacagaggaagctggacattgcactaagatggctggatttgggcacgtaactgtcagggacagaaaaagtggctgcatgtcagtgacagggtgactgtgttcagtgggccagcgcggaggtgactcagtttgttactgctggatctgatttaaatgtttgtgtaaggaagggtggcaaggggacgcttcaacagggaacgcatagtgtgtgagaaggaaaatgagcaaaagaaaagctaggactaaatcccaaagcccctaaatcccaaaattgggaggtgcgagaggcaggatcaggatgcctccaggatgccttcagcccactgcgccccaccagcgccaagcctgtcccacaaagagtgcgggctggggacgcggctcaggtcgcctctccgcctcgcacgtgaatgtgttgttttggaaaaacgaagccttttgtgttcacttccttgccctcctttgaaacaaaatcctaatcctagagctgccggagcgagactgcggagctc

SEQ ID NO: 248158 - DNA, 38 bp, Homo sapiens
  chr1:22823351-22823389
  hypo
gtcccacgataggccgtctgtaccttgaggagcaagga

SEQ ID NO: 248159 - DNA, 134 bp, Homo sapiens
  chr1:22852708-22852842
  hypo
agagccggtggccccgacagagcaggtgatcactttggaggagacccagcttgccgggtcgcaggtgtttgtgacgttgccagattctcaggcatctcaggccagctctgagctcgtggcggtgactgtggagg

SEQ ID NO: 248160 - DNA, 78 bp, Homo sapiens
  chr1:22854345-22854423
  hypo
tgactggcatctgccggctttgtgcaggcagccccgacggtttccacagcgagcgccagctccggccagcctgggaca

SEQ ID NO: 248161 - DNA, 175 bp, Homo sapiens
  chr1:22902927-22903102
  hypo
cctggagtcggaccgcgacctgggggccagcacacaagaaagccagttcctcaaaatcgacaccattgcggccgacgagagcttcacaggtgccgaccttggtgtgcggcgtctcaagctcaacacggaggtgcgcagtgtgggtcccctcagcaagcgcggcttctacctggcc

SEQ ID NO: 248162 - DNA, 197 bp, Homo sapiens
  chr1:22927346-22927543
  hypo
gggtgcagggagggacggctgagcccagcgctgatcccctgcaggtcatcagctctgtggaggaggggtaccgcctgcccgcacccatgggctgcccccacgccctgcaccagctcatgctcgactgttggcacaaggaccgggcgcagcggcctcgcttctcccagattgtcagtgtcctcgatgcgctcatccgc

SEQ ID NO: 248163 - DNA, 56 bp, Homo sapiens; identical to SEQ ID NO: 206798
  chr1:22927884-22927940
  hypo

SEQ ID NO: 248164 - DNA, 106 bp, Homo sapiens
  chr1:23021935-23022041
  hypo
acaatacagtagccacgaggcacgtgtggtcatttaaagtccaatttaaattaattacaatgaattagaattaaaactgcacttgctcagtcgccctagtcatagt

SEQ ID NO: 248165 - DNA, 98 bp, Homo sapiens
  chr1:23058329-23058427
  hypo
ctcaaacaaaacaaaacaacaacaacaaaatcatcactgtgtagaagccagggcacagaagccagggccggaatgcttttgtgcggcctgtgccccag

SEQ ID NO: 248166 - DNA, 133 bp, Homo sapiens; identical to SEQ ID NO: 206801
  chr1:23063031-23063164
  hypo

SEQ ID NO: 248167 - DNA, 33 bp, Homo sapiens; identical to SEQ ID NO: 206802
  chr1:23063499-23063532
  hypo

SEQ ID NO: 248168 - DNA, 85 bp, Homo sapiens; identical to SEQ ID NO: 206803
  chr1:23091396-23091481
  hypo

SEQ ID NO: 248169 - DNA, 386 bp, Homo sapiens
  chr1:23110981-23111367
  hypo
ccaagtttatccggcgccgtggcgcccaccgcatccacgtggagatgaagttttcggtgcgtgactgcagcagcatccccagcgtgcctggctcctgcaaggagaccttcaacctctattactatgaggctgactttgactcggccaccaagaccttccccaactggatggagaatccatgggtgaaggtggataccattgcagccgacgagagcttctcccaggtggacctgggtggccgcgtcatgaaaatcaacaccgaggtgcggagcttcggacctgtgtcccgcagcggcttctacctggccttccaggactatggcggctgcatgtccctcatcgccgtgcgtgtcttctaccgcaagtgcccccgcatcatccagaat

SEQ ID NO: 248170 - DNA, 214 bp, Homo sapiens
  chr1:23162009-23162223
  hypo
agcacattttatgcacgagtagacatgcatgcatgtgggcatgctttcatacatgtaggcaaatcatctagaaaatgggataagaacatggacctcatggggttgtgagtgaacgagtccatggtgctccgtgcaatgcctagcccattgtaagtactcggaagtcagctttattccatatgggaatgggtctggagcacggtaaggggtacct

SEQ ID NO: 248171 - DNA, 132 bp, Homo sapiens
  chr1:23168730-23168862
  hypo
cagctcactgattgcgagtccttgcagagaggcggtgctgaaatcatgaaatattccaaaggaaatacgtttattcctttgcagaaggataacacagcatctcactcgtcactacctcgcattcgcgtgggg

SEQ ID NO: 248172 - DNA, 343 bp, Homo sapiens
  chr1:23191506-23191849
  hypo
cggggtgcctgcacccgctgcggggacaatgtacagtacgcaccacgccagctaggcctgaccgagccacgcatttacatcagtgacctgctggcccacacccagtacaccttcgagatccaggctgtgaacggcgttactgaccagagccccttctcgcctcagttcgcctctgtgaacatcaccaccaaccaggcaggtaagtgcttccgacgtgggccaggggagtgccccatcgcgctgtgccagggagggtcctgcagtcctcacaaaagactccttcacatctatggagtgatttcttcttttcaaaggcttttcatgtgatcggtccacctgggag

SEQ ID NO: 248173 - DNA, 211 bp, Homo sapiens; identical to SEQ ID NO: 206806
  chr1:23201492-23201703
  hypo

SEQ ID NO: 248174 - DNA, 97 bp, Homo sapiens
  chr1:23205285-23205382
  hypo
ggactggatgggagcgtcttgacctgggcactgtgcgggtctaggcatgaagcagtaggtgagcgagcacacctggcagcagcgcaatccaaatact

SEQ ID NO: 248175 - DNA, 179 bp, Homo sapiens
  chr1:23208896-23209075
  hypo
acagcattaccctgtcgtggtcccagccggaccagcccaatggcgtgatcctggactatgagctgcagtactatgagaaggtacctattggctgggtgctgtccccatcacccacctccctgagggcccctctcccaggctgaggcctgggagttctgccccaccgcaagatgagacgc

SEQ ID NO: 248176 - DNA, 79 bp, Homo sapiens
  chr1:23270402-23270481
  hypo
atacagatgtagatccgacagtcctaagaattccatgttaattaatgtgaactattttgtaatacgcagatgatatctt

SEQ ID NO: 248177 - DNA, 188 bp, Homo sapiens; identical to SEQ ID NO: 206808
  chr1:23411432-23411620
  hypo

SEQ ID NO: 248178 - DNA, 36 bp, Homo sapiens; identical to SEQ ID NO: 206809
  chr1:23440075-23440111
  hypo

SEQ ID NO: 248179 - DNA, 82 bp, Homo sapiens
  chr1:23566833-23566915
  hypo
taaatttttctttatggcaacgacactgttaacaaagccaaaataatagattagggacaaatttttccacataaaacaaagg

SEQ ID NO: 248180 - DNA, 120 bp, Homo sapiens; identical to SEQ ID NO: 206810
  chr1:23567755-23567875
  hypo

SEQ ID NO: 248181 - DNA, 214 bp, Homo sapiens
  chr1:23693473-23693687
  hypo
taagtcattttgacacgatctcaaaaacgtggaggcaaagaaaggtagaatccttacttacctagtgagacaacatttccataattctcctgcataacatcccggtaaaggtccctctgtgcagcgtccagaggtctccattcttcccgggtgagatacatggccatatcttcaaacgtcacaggtgcctgaaatcacacgatacttccctact

SEQ ID NO: 248182 - DNA, 201 bp, Homo sapiens
  chr1:23693910-23694111
  hypo
atctggcacttgcatcgctccatacctttactcataatgttcctcttttcctggaatattcttctcacactagagaaattctactactctttaaggtcccgctgcagtactaactgttcttcaatgccccctacccctctgcacggctccactccccttggatgccccagatagacttaatcacgccgacttcttgggagt

SEQ ID NO: 248183 - DNA, 137 bp, Homo sapiens
  chr1:23698583-23698720
  hypo
ggggggaggcttcacggaggaggtgacgtctgagctggtaagactgtaggagtttggaggtggagaaggtgggagggaaagcattccagtcttcaagaacagcatgtgcgaaggcacggaggcgtgaaaggccagag

SEQ ID NO: 248184 - DNA, 138 bp, Homo sapiens; identical to SEQ ID NO: 206811
  chr1:23762544-23762682
  hypo

SEQ ID NO: 248185 - DNA, 78 bp, Homo sapiens
  chr1:23762922-23763000
  hypo
tgggattacaggcgtgagccactgcgcccagcctccccagacttctgatccaagacttttctacgaccctggacactg

SEQ ID NO: 248186 - DNA, 203 bp, Homo sapiens
  chr1:23768673-23768876
  hypo
cctacttgtgctgggcgtggaagaacttgatgaggctctgaaggaagtcaggaccttgcttcatctggctctccccggctttgagcagatactaggaggagggcagggcaagatacgtgatgtgagctgaagcagaatcctgggaacgaggggctgcagtccccatcccaggctaatcctcctggctgcgactgggccttggt

SEQ ID NO: 248187 - DNA, 101 bp, Homo sapiens; identical to SEQ ID NO: 206813
  chr1:23954418-23954519
  hypo

SEQ ID NO: 248188 - DNA, 143 bp, Homo sapiens; identical to SEQ ID NO: 206814
  chr1:23963133-23963276
  hypo

SEQ ID NO: 248189 - DNA, 34 bp, Homo sapiens
  chr1:24016636-24016670
  hypo
ctggcctggttggcggggccggggtcgggtgtgg

SEQ ID NO: 248190 - DNA, 88 bp, Homo sapiens
  chr1:24017560-24017648
  hypo
gcctgtcttcaagctcgggactcttaaaccaccactcctttccgtttgtataaattctatttgtgcccggagtggtggctcacgcctg

SEQ ID NO: 248191 - DNA, 105 bp, Homo sapiens; identical to SEQ ID NO: 206815
  chr1:24110632-24110737
  hypo

SEQ ID NO: 248192 - DNA, 45 bp, Homo sapiens; identical to SEQ ID NO: 206816
  chr1:24111037-24111082
  hypo

SEQ ID NO: 248193 - DNA, 213 bp, Homo sapiens
  chr1:24119111-24119324
  hypo
ggttttgctcttgaccgccgccccgatgtatgcaggcccccgccgtggagccgtgtggtgtatgtgtggtaacaccatgtctgtgcccctgctcaccgatgctgccaccgtgtctggagctgagcgggaaacggccgcggtaagggtcccctttcacccacggccagacactgtgggagcagctggaggaccggctggagggggtgtgggaaa

SEQ ID NO: 248194 - DNA, 38 bp, Homo sapiens
  chr1:24153112-24153150
  hypo
ctgggattacaggcgagagccaccgcccccggccagag

SEQ ID NO: 248195 - DNA, 268 bp, Homo sapiens
  chr1:24424243-24424511
  hypo
aggcccccagggaagcgggagtctccagggctgccctggtcacccaatgccaggctgaacagccttgtgcctatggcccttcctcaggtctcacgcagacccatgtccttgtctgcccagcttgggtttgctgtggcccggagtgcctgttggggttgggaggacttactgcggacgaggactttggcgaaggaggaggcctggccgtgggcgttcttcactcgcacagtgtaagttgctgagtcctcaatggcgcatctgaaaagga

SEQ ID NO: 248196 - DNA, 205 bp, Homo sapiens
  chr1:24426174-24426379
  hypo
aatctccagggacagcagcccgtagttgttggtgattcggtattttccggcacgaaagaggcggggatcaatccgtgtgtcatttttgtacctgtggggacatagcggtctgtggcaggcagggtggttctaagcgggaggggtctggagcctctcggatggggattccagctgcaggtttttgttttgttttgtttttttgaga

SEQ ID NO: 248197 - DNA, 261 bp, Homo sapiens
  chr1:24434924-24435185
  hypo
ggaacagggcagtggctgggcggggaccctgtggctcccacctgctgcggaaggtccgcctccgcacagaggagcccatgcgcaggctgtgctgccgctcctccttctgctcctcctcctgccggtgctccagcctgtgaacctccatggcctgggggggccgggggtcccccgcacctcccaagctgtgcggcagagtcatggttacgagagcaacaacctgtgaaggccaaggtccacggtcattccaccaggtgcccg

SEQ ID NO: 248198 - DNA, 194 bp, Homo sapiens
  chr1:24611879-24612073
  hypo
gtctccggagcacacgcaggctgctacatgcctaaggagatgtggcagctgctccccaaacgcagctacaccccgacctccatcttgagagagaggagagcctgtggtgtacagcgtggccccagcaggcacctgtgctgatgggaaaacacacagacaggccaacgaatacacgtacgcgcacgcacgtacag

SEQ ID NO: 248199 - DNA, 52 bp, Homo sapiens
  chr1:24612363-24612415
  hypo
tgtgctccaggcaccgtgtaaggcttttgggatacagcgatgcacagaggag

SEQ ID NO: 248200 - DNA, 105 bp, Homo sapiens
  chr1:24620325-24620430
  hypo
gtggaaatggcaaacgctgctttctgcggctcctctaagggccctgctggggccctccccaaaccctcccacctgggtgcccccagaagccggcactcccagtcc

SEQ ID NO: 248201 - DNA, 32 bp, Homo sapiens; identical to SEQ ID NO: 206821
  chr1:24683006-24683038
  hypo

SEQ ID NO: 248202 - DNA, 142 bp, Homo sapiens; identical to SEQ ID NO: 206822
  chr1:24701524-24701666
  hypo

SEQ ID NO: 248203 - DNA, 58 bp, Homo sapiens
  chr1:24702011-24702069
  hypo
ttaattactggacacggagagttggggagaggagccaggttgccggagagaaggtaat

SEQ ID NO: 248204 - DNA, 88 bp, Homo sapiens; identical to SEQ ID NO: 206823
  chr1:24706236-24706324
  hypo

SEQ ID NO: 248205 - DNA, 33 bp, Homo sapiens
  chr1:24708666-24708699
  hypo
atttggaaagttaccgcacgcaaagccttgtag

SEQ ID NO: 248206 - DNA, 399 bp, Homo sapiens
  chr1:24712879-24713278
  hypo
aaagagagtcctccaggcagcggcagctggagctggccagcggcagcttgtgaggacaactgttaaaaattccaaaatgttgctgctggtggcttgaagttggccacggtggcagtatttatgtcacaaaaacgggcagatgctacatctcagcacttttcttcgaggagggtaaatggtggttgaccagcacaccaccgccttcgtgcaacgcccaagtaggtctctgggagggaaatgtcaagcgttctcctgtgacttctagaggtgggcggatgccaccctcagagaggcctttcgcctgtgcaaaaacagttcctgcgactgacattctgtgacttggatgaatttagcctctcagagcaaatcccagagaacgagaatccaagttgtgactgg

SEQ ID NO: 248207 - DNA, 43 bp, Homo sapiens
  chr1:24945574-24945617
  hypo
gctctgcaggagagaaaagcttcggtttcgcagaagcccaaag

SEQ ID NO: 248208 - DNA, 35 bp, Homo sapiens
  chr1:24976035-24976070
  hypo
ctgacctcaagtgatctgcccgcccttggcgggat

SEQ ID NO: 248209 - DNA, 287 bp, Homo sapiens
  chr1:24976291-24976578
  hypo
taccagtcttaatgcgtatctgtagtgtaggtgaagaaagaacaggtctggttcaaaagaagaggccgatgaaatgataatagcattggtgtttaacacacgtagaaagtagtcttcagtttgttctcaaatgttcaactatgtgtattttgaaaacctggtctttgcagattgaacaagaaaaactggcatctatgaaaaagcaagatgaagacaaagataaaagagataaggaagaaaaagaaagcagcagagaaaaaagggagcggtctcgtagcccaagaagg

SEQ ID NO: 248210 - DNA, 135 bp, Homo sapiens
  chr1:25055531-25055666
  hypo
ttacaggcgtgagccaccgtgcctggcaagttatctttcttacagaatgttcttcaactcaggtgaatctgacgtctcctcatgaacacattcagctttgcattctcagctggaacattacgaaagtgatatagt

SEQ ID NO: 248211 - DNA, 257 bp, Homo sapiens; identical to SEQ ID NO: 206824
  chr1:25070657-25070914
  hypo

SEQ ID NO: 248212 - DNA, 39 bp, Homo sapiens; identical to SEQ ID NO: 206825
  chr1:25115718-25115757
  hypo

SEQ ID NO: 248213 - DNA, 42 bp, Homo sapiens
  chr1:25200671-25200713
  hypo
aatatgttagagaggaaaagcgtgtttacatataacaaagta

SEQ ID NO: 248214 - DNA, 639 bp, Homo sapiens
  chr1:25228568-25229207
  hypo
ttgttagggtccccgcctccagcgggaggagtccaccagggcggtcagtagggccgccacacggcctcatccatgcggcctggcgtgctcagggccgtgggtgagttgctgtggctgccgtcggcctccacgccatcactctggccgcccaggctggggttcatgaggttgccggcggcgacagaggcagcgctgctggtgcaagaggccagcatgcgggtaggtgagcggtcgcccccactgctgctgccggccaccatggagaactggtaggagccagaggatgtcccgtagtagaggtggtagggggacgggttggcctggaagggcccgctctggttctgcggggcccccgggtagggtggcgggaggtaggtatggtggaagcggctggtggccggcatgcccgccacgctgaggctgctgatgctcgtgcccgagggcgtggcgctgtaggggaaggcagctgacatggccccgggataatgcatcctggggtctgggaagcggctctccgtgagggttggcagcgtggggaaggagcggtcaaactggcgggggtcggagaatgggttcagttccgaggtgcctggaggacagcagggaagaggtcagttccagctcgagacaaccccagga

SEQ ID NO: 248215 - DNA, 31 bp, Homo sapiens; identical to SEQ ID NO: 206827
  chr1:25230202-25230233
  hypo

SEQ ID NO: 248216 - DNA, 42 bp, Homo sapiens
  chr1:25247524-25247566
  hypo
tgggtaggggccaatggtctcgcactctcacctgtaccccag

SEQ ID NO: 248217 - DNA, 230 bp, Homo sapiens
  chr1:25269413-25269643
  hypo
ctgtggagccagcccgtgggcaccgctcctgagaggtcacaggctggaaatgtgggcagctgggtagggtctaggagggggcagcggctcaggactgggcgggggtccggagcggaaggcgcccagccctgattggaacaaggtggcagcaccgggagccgagccgggtgtcattgatcttgcccggtgttccagccaccaggcgggaccagcgccgggcagactgccgg

SEQ ID NO: 248218 - DNA, 133 bp, Homo sapiens; identical to SEQ ID NO: 206829
  chr1:25396320-25396453
  hypo

SEQ ID NO: 248219 - DNA, 191 bp, Homo sapiens
  chr1:25397931-25398122
  hypo
tctccctctgctccacggatacatgctctcacttgcgctcccaaaccatctcttgtgtgtcttcatgaaaaatgagtcttcccatgagtctgatggagaaactgaggcccggaacagtcatcagaccaaagtcacatggccagtgaggagctgctgggaccggaatccaaggttcccgctgctcccaaatt

SEQ ID NO: 248220 - DNA, 192 bp, Homo sapiens
  chr1:25510193-25510385
  hypo
tccaccctttcttgccgcagagtcagcttgctctcctgagaccgggttccagttatcttaacacaaaagcagccctattggaggcagcttctgggccagggctctccacgaggggtcttcacgtggtcagggctgccctcacccaaggtgcagcctcctcacaggcagtccagccccgcggacctgcccatg

SEQ ID NO: 248221 - DNA, 185 bp, Homo sapiens
  chr1:25718494-25718679
  hypo
agacaaactgggtatcgttgctctctgatcattatcctccgttcccttgggtagaggctttggcaggcaccaggccacagtcagcccaaaataggctgcgaacacgtagaagtgcctcaggttcatgtggtagtctgtctgcaataaaacccagtaagagcagtgagtgtcggcatcctctgccc

SEQ ID NO: 248222 - DNA, 61 bp, Homo sapiens
  chr1:25825875-25825936
  hypo
gcagtgtttgtggacgagagactgtaacgatggctaataaaagctgcgggtctaggttttt

SEQ ID NO: 248223 - DNA, 52 bp, Homo sapiens
  chr1:25853937-25853989
  hypo
ctcactcctgtgcacgatggctgtgtgggaccctgcccgccgagggccaggc

SEQ ID NO: 248224 - DNA, 179 bp, Homo sapiens
  chr1:25854470-25854649
  hypo
caagcactgccagccgcccactagagtttttgtgttgtcacttcttgtggactggtctgtctccccggccttggaaccctttgagggcagggcgaagccgggctacctctgctcctctctgcagccccaggccctggcgggcaggcagcatcaggtgtccagcccgtgcgctcttgccg

SEQ ID NO: 248225 - DNA, 201 bp, Homo sapiens
  chr1:25856754-25856955
  hypo
gtggaggctgcacccgtgatcaggttggatcccgggactgcagggttcagacgatctcatgtgaagcgcctctgaacacctctgtcacgagagccgctgctcacttgagacggggggacaaggctgaggctgggggagtgctcaggtcccagccattcccagagccagcggtctcccctccccagccgcaaaaggtagttc

SEQ ID NO: 248226 - DNA, 110 bp, Homo sapiens
  chr1:25862319-25862429
  hypo
acccagagacccacactcaacgcatggctctgtgcgagccctgggctgggcacaggaaacatctaggcaaatcagacactctcaagtacgcctcctctcaagtagcaacc

SEQ ID NO: 248227 - DNA, 90 bp, Homo sapiens
  chr1:25869054-25869144
  hypo
agcctgggagctacgaggatgagtaaagtgcctggctggacttgctaaaggcaaatttttatataccgaccctgcgcctaacaagggtct

SEQ ID NO: 248228 - DNA, 263 bp, Homo sapiens
  chr1:25889407-25889670
  hypo
gattaactgacatccgaaaggtttctttcctcccggctggaaacctgaaactgccccttgaggttggccaccgctaatcacccctgcccggtgattgctggggacagagtgctggggtctgaggctccaacatgttgtgccttggtcctgcagagaaagagaagagggacaaagccagccaagagggaggggacgtcctgggggcccgccaagactgcaccccctccttgaagagctgtgagtcctgacggggaagggggatt

SEQ ID NO: 248229 - DNA, 158 bp, Homo sapiens; identical to SEQ ID NO: 206831
  chr1:25890394-25890552
  hypo

SEQ ID NO: 248230 - DNA, 76 bp, Homo sapiens
  chr1:25895704-25895780
  hypo
cgtgtccacgtgggcgttttccacagagaggatgtccattatttccatcactttttggatccgcaacactttatca

SEQ ID NO: 248231 - DNA, 87 bp, Homo sapiens
  chr1:25896264-25896351
  hypo
atggcattagctcccgttactgctgaggacactgggctgggagaggaaggcagctgtgcttcaagtgctgggcggggccacagctga

SEQ ID NO: 248232 - DNA, 271 bp, Homo sapiens
  chr1:25919183-25919454
  hypo
taaataagtttgtcctgtttaccgctctatatccagcacctagaacagcgcctggcacctaagcaggcatttggtaaaactgtgccaaatgagtgagtgcggacagcgtcctagtccttcaccagccccctctcagcagcgcaggcaactggcccagctgtgtctcccgcacgggccggcgggcgctgtgatggaggcagtgcaggatgccgtgtgagcccgaggaaggacttgcagccctgctgaggggacgaggcgaggcttcttggat

SEQ ID NO: 248233 - DNA, 76 bp, Homo sapiens
  chr1:26084118-26084194
  hypo
tacggatgcaggcacggaggcatgcgaggattaagtggtttgcccgagggctccagctgagcgacacttgaacctg

SEQ ID NO: 248234 - DNA, 231 bp, Homo sapiens
  chr1:26086991-26087222
  hypo
attggcccaaattctagaagcgcccgcaccctccaggggagctaatttggcctgcttcactgctcaccaccaggacagtcgagagtaacgcaggtacaagcacattcctgtccccgtaatggacttcgttaacataaatggatatgaaatctgacgtggcaaagccaagtgctgtcacctggaaaggaaggtctgcctgcagaaaggtggctctcccgcactcccggcccc

SEQ ID NO: 248235 - DNA, 214 bp, Homo sapiens; identical to SEQ ID NO: 206834
  chr1:26121478-26121692
  hypo

SEQ ID NO: 248236 - DNA, 32 bp, Homo sapiens
  chr1:26336891-26336923
  hypo
ttttattttttgagtcggagtctcgttctgtt

SEQ ID NO: 248237 - DNA, 92 bp, Homo sapiens
  chr1:26337163-26337255
  hypo
ggcgtgagccaccgtgcccggcagtggcgactttctttgtttggctaaagccttggcgttagcggggatggtgtcagcgaggtaatggtatg

SEQ ID NO: 248238 - DNA, 120 bp, Homo sapiens; identical to SEQ ID NO: 206835
  chr1:26634350-26634470
  hypo

SEQ ID NO: 248239 - DNA, 194 bp, Homo sapiens
  chr1:26670609-26670803
  hypo
gctggagcttctcatcgtcactcagataggggttctctggttcctcctcctcctcctcctctttctcttccagtgaaggcacctcctggggtccggggcccagcacccatggccccagctggtcctcctcaatggcaggcagcgtggcgtacatggacaggtaggaggagcgaggggctcgtggcagccggtga

SEQ ID NO: 248240 - DNA, 142 bp, Homo sapiens; identical to SEQ ID NO: 206837
  chr1:26678029-26678171
  hypo

SEQ ID NO: 248241 - DNA, 207 bp, Homo sapiens
  chr1:26680626-26680833
  hypo
tcctgaggcggggccgtccggcaccctgtgatggggcgtggcccctggggaggctcccaccagccctcagattcctcagggccgcagaggtgtggagctggttgggccggttcttcaccctcctcccctggtgcttgcctgtgccccagcagggtgacagtgatgtagtagcgggtcctcctggaagagggacgcgtgtgtagggtc

SEQ ID NO: 248242 - DNA, 54 bp, Homo sapiens
  chr1:26683592-26683646
  hypo
agaggcccctgcctcggtaccgggttcccattcccagggcgggtgagatcggag

SEQ ID NO: 248243 - DNA, 44 bp, Homo sapiens
  chr1:26796229-26796273
  hypo
cccccaatggtgcgcggaagccaggcgggcgattacaatccaat

SEQ ID NO: 248244 - DNA, 97 bp, Homo sapiens; identical to SEQ ID NO: 206838
  chr1:26807958-26808055
  hypo

SEQ ID NO: 248245 - DNA, 43 bp, Homo sapiens
  chr1:26874361-26874404
  hypo
ctctttaaataagtcaaggccgggcgcggtggctcacacctgt

SEQ ID NO: 248246 - DNA, 68 bp, Homo sapiens
  chr1:26885364-26885432
  hypo
cggcctgatggaagacgacggcaagcctcgtgccccgcaggcacccctgcactcggtggtacaggtga

SEQ ID NO: 248247 - DNA, 39 bp, Homo sapiens
  chr1:26969659-26969698
  hypo
aaatttattacaggccgggtgtggtggctcatgcctgta

SEQ ID NO: 248248 - DNA, 50 bp, Homo sapiens; identical to SEQ ID NO: 206840
  chr1:27056297-27056347
  hypo

SEQ ID NO: 248249 - DNA, 117 bp, Homo sapiens; identical to SEQ ID NO: 206841
  chr1:27057988-27058105
  hypo

SEQ ID NO: 248250 - DNA, 190 bp, Homo sapiens
  chr1:27179351-27179541
  hypo
cccaggtaagtgagcggggtgcggaagaggggtaacagggccatgcctggccagtgatcaaagtgttcctggatatcagccgacctccccctacaccctagatgccctccgtccactaccccctggagggcatttgtcatgtgacggaattccatggagaattgttatttaatcacgtgctcattgtaga

SEQ ID NO: 248251 - DNA, 275 bp, Homo sapiens
  chr1:27183356-27183631
  hypo
gacctcctgaggaccgctgctctctgcctctccaggaatggcctggggggagccaggcacccggcacctccacctgcctaacctgtggcccatctgccaccatctgtgcctacagggtctgccccccagcctgcccggcctgtgtgctctctaggacccccatagggggcaggggctggcctctttgccccattcccgctccatgccggccagagtgtagaaagccataacgcagccatcagcacaataatgtgactctacgctgatatgctccc

SEQ ID NO: 248252 - DNA, 610 bp, Homo sapiens
  chr1:27189668-27190278
  hypo
gttagcccgccgcccgcctgtgtgtccccagagccatggagagagccagtctgatccagaaggccaagctggcagagcaggccgaacgctatgaggacatggcagccttcatgaaaggcgccgtggagaagggcgaggagctctcctgcgaagagcgaaacctgctctcagtagcctataagaacgtggtgggcggccagagggctgcctggagggtgctgtccagtattgagcagaaaagcaacgaggagggctcggaggagaaggggcccgaggtgcgtgagtaccgggagaaggtggagactgagctccagggcgtgtgcgacaccgtgctgggcctgctggacagccacctcatcaaggaggccggggacgccgagagccgggtcttctacctgaagatgaagggtgactactaccgctacctggccgaggtggccaccggtgacgacaagaagcgcatcattgactcagcccggtcagcctaccaggaggccatggacatcagcaagaaggagatgccgcccaccaaccccatccgcctgggcctggccctgaacttttccgtcttccactacgagatcgccaacagccccgaggaggccatctc

SEQ ID NO: 248253 - DNA, 272 bp, Homo sapiens
  chr1:27220858-27221130
  hypo
gcagcgcttcatgccgttcccattcctcaccccggtcatcgtcctaaaaggcagggagaggtgatttgcctgagcttcctgacctcatgccccgagggagggaagctcagggcacaggaggcatgtgtggctagcctcagcgccattccttcagatttctccaagaagcagcacatatttggcccctgaccaacacgtctccagcccgataattctcaacagtttgctcctgtccccacaagcctgactcacctctgcgcgtttggccatgt

SEQ ID NO: 248254 - DNA, 57 bp, Homo sapiens
  chr1:27332929-27332986
  hypo
caggtgctccagggcctcggtgaagtccccgtacaggctttcgcctgtgaccgttgg

SEQ ID NO: 248255 - DNA, 141 bp, Homo sapiens; identical to SEQ ID NO: 206845
  chr1:27426938-27427079
  hypo

SEQ ID NO: 248256 - DNA, 79 bp, Homo sapiens; identical to SEQ ID NO: 206846
  chr1:27427840-27427919
  hypo

SEQ ID NO: 248257 - DNA, 168 bp, Homo sapiens
  chr1:27480389-27480557
  hypo
ctggacagcctcaaatggtgcgagatgaggcaagaagctcaccagtctggtggcggccgcagcatcggagcaaacgggacttacctatcttcatgaggcaggccagaaggatccagagggagatctcgaagggggtgcgcacgtgtgtgtagtcgatgcccaggactg

SEQ ID NO: 248258 - DNA, 44 bp, Homo sapiens
  chr1:27621918-27621962
  hypo
tcatctttttaaacatgtgacgtgttttttgttttttttttttg

SEQ ID NO: 248259 - DNA, 68 bp, Homo sapiens
  chr1:27627840-27627908
  hypo
ctggagtgcctggacgacttcaaagggaaatttccggagcaggcccacagcagcgcttgtgatgcatt

SEQ ID NO: 248260 - DNA, 225 bp, Homo sapiens
  chr1:27628358-27628583
  hypo
agcagagacaatagcgcagagcagtagaaatgcctcaggcttggaatgtggggcctcggttccaaatgcagctccaccacctgactgtgtggccttgaagaaagcacagcctctctacctacctgcacaaagagcacgaagccctgcccagctcccctcagtgtgctggagaatgaactgggccatcggagtgtggtctgtaaacgtgaacggtgagctcatagg

SEQ ID NO: 248261 - DNA, 87 bp, Homo sapiens
  chr1:27647873-27647960
  hypo
gctaccactacctcgtgagagggccacagaatgaaaagggcaagggaggtataagacttgggtttgggccaggcgcggtggctcacg

SEQ ID NO: 248262 - DNA, 102 bp, Homo sapiens
  chr1:27694479-27694581
  hypo
aaaggacaggcatgggcaaccgacaggctgagaaagctgtgcaattcccagccagggcggtggctcatgcctgtaatcccactttgggaggccaagatgagt

SEQ ID NO: 248263 - DNA, 95 bp, Homo sapiens
  chr1:27704688-27704783
  hypo
aaagttataaaactcgcagctacatgcctggctcctggcaagcgcccatccatgggcgatgttaccgtcagggaagacttcggtgcctggggaca

SEQ ID NO: 248264 - DNA, 52 bp, Homo sapiens
  chr1:27750893-27750945
  hypo
gtgcatcaatagcacggaatagtgggaaatatataggcgtgaattattcgac

SEQ ID NO: 248265 - DNA, 44 bp, Homo sapiens; identical to SEQ ID NO: 206849
  chr1:27798548-27798592
  hypo

SEQ ID NO: 248266 - DNA, 76 bp, Homo sapiens
  chr1:27844443-27844519
  hypo
gccacggtgcctggccttattgcgcctattttagaaaggtgattctagccgcagtgtggagcgtgagctgtacgag

SEQ ID NO: 248267 - DNA, 208 bp, Homo sapiens
  chr1:27844781-27844989
  hypo
acctgcctgcctcgtcgactggactctggccaagggcagggactgtgtggcactgctcactgctgtatccacaaggccctaaggcataatgcctggagcctcaatccatgatcggtagggaacgaatgaatggctaagcctgttggggcaggtgtgatagtttgagtgaaagtgacagggtctgcggtggcagcgaggagagaagaga

SEQ ID NO: 248268 - DNA, 76 bp, Homo sapiens
  chr1:27862696-27862772
  hypo
atttaaattctgctcagcctcggctgctgtctgctgggcagtcagccccggggacgacttttgtcctgaggctgga

SEQ ID NO: 248269 - DNA, 227 bp, Homo sapiens
  chr1:27863985-27864212
  hypo
ggggccaagacgtacgctgactgagtgacagagcggggactgacctgagtctggtcagcatgtcaaggtccagctccggccttgcacaccttcagaacacctccttagaccaccctgttaccatagctacggtacccttgtcatcccgacctggctcctccagggcaggaacctatatgtggtactgctgcacacccagggctagcacgcaccggcccccagcacac

SEQ ID NO: 248270 - DNA, 34 bp, Homo sapiens
  chr1:27868419-27868453
  hypo
cgtgagccaccgcgcctggcaaggaggttttaaa

SEQ ID NO: 248271 - DNA, 278 bp, Homo sapiens; identical to SEQ ID NO: 206850
  chr1:27875530-27875808
  hypo

SEQ ID NO: 248272 - DNA, 606 bp, Homo sapiens
  chr1:27875838-27876444
  hypo
catagcttgctgctcgtcctggtgggaaggtctggcgcgcggacaggacaggctgaaaggaggggtccgccccagccccgctgctacccactgccactgggctggccttggctccccggctagggaaggtggccaggccccgctgggcaggcagggcactggtgggtggccctgcataggtgcccgatgccttccgggactctgggcgagaggctgagagggcaaagtccaagagatcggaggagtcatccgaatcgagcagcgagcgaaagtagccggtgaagaggttttggcgctcctggctgagctcggtctggcctgagggtgcacccgtgctgtagtagctgccacggcctgaggctccactctccagcccagtggaggcaaaggcccgggcctcggtcccctgaaacccacagtttcggccagcttgtccgcctgggtgcccatggtgaggggcccagccaccacccttatccccggcccactcagcacctgcctccccaaagcctgggccactgggcacctgctctgggaacagagtcccattcttccgggaccgtctcttgcgctttggcttcccagtcacagcgtctacctcccccc

SEQ ID NO: 248273 - DNA, 230 bp, Homo sapiens
  chr1:27921335-27921565
  hypo
atgtgacagggtgccgtggggtgcaggcggagcacagaatgggtgcagggttgtgactagctgaggctgtctttgtgtacaggtgtggtatcggggtgtttggagaggtgtaggggtgtccctgggcccttaggtggctgaggaaaagtaccggagctgagactgtctgggaagcggtggggccgggccattaggactgcctgtcgaggaggtgccgggatccaggaggc

SEQ ID NO: 248274 - DNA, 128 bp, Homo sapiens; identical to SEQ ID NO: 206855
  chr1:27942073-27942201
  hypo

SEQ ID NO: 248275 - DNA, 228 bp, Homo sapiens
  chr1:27994765-27994993
  hypo
ccggcgggcacgccgcccccattcaggatcgcagaccagctcatcagcgaggcagccaccgagttggccgcgatgccggcgccggtgaagcccagcgcgggcagcccggcgactgcgagtcctggaggaacaggagcaggtgagggagcgtccgcggcagaggcccgccccgcctgcccgagatcctcgccctccagacccacctcctccgacggccatgaaggtcag

SEQ ID NO: 248276 - DNA, 33 bp, Homo sapiens; identical to SEQ ID NO: 206857
  chr1:28148833-28148866
  hypo

SEQ ID NO: 248277 - DNA, 349 bp, Homo sapiens
  chr1:28293260-28293609
  hypo
tcagggcacagacttcatgccggaccccagctccgagtggctgtaccgggtgacggtggccaccatcctctatttctcctggttcaacgtggctgagggccgcacccgaggccgggccatcatccacttcgccttcctcctgagtgacagcattctcctggtggccacctgggtgactcatagctcctggctgcccagcgggattccactgcagctgtggctgcctgtgggatgcggctgcttctttctgggcctggctctgcggcttgtgtactaccactggctgcaccctagctgctgctggaagcccgaccctgaccaggtagacggggcccggagtctgctttct

SEQ ID NO: 248278 - DNA, 37 bp, Homo sapiens; identical to SEQ ID NO: 206858
  chr1:28364954-28364991
  hypo

SEQ ID NO: 248279 - DNA, 185 bp, Homo sapiens
  chr1:28447726-28447911
  hypo
aggtggtcttgcccgagtactgcagccccacgagcatcagctccatctcctccttccagaagagcgaacggaaccagtccagcaggcgggagatgagtgccagcatgatggcggccggcagcgaggacggacgggaggacggagagtggaggcgaccacgacttccacacgagcaggcctccgcc

SEQ ID NO: 248280 - DNA, 36 bp, Homo sapiens
  chr1:28560005-28560041
  hypo
ggaattacaggcatgagccaccgcgccggaccggct

SEQ ID NO: 248281 - DNA, 34 bp, Homo sapiens
  chr1:28626665-28626699
  hypo
gcggcggtggctcacgcctgtaatcccagcactt

SEQ ID NO: 248282 - DNA, 91 bp, Homo sapiens; identical to SEQ ID NO: 206859
  chr1:28663349-28663440
  hypo

SEQ ID NO: 248283 - DNA, 78 bp, Homo sapiens; identical to SEQ ID NO: 206860
  chr1:28727742-28727820
  hypo

SEQ ID NO: 248284 - DNA, 44 bp, Homo sapiens
  chr1:28807198-28807242
  hypo
tgtgtgttttgtttcgttttctgagacagggtcttgctctgtca

SEQ ID NO: 248285 - DNA, 120 bp, Homo sapiens
  chr1:28827219-28827339
  hypo
acaagagcaaaactccgtctcaaaaaaaaaaaaaaaagaatttatattaaccacatataattggacccccaagatgacattacaaaaggacacttagtactttttctttttttttttttt

SEQ ID NO: 248286 - DNA, 33 bp, Homo sapiens
  chr1:28853112-28853145
  hypo
atccaaaggatagggctgggcgcggtggctcac

SEQ ID NO: 248287 - DNA, 146 bp, Homo sapiens
  chr1:28853676-28853822
  hypo
aaggaatggcactcacatgccgggcaactgatgctcagagtaaccttcccacagcagccgcgatcttcagtgcatgtgtgtttttgtttttttgagacagtgtctgtctctttcgcccaggctaaagtacagtggcacaatctcag

SEQ ID NO: 248288 - DNA, 43 bp, Homo sapiens; identical to SEQ ID NO: 206862
  chr1:28854229-28854272
  hypo

SEQ ID NO: 248289 - DNA, 323 bp, Homo sapiens; identical to SEQ ID NO: 206863
  chr1:28857207-28857530
  hypo

SEQ ID NO: 248290 - DNA, 38 bp, Homo sapiens
  chr1:28867211-28867249
  hypo
aaaaggcttactgagccgcttgtgtattgttttcagca

SEQ ID NO: 248291 - DNA, 120 bp, Homo sapiens
  chr1:28881382-28881502
  hypo
taacaagtcaggacttgaattcgagtctatcctgaaagctcatgagggcccttaactcttatgccattcatttaaaaaattgtggaggatgggtgcggtgcctcatgcctgtaatcccag

SEQ ID NO: 248292 - DNA, 159 bp, Homo sapiens
  chr1:28887875-28888034
  hypo
aactatgccacttacgggaaacaaccagataacaggtaggtacaaagtcatgtctagacagacataagatgtgtcactgtgcctgtcactgccatataggaggaggggagccggtttggctgcacttggttccctcctgaaggacgacgctcttctccc

SEQ ID NO: 248293 - DNA, 34 bp, Homo sapiens; identical to SEQ ID NO: 206865
  chr1:28891701-28891735
  hypo

SEQ ID NO: 248294 - DNA, 34 bp, Homo sapiens
  chr1:28986972-28987006
  hypo
acacagggcagggtgcggtggctcacacctgtaa

SEQ ID NO: 248295 - DNA, 82 bp, Homo sapiens
  chr1:28997959-28998041
  hypo
tttatgcctgtaatgccagcactgtgggaggccgagacaggcggcctcccaaagtgagcggcctcctcggcctctctttagc

SEQ ID NO: 248296 - DNA, 35 bp, Homo sapiens
  chr1:29007853-29007888
  hypo
tgggcaacggagcgagaccgcgtctcaaaaaaaag

SEQ ID NO: 248297 - DNA, 35 bp, Homo sapiens
  chr1:29047654-29047689
  hypo
ttttttttttttttgtgaggcggagtctgactccg

SEQ ID NO: 248298 - DNA, 35 bp, Homo sapiens; identical to SEQ ID NO: 206866
  chr1:29074338-29074373
  hypo

SEQ ID NO: 248299 - DNA, 46 bp, Homo sapiens; identical to SEQ ID NO: 206867
  chr1:29116013-29116059
  hypo

SEQ ID NO: 248300 - DNA, 97 bp, Homo sapiens
  chr1:29273976-29274073
  hypo
ttgagggcaaatggctttctttttattagatgcaaccagggaagtctagtgtttggatgccgttaaaaatacagttattcagcggggtgtggtggct

SEQ ID NO: 248301 - DNA, 66 bp, Homo sapiens; identical to SEQ ID NO: 206868
  chr1:29422743-29422809
  hypo

SEQ ID NO: 248302 - DNA, 148 bp, Homo sapiens
  chr1:29463293-29463441
  hypo
gtaacgcgataccgcggggttgtcctaatttgcatttccttaggactatcccagagttcttcatagactctctaagaaacatcagggtttcctggaaagtgtgaattaaggacaaatattctatctgataaaaaaaaaaaaaaagggc

SEQ ID NO: 248303 - DNA, 120 bp, Homo sapiens
  chr1:29463501-29463621
  hypo
atcctcctgtctcagtctcctgtgttgttctgactacaggaatgcaccactgtaccccactttggaaccctttttattgtgaatataatacacctccaggaaattacataaaacttgaat

SEQ ID NO: 248304 - DNA, 79 bp, Homo sapiens
  chr1:29473803-29473882
  hypo
aaatcctttaggaacgtgttggttccctaagatgggtgatcccaaggaacaaaacagtcattacacatgaacttttttt

SEQ ID NO: 248305 - DNA, 31 bp, Homo sapiens; identical to SEQ ID NO: 206869
  chr1:29513701-29513732
  hypo

SEQ ID NO: 248306 - DNA, 54 bp, Homo sapiens; identical to SEQ ID NO: 206870
  chr1:29605969-29606023
  hypo

SEQ ID NO: 248307 - DNA, 177 bp, Homo sapiens
  chr1:29647168-29647345
  hypo
gccctgctgagttccggtttccctgcagagctacacacggagtgcggccttcatcgtgaccctgcacccgctgcagagcaccacgcccgacttctggcggctggtctacgattacgggtgcacctccatcgtcatgctcaaccagctgaaccagtccaactccgcctgggtgaggcc

SEQ ID NO: 248308 - DNA, 86 bp, Homo sapiens
  chr1:30180749-30180835
  hypo
accctgctctggctacgcagagctgcctaccatttccaagggtgccaggctccccctttctctgccagtgccgtgcctgtgcctgg

SEQ ID NO: 248309 - DNA, 157 bp, Homo sapiens; identical to SEQ ID NO: 206872
  chr1:31194412-31194569
  hypo

SEQ ID NO: 248310 - DNA, 34 bp, Homo sapiens; identical to SEQ ID NO: 206873
  chr1:31239979-31240013
  hypo

SEQ ID NO: 248311 - DNA, 87 bp, Homo sapiens; identical to SEQ ID NO: 206874
  chr1:31240595-31240682
  hypo

SEQ ID NO: 248312 - DNA, 145 bp, Homo sapiens
  chr1:31249866-31250011
  hypo
ctgctcttgcccgccgcatgccagcatttcatttaatggtccaaacatcccatgaggacatatggccatcattcccgctttactcatgaggggactgacacgcagaggttaagcaatttgcccaaggtcacgcagctattccgtg

SEQ ID NO: 248313 - DNA, 88 bp, Homo sapiens; identical to SEQ ID NO: 206875
  chr1:31260793-31260881
  hypo

SEQ ID NO: 248314 - DNA, 284 bp, Homo sapiens
  chr1:31347131-31347415
  hypo
cccaagcctcacctacgagcacctccttccgctccaggatactcttctgaggcagctgagcagctgagctgcccgagtcgatggcattgtccaggaggccagggcccgggcgggcacccttgggcagtgtcccaggtggagatgatgccttggccgcagcccctcccacagctaccacctcattggctgtgtctggttgtgtggtctcttcttctggcagctcgaagtctccactgggccccccactcaccggaacctctggctcatcccggattgtggtcagg

SEQ ID NO: 248315 - DNA, 75 bp, Homo sapiens
  chr1:31401181-31401256
  hypo
tgtaaagatttctttagacaggctttttttttttaagtcattctgtctttgggaagcttccgtgtaccatcgaac

SEQ ID NO: 248316 - DNA, 33 bp, Homo sapiens
  chr1:31406884-31406917
  hypo
gtgctctcaaggcacgcccgccacaccagcctc

SEQ ID NO: 248317 - DNA, 178 bp, Homo sapiens
  chr1:31407298-31407476
  hypo
aaggaagggttgatccggtctagaaatcacctgcgcatgcttcccaggacacagagctgcatcgggtgtcacattcccactttggagcctacaggggaaactggctggtggcaaacagtccttggttccagtttcacctcccttaaactcacctgtaaaacggcgtatgcaataatgc

SEQ ID NO: 248318 - DNA, 100 bp, Homo sapiens
  chr1:31474693-31474793
  hypo
tttctgagataacgcgtatgatagcagtgcttatcaaactttaatgtgcatacaaatcatctgggtagtcttgtcaaaatgcagattttgattcattcgc

SEQ ID NO: 248319 - DNA, 64 bp, Homo sapiens; identical to SEQ ID NO: 206877
  chr1:31478716-31478780
  hypo

SEQ ID NO: 248320 - DNA, 76 bp, Homo sapiens
  chr1:31585281-31585357
  hypo
gataataggcatgagccaccacgcccagctgaactagaggttttaacaaatgtcccggtgacggaaactgaatggg

SEQ ID NO: 248321 - DNA, 143 bp, Homo sapiens
  chr1:31633840-31633983
  hypo
cactctggctctgggcgggaaaaaaggacattcatgtccccaagtttttcctcttccttcctcagccccttccacaaactcaaggccttatgccccaccattaagatggtcttcaattcaggcattgttaaagcacaaatgcc

SEQ ID NO: 248322 - DNA, 62 bp, Homo sapiens; identical to SEQ ID NO: 206878
  chr1:31639518-31639580
  hypo

SEQ ID NO: 248323 - DNA, 64 bp, Homo sapiens
  chr1:31676127-31676191
  hypo
aaataaaataaataaaaaataatgaaaacactgtggatgtccctcagaaggggtcacagtcaat

SEQ ID NO: 248324 - DNA, 68 bp, Homo sapiens
  chr1:31676221-31676289
  hypo
cagccattatgatggagtgtgggaagagggccaagctaccacgtttgaaacggcgctgcagagccact

SEQ ID NO: 248325 - DNA, 36 bp, Homo sapiens; identical to SEQ ID NO: 206879
  chr1:31732224-31732260
  hypo

SEQ ID NO: 248326 - DNA, 105 bp, Homo sapiens
  chr1:31863044-31863149
  hypo
gtgtgttctgggcacgcagcgggcctcatttatgacttagttcaacattacaaaccttcgggagccccaccctccttctctgagagttgccgctccctactaggt

SEQ ID NO: 248327 - DNA, 37 bp, Homo sapiens; identical to SEQ ID NO: 206880
  chr1:31871814-31871851
  hypo

SEQ ID NO: 248328 - DNA, 55 bp, Homo sapiens
  chr1:32050770-32050825
  hypo
taccccttctcgggccgtgaacgagacgaggctggccctgcgcccccctgtatga

SEQ ID NO: 248329 - DNA, 668 bp, Homo sapiens
  chr1:32091929-32092597
  hypo
agggtgctgggatgctctggcggacagaggctgaggcgcccagcacagcgtgactgccaaatgcaaaagggctgctgctgccgtcattttcatcatcaaagggcagagaggacacaagcctcgcaacagatagtgacccccacgtacacaccaaggagagcagaggtgacctgaggcccccgagccagacaccacgttttgagtcagcctccgagccagagcacagtcaaggaatcagatggcaattgcgtctctccttgggaacccgctccagggcttctgtcctctctctctggcggtgccgaggttgcctcagggctctccctcccagctctatccctccctccctccccgccccctcataggcagcttggctggagctgcgtgggtgtccctgggctcaaggccccttcctgctgcatctgtctccttatggctgtgtcttttgtctcccaaccaaggcaaattccgggagcagtttaaggctgccttctcctgctgcctgcctggcctgggtccctgcggctctctgaaggcccctagtccccgctcctctgccagccacaagtccttgtccttgcagagccgatgctccatctccaaaatctctgagcatgtggtgctcaccagcgtcaccacagtgctgccctgagcgagggctgccctgg

SEQ ID NO: 248330 - DNA, 196 bp, Homo sapiens; identical to SEQ ID NO: 206881
  chr1:32139297-32139493
  hypo

SEQ ID NO: 248331 - DNA, 176 bp, Homo sapiens
  chr1:32156856-32157032
  hypo
tttccagggaccactcgctacagcgagatcttctaccctcaccctctcctccagccaggatccctgggacagagccttatcttccccccgttcattccctggccagggtgggagagcggtctctgagaaaagcacagcaggagaagcaagggggtactcaccggggtcccaggcag

SEQ ID NO: 248332 - DNA, 126 bp, Homo sapiens
  chr1:32208523-32208649
  hypo
ccgcatccggctccgggacccccgcccgcagctgcgggagcacaggctccaggacccccactcctcccacacgccgtgcactgcaaggaagcacgtggccggtggctgggcggcaccatggccccg

SEQ ID NO: 248333 - DNA, 119 bp, Homo sapiens; identical to SEQ ID NO: 206882
  chr1:32221874-32221993
  hypo

SEQ ID NO: 248334 - DNA, 77 bp, Homo sapiens; identical to SEQ ID NO: 206883
  chr1:32407225-32407302
  hypo

SEQ ID NO: 248335 - DNA, 120 bp, Homo sapiens
  chr1:32469886-32470006
  hypo
taaaacatatggataggctaaatctaacctgtgagctgtggtgttcttccctcctttccgcgtctgaccacgttatctcactgttctccactggcactctatctccttatctgagcatca

SEQ ID NO: 248336 - DNA, 55 bp, Homo sapiens
  chr1:32497745-32497800
  hypo
tacagaatctaatgcgtcttttttttccccatgccatagccgcgtacgctgtgta

SEQ ID NO: 248337 - DNA, 39 bp, Homo sapiens
  chr1:32674989-32675028
  hypo
tagcaagggaggtaacggcaagagcgtgtattcagtacc

SEQ ID NO: 248338 - DNA, 286 bp, Homo sapiens
  chr1:32705375-32705661
  hypo
ggaccccccgcctcccgccaacacatactcacacacatgtacattcacagagccctgcaggagagggcctgggagagggtgggaggccccttacctctccagggaccagtgcaaccagccaggttaagcggccttggtctctgtgcctccgccagtcacgcgggcttgtttcgcggcctgggccgagagcgtgtccatgatgaagccccgcgcccaaggacgagcccccgccagcgcagttcgcagcagctcctggtccctgtagcagcgccgcttctggggacca

SEQ ID NO: 248339 - DNA, 143 bp, Homo sapiens
  chr1:32741468-32741611
  hypo
ctcactgcgttctttcgtcgctttgtccatccattcattcattcaggatcgttttcactgtcggtccgggacttcgaccagaaccagggagaggtggtgaaacattacaagatccgtaatctggacaacggtggcttctacat

SEQ ID NO: 248340 - DNA, 525 bp, Homo sapiens
  chr1:32741986-32742511
  hypo
gaagccccagaagccgtggtgggaggacgagtgggaggttcccagggagacgctgaagctggtggagcggctgggggctggacagttcggggaggtgtggatgggtgagtgtggcctccaggactgcctgggaagaggggaacgggaggggccgctgaggtgatgagagtcccaggacagctgcctggcgactttcccactccttcccttccccgacccagggtactacaacgggcacacgaaggtggcggtgaagagcctgaagcagggcagcatgtccccggacgccttcctggccgaggccaacctcatgaagcagctgcaacaccagcggctggttcggctctacgctgtggtcacccaggagcccatctacatcatcactgaatacatggagaatggtgggtgctacccgagtcggctaccaggggatactgctctccctgctgtccctgccagagggtggaaatacaccttttcttctggcccaaagctcaagcaaggagggtttcttgagctttcctg

SEQ ID NO: 248341 - DNA, 47 bp, Homo sapiens; identical to SEQ ID NO: 206884
  chr1:32751094-32751141
  hypo

SEQ ID NO: 248342 - DNA, 240 bp, Homo sapiens
  chr1:32764105-32764345
  hypo
taggcccagccgggaatagacttcttacttgagaaactgagttttgcagtgaggtcattactttgggattcagatttggctctgccattgagaagctttgtaatatcaggcaagtcaccttacatttcagatttctctcctataaaatcaaaatgataggagttcctattatgagaacaatgatgggaaagctctttaagagtttaaagtatggctggcgccatggctcacgtctgtaat

SEQ ID NO: 248343 - DNA, 156 bp, Homo sapiens
  chr1:32788457-32788613
  hypo
atcacttaacttctcggtatctgtttgttcctccgcacagtggggttgatatctggcttgtccagctcatagagttgttgtgaggatcaaatgaggttgtatatgtgaaaggacttggaaaagggccgggatatattttcacaggcttttaagaca

SEQ ID NO: 248344 - DNA, 76 bp, Homo sapiens
  chr1:32804501-32804577
  hypo
tgaatgtgtggagcaaagagcggctcctttatgtctgggtgagtgttcctgtggcggtggggagctgtgtgtgcct

SEQ ID NO: 248345 - DNA, 334 bp, Homo sapiens
  chr1:32826700-32827034
  hypo
gggtcaggaccagcaagatacgagaggagtgaagtggcgtaggttgaaaggcggaagggcgggcccctaaggctgggtccaaacgaggaggctgcggaagggaaagtgttattggactgggcagagcagctggtgggcccgacggatagacatacactgccagcccggagtggaaagaacagtttgtgctgtgctttattaaaatgtgcatcattcttttattttaaaatgtgcatcattgtctcgtgctcggcgcatgcgacctcagcgtggtggcccgctgggggcctcgttcccgcccagctcccgcggagccgcagggagcaggcgcact

SEQ ID NO: 248346 - DNA, 79 bp, Homo sapiens
  chr1:32893209-32893288
  hypo
tttcgctaaactttcgataccctttgttgcatgtttgataattaattcaccgccctattaggtacgggctgccaggcaa

SEQ ID NO: 248347 - DNA, 140 bp, Homo sapiens
  chr1:32950770-32950910
  hypo
gggctgcggcgcttcgggctgtgtgacagctgcacctgcgttacagacacacccgatgatgatgatgatttgatgcccatcaaccttagcttggtggaggcttcatctgaaagccaagaaaagagcgacacagacaatga

SEQ ID NO: 248348 - DNA, 32 bp, Homo sapiens
  chr1:33016264-33016296
  hypo
aagccacaaattaggccaggcgtgttgggtca

SEQ ID NO: 248349 - DNA, 91 bp, Homo sapiens
  chr1:33016536-33016627
  hypo
aacaggagcgagactccgtctcaaaaaaaaaaaaaaaaagccacaaattaccaccgtacacacccagtacgctggacagtagttaatatgc

SEQ ID NO: 248350 - DNA, 33 bp, Homo sapiens
  chr1:33154203-33154236
  hypo
agtacaaactttttttaaggcggagtctttgtc

SEQ ID NO: 248351 - DNA, 322 bp, Homo sapiens
  chr1:33169543-33169865
  hypo
ttcattcatcctcgcgtctgagtgtgctgcctgtggctgtatatttatatttctctgtctaatgcaagggggtggaagatttaacacccagggcagccaaatatacccttgtaaggtacgcacgagaaaaagccaggttttgaggctgctggtcattttctgacttacccccgaactattccaggggaggaggctggcgaagcctcagctgctgggcatttgacatctgctgcccgccagaggagagctaaggcagcaagggcaggcctgccagaggctctgtttgctgtggtaccaagcaacaggcggcaagggtggcatt

SEQ ID NO: 248352 - DNA, 93 bp, Homo sapiens
  chr1:33220942-33221035
  hypo
tggtgggagaatctacgggtgtattcccaggatggcccacattcctagagattccgaaccggagcttgatgatctcatcgctccatggagggg

SEQ ID NO: 248353 - DNA, 35 bp, Homo sapiens
  chr1:33225964-33225999
  hypo
caagacagtgcgtgcgcatgcgcgtggccttggga

SEQ ID NO: 248354 - DNA, 93 bp, Homo sapiens
  chr1:33226462-33226555
  hypo
taccggtgtgagccaccgcacccggccatgtgggtgtggttttgagagtgcccacctgcggaggtggccccagtgggacgctgcctgctgcct

SEQ ID NO: 248355 - DNA, 70 bp, Homo sapiens
  chr1:33231258-33231328
  hypo
gggcgggagggctcgcatccccatagtgctgggttacagtgaaggtacgccccgcgctctgctctggaga

SEQ ID NO: 248356 - DNA, 935 bp, Homo sapiens
  chr1:33235318-33236253
  hypo
cagggcggcgtcggcgggagcggcggagcactgtgctgggactcccgcagcatgtgcagaaggagcttggtgaggcctgggttaggagggcagtggtggggtgggtggggagccttggtcatcccctctctgctgaccccacctcctccctgtcccttccaggcctgaggaatgagcgtgaggcaccaggcacgccccgggctcctggtgcacgggatgccgtacgcatccccacagtggacggccgcccccgaggcacctcagggatgggggcccgggtgtccctgcaggcgctggaggcggaggcggaggctggcgctgagacagaggccatgctgcagcgccacattgaccgtgtctaccgggatgacacctttgttggccggtccacgggtacccgggccccaccattgacccggcccatgtccctagcagtgcctggattgacaggaggggcagggcctgcagagcccctgagcccggccatgtccatctccccccaggccacctacctgtcgaagttgattccacatgctgtgctgccgcctacagtggacgtggtggccctaggccgctgcagcctgcgcacactaagccgctgcagcctgcactcggccagcccagcctcagtccgctcgctggggcgcttctcctccgtctccagcccacagccccgcagccgccacccatcctcctccagtgacacctggagccactctcaatcctccgacaccattgtgtctgacggttccaccctctcctctaagggtggctctgagggccagccggagagctctacggctagcaatagcgtggtaccccctccccagggaggcagtgggaggggctctcccagtgggggcagcactgctgaggcctcagacacactcagcattcggagcagtgggcagttgtctggccggagtgtgtccctg

SEQ ID NO: 248357 - DNA, 502 bp, Homo sapiens
  chr1:33237281-33237783
  hypo
ccctcctccagctccgccagccccagctcctgctagttccgccccagggcatgtggccaagctccctcagaaggaaccggtgggctgtagcaagggtggtgggcctcccagggaggacgtaggtgcgcccctggtcacgccctcgctcctgcagatggtgcggctgcgctccgtgggtgctccaggaggggctcccaccccagcactggggccatcggccccccagaaaccactgcgaagggccctgtcagggcgggccagcccagtgcctgccccctcctcagggctccatgctgcggtccgactcaaggcctgcagcctggccgccagtgaaggcctctcaagtgctcagcccaacggaccgcctgaggcagagccacggcctccccagtcccctgcctcaacggccagtttcatcttctccaagggctctaggaagctgcagctggagcggcccgtgtcccctgagacccaggctgacctccagcggaatctggtggca

SEQ ID NO: 248358 - DNA, 146 bp, Homo sapiens
  chr1:33264160-33264306
  hypo
ggtgcgatggctcacgcctgtaatcccagcactttgggaggctgaggtggaaagatcacttgagcccgggtgtctctccaaaaataaaaaacaaacaaacaaacaaaaagaaattagccaagtgtgatggtgcgcatctatagtcc

SEQ ID NO: 248359 - DNA, 40 bp, Homo sapiens
  chr1:33271259-33271299
  hypo
gatttaaagtgacagatgtgcggccgggcacggtagctca

SEQ ID NO: 248360 - DNA, 164 bp, Homo sapiens; identical to SEQ ID NO: 206893
  chr1:33415196-33415360
  hypo

SEQ ID NO: 248361 - DNA, 78 bp, Homo sapiens; identical to SEQ ID NO: 206894
  chr1:33431248-33431326
  hypo

SEQ ID NO: 248362 - DNA, 37 bp, Homo sapiens; identical to SEQ ID NO: 206895
  chr1:33432070-33432107
  hypo

SEQ ID NO: 248363 - DNA, 480 bp, Homo sapiens
  chr1:33441467-33441947
  hypo
gagagggagaggggtttttgttttatttttaaagaggtttttttttttgagcgggagggtttcaatagattctgccccgcaagcttcccagccacctttctcatacctacagctcatggtgtgtcgccctgccttaaaccccacactggctccccgtgcccgatgagagagcatttagatccttcataactaagactcaccttcaccctcaccagtcccaccgcctccttgcacgggagaccccatccctctggacccggggcccttccagggatagccatcacttgcatacttgcgactgctcttgctgtagggtcccctttccccctttgtgaacctagcgaattcctagaccctacttaattataataaagcaacagagggtagaaactggcactaaaatgccgcttagcaaaggtcacaaaggtgaaagcctgcagaagtcaagcaggagagagaaatacggctggtgtatcaggg

SEQ ID NO: 248364 - DNA, 43 bp, Homo sapiens
  chr1:33612963-33613006
  hypo
gtcaagcttgtcccggacgttaagccgcgtccagggctccgtg

SEQ ID NO: 248365 - DNA, 174 bp, Homo sapiens
  chr1:33741930-33742104
  hypo
gtcctcttcttcccgcagctggacaacctggttctgattaacaagatcaaggagcagctgatggccgagaagatcaggccgcctcacctgccgcccacgtcggcctcgtcgcagcagccgttgctagtgccgccggcacccgccgagagcagccaggccgtcatgtcgctgccc

SEQ ID NO: 248366 - DNA, 42 bp, Homo sapiens
  chr1:33763431-33763473
  hypo
atcaagatccaaataagattcctgcatcgtagtagctcagta

SEQ ID NO: 248367 - DNA, 94 bp, Homo sapiens
  chr1:33817184-33817278
  hypo
ggtggggtacagaccgtgtttctcagtgtgctacctcccttcccacagtgctttgcacagagcaggcattcacacatacacagaatgggccggg

SEQ ID NO: 248368 - DNA, 97 bp, Homo sapiens
  chr1:33841565-33841662
  hypo
gtggataccaggtgacgactatgcagtatatacatcagctttccagtctgtggtggggccacttgggaactgaggtctctgttttttgagactggag

SEQ ID NO: 248369 - DNA, 142 bp, Homo sapiens
  chr1:33985063-33985205
  hypo
ccggctgctggaggcggggctctcggtggcggtggtggcggccaggccgggtggctatactgctgtgcacactgtgctgactgtgaactccgcctcgctggccatgatgtctgtgggctggatgttgcggtcgtacattggg

SEQ ID NO: 248370 - DNA, 250 bp, Homo sapiens
  chr1:35116224-35116474
  hypo
acagttccctcactcctggtcggaagacacttgaatacagattctgcgctggcagaggagtgccggcgcctccagctccctcagctcaggacctctcccctggcaggagcagggggtggaaagcgtgcgagcacgctggagctgaggaagcagcaggaaggaggggtgtgtgccagtgccatagactcgaccagggccttccacgtgccttcgctcctgtcacggtcacgtaaccttctgaggtgagcac

SEQ ID NO: 248371 - DNA, 292 bp, Homo sapiens
  chr1:35223069-35223361
  hypo
gaccacaaggacttcgactgcaatactcgccagcccggctgctccaacgtctgctttgatgagttcttccctgtgtcccatgtgcgcctctgggccctgcagcttatcctggtgacatgcccctcactgctcgtggtcatgcacgtggcctaccgggaggttcaggagaagaggcaccgagaagcccatggggagaacagtgggcgcctctacctgaaccccggcaagaagcggggtgggctctggtggacatatgtctgcagcctagtgttcaaggcgagcgtggacatcg

SEQ ID NO: 248372 - DNA, 548 bp, Homo sapiens; identical to SEQ ID NO: 206901
  chr1:35226870-35227418
  hypo

SEQ ID NO: 248373 - DNA, 46 bp, Homo sapiens
  chr1:35442224-35442270
  hypo
gtgtgcaggatgtcgagcgtggaggcggcgcgacaccggtctccgt

SEQ ID NO: 248374 - DNA, 143 bp, Homo sapiens
  chr1:35650178-35650321
  hypo
caaagcgctcagtacgctattggaacagtaattaacagttcattataagtagttgatgtccatgtgtgttaagtaaatattttagaaggttccgtagtcaacgttcgtcgatacaatcaccaatgagtcgatccacaggtacc

SEQ ID NO: 248375 - DNA, 159 bp, Homo sapiens
  chr1:35664741-35664900
  hypo
tcttaagatttatcaagttactttacctgtatgttttgcctcagggcatttgcacttgctctttactcagcctgcagtgttctccccactcgccccgccccggctctttgcacagatatcttttcttaatctttttttttccttcgctgctttatggaa

SEQ ID NO: 248376 - DNA, 36 bp, Homo sapiens
  chr1:35894111-35894147
  hypo
acaggcgtcacacaccttgcccggccgcctgagaat

SEQ ID NO: 248377 - DNA, 40 bp, Homo sapiens
  chr1:35963895-35963935
  hypo
tacactccagcctgggaaataagtgcgaaactcccatctc

SEQ ID NO: 248378 - DNA, 270 bp, Homo sapiens
  chr1:36025948-36026218
  hypo
gtgacatagatgccaaaactcggcggcggatcttcgatgctgtcggcttcaccttccccaatcgtctcctgaccaccaaggaggcgccggatggctgccctgaccatgttctgcgggctttgggtgtggccctgctggcctgcttctgcagtgaccctgaactggccgcccatccccaagtcctgaacaagattcccattcttagcaccttcctcacagcccggggggacccggacgatgctgcccgccgctccatgattgatgacacct

SEQ ID NO: 248379 - DNA, 39 bp, Homo sapiens; identical to SEQ ID NO: 206905
  chr1:36056553-36056592
  hypo

SEQ ID NO: 248380 - DNA, 44 bp, Homo sapiens
  chr1:36271181-36271225
  hypo
agaatatagagtatggtggccgggcatggtggctcacgcctgta

SEQ ID NO: 248381 - DNA, 120 bp, Homo sapiens
  chr1:36271465-36271585
  hypo
cgagactccgggtcaaaaaaaataaaagaatatagggtatggtatcagtagacaagaatgtaggcactagattaaaagtcccagttccggccgggcgcggtggctcaagctcgtaatccc

SEQ ID NO: 248382 - DNA, 201 bp, Homo sapiens
  chr1:36549011-36549212
  hypo
tctatgtactgttcgtttgctggcaactactatgtttctgaggctgacctcgaaatcctagcctcaagcgctcctcccgcctgggtctctggagtagctgggattacaagcgtgagccactgcacttggtttcgtattttctatcatgtctatgcatacctttatcaaaataaaattgtttaggccggggcagtgacacat

SEQ ID NO: 248383 - DNA, 147 bp, Homo sapiens
  chr1:36558327-36558474
  hypo
agctggccactagtcgtaaaaatgttgataatggattttatttgtctagcatctatactgggcgttgtgcagaatgcttcacagacacgatctcgcttcatcctcacaacagccctgtcagagagttgctaacgttactccctgtct

SEQ ID NO: 248384 - DNA, 188 bp, Homo sapiens
  chr1:36563384-36563572
  hypo
cgttggtgcccttgacgtgcacatggtaagcaaagtagtagacgccgcccacagggcaggtgaagatgccagtggctgggttgtagccgctgtggccattgtagagagtccggtcaaatttcacgggcatgcccgaggcggggaagggcgaggtgagcaccgcagtgaaggccggtgtggcatgggca

SEQ ID NO: 248385 - DNA, 82 bp, Homo sapiens
  chr1:36610554-36610636
  hypo
tttcaggaggcctttcttcccgttagtgccccaaacaaaatgtcaaatctccttaaggaggctgatcttttttttctttttt

SEQ ID NO: 248386 - DNA, 59 bp, Homo sapiens
  chr1:36633228-36633287
  hypo
acacaggctcagggcttgcccgaggttcgccgggagccgaggtcctcagtcaggcctgt

SEQ ID NO: 248387 - DNA, 88 bp, Homo sapiens
  chr1:36637143-36637231
  hypo
tggcaaaggagcggcgagaagagcgggccaagtacctgggtgagtgagcaggaagcctcatcatcttcttcatcgtcatcatcagcat

SEQ ID NO: 248388 - DNA, 62 bp, Homo sapiens
  chr1:36638185-36638247
  hypo
agccctggaggaacggcagcggcagaagctcgagaaaaacaaggtgcgggatgggtctccgt

SEQ ID NO: 248389 - DNA, 111 bp, Homo sapiens
  chr1:36640423-36640534
  hypo
tgcatggaaggcctcggtgccccccactggctcctgccgggcccggccctaatgccgtgtcttttccccctccaggtgggagcaggtgctccgtgtcggcagttaacctgc

SEQ ID NO: 248390 - DNA, 93 bp, Homo sapiens; identical to SEQ ID NO: 206907
  chr1:36641759-36641852
  hypo

SEQ ID NO: 248391 - DNA, 155 bp, Homo sapiens
  chr1:36773758-36773913
  hypo
cccagacgagttggcgctgcggaggggggacgtggtaaaagtactcagcaaggtgtgagacgaacagggtgggggggcccagggaagccggtgttgagaaagggtagacctgcacatgtaccccctgaatctaaaataaacgttgaaattatatc

SEQ ID NO: 248392 - DNA, 42 bp, Homo sapiens; identical to SEQ ID NO: 206908
  chr1:36774202-36774244
  hypo

SEQ ID NO: 248393 - DNA, 116 bp, Homo sapiens
  chr1:36807404-36807520
  hypo
atgggctgtgcgtcgtggcccagccgtcgcaccggtggtgcgctgccgaactgccgcttgggtacccagctccgggcgtcatggatggagctcttctcctcggccagcagcagctg

SEQ ID NO: 248394 - DNA, 66 bp, Homo sapiens
  chr1:36814516-36814582
  hypo
acagtaggaggtaggcttctcgtcagagggtgaagcagctgccccgaccccctctccagggagcag

SEQ ID NO: 248395 - DNA, 76 bp, Homo sapiens
  chr1:36845272-36845348
  hypo
gcccggcctgggttgtagcctctttagggagtgggaacacctgtgttcccctcaggacgtacgacctcaacccaaa

SEQ ID NO: 248396 - DNA, 186 bp, Homo sapiens; identical to SEQ ID NO: 206909
  chr1:36857026-36857212
  hypo

SEQ ID NO: 248397 - DNA, 223 bp, Homo sapiens; identical to SEQ ID NO: 206910
  chr1:36881339-36881562
  hypo

SEQ ID NO: 248398 - DNA, 39 bp, Homo sapiens
  chr1:36931309-36931348
  hypo
caaagtctcttcaccgtgtcccaccgcactgtcactccc

SEQ ID NO: 248399 - DNA, 109 bp, Homo sapiens
  chr1:36936920-36937029
  hypo
tacaggcgtgagccactgcgcccggccaataggactagatttaacccaggcagtctagcctttgaattgatgcgcttgacctctgtgctcttctggctgccagccccct

SEQ ID NO: 248400 - DNA, 150 bp, Homo sapiens; identical to SEQ ID NO: 206915
  chr1:36979463-36979613
  hypo

SEQ ID NO: 248401 - DNA, 142 bp, Homo sapiens
  chr1:37324710-37324852
  hypo
ccttgatgaagttcatgaagcggccgccaaagcgccaggccttgtgccgatggcactgcagggagttcacggtcatctgtggtgcccgctggtagcacacggacacgatatggacggcgtcgtacagtaaggctgcatcagt

SEQ ID NO: 248402 - DNA, 44 bp, Homo sapiens
  chr1:37851536-37851580
  hypo
cacaattcacatctctagctaacggaagtaaaatttcagagcta

SEQ ID NO: 248403 - DNA, 45 bp, Homo sapiens
  chr1:37863807-37863852
  hypo
atattaaatttccagttattcggttaggtgttagaaaaccaccat

SEQ ID NO: 248404 - DNA, 179 bp, Homo sapiens
  chr1:37898813-37898992
  hypo
cgcagagcaacactcgtgtcccaacacatacacaaagcacagaggcaaaagccagcatgccaggcagacagaaccagccccaaaagccccttcacatgccggacagacacacttgcatgcacgtaggtacccagcacctgcacacagggatgtgcccccgcacgcgcagcggtgctgag

SEQ ID NO: 248405 - DNA, 32 bp, Homo sapiens
  chr1:38030259-38030291
  hypo
gaatgagccactgcgcccggccagagagccaa

SEQ ID NO: 248406 - DNA, 92 bp, Homo sapiens
  chr1:38149928-38150020
  hypo
aagtgcttagtaatgtcagccgcagctcttgctccttctgcccatgctcctgttgctgttactactactgctaccaatgcatttaaaaggga

SEQ ID NO: 248407 - DNA, 181 bp, Homo sapiens
  chr1:38171209-38171390
  hypo
ttcctcactgtgccagtgggcggcggagaggtgaagtatttccaagggaagccaggccacagtgtgctgcttagtcaagcatttcttttccctgggccctcacccacgcttcaccctcagagtcctttcagtgcgtgggtcctgatctccacacttctgcgggactcagaacccagttttc

SEQ ID NO: 248408 - DNA, 42 bp, Homo sapiens
  chr1:38184577-38184619
  hypo
caggagaaggggagggtaaccgggccccagggctggatctgg

SEQ ID NO: 248409 - DNA, 58 bp, Homo sapiens
  chr1:38206997-38207055
  hypo
aaagtggacgttcccggtgccttcaggggattgaggaaagtaccgatcagatagtaat

SEQ ID NO: 248410 - DNA, 37 bp, Homo sapiens; identical to SEQ ID NO: 206917
  chr1:38294272-38294309
  hypo

SEQ ID NO: 248411 - DNA, 96 bp, Homo sapiens
  chr1:38327726-38327822
  hypo
aataaaaaaatctgtgttaaataactaaagttgaaaattgaatgtcagttttattatggtggattttctcccgtgtcttcacgactcacagcgctg

SEQ ID NO: 248412 - DNA, 86 bp, Homo sapiens
  chr1:38398323-38398409
  hypo
ccaccacccccggcctattatccccattttatatacaaggcaaccaagttcagagaggttaagtctgaggtcgcagagtgactagc

SEQ ID NO: 248413 - DNA, 313 bp, Homo sapiens; identical to SEQ ID NO: 206918
  chr1:38492844-38493157
  hypo

SEQ ID NO: 248414 - DNA, 96 bp, Homo sapiens
  chr1:38673133-38673229
  hypo
cagctcggaggctgcgaggcagagccgtgaacgccaacagtctggaggcaggctccggagggagacaggctcgggcccattcgctgagcttggttc

SEQ ID NO: 248415 - DNA, 258 bp, Homo sapiens
  chr1:38953061-38953319
  hypo
tctgttacaacttacagttgcgtcaatacaggatggagctccccagacggtgctggctgttgagtgctgcagcgagtgcgatattggccctttagatttcacagacaccctctccaagtacaaacacacactcacacacacacagacacatgcgcgcgcctactccatcgcgggctgcgtggtgtgtgcagtcagcagccgtgtggagaatgtgaaatcacacctcgctctccttccgaggcagtgagatctttattg

SEQ ID NO: 248416 - DNA, 144 bp, Homo sapiens; identical to SEQ ID NO: 206919
  chr1:39174396-39174540
  hypo

SEQ ID NO: 248417 - DNA, 44 bp, Homo sapiens
  chr1:39326752-39326796
  hypo
aaaattgttaaagccggccgcgcggtggctcacgcttgtaatcc

SEQ ID NO: 248418 - DNA, 33 bp, Homo sapiens
  chr1:39345384-39345417
  hypo
tttgttctgttttttttgttcgtttgttttctg

SEQ ID NO: 248419 - DNA, 120 bp, Homo sapiens; identical to SEQ ID NO: 206920
  chr1:39345657-39345777
  hypo

SEQ ID NO: 248420 - DNA, 82 bp, Homo sapiens
  chr1:39388385-39388467
  hypo
tttcctcatctctcccgctcacgtttatcttctgccccactcctgaatttctgaggaaatattacctattagattggtaaca

SEQ ID NO: 248421 - DNA, 105 bp, Homo sapiens
  chr1:39416852-39416957
  hypo
cacagcacatgtcagcgtcatgaagtctctaaccttctaagaagtccttcaacaaacaagtctgttcaatgttgcttcacctagcacttcccaaacttgtctgac

SEQ ID NO: 248422 - DNA, 35 bp, Homo sapiens
  chr1:39455439-39455474
  hypo
ggattacaggcgtgagccaccgcacccagccgata

SEQ ID NO: 248423 - DNA, 31 bp, Homo sapiens; identical to SEQ ID NO: 206921
  chr1:39739272-39739303
  hypo

SEQ ID NO: 248424 - DNA, 31 bp, Homo sapiens; identical to SEQ ID NO: 206922
  chr1:39739543-39739574
  hypo

SEQ ID NO: 248425 - DNA, 39 bp, Homo sapiens
  chr1:39920597-39920636
  hypo
gcagcaccagcagcgtcttgaaacggccttgtcagaact

SEQ ID NO: 248426 - DNA, 37 bp, Homo sapiens
  chr1:40025745-40025782
  hypo
gccactgtgcccagccgaggtgacaccagatctaaag

SEQ ID NO: 248427 - DNA, 134 bp, Homo sapiens
  chr1:40030074-40030208
  hypo
ctaaaggccagtttgctcaccgactctctgagtggtagtagggaggccacgagaggccggagcattaccagttggagccagatggcgaagagttggacgaggcccagactggcgtatagcacttggcattcctt

SEQ ID NO: 248428 - DNA, 101 bp, Homo sapiens
  chr1:40081557-40081658
  hypo
gcctgaatgagtcttttctagcaggtgtagagcaggagtcaggtttcgcctggtgtattagttactgattgctatgtaacaatgaccgtaaacctagtgct

SEQ ID NO: 248429 - DNA, 33 bp, Homo sapiens
  chr1:40117400-40117433
  hypo
attaataaagaagttcgtaggccgagtgtggtg

SEQ ID NO: 248430 - DNA, 248 bp, Homo sapiens
  chr1:40124818-40125066
  hypo
caggtgcagtccgccggggtgtctgtgccacaccataaggcacatgggcggccacagtgcccatctcctgagccccagccacatggaacatctggtcatcaaagaagatgtgtgggcggatcttctcaaggagagggcccttgggcgctccagcaaggaacaaggcttcatctgtctccaggccccagctgcgcagggtcttgagagcccgggccccggaactggctgcactgcgtgctgtcaccaag

SEQ ID NO: 248431 - DNA, 31 bp, Homo sapiens
  chr1:40179273-40179304
  hypo
agccacggcaccctgccgtgatattacttta

SEQ ID NO: 248432 - DNA, 85 bp, Homo sapiens
  chr1:40349616-40349701
  hypo
caggcatgcgccactgcgccagaccacctgccgtcttaaatggtagatggcaaccctatctaaatagatccgtccctattattct

SEQ ID NO: 248433 - DNA, 44 bp, Homo sapiens
  chr1:40409694-40409738
  hypo
accaggcaatataggcgtattcattctgttttttttttttttga

SEQ ID NO: 248434 - DNA, 148 bp, Homo sapiens; identical to SEQ ID NO: 206923
  chr1:40771002-40771150
  hypo

SEQ ID NO: 248435 - DNA, 162 bp, Homo sapiens
  chr1:41116838-41117000
  hypo
cttggtttggaaacacggtcgttgcagatgtgacaagttaagatgagatcatgctggagaagggtgggtccctcatccaatataaccagtgtccttataggaaggtggccacgtgaagacagacacggggagagcgccatgtgccgacggaggcagaaatgg

SEQ ID NO: 248436 - DNA, 32 bp, Homo sapiens
  chr1:41170004-41170036
  hypo
agtgctggtattacaggcgtgagccacagcgc

SEQ ID NO: 248437 - DNA, 363 bp, Homo sapiens
  chr1:41281553-41281916
  hypo
aggtctctctgaccccgagctgctgtccttaaggtcaccacgaaacatgaatataaataaagccacatagaaggtgacttgggccacacatagggaggcaagcatcgggagttggcagttctgaaggggggatagtggggtgcgggaatcagaggctccgtagagctttgtagcatttgtgttcctgtaggcgtggacgatgagcagagtctcgcaggcacagacatgaggtgttctgcgtagcatgcaccgtgccagcaacggtgcagaggtggggagactggggacatctgggaaggctggcgggtcagtacacagagatgtatttccagagaagcctgttccctccggagtctcctccag

SEQ ID NO: 248438 - DNA, 79 bp, Homo sapiens
  chr1:41295714-41295793
  hypo
agtgcatgtgtagacgtgcacgtacacgttcacatgcacacagactgtgtaaatgctgttgaaccgggagctcagtagg

SEQ ID NO: 248439 - DNA, 161 bp, Homo sapiens
  chr1:41451887-41452048
  hypo
agccactttgggcaggtggtcggggagtctcccaagagaggccatttgagctgagaggccagtcacagcgagagtggaatgagaagtgcggaggcgcagggctacgaaggcgtggttggtccgggaatggaggggaggccggcatagctaaggcagagtga

SEQ ID NO: 248440 - DNA, 394 bp, Homo sapiens
  chr1:41472915-41473309
  hypo
gacaggctgaaggacggagcctccacccaaccgaggttacaaatgccaactgggaggcattttcttctgtgacaaaatgtctcataaggaaagcctggagaattagagcttacttacaagcctttgccacccactcagcgagggaggtttctctctagcggaagcagagttctgtagttggtgtctgttttctgaacatctccaggtcgtagacatgccagaacacaacccagggcagatgggcggaaccatgaggctgggcaagaggagaaccctgttccagaccaagaactcagtcatgagtaagagctgcctcacgctggcccagcctttggctctgcgtgcccaggacgcgtgtcttagggtgatgctgtggcttcgaggagcaggctgg

SEQ ID NO: 248441 - DNA, 137 bp, Homo sapiens
  chr1:41483523-41483660
  hypo
acgtagcgccgcacgtggtgcttgaaggccaggctgaggtactcgccgctaccccgcttgaactccatattgcgggtctcgctgcccaggaaggcaccctggaagagctggtccttgcccacgatctgctggtgcac

SEQ ID NO: 248442 - DNA, 347 bp, Homo sapiens
  chr1:41485929-41486276
  hypo
tcaatagcaggtccttcccacgggctgccagctccttgaggattaggtgctcctccagggccgtctgcaggcgccaggggagggaggccagggtgtccctgtggacagtcacctgcaccagtgcataggccttccgcggccgcctcaccacttcaatgtgctcccgcgccaccggcatctccagccgctccagggtgtctcgcagcaggcaggcaagcaccggcactgagaactgggggttcagatggcccacatagagagtgtgcgccgagggagcctcctcgaggtcagagtactccgtcagggactgctctgcgggtagctccggcagggactcctcaccccag

SEQ ID NO: 248443 - DNA, 51 bp, Homo sapiens
  chr1:41488287-41488338
  hypo
ctccttgcccgcccgggcagcagccaggttgggctcggctttgtgtccaca

SEQ ID NO: 248444 - DNA, 89 bp, Homo sapiens
  chr1:41915194-41915283
  hypo
aggtgtgaggaggccgaaagcccaggcaggttgacgactgtaaaacgccggttggatttagcaaaatggaggtccggggccttgagcag

SEQ ID NO: 248445 - DNA, 98 bp, Homo sapiens
  chr1:41933801-41933899
  hypo
tgactcgtcttctccgagggttagtttctagaaaatgggagtgaaatactgctttcctgcaggtgtcaggtaaggatcaaaagcgataaggcctgtaa

SEQ ID NO: 248446 - DNA, 253 bp, Homo sapiens
  chr1:41934216-41934469
  hypo
gctggtgacacgggcgtgggctttgacaggtgagtagatgtttatgaggggcaaggaggcagtgaaggcaggggtggggtgggtagagatggttctggggacagagggaggtgagtagaggaaggtgggcagatggcggagcttgtgttttgagctcctgtgcaacagaaatcccagatgctgcaggtgaggcagcggccaagcctggcccggttgctaccagagcagggctggcctgcggcctcctgattcc

SEQ ID NO: 248447 - DNA, 47 bp, Homo sapiens; identical to SEQ ID NO: 206928
  chr1:41967566-41967613
  hypo

SEQ ID NO: 248448 - DNA, 211 bp, Homo sapiens
  chr1:41970958-41971169
  hypo
tctcatggctcccttcgtcctcccgacccttaggacttttccaaggaaaagtcccctgggtgatgcagactcactctggattagcactgtcattctcttccaccacagcagtgatggccgctgtgattgagtaactgatgatggcctcccctgctacaatgtgagctcctcgtggtggatctgtgtctgtcttgctcgctgttgtatcaat

SEQ ID NO: 248449 - DNA, 149 bp, Homo sapiens
  chr1:41976354-41976503
  hypo
ggctccaggactgcgctgcccggcgtccctggggcggccggggcaaggtgtcgggtggggtgcaggggctgtgcgtgggtgtgggctctgcaggtgccccggtcccatggggtgtccagtcaggaggcctgcccgggcctccgccggtc

SEQ ID NO: 248450 - DNA, 182 bp, Homo sapiens
  chr1:41979369-41979551
  hypo
gcctctgaaccctctcgtccttccgagtcctggaacaggtcgtcactggttcctgagggcaaacacagaagacccaaggtcacagttgggccttggccccactgcccacacggctgctcctctctgagccccagtttccttgcctgctgactgggcaaaatagccatcgcaagggcacaaga

SEQ ID NO: 248451 - DNA, 33 bp, Homo sapiens
  chr1:41991669-41991702
  hypo
gccctcacatactcacgccgcaccacctgcccc

SEQ ID NO: 248452 - DNA, 35 bp, Homo sapiens; identical to SEQ ID NO: 206930
  chr1:42120784-42120819
  hypo

SEQ ID NO: 248453 - DNA, 66 bp, Homo sapiens
  chr1:42142944-42143010
  hypo
taacacgcttcacacgtataatccggtctaatcctcatgacaagcctatgtcgtaagagagaaata

SEQ ID NO: 248454 - DNA, 178 bp, Homo sapiens
  chr1:42212494-42212672
  hypo
gccactatcactatctcagccgtgggccagccctcaggtaacggctgctgggtgcagggtataaatgccctggttccctcgcaggtgcacagagtagagaatgagcaagtcaggagggccagcatgtgacctggtgtaacagcatcacccccggctcgaggatccatgggtcagggag

SEQ ID NO: 248455 - DNA, 66 bp, Homo sapiens
  chr1:42630381-42630447
  hypo
atggcagcagtgcccgagagaggggtggctgttctggatgccagggggaagcggcgggacttttaa

SEQ ID NO: 248456 - DNA, 197 bp, Homo sapiens
  chr1:42633130-42633327
  hypo
tgtgtgtgtgctgacgtgtgtgtatacactgaggtgcgtgtgtgctgaagtgtgtgtatacactgaggtgtgcgtgagtgctgacgtgtgtgtatacactgaggtgtgtgtgagtgctgacgtgtgtgtgtgcactgacgtgtgtgtgtgctgacgtgtgtgtatacactgaggtgtgtgtgcgtgcctggacatgt

SEQ ID NO: 248457 - DNA, 35 bp, Homo sapiens; identical to SEQ ID NO: 206931
  chr1:42802314-42802349
  hypo

SEQ ID NO: 248458 - DNA, 35 bp, Homo sapiens
  chr1:42802589-42802624
  hypo
cctgcaattttaaatagagccgtcagcatgggcct

SEQ ID NO: 248459 - DNA, 189 bp, Homo sapiens; identical to SEQ ID NO: 206932
  chr1:43203989-43204178
  hypo

SEQ ID NO: 248460 - DNA, 183 bp, Homo sapiens
  chr1:43209438-43209621
  hypo
gcgtcttccacatccaaatcttcactgtgtttgaggagttgcctttcatcccctccaaccctcccatgggctctctcctttcttctcaagcagtcatcctctcattgctcgcgcgcccttgcatgtgcgttaccaaacgcagaccgaaatcacagtcgcatctcagccgggctgccatcaccc

SEQ ID NO: 248461 - DNA, 88 bp, Homo sapiens; identical to SEQ ID NO: 206933
  chr1:43296453-43296541
  hypo

SEQ ID NO: 248462 - DNA, 195 bp, Homo sapiens; identical to SEQ ID NO: 206934
  chr1:43310138-43310333
  hypo

SEQ ID NO: 248463 - DNA, 293 bp, Homo sapiens
  chr1:43353271-43353564
  hypo
ctgcatcatgaactccgagaagatgtggacggccacagcgcagcccagcgcagtccccagacacaggagccacatgagccccagcatggccgcctgccgcagcctcccgcacacgctcctggggctctgccgcagctgctgctcgggccagcagctccttctcccggtgcgaatgttgtctgttgtcttgctgagggcggggggcccgcttctgcctcaccttgcagtcccaggagcagaagatagtgacggcgtggatgccagaggtgctgcccacccggtattagcattag

SEQ ID NO: 248464 - DNA, 374 bp, Homo sapiens
  chr1:43400331-43400705
  hypo
ggatcccacaggcccaatcccgccggctcccagcagcctccgcaaccctgggtcatgtgtgaggtgagacctggcacgtgcctgttctgaacgctcccacctcacatgcccgtcccaagcttaggatttaaacacttgatgctgccaccaccccacatccatccatcaccaggtcctctcgattctgcctccgagtctgtcctacttctctacccaggcagcctgccctgggtctcatctggattctgctcccgactcttcctatccaccaaagtcagaccccatttcccacagtgaaccacccctcagaatgcagtcggagtcctgcacaccaaatgtgccaggctcggccatccacccgcttctctgctccc

SEQ ID NO: 248465 - DNA, 169 bp, Homo sapiens
  chr1:43412604-43412773
  hypo
tggtttcctcacctagaaaacggggatgaaagttccttccttaaagggttgctgttacgttttctatcagtatccatcatgaagcctggcagaattccctccacaagtgtttgctggatcggtgaagaatagcaagctaccctcgatcgggcagcctcagcaccatctg

SEQ ID NO: 248466 - DNA, 69 bp, Homo sapiens
  chr1:43446014-43446083
  hypo
tttcttcctcatacctgccccgctccgatgaggctccctccaggctccgcatcttgacttagttacaac

SEQ ID NO: 248467 - DNA, 31 bp, Homo sapiens; identical to SEQ ID NO: 97386
  chr1:43478271-43478302
  hypo

SEQ ID NO: 248468 - DNA, 89 bp, Homo sapiens; identical to SEQ ID NO: 206937
  chr1:43521465-43521554
  hypo

SEQ ID NO: 248469 - DNA, 145 bp, Homo sapiens
  chr1:43532590-43532735
  hypo
gaccccaggcccttctagaacgaagtctcagcgtgggagccaggagcagacagggtctcgacctcagagagcttccagcctgatggagagagccggaagagtcaggctggctctgtggctgcccgtggtcttggggcaggagggc

SEQ ID NO: 248470 - DNA, 83 bp, Homo sapiens; identical to SEQ ID NO: 206938
  chr1:43533472-43533555
  hypo

SEQ ID NO: 248471 - DNA, 404 bp, Homo sapiens; identical to SEQ ID NO: 206939
  chr1:43534661-43535065
  hypo

SEQ ID NO: 248472 - DNA, 35 bp, Homo sapiens
  chr1:43626939-43626974
  hypo
aggcgtgagtcaccgtgccctatcactttttgttt

SEQ ID NO: 248473 - DNA, 32 bp, Homo sapiens; identical to SEQ ID NO: 206940
  chr1:43702286-43702318
  hypo

SEQ ID NO: 248474 - DNA, 238 bp, Homo sapiens
  chr1:43738645-43738883
  hypo
cagctgatgagctcggctgtgcaggacatgaactgcatccgccaggcccaccatgtggccctgctgcgcagtggtggaggggccgacgccctcgtggtgctgctcagtggcctcgtgctgctggtcaccggcctgaccctggccgggctggccgccgcccctgcccctgctcggccgctggccgccatgctgtctgtgggcattgctctggctgccttgggctcgcttttgctgctgg

SEQ ID NO: 248475 - DNA, 251 bp, Homo sapiens
  chr1:43750607-43750858
  hypo
cagaaccagtcattgctaggcgggcagctccccgtgggcaacggctggctgaaggatctgtaccctggcgctgcagggagctgggcgttcagcccctcagtgtggtgcttgtgaaattaacgaggggagcgtgagagtgaatatacaggtgggagcgggagagacgtcctgggaaggagaggtcagctgctcattcattcctcagcctgctgtgggcctcatcctagtactaggtccgcaaaacatgagaa

SEQ ID NO: 248476 - DNA, 163 bp, Homo sapiens; identical to SEQ ID NO: 206942
  chr1:43754321-43754484
  hypo

SEQ ID NO: 248477 - DNA, 201 bp, Homo sapiens
  chr1:43782856-43783057
  hypo
tcatcctgtgaagggcgaggagaccatcctgcagttcagctcagggaccttgacacttacccggcggccaaaactgcagcccgagcccctgagctacccagtgctagagtgggaggacatcacctttgaggacctcatcggggaggggaacttcggccaggtcatccgggccatgatcaagaaggacgggctgaagatgaa

SEQ ID NO: 248478 - DNA, 151 bp, Homo sapiens; identical to SEQ ID NO: 206943
  chr1:43783572-43783723
  hypo

SEQ ID NO: 248479 - DNA, 105 bp, Homo sapiens
  chr1:43834716-43834821
  hypo
aatttctacctccagcggcccctggaacagtagcacacaacgatctaacaactgcttgtatgattggatggtgtaagtgcggacagaattagggaatttgggcta

SEQ ID NO: 248480 - DNA, 201 bp, Homo sapiens
  chr1:43842607-43842808
  hypo
tatggcaaagtggcaagagtcgtagagtatgccatgacaaaacaaagtctgaaggactggtggtcagtgtggcgggaagagaggcaagcatggcaccaaagagctccggttttgatctccagtgaattacacacagccacccacgaagaactgagcccgacctagcaagcacagacaagcgaggcaagaattcatcacaac

SEQ ID NO: 248481 - DNA, 891 bp, Homo sapiens
  chr1:43888923-43889814
  hypo
aggccctgtctgaccggccctgccttgtggtcctgcataagccactggacaaactgctcatcaggttggtacagaggtgtggaagggcgtggcttagcagggtatgagtggtacagaggtgtggagggcatggcttagcccggtgtgagtagtatagaggtgtggagtgcgtggcttagtggggtatgagtggtacaaaggtgtggaagggtgtggcttagcggggtgaggtgtggaagggcgtggcttagcagggtatgagtggtacggaggtgtggaagggcgtggcttagtggggtatgagtggtacagaggtgtggaagggcatggcttagcggggtatgagtggtacagaggtgtggagggcatggcttagcccggtgtgagtagtatagaggtgtggaagggtctggcctagtggggtatgagtggtacagagttgcagaagggcgtggcttagcggggtatgagtggtacagaggtgtggaagggcatggctcagcgaggaatgagtaggtcagaggtgtggaagggtgtgacttaggggggtatgagtgatacagaggtatggaagggcgtggcttagcgaggtatgagtaggtcagaggtgtggaagggtgtggcttagcggggtatgagtggtaaggagtgtggaagggtgtggcttagcagggtatcagtggtacagagatgtggaagggcatggtttagcagggtatgagtggtacagaggcatggaagggcgtggcttagccgggtatgagtggtacagaggtgtggaagggcgtggcttagccgggtatgagtggtacagaggtgtggaagggcgtggcttagccgggtatcagtggtacagaggtgtggaagggcgtggcttagccagctgtgagt

SEQ ID NO: 248482 - DNA, 332 bp, Homo sapiens
  chr1:43905359-43905691
  hypo
ccccagacccactgcgagaggaggaatttgagcaactgacccaggtcatccgctgcccggttgttgtggacagttcttcaggtgggacagcttggtcagaggatgaggtgttcagttattgctgtgggaggtaagggtggtgagtagagtgggatctagggacaccctcaagtgtccctgttctccttccagctcagaatggggccccacggcttcgattggatgtgtgggaaaaggggaacattagtattgtgcagctggaggagaaactccgaggagcagctcgccaggccctggccgatgccatcatcgagcttcagctgctgccagct

SEQ ID NO: 248483 - DNA, 34 bp, Homo sapiens
  chr1:43906214-43906248
  hypo
tccacccagcaaagcgggccggcgtagcttctgg

SEQ ID NO: 248484 - DNA, 88 bp, Homo sapiens; identical to SEQ ID NO: 206951
  chr1:43969026-43969114
  hypo

SEQ ID NO: 248485 - DNA, 189 bp, Homo sapiens; identical to SEQ ID NO: 206952
  chr1:43987296-43987485
  hypo

SEQ ID NO: 248486 - DNA, 35 bp, Homo sapiens; identical to SEQ ID NO: 206953
  chr1:43991183-43991218
  hypo

SEQ ID NO: 248487 - DNA, 212 bp, Homo sapiens; identical to SEQ ID NO: 206954
  chr1:44029987-44030199
  hypo

SEQ ID NO: 248488 - DNA, 45 bp, Homo sapiens
  chr1:44030403-44030448
  hypo
tgtgtgtgcgggtgcgtgcctgcgtttgcacggagacgccacgaa

SEQ ID NO: 248489 - DNA, 102 bp, Homo sapiens; identical to SEQ ID NO: 206955
  chr1:44044918-44045020
  hypo

SEQ ID NO: 248490 - DNA, 159 bp, Homo sapiens
  chr1:44047737-44047896
  hypo
tggccgcaaggcttcgtctcctcatcagacttggcttcggtgtctacctcacatctcccttctgtcccccaaattctcagggctcccagtgtcgctctctgaggccacgcgactgctacatttaatgggacagtacacgtgaagcaccaggcacattgc

SEQ ID NO: 248491 - DNA, 93 bp, Homo sapiens; identical to SEQ ID NO: 206956
  chr1:44063579-44063672
  hypo

SEQ ID NO: 248492 - DNA, 49 bp, Homo sapiens
  chr1:44068723-44068772
  hypo
gctgccaagagccacgcaaggtgctgggtgcgtgcgaggctgtgccctg

SEQ ID NO: 248493 - DNA, 148 bp, Homo sapiens; identical to SEQ ID NO: 206957
  chr1:44069555-44069703
  hypo

SEQ ID NO: 248494 - DNA, 128 bp, Homo sapiens
  chr1:44070960-44071088
  hypo
accgtggcagcagcgcagggggcctgcagcacctggtgtccatccgcacagcccccgacctcctgcctcacaagccgctgcctgcctctgcctacatagaggacggccgcttcgatctctccatgccc

SEQ ID NO: 248495 - DNA, 238 bp, Homo sapiens
  chr1:44072459-44072697
  hypo
cctgctgttctccaccgggccacagaagcgctatgcctccagcccctactcggatgagatcgtggtccaggtgacaccagcccagcagcaggaggagccggagatgctgtgggtgacgggtcccgtgctggcagtcatcctcatcatcctcattgtcatcgccatcctcttgttcaaaaggtgagcactgccctcagagctccgggaacggccacctgcccctcgcctttcaggccct

SEQ ID NO: 248496 - DNA, 347 bp, Homo sapiens
  chr1:44084831-44085178
  hypo
ctgcaaccccctagacgcagggcccatggtggtgcactgcaggtgagagggtacagtgccacccagaggggtgggtggggtgggaggtgggggcgcctgtgcctcaagctgagcccgtgtcctgcagcgcgggcgtgggccgcaccggctgcttcatcgtgattgatgccatgttggagcggatgaagcacgagaagacggtggacatctatggccacgtgacctgcatgcgatcacagaggaactacatggtgcagacggaggaccagtacgtgttcatccatgaggcgctgctggaggctgccacgtgcggccacacagaggtgcctgcccgcaacctgtatgcc

SEQ ID NO: 248497 - DNA, 80 bp, Homo sapiens
  chr1:44110063-44110143
  hypo
tgctgggattacaggcgtgagccacgtcacctggcctaggtgtagttaactttttaagcgaataatattgccattatgat

SEQ ID NO: 248498 - DNA, 189 bp, Homo sapiens; identical to SEQ ID NO: 206959
  chr1:44132657-44132846
  hypo

SEQ ID NO: 248499 - DNA, 221 bp, Homo sapiens
  chr1:44137396-44137617
  hypo
gagcctctctcctgccgagcccaagggcaaacgggagttctcactgtgcacagttatgccaaaggggatggcagggtcactgtgggagagccatgcacgaggaagaaaggaagcgccgctagaagtttcagtgagcgggagctggcagaggtatgggctccaggcagtggtgtggggtggggagctgccctggaggacaccctgtcgggaggggatctgtg

SEQ ID NO: 248500 - DNA, 73 bp, Homo sapiens
  chr1:44138998-44139071
  hypo
tcactatggaaaatttctgacgtacgtacaaaataccatcacgagcccccgcgtgtactcatcatatatatga

SEQ ID NO: 248501 - DNA, 257 bp, Homo sapiens; identical to SEQ ID NO: 206960
  chr1:44170222-44170479
  hypo

SEQ ID NO: 248502 - DNA, 42 bp, Homo sapiens
  chr1:44303658-44303700
  hypo
aacaccttatcccagccactcgggaggctgaggcaggagaat

SEQ ID NO: 248503 - DNA, 162 bp, Homo sapiens
  chr1:44303820-44303982
  hypo
tccttatgaattaataacccactcagtgctcagtgcctggcaagctgtaactttccttctcttcccataggcctgctgaattagccaccaagtacgcaaacttttcagagggagcttgcaagcctggctatgcttcagccttgatgacggccatcttccccc

SEQ ID NO: 248504 - DNA, 201 bp, Homo sapiens
  chr1:44309570-44309771
  hypo
gactatacctcacttcagatgctaatcacaagtagtaggttgttacctatacatctcgccaaccagctataagttgtgaattccaagaccatcccctcttgggtttgatctgtttgctagagcagctcacagaattcagggaaacttatgtttatccatttattataaaggatatcataaaggatacggatgaacagccag

SEQ ID NO: 248505 - DNA, 216 bp, Homo sapiens
  chr1:44351017-44351233
  hypo
ttccagtgcaacttccgtctcctccttccccgggtccttctcacgcactcacacacaccctgctgaaacctgatcctgaggctgcctcgcgtgccggggtgctggcggggctggcgggctggggcctgtcttttggagcctgccccaccctcccctgctaccccctaggccagggcaagcaggtcaggcgtcccacacccccgctagtctgaccag

SEQ ID NO: 248506 - DNA, 133 bp, Homo sapiens
  chr1:44380112-44380245
  hypo
ggcgggaactgcagcgatgatacaaatggtgtggtggaaagaatgccgttttggagtcaggacacctgggtttgaatccacttgcagccacttgcaggctgcttgaccttgaacgtatcgtgtcgtatcgttt

SEQ ID NO: 248507 - DNA, 81 bp, Homo sapiens
  chr1:44446769-44446850
  hypo
accctgctcaggccagcagccggatgcccgggcccactgggcgggccagtggccgcctgcgggatgagcagactgctgggg

SEQ ID NO: 248508 - DNA, 126 bp, Homo sapiens
  chr1:44447464-44447590
  hypo
accccagcccagacggtggcggtcatcatcccctttagacaccgggaacaccacctgcgctactggctccactatctacaccccatcttgaggcggcagcggctgcgctacggcgtctatgtcatc

SEQ ID NO: 248509 - DNA, 692 bp, Homo sapiens
  chr1:44463203-44463895
  hypo
ctggcagctgtgctcatatccgggagtcctggaggcggctggagccattactgcccacaatggggatctgcgccttgtccgggtgcagtggctggacctcgaagccgtcctcaggagagggggctatggtgggggcgtagcgccctgtccggtgctccaggagggcagggccccagtctctgcttggctttgtggcatttttcaaacgctgcatgaggtaggcatggggcacaggggcagggcacgtcaggagggagcccttaagccccttccagctggcccctcccattttgcctggctacccagcctgtccctgccctcacctggaggagggtgtccccgtctgtgcggcagagccggaacatggcgtagagggggatgcagaggacggaggacagagccatgaggaagccaatggccacggcccagcctgggtactggtagtggttgtaggtgatcggctggtactggatcacagtgaaaactagaataaactgcacggggcaggtgtgggagtgggcgtgaggccgacccagagcccagaccccaggccatccctctaccagcaccctttcctctctggtttcccaaactagaaaagggcatttggggcagaacagggacagctgtcaacatctgggccgtggaagaagcaggcagggccgggggccggagcgcggtgagtgggaagg

SEQ ID NO: 248510 - DNA, 226 bp, Homo sapiens
  chr1:44483085-44483311
  hypo
ggggcagagcaggcgagagggtggctcactccccccacggagctgaccagacgctgtctgagcccacaggcctagcactgggtgggctcctgctagggtagttgggtgtctgatgagtgacggggtctgccccattgggccctggatggtgaccggcaggaggatggaaggcacagtccacagggcaccaccagagcagctcaggctccacggaggggtgcgggct

SEQ ID NO: 248511 - DNA, 137 bp, Homo sapiens
  chr1:44490960-44491097
  hypo
caaggtggggctggcgagctggggggcagcagccacgtggaaggaacagtctcatggcaatgctggtgcacactggattaatgtcagatgggacggaagaaaggttagtttttgacaggcctcgggagaaatccatc

SEQ ID NO: 248512 - DNA, 130 bp, Homo sapiens
  chr1:44584403-44584533
  hypo
gctgcgagggcggcgcagggcgggacgggtggggcctgaccccgccccttggcgcagctgtaaataggtaaatagaaggtgattgtggcgtggcgatgtaccgatacccgcctgcgacgccgtggtggct

SEQ ID NO: 248513 - DNA, 395 bp, Homo sapiens
  chr1:44717918-44718313
  hypo
gtgccaggcaggcacgcacacacgcttcccttcccctgggctgctgcaatttccatgcacagggaagcaggtgccgagctgctcccggctggctctcccctctcgtggctctgcccgccttggctgctgccccattagcttagtggccagccatctgcgacgggcctgccgcatagccctgctgtaggtgcggcgggtggccccctgtgtaacagggagctttgccattagcgcctttaatattctgacacctcagcgcagcctgctattacatgcaaacactgatcgccctgtgaaattacattgctgggcccgcgaaatggaatcgtgtataatcagcctcctccatgcactgtcagtcccatcacaaacacggcgcccggcggcttatgggg

SEQ ID NO: 248514 - DNA, 566 bp, Homo sapiens
  chr1:44726773-44727339
  hypo
agtcctttgagaactcgacaggcctcgacttgaaaagggtgctaaaagcaatgatgtctccaagtgtgatgggagatatttgtgtctgctttacccttggctttttgctccggttcaggtaggagcggggtgggccggctggcagatctgagagcgtggcacgccccagcgggcagggcgcacagcgcggaggaaggcgcgagtcagtctggagtgctccccatttatcaagctcacgcaggccgccagccgagcgagtctttctatcattacacctctcaaaatccgattcataccactaatcctgccttcattctcccagattaataacatctctttcaaccttcacagtgtgataaatagacaaagagagaacaaaaggagagacagaagagagagaaagagctggagcaagtccccataatagagagagctgagaaagaggagagggaaaaaaggagagcgaacgagagcaggcagcggccagagactgcagctaccttagagagccgctctgaggagagctggcggctgcgccccgctatgcgctccgctccgtccccaaa

SEQ ID NO: 248515 - DNA, 136 bp, Homo sapiens
  chr1:44755341-44755477
  hypo
ctgagccatactggctgggccgagacagccctgatggcaaacaggtgtggctagcccggcgccagccaaggcaggggatagctcattaggggaacacccccctcgctaatgggtatggccacggtgaagcccttgt

SEQ ID NO: 248516 - DNA, 242 bp, Homo sapiens
  chr1:44792160-44792402
  hypo
tgctcctaaataatttatggcgggttaaatttattgccaagccctggctggctgcaaattcgaattgccaaataattagattttagggcaaagcttataaattacccgtcgatttgtccggacttgtttgtcagttgctttgtgcttcgggtcatctttggcatttggctgtttgggttttaattgctgatttacactttgacagatgagagctgatgctcgaagtttcaggacaaggaagg

SEQ ID NO: 248517 - DNA, 380 bp, Homo sapiens
  chr1:44971160-44971540
  hypo
ccctgcggctggcccgcagcagggaagccctcttgcctagctctgcatggactgctcgcttgcctgagtttgcattatttatttaatgtcttgtaccgtaaataatggtaactttatggttattaggaacgggttaaggtacatgcgggtagcaccaggctgccttcaaaaggaacagtcctggcataaaatgttgcgataattgcttcactgctgagtgttggtctttattttgtgtctgatttgtcccttaagccagcgtaacattctccccacggcaggagaatgcagagagcaaattgaagggctgagcatgaacaatgcgacatggcgcactgctgggtttttcttttttcctctttcttcgtttctcccttgac

SEQ ID NO: 248518 - DNA, 143 bp, Homo sapiens
  chr1:45068757-45068900
  hypo
ggacaaataaggtttcccaacgcaattgaaaatgattacaggcagctacagatggggccaatctgatgcgcagcagcaaatcaaatcgaatttccttatcggcgtattattttaggcgttatctggcacgttgatgcagttat

SEQ ID NO: 248519 - DNA, 355 bp, Homo sapiens; identical to SEQ ID NO: 206967
  chr1:45087574-45087929
  hypo

SEQ ID NO: 248520 - DNA, 194 bp, Homo sapiens
  chr1:45090554-45090748
  hypo
tcatgatttaatgccgggattttttttcaaaacacattttactgctttttggtccatgtttaaaaagcaccagtgacctttttttattccgcttgccccaggtgtaatgccgaggcctctcagggcttctaacctagagagaatgagagagagagagagagagagagagagagagaaagcgcacaaacaggagc

SEQ ID NO: 248521 - DNA, 99 bp, Homo sapiens; identical to SEQ ID NO: 206968
  chr1:45101746-45101845
  hypo

SEQ ID NO: 248522 - DNA, 569 bp, Homo sapiens; identical to SEQ ID NO: 206969
  chr1:45106053-45106622
  hypo

SEQ ID NO: 248523 - DNA, 255 bp, Homo sapiens; identical to SEQ ID NO: 206970
  chr1:45111998-45112253
  hypo

SEQ ID NO: 248524 - DNA, 346 bp, Homo sapiens
  chr1:45120345-45120691
  hypo
acccggcgtgccaggcgtgcctccaccatgcgttctatgtctctggccaggactacttcgtcagccctcgagtagaggtagagctcgggccagcgagagcccgcgtcctgtagcctgtcatagaagtgggtgtggaagagggctgtgatgggagcaagcaggacgtggaacaggacgaccaccagggcaaaggccaccagcagcaacaggcgcagcatggcggcccggcgctccaggatggctgccagggcccgcagagcccctaccaggttgctgtcaccaggagcgctgtcaaagatggtgcccaccacacgcaggcggcagaagcgacgggtctgcaggagct

SEQ ID NO: 248525 - DNA, 81 bp, Homo sapiens
  chr1:45156593-45156674
  hypo
ggagtacaggcataagacaccgcgcccagtgaagcttcttgaaaaggttgttgaggggcggggcgcggtgactcacgcctg

SEQ ID NO: 248526 - DNA, 348 bp, Homo sapiens
  chr1:45190029-45190377
  hypo
tttttgcagcaggccgcggccgccaaggccatcgggtaagcgggcaggggttagtgggtagctgcagcaagcctggcttggcgctgccggcgggccccgggagcgctccgtgcgccgggtgggcgggggtgtgcgccgggtgagccccagggcgtcgccccagcccgaacccccggcccagggtcctggcgcgcaacgacatgagcatcgccgaggagctgctgtacctgcgcgtggtgcgtggcctaatggccgccatgggcaacacggaccacagcaacagccagcggctggccagcctcacgctggaggtgcgcgcggcggctggttagggggcgggaagggcgg

SEQ ID NO: 248527 - DNA, 134 bp, Homo sapiens
  chr1:45190407-45190541
  hypo
cacgccgcctcgcccgcgcggcgcagtgcttcgtgcagatgttccccttggtggcggagcacgtgcgcaagtgcatgggggaggaactctaccagctcttcctggtaagtgcgcccttcctgccccgccgcaat

SEQ ID NO: 248528 - DNA, 43 bp, Homo sapiens
  chr1:45190571-45190614
  hypo
cccttcagacagtccccatcctggagcgcgccacatgcagagt

SEQ ID NO: 248529 - DNA, 132 bp, Homo sapiens
  chr1:45190897-45191029
  hypo
gggacgagggaagccgggcgcaggcgccgccagcacagcctcacgcccgcctttcctgcctgcagccctgtgcctccatggcagctcctacagcatgaacactctctatggctcgcgcgattcggctcagat

SEQ ID NO: 248530 - DNA, 378 bp, Homo sapiens
  chr1:45253065-45253443
  hypo
gaggtctgctgagcggttgcagtaccgggccacctgagcatacacgtacctctgctcctgggtcagcagcagcctggggaaggcaggtgtaggcttgggttagagggaggtgggtggcccagtctccccacttgcgccagctctaagaccctgcccttaccggtaggtgatgctaagcacagcgtacaaggccccaaagaggaggaattccttgtagaggagcttgtagatgcttcccctccagcggagaagcaggccagagaaacctccgaagcgggcctccgccactttgagagtgtatgaaaccgtcatggtgctgggagcctggggcaggaggtcacaagagttgcccccagggctgtcgtttagttctccaga

SEQ ID NO: 248531 - DNA, 32 bp, Homo sapiens
  chr1:45264888-45264920
  hypo
agctgcccaagtgcccgtgtctagcatttgag

SEQ ID NO: 248532 - DNA, 215 bp, Homo sapiens; identical to SEQ ID NO: 206972
  chr1:45268611-45268826
  hypo

SEQ ID NO: 248533 - DNA, 136 bp, Homo sapiens
  chr1:45280523-45280659
  hypo
cctcagctccttctttcattccagacctgcccccctggagatcgctccctgaatgcccctcagacaccacaggctcggcgagaaattgatctccccagcttttccccagctctgcccccatcgtgtttctcatttc

SEQ ID NO: 248534 - DNA, 153 bp, Homo sapiens
  chr1:45293094-45293247
  hypo
agtgcagccaggtgcggggtgcctgggtggccggtgggggcagcaccgccttgagggaactgaagcgctggtgcagatcaaagagggcgcgttgggagtgggcgtagtcaaagccaccctgggtcaccagggccacctcgtacagggagaagt

SEQ ID NO: 248535 - DNA, 87 bp, Homo sapiens
  chr1:45308228-45308315
  hypo
gtgagtcaccgcgcccggccggcataggcccattttctgagagcaggatacatatgtacacacacctgtcgtcgggtggacacagag

SEQ ID NO: 248536 - DNA, 120 bp, Homo sapiens
  chr1:45409393-45409513
  hypo
cccagagctgttattattagcactttaccaacgaagaaacagatttatagtagttatgtaactaagatttaacaattagtaatggctatttgtataactaaagaatctgtattactgaat

SEQ ID NO: 248537 - DNA, 83 bp, Homo sapiens; identical to SEQ ID NO: 206973
  chr1:45454356-45454439
  hypo

SEQ ID NO: 248538 - DNA, 206 bp, Homo sapiens
  chr1:45457724-45457930
  hypo
ctgctgaagggcatcgtgagcaaagtaggttttccgcttattgtaatactttaataaatagggatccagaacaagcctggtcactctcactttagcagtcttttgcatttttgtcccaatcaccttccccacgatccacttggcatgggtggatgaatgaactacggacattatgtggctttggtcacctccgccacgactgtgca

SEQ ID NO: 248539 - DNA, 105 bp, Homo sapiens
  chr1:45529304-45529409
  hypo
accaaaaaacccaaccgttctcattgttaatattacttcagctccagagtcagggccgcaatgagaaacagaaaccataggaaggcgcagtggctcacacctgta

SEQ ID NO: 248540 - DNA, 38 bp, Homo sapiens
  chr1:45656870-45656908
  hypo
ctgggattacaggcgtgagccaccgcgcccggccgaaa

SEQ ID NO: 248541 - DNA, 167 bp, Homo sapiens
  chr1:45759290-45759457
  hypo
aatcccagcaagagacggtggtaatccaagcaagagacgctggtaacgcggattaggacaacagcagtagagacagaagtgaaaatggaaagaagtggatgctttcaagagccatgtaagagagaaaattggcagcacttggtgactggacacggctacagggtgag

SEQ ID NO: 248542 - DNA, 32 bp, Homo sapiens
  chr1:45801240-45801272
  hypo
accccaggccaggcacggtggctcatgcctgt

SEQ ID NO: 248543 - DNA, 120 bp, Homo sapiens; identical to SEQ ID NO: 206974
  chr1:45950719-45950839
  hypo

SEQ ID NO: 248544 - DNA, 227 bp, Homo sapiens
  chr1:46089387-46089614
  hypo
atggccatggaggcccttaccgcggcccgctggggttcagtggcaactgatgcctgtgctccaaatgtcatctcttgggtcgggtggccaatgcagaagcgctgagtatgggtggctaacagagctgaggagcggaaaaccatgtcacaggtcccacagggcaggagcgcaggctccccagagtgggagtccatgggatgggacccgtttcctgaaaccagccaaga

SEQ ID NO: 248545 - DNA, 107 bp, Homo sapiens
  chr1:46111787-46111894
  hypo
ctagtaagaaccggcgtttccctctcttttcggcattggtgatactcttgagagcaacaggtaggatgttcacacacaccattgtggcagcgcgaaacaatgccgga

SEQ ID NO: 248546 - DNA, 79 bp, Homo sapiens; identical to SEQ ID NO: 206975
  chr1:46131435-46131514
  hypo

SEQ ID NO: 248547 - DNA, 35 bp, Homo sapiens
  chr1:46338430-46338465
  hypo
gcgtgagccaccacgcctggccatgaatagcacca

SEQ ID NO: 248548 - DNA, 90 bp, Homo sapiens
  chr1:46476446-46476536
  hypo
aacactccagacagcgtgctgcccttggcagatggagccctgagctttattcatcatcaggtgattgagatggcccgagactgcctggat

SEQ ID NO: 248549 - DNA, 295 bp, Homo sapiens
  chr1:46500308-46500603
  hypo
cacccaagctccaacgccagtaccgctctccacggcgcaagtcagcaggcagcatcccactgtcaccactggcccacaccccttctcccccacccccaacagcttcacctcagcggtccccatcgcccctgtctggccatgtagcccaggcctttcccacaaagcttcacttgtcacctcccctgggcaggcaactctcacggcccaagagtgcggagccaccccgttcaccactactcaagagggtgcagtcggctgagaaactggcagcagcacttgccgcctctgagaagaa

SEQ ID NO: 248550 - DNA, 34 bp, Homo sapiens
  chr1:46618505-46618539
  hypo
ttacaggcatgagccaccgcgcccagcctgatta

SEQ ID NO: 248551 - DNA, 190 bp, Homo sapiens
  chr1:46653315-46653505
  hypo
acacttctcctctgccgtgtgcctgtgtggaggctgcatgggatttgtttgcccagggcgggcctctacctcatcatgggctaattgctgctcaacctggctgttgtgccacctcaggcactatatccagctccaacaaacactgaaggcgtcagggtggcgagatatgtccaagcgacataccacccat

SEQ ID NO: 248552 - DNA, 122 bp, Homo sapiens
  chr1:46744595-46744717
  hypo
catggcaggtagcccggagccgccggatggcttccctggctgtgactgcatcctggtccagccagttttggaagaggcgcaggtgaccaaaggctccacggccccagcgctccagccgcttg

SEQ ID NO: 248553 - DNA, 89 bp, Homo sapiens; identical to SEQ ID NO: 206976
  chr1:46751246-46751335
  hypo

SEQ ID NO: 248554 - DNA, 97 bp, Homo sapiens
  chr1:46751628-46751725
  hypo
ggctgcagcacatcgctcagcagcatcccggcggggccgacgtgagcccaataagagggacccttcatctcgggatggggcccggcctcgggaggcc

SEQ ID NO: 248555 - DNA, 59 bp, Homo sapiens; identical to SEQ ID NO: 206977
  chr1:46752071-46752130
  hypo

SEQ ID NO: 248556 - DNA, 54 bp, Homo sapiens
  chr1:46805244-46805298
  hypo
taagaaaaagctttcggctgggggcagcgtgagccaccgcgcccggccaagttt

SEQ ID NO: 248557 - DNA, 286 bp, Homo sapiens
  chr1:46807507-46807793
  hypo
cctccagaatgcggcgtccctgtcttcaaggcacgtactgtgaccagcacactaatctctgttactctagcggatggccttcagcttttggaaccagcccggcaacctcctttccccttgctcatcagtccccgggaacgagcccagtgacctcccctcagctcactcatgtacccttggaaactggacccatgatttcgcctcctcctacacataggaccccgggaacttgcctcacgatttcacctcctcttgctcgccggccggtggaaactagtcctatggc

SEQ ID NO: 248558 - DNA, 151 bp, Homo sapiens
  chr1:46921732-46921883
  hypo
gcagccaggcccccgagtgtgcgccgtgtaaagtgacacatattcatcaccagctcgtggcgccggcgccgacgctgatacaatattagtgttgccccccctttcggagcccgctccgcccggctccccgatggcacgaatccatcacctg

SEQ ID NO: 248559 - DNA, 243 bp, Homo sapiens; identical to SEQ ID NO: 206978
  chr1:46963445-46963688
  hypo

SEQ ID NO: 248560 - DNA, 85 bp, Homo sapiens
  chr1:47033312-47033397
  hypo
ccttatttatgagccgcggcttcatccagaccacaatatatatgctcttgaatacacacatgtatatacacgcagagctgtgaac

SEQ ID NO: 248561 - DNA, 381 bp, Homo sapiens
  chr1:47035269-47035650
  hypo
agtcctccgattcccgactagaaggcaaaagcctggcccaggccacgggaggcacttcactaaagaagaaaaacctgagctccagcaagctcagtaacttcatcagtcacctaattgaacgagaacccagagcaactcagtccaggctgcacaaattgagtagcactgctctgcagctcgctgcactaaaagtggaagatattttccattacagcaagtgctcccacagaaggatcacgagccacacacggagccttactctccaaataggcgcccatggcccagtcgtcccttagcctaagaactcagagagccaggctgtaataatggggctgccgtgtgagcacagcagccatcgagctgctccggttcatttcccag

SEQ ID NO: 248562 - DNA, 318 bp, Homo sapiens
  chr1:47041013-47041331
  hypo
actggaagcaattgcggctaataacactgaatactaggtgtgtgtcctggaggcaagcagcaaataattacttgccctccctcttgcccataaatcacggggcagtatttacattgcctggagaaaatggaaacatctgtcaaatggacttggggcctaacatgggcaccgctagaccctaactgctaagcgctgcttaatgaaacggccgcgttcctggccactgtagcacttgtggccttccccggtgagcactctctgtctgcccgagtatttcagtgctctgccaacaaggtcgtcttgtaactcagtagggaa

SEQ ID NO: 248563 - DNA, 77 bp, Homo sapiens
  chr1:47078538-47078615
  hypo
gctcccagtggctccctccccgccaggtgacactcaccaacacgcgtgggaaagacctcttcgtcgttgatgaggcc

SEQ ID NO: 248564 - DNA, 112 bp, Homo sapiens
  chr1:47684469-47684581
  hypo
agaatgcacagatggggctgcgcatctactcagcaccagcgtacgcccatcagcacactggcattcactcgccagcatgaacagtgatgtcgaggagttgaagcccacatgc

SEQ ID NO: 248565 - DNA, 439 bp, Homo sapiens
  chr1:47685397-47685836
  hypo
agggccggctccatcggcggcaggcagcatggcaggatggaggctgcgggccgtgtgtttgggcgcgggctcctccgtgtagctgtccgggctggctgccccatccagggagctgccgcagctggagttgggggaaagcacgtcttgcaggaggtcatctgggggcgcgccgccccctcccccacctccacccccaccagcccccaccacagggtccttgccagtcttggcccgctgggtgccctcctcctcctggtcattgagcagcttggccaagaagttgatatacttcatggccaggcggaggatctcattcttgctgagcttcttgtccgggggatgtgtggggatcagcttgcggagctcggcaaaggccccgttcacattctgctgccgccatcgctcccggctgttggtgaagatacgccgcacaactttg

SEQ ID NO: 248566 - DNA, 66 bp, Homo sapiens
  chr1:47974505-47974571
  hypo
gctgagagctgtctgggccctgctcacccatttttttttttttttttggcatttctgcatctagaa

SEQ ID NO: 248567 - DNA, 102 bp, Homo sapiens
  chr1:48187539-48187641
  hypo
tatttgaaatgttcccggcttcctcccacccagggaagttcaaatgcacagattccactgctaggaatgcccctcctgactccaggccggccctagtcaatt

SEQ ID NO: 248568 - DNA, 103 bp, Homo sapiens
  chr1:48246983-48247086
  hypo
caggaaaaaaagccctgcctcgggctgtacaggagcagcagcaaatatttactgactgctgcgcggctgctccaagaggagcgtttctgggactgagtagagg

SEQ ID NO: 248569 - DNA, 188 bp, Homo sapiens
  chr1:48257294-48257482
  hypo
aggtgaggagtggagcgggtatgtcttcaggtctcactccaccaagagagtgcttagtcccagctctgcacgtaagtcagcctgtcaccagatgtgggactcagaaattacatgatcataagaatgtaacgaggccggagtggacttccctcaccacagctttcatgcggatgcgttccatgtcaata

SEQ ID NO: 248570 - DNA, 142 bp, Homo sapiens; identical to SEQ ID NO: 206987
  chr1:48270033-48270175
  hypo

SEQ ID NO: 248571 - DNA, 469 bp, Homo sapiens; identical to SEQ ID NO: 206988
  chr1:48459792-48460261
  hypo

SEQ ID NO: 248572 - DNA, 48 bp, Homo sapiens; identical to SEQ ID NO: 206990
  chr1:50919071-50919119
  hypo

SEQ ID NO: 248573 - DNA, 36 bp, Homo sapiens
  chr1:51099440-51099476
  hypo
aaagcgtctaataacgatattcgttgcctgtcaaac

SEQ ID NO: 248574 - DNA, 355 bp, Homo sapiens
  chr1:51165682-51166037
  hypo
tggtgcttaaatagcgcactttaaaacaaaaaaaactccaattggcttttcatacatccaccctccccaaaaataacgcacttgaaaaactcaaatgatatgaaaggcttcaaggcctcttttctccctttcatacccccctttttttttttatttctgtttgcagtaatctgcctttctctttctcattgctacagagcaagcgaggaggctcagagctttgaaaagggggctgtgtgtaatgggtccactagaattaatttacttgcaccaaatccattgagcacagaggttcttttcccccctctctctctctcttctcaaatcatttggagtcgaacgcagcccccggcct

SEQ ID NO: 248575 - DNA, 35 bp, Homo sapiens; identical to SEQ ID NO: 206991
  chr1:51424030-51424065
  hypo

SEQ ID NO: 248576 - DNA, 309 bp, Homo sapiens; identical to SEQ ID NO: 206992
  chr1:51439564-51439873
  hypo

SEQ ID NO: 248577 - DNA, 251 bp, Homo sapiens
  chr1:51761677-51761928
  hypo
cctggctggtctgtccatagcggcctacacggtgggagtggcctacacagtgggagcacgatgtgggacccaccgaaataattccacttcgtcgtccccgaacggcttgtggtcctccttcccaaacatgctgaggtaggcggccttcatgtaaatgtaggtggcctgtgcgagacagagcaacagccaggtgtgagcagccctcctccagccccagccgggctggaatctgcagacggacctcacgtggc

SEQ ID NO: 248578 - DNA, 393 bp, Homo sapiens
  chr1:51763206-51763599
  hypo
cctcccgggtcacccttgtcctctccctttcccctgcccctgacgtggagacaccaagtcccggtgactttacctcccgtctcactctaggatcctgctggccttgccctacggctctcattatcggactgccaccatctccacaccgtctccctgttccaggctacccgggatgtctttctgctgtcctggtacacattgtctcctatctccctgctcccactcctgtcccctgcaagccatttcgcacactgacctttttaagtcagatcatgtcagttccttctggaaatctggttatattccatcacactcaggagacatctcctacaatttccttgacacctgcagcactccagccacacgacggcctcagggcggttcccaggacac

SEQ ID NO: 248579 - DNA, 83 bp, Homo sapiens
  chr1:51848399-51848482
  hypo
tttaaaattaacaaaacaaaacacctcccaacaaagaaaagctcacgattacatgacttcacgggtgaattctaccaaacatt

SEQ ID NO: 248580 - DNA, 47 bp, Homo sapiens
  chr1:52049261-52049308
  hypo
ccagctggatcaggcctattcggttcgggcatcagtccagggtgatt

SEQ ID NO: 248581 - DNA, 44 bp, Homo sapiens; identical to SEQ ID NO: 206995
  chr1:52060513-52060557
  hypo

SEQ ID NO: 248582 - DNA, 203 bp, Homo sapiens; identical to SEQ ID NO: 197532
  chr1:52081941-52082144
  hypo

SEQ ID NO: 248583 - DNA, 38 bp, Homo sapiens; identical to SEQ ID NO: 206997
  chr1:52089596-52089634
  hypo

SEQ ID NO: 248584 - DNA, 42 bp, Homo sapiens
  chr1:52284963-52285005
  hypo
tgtctccaaaaaaaaaaaaaagaaatccgatacaaatgactt

SEQ ID NO: 248585 - DNA, 45 bp, Homo sapiens
  chr1:52310965-52311010
  hypo
tgaaatgtctccttttggcccggccgcagtggctcacacccgtaa

SEQ ID NO: 248586 - DNA, 38 bp, Homo sapiens
  chr1:52337810-52337848
  hypo
gggattacaggcgtgagccacggcgcccagtcagaaaa

SEQ ID NO: 248587 - DNA, 38 bp, Homo sapiens
  chr1:52455125-52455163
  hypo
gactcctgagtggccgagacaccgctagtgcgtggaca

SEQ ID NO: 248588 - DNA, 98 bp, Homo sapiens
  chr1:52505300-52505398
  hypo
ctgagaaactacgttatactgcgatacgcaatacactggagagacgtactgctcactgaagatgattaatgttgcacggcattttaagtggatactca

SEQ ID NO: 248589 - DNA, 32 bp, Homo sapiens
  chr1:52524548-52524580
  hypo
ggcgtgagccaccgtgccgggcctgaatttgg

SEQ ID NO: 248590 - DNA, 43 bp, Homo sapiens
  chr1:52549396-52549439
  hypo
tattcagaaacatggctgggcgtggtggctcatgcctgtattc

SEQ ID NO: 248591 - DNA, 300 bp, Homo sapiens
  chr1:52659366-52659666
  hypo
aaaactctgtctcaaaaaaaaaaaaaaaaaaaaaaaaagatacacactaatgactcagtaattgtgcatcttaatgtcttaatgtttatcttcaaacacacacgcacgcgcgcacacacacacatgtgtccaaggaggcatatacaagggtgttaatgggagcattcttggtaatcgttgaaaaataggggaaaatgtaaatgcttattcgtgctttatataactgataaataacaggaaaattatgatatggttatattttagaattctatgtgtacaattaaagtagttgtaatccca

SEQ ID NO: 248592 - DNA, 94 bp, Homo sapiens
  chr1:52832632-52832726
  hypo
tttctaaggaaagcacgtttctccctgcggcttgcagagtccagttaacaagagattgagctcaggagtccgagaccagcctgggcaacatggc

SEQ ID NO: 248593 - DNA, 77 bp, Homo sapiens
  chr1:52879566-52879643
  hypo
cacctgatcaccgccggagaagctaccgagacttggacaagccccgtcgctctcccacactgcgctacaggaggagt

SEQ ID NO: 248594 - DNA, 104 bp, Homo sapiens; identical to SEQ ID NO: 206999
  chr1:53053490-53053594
  hypo

SEQ ID NO: 248595 - DNA, 79 bp, Homo sapiens; identical to SEQ ID NO: 207000
  chr1:53129044-53129123
  hypo

SEQ ID NO: 248596 - DNA, 168 bp, Homo sapiens; identical to SEQ ID NO: 207001
  chr1:53238154-53238322
  hypo

SEQ ID NO: 248597 - DNA, 86 bp, Homo sapiens
  chr1:53479848-53479934
  hypo
ttacaggcgtgagccaccgcgcccggccctgatagaacattcttaacccagctctccttcaatagctggtccgatagaaaggcaaa

SEQ ID NO: 248598 - DNA, 92 bp, Homo sapiens
  chr1:53535642-53535734
  hypo
gccccgaagagaacgaatttgcggaggaggagccggtgctggtactgagccctgaggagcccgggcctggcccagccgcggtcagctgcccc

SEQ ID NO: 248599 - DNA, 263 bp, Homo sapiens
  chr1:53544125-53544388
  hypo
acttggagaagaacgccatccggagcgtggacgcgaatgtgctgacccccatccgcagcctggagtacctgctgctgcacagcaaccagctgcgggagcagggcatccacccactggccttccagggcctcaagcggttgcacacggtgcacctgtacaacaacgcgctggagcgcgtgcccagtggcctgcctcgccgcgtgcgcaccctcatgatcctgcacaaccagatcacaggcattggccgcgaagactttgccacc

SEQ ID NO: 248600 - DNA, 240 bp, Homo sapiens
  chr1:53561177-53561417
  hypo
cacacactctgcctcgttacactcacaccgcctcggtacactcaactcgccttggtacactcaccctgcctcgatacactcacacaccccgcctcgttacacacacactgccttggtacacttaaacccgcctcagtacactcacacaacctgcctaggtacactcacacaccccagctcaatacactcacacaccctgcctcggtacacacacacaacttgcctcggtacactcaactg

SEQ ID NO: 248601 - DNA, 91 bp, Homo sapiens
  chr1:53583644-53583735
  hypo
gagaggtgagcagccgcgggaactgctggtgacagctggcagcacaggccagcctcccccggagtgccagggccaccgcaggtgagggcgg

SEQ ID NO: 248602 - DNA, 212 bp, Homo sapiens
  chr1:53600839-53601051
  hypo
aataaaatctctctcgtgtagcagatggcaggtgaccagaggacagagccgagtactgttcatgcattcattcaacccgcatcgtgccacgcatcacagtgggtaccccaacatgaactaggcagggttcctgtcctgagaagttcccagcctagctggtgaggagacccactcctaagcagaccatggccgccttgcgagtcagtttctcc

SEQ ID NO: 248603 - DNA, 37 bp, Homo sapiens
  chr1:53703058-53703095
  hypo
aagcccggccgggcgcggtggctcacacctgtaatcc

SEQ ID NO: 248604 - DNA, 326 bp, Homo sapiens
  chr1:53769484-53769810
  hypo
ttgaatgctctcagcgacaggggactcagtcagccgtgctggctggaggctgaacacgttccttcctcttgaacggggagggaaataagctctcaacaggagatccccactttgtacaaatggatttttcacccctccttgttctttggctcggtcagaaagactcccagggaagtggaaaggagccaagagctgccatgaaatgactttacccagcagacaggctggtgataggtttcggtgggaaaaagaaaggaaaggggcgatgaattccaacttgctgagcgataaaggaaattaaggcataataccgaggaggcagcagt

SEQ ID NO: 248605 - DNA, 236 bp, Homo sapiens
  chr1:53905598-53905834
  hypo
aggggtaaagagtcgccatgcactgttgccttcctgagaggcctttctggagtcctcacccaactatgccggtttaggggaatggtcatctccatggcagtgacgttccacggtgcgaatgggcagagagagccagtggcttccggccttacataaccttctcacctggtaggtaggtgagtttcccccagctcacacaccactcctgtctcccaacaaacggttgtagtgggagc

SEQ ID NO: 248606 - DNA, 56 bp, Homo sapiens
  chr1:53986260-53986316
  hypo
gcccctcctgggctacgcccctggccctgcctccccgcacacgtacctgggagcag

SEQ ID NO: 248607 - DNA, 77 bp, Homo sapiens
  chr1:54009675-54009752
  hypo
gtggcgggaggagccgttctggggcgcgcagcccagcccagatgcctggctcagcagagctgcgccacccgactcag

SEQ ID NO: 248608 - DNA, 82 bp, Homo sapiens
  chr1:54009966-54010048
  hypo
ctaagagaggagcccgcaactctgctggagatgggagaaggggaaggttgggagccagggtgcagtccggcccccggggcac

SEQ ID NO: 248609 - DNA, 37 bp, Homo sapiens
  chr1:54037530-54037567
  hypo
gtgagccaccacgcccggccaaaatcttaaaaatata

SEQ ID NO: 248610 - DNA, 75 bp, Homo sapiens; identical to SEQ ID NO: 207004
  chr1:54060385-54060460
  hypo

SEQ ID NO: 248611 - DNA, 128 bp, Homo sapiens
  chr1:54142673-54142801
  hypo
ctgggactgcatgacgtgacatacacggagcccctagctgagcaacgcaaacagcaggtaccgcacaagcccaagctctccttcccctgtcccgctacccttgaggatgacgccggcctacagctctg

SEQ ID NO: 248612 - DNA, 160 bp, Homo sapiens; identical to SEQ ID NO: 207005
  chr1:54260083-54260243
  hypo

SEQ ID NO: 248613 - DNA, 266 bp, Homo sapiens; identical to SEQ ID NO: 207006
  chr1:54408679-54408945
  hypo

SEQ ID NO: 248614 - DNA, 240 bp, Homo sapiens
  chr1:54474564-54474804
  hypo
tcctgcccttgtgcgctaggatttgattttcatgtgaagggttatcagtgccattccagccagccttccatgctggcctgagtggcccactcagggtccgggacaggcatactcatcggaccagtcggagcagtgctgtacatggtcgcggcagagatgcctcggtatacagtcgcagtacttgaagaaggttgaaggacagcgccaccacccagggccgcagggtgggcacacagttac

SEQ ID NO: 248615 - DNA, 209 bp, Homo sapiens
  chr1:54586633-54586842
  hypo
tggtggtacgtgggcggacagagctggatgagagacctgggagagggagaaatccgaggccagcgcagaagtctgggtgtggagaggccgctcatccaaacgacaggagaggctcagggagcgccaatgattccgtgtgaggcacagggcgtggctgcgggtgggtgggagggcgactgcagcatgggaaatttcggtggagaaccaga

SEQ ID NO: 248616 - DNA, 166 bp, Homo sapiens; identical to SEQ ID NO: 207008
  chr1:54602338-54602504
  hypo

SEQ ID NO: 248617 - DNA, 204 bp, Homo sapiens; identical to SEQ ID NO: 207009
  chr1:54605374-54605578
  hypo

SEQ ID NO: 248618 - DNA, 50 bp, Homo sapiens; identical to SEQ ID NO: 207010
  chr1:54610116-54610166
  hypo

SEQ ID NO: 248619 - DNA, 274 bp, Homo sapiens
  chr1:54683785-54684059
  hypo
gttttaattgctgccgttaaacctagtagcaggatcctaatgaaccgtgttctttccaggaacctgttggcccagttggtttcaagccagagacattcagaaagtttttagctctatatttgcatggtgctgcgtgagcggaggacccctctgaatcctgaaacccctcttgcctctcttccacggaagagggcctgggccccgtggagcctcagtgcccgtttggcctgctgctctcgctgacaataaagagcccttgcgttgcactgaagcc

SEQ ID NO: 248620 - DNA, 119 bp, Homo sapiens
  chr1:54694092-54694211
  hypo
gccgccagggagaccgagtgcacactcacttttggaagtccgtctatgtcgcctgaccctggaaagaaaaaataatccaattcagtttcttgcttgctcttccacggaggggtctcccc

SEQ ID NO: 248621 - DNA, 254 bp, Homo sapiens
  chr1:54722603-54722857
  hypo
ggcaggtgaactgccgcaccatgggcacagcggggacatggggccctctctggggaacagctagtaagctaccagccacgttaaacctgcccctccacccctcaatcctttccctcaactttcattttgtgtcaaagtccacctagggccaaggatggctgagggaggggagagagaacatgaaaaggtacagtacctggtttcccattctgatcgggggcctggggccgcctgcgtatcgcggtgacataaaa

SEQ ID NO: 248622 - DNA, 416 bp, Homo sapiens
  chr1:54725170-54725586
  hypo
agacaggcctccattcgctcttccccacccatgactgtgctgttttttagaggttggtttttagaaaaattcaaaatgtgcacagggggtgagtgtggctaaattaaaaagagagaggagctgcctaggtagggtttcccccttggccttctcctgcagagccaggctgccagccgcctgcccactggggaggaggggcgtgggcccacagagaagaggtgtgcagagaacatcgcagggggctgtacaagaacccgagggcgccgccgctgtgaggcctgggagtttcttggccaagcgaggagctgctcacttccggaaagctccgaggagcagatgttcccctacctgccacgctactaatttcaacaagtgtgtgtctttctagcggctgccagcaacggcatggtttgtta

SEQ ID NO: 248623 - DNA, 60 bp, Homo sapiens
  chr1:54726656-54726716
  hypo
cctgcccacctctcggcacagagccagacgcctgccatttcccaacgggccacccacgtc

SEQ ID NO: 248624 - DNA, 207 bp, Homo sapiens; identical to SEQ ID NO: 207012
  chr1:54746227-54746434
  hypo

SEQ ID NO: 248625 - DNA, 358 bp, Homo sapiens
  chr1:54747983-54748341
  hypo
aataaatatccatgactcaacgaataaatgaacagaccaactgggaaacactgctggagagggtgacggagggcagagcgtgttcttggccctgcagggtcctaggtgtctcatgagagagaggggcctcgcgaagtggggggaccgtcattccttttctctttaaacactgctgttctggcatttgcctggtatatctgcctcaacaaatgcctcccaggggtgagcagacattgctctccccagcctggcctccttccaaaggatctgtgtgcaacctattcaggtggtcggcgcgtctgtgcctggccccgtgctcacacaggcggggcggggcgaggctgagacatctgggccc

SEQ ID NO: 248626 - DNA, 105 bp, Homo sapiens
  chr1:54756002-54756107
  hypo
agccagactcagccaaggtacgggttcagcaaccggcggcccagagccagagacacagctccaggtaaaggaccacgtgctgacgtcctaagattccctgaccac

SEQ ID NO: 248627 - DNA, 43 bp, Homo sapiens
  chr1:54757160-54757203
  hypo
ccacacgggttcggcgctgagcagatgccgtctaagcctttaa

SEQ ID NO: 248628 - DNA, 92 bp, Homo sapiens
  chr1:54757486-54757578
  hypo
caggcagccctccacgcccagctgtcaggcaaggaatagcatagatggttctcctgcctgaaatccaggtgcgagcccgcatcctgctcagg

SEQ ID NO: 248629 - DNA, 119 bp, Homo sapiens
  chr1:54766194-54766313
  hypo
accagtgcaacacagagtaccgcacaggcctgtactcagctccaggatcccaaagaaaggaaggattatttctgccggagggtggggcttcacagagcggtgacatctgatcagacacc

SEQ ID NO: 248630 - DNA, 31 bp, Homo sapiens
  chr1:54767237-54767268
  hypo
cacgcggggaccctcgcggctcctaaggcac

SEQ ID NO: 248631 - DNA, 257 bp, Homo sapiens
  chr1:54775634-54775891
  hypo
ctcaaaacaaaaggcgagacacagcatgtagggaagcccgggcaggctccttctccctgcacacttccaagcctttgaatacccgcagatctcggtccagagctggcagctgtctgttattatcccagcaactccaagggccccagcaccagggagcatgtcccgagcaggtgaacaccatctgcccggctgacaagatgcccgtcttagtgcctgctgctgccagcaggccgtgtggacctcggggaggcgcagcc

SEQ ID NO: 248632 - DNA, 279 bp, Homo sapiens
  chr1:54808633-54808912
  hypo
tatggatcatgtttcgtgactagcaaaacacgccagccgggacactttgagaacccggccggttttcaggaacaggattttacacatttcccaggattggcggatctgcgctcgcctccacccgcctgcgagctccatagcccggatcctgtaccagggggatacttaggacaggtggggggaagaggggaggctgtgccctaaccctctgccgcttttcatattgctactaccatttatgtattgaacacgtgatacattcctcgctgcgtgtcaggt

SEQ ID NO: 248633 - DNA, 121 bp, Homo sapiens; identical to SEQ ID NO: 207014
  chr1:54818601-54818722
  hypo

SEQ ID NO: 248634 - DNA, 78 bp, Homo sapiens
  chr1:54860655-54860733
  hypo
gtgagccaccgcgcccggctaagactcctttttttttttttattgtatgtgggaatcgcctttgtgggatttccacat

SEQ ID NO: 248635 - DNA, 138 bp, Homo sapiens
  chr1:54880303-54880441
  hypo
ccccgggaagacagcgcttccaggagagagtggccgagcaacggagagcatgaacacggcttttggaaagagctctgtgaagggcacagttggccggtgtagagcagtattactattttttttaagacggagtctccc

SEQ ID NO: 248636 - DNA, 36 bp, Homo sapiens
  chr1:54944840-54944876
  hypo
atgtgagccaccgtgcctggccgaaaagaaataact

SEQ ID NO: 248637 - DNA, 44 bp, Homo sapiens
  chr1:55009517-55009561
  hypo
aggggatcagaagaacgaagtctggacagcgaggccagggctga

SEQ ID NO: 248638 - DNA, 94 bp, Homo sapiens; identical to SEQ ID NO: 207015
  chr1:55033218-55033312
  hypo

SEQ ID NO: 248639 - DNA, 155 bp, Homo sapiens; identical to SEQ ID NO: 207016
  chr1:55050846-55051001
  hypo

SEQ ID NO: 248640 - DNA, 72 bp, Homo sapiens; identical to SEQ ID NO: 207017
  chr1:55065738-55065810
  hypo

SEQ ID NO: 248641 - DNA, 189 bp, Homo sapiens; identical to SEQ ID NO: 207018
  chr1:55066933-55067122
  hypo

SEQ ID NO: 248642 - DNA, 293 bp, Homo sapiens
  chr1:55067377-55067670
  hypo
tcagatgtgggttggaacctcgcctctactacattcaagtgatgccccctcgagctttcagtctccatttgtaaaatgggtgtatctgcagtccctacctcacaggactgtggggcgatagatgcagtactgactccatgcctggctgcgccctgggagcggtcaggaggatggtgaaagcaacgcaaggggcacgggaagacagtcaggagcctggtgcaaggtcctctcttacaaaatgctccctgtgcctcctgtgggccaggccttggagaggccgctccctcccttgg

SEQ ID NO: 248643 - DNA, 206 bp, Homo sapiens
  chr1:55074067-55074273
  hypo
cataaaacccagcagcgcagtccgtgttgatggaaaacatggggaggaggctgagggaaagcgagggtggggtactgcagcctcccccctcacagcttctattagggccctgcagcctgggtctggccttgagactcacccagcagagactcagccggtgtttgctgaattcatatgcttgaacccatgagcgcctcagaaccatc

SEQ ID NO: 248644 - DNA, 205 bp, Homo sapiens
  chr1:55146065-55146270
  hypo
ttgaaaggaggtctgcgtgtccgtcctgactctgcctccagctgctgtgtgggtcttgggtagcccatttgtcctctctttcccccttaggcaaaagaaggaaatgatccctgcaatcccaccccaggtgggtggtcatgacagtaatgcagccagcggtgctgagtgcctgctcaggcctgggcccgtgcggaagggtgctcca

SEQ ID NO: 248645 - DNA, 269 bp, Homo sapiens
  chr1:55261713-55261982
  hypo
tgatgatcaaatgagataatcgatgaaaagcacttgtgtgcacagtgcctgggatatcatccagcttcatctacctcctcatggagctgaaccaaatcaaaccactcagaattgtggagtcgtgtgtgtgtgcgcgtgtgtgtgtctgtgcgcgtgcgcacgtgtggacacgcatgcgtgcataccagggatcctgggcttgctgacctatgacactctcttgggccttcccgccaggtccccaccccgctgggcgcagtgatggattg

SEQ ID NO: 248646 - DNA, 134 bp, Homo sapiens
  chr1:55317920-55318054
  hypo
cttgcagatcttgtcgtacacctcggggaaggcgtcctggcaacccagcttctctcgcagcttgtggtacaaggagccatcaaacatctcccagaactcctcccggttcatgtagcagtcggcatacagcatct

SEQ ID NO: 248647 - DNA, 97 bp, Homo sapiens
  chr1:55447258-55447355
  hypo
ccagcctgggcaacagagcaagatggaatctcaaacaaaacaaaacaaaacaaaaatgcccttattggtatggagtagggcacggagaatggcatgg

SEQ ID NO: 248648 - DNA, 198 bp, Homo sapiens; identical to SEQ ID NO: 207022
  chr1:55517831-55518029
  hypo

SEQ ID NO: 248649 - DNA, 155 bp, Homo sapiens
  chr1:55529041-55529196
  hypo
gtgaccgtggcctgcgaggagggctggaccctgactggctgcagtgccctccctgggacctcccacgtcctgggggcctacgccgtagacaacacgtgtgtagtcaggagccgggacgtcagcactacaggcagcaccagcgaaggggccgtgac

SEQ ID NO: 248650 - DNA, 75 bp, Homo sapiens
  chr1:55532714-55532789
  hypo
atatacacggtggacgatcctgatgaagctttacagtgaggacggcaggtgctaggggtgcggaaggcgttgttt

SEQ ID NO: 248651 - DNA, 118 bp, Homo sapiens
  chr1:55560944-55561062
  hypo
ttcctgccgtacaacgctgactcgacttttctttggtaatactggggagttctgatcagacaccctttggtagaaaagcatataggcattccagtatcttcggcgcacatcagtgtat

SEQ ID NO: 248652 - DNA, 41 bp, Homo sapiens
  chr1:55567199-55567240
  hypo
tttcaagtaacgcacgtattatctatcgtaccaaaaaggat

SEQ ID NO: 248653 - DNA, 40 bp, Homo sapiens
  chr1:55583107-55583147
  hypo
aaaagaaactgtggccgggcgcggtggctcacgcctgtaa

SEQ ID NO: 248654 - DNA, 183 bp, Homo sapiens; identical to SEQ ID NO: 207023
  chr1:55620060-55620243
  hypo

SEQ ID NO: 248655 - DNA, 293 bp, Homo sapiens
  chr1:55740624-55740917
  hypo
agcaggacgaccaccggggacccgcacacagcagctgggctggccagcacccttcctgccactgacacacctcaagacatgtttgttttctgggtcctcctcagggtcagagtgggagcagggagcacgtggggcggtgggggacagatgttgtttttcaagtgacaagcgcgactctgtttccgattctcacaggcaacctgaatgcccatcacatcaggcagggagagctgcccagatctgacactaaccccttgtggaagtgcctggcgggtccgcggggtgagggggga

SEQ ID NO: 248656 - DNA, 34 bp, Homo sapiens
  chr1:59500703-59500737
  hypo
gccttcgcggaggacgtgctcacattcctcccct

SEQ ID NO: 248657 - DNA, 46 bp, Homo sapiens
  chr1:59500767-59500813
  hypo
gccgcaccaaagagaaggaatcgctgggggccggggtgccattcgg

SEQ ID NO: 248658 - DNA, 54 bp, Homo sapiens
  chr1:59893085-59893139
  hypo
gagacacgagatggcggaggtaagagttggttaccttgccgtctcctcctcagc

SEQ ID NO: 248659 - DNA, 186 bp, Homo sapiens
  chr1:59911863-59912049
  hypo
caggggcttcatcacgatcttggaatattttggtggcaactttaagatcttttgttttctgactcttagatctctttcttttggtggcatgggaaaattccctcaactcgattatttattcagttctttcatgctccccatattgtcatggccacgtttgaatcatgttatcggcaagtctgaccg

SEQ ID NO: 248660 - DNA, 204 bp, Homo sapiens; identical to SEQ ID NO: 207028
  chr1:60220992-60221196
  hypo

SEQ ID NO: 248661 - DNA, 198 bp, Homo sapiens
  chr1:60382733-60382931
  hypo
ctgtatagttcaatcgttttcggctcttgcggaagttgctttattttttgagcctcaactccccagctataaaagggagaaaattattcctctctcttaaggttctgtgaggaagaatgagagcagcaatgtgaaaggcactttgttttcttgttccaggcgcacagccacccagcgagtctccgaggaatgaaagag

SEQ ID NO: 248662 - DNA, 42 bp, Homo sapiens
  chr1:61333528-61333570
  hypo
atcaaaggacagtacaagatcggagtttcacactaaaggcaa

SEQ ID NO: 248663 - DNA, 92 bp, Homo sapiens
  chr1:61339525-61339617
  hypo
ggcaacttcagttctcgtttttgtaagtatgcgagaaacgccctgttatcaggtgtcatagcctgaactccgtcctaataaacagtaaggaa

SEQ ID NO: 248664 - DNA, 76 bp, Homo sapiens; identical to SEQ ID NO: 207030
  chr1:61445392-61445468
  hypo

SEQ ID NO: 248665 - DNA, 216 bp, Homo sapiens
  chr1:61456417-61456633
  hypo
caaccagggaaatccgaggctttggattattagccgggttggatcacgttaccctgtttggctctgcagaaatcacacttttcattttgcctttaatcctaaaggtcaccgggaaggtcagccccaaacacaaatgatactttgtggtcttactttcagacaattatcaactcataaatcttggtcagactgtaatgagagcgcgaggaataattg

SEQ ID NO: 248666 - DNA, 36 bp, Homo sapiens; identical to SEQ ID NO: 207033
  chr1:61541526-61541562
  hypo

SEQ ID NO: 248667 - DNA, 252 bp, Homo sapiens; identical to SEQ ID NO: 207037
  chr1:61601535-61601787
  hypo

SEQ ID NO: 248668 - DNA, 63 bp, Homo sapiens
  chr1:61716877-61716940
  hypo
catacacatgcatccgtacaaataaaaatttcactggaaagggaactccgtgatctctttact

SEQ ID NO: 248669 - DNA, 133 bp, Homo sapiens
  chr1:61833608-61833741
  hypo
aataagatggagatcacacacgtctcactttgtccttcgagtaggatcaagcgctcagaagcagagcgatgtatacgtttgtcgaacgaatgagcgttgctccgcttgcatcggagaacccagatgtacaatt

SEQ ID NO: 248670 - DNA, 159 bp, Homo sapiens
  chr1:61875330-61875489
  hypo
aacccccaattacatcgtcatagctaccaggtcgctggcaggactagaccacagcagcccttcctacatatggtccgccctagcctgtaaagctgatggcatgaaggtgcgggtggcagtgtgcttcccaccagcacctgtccccgaagaggaagagac

SEQ ID NO: 248671 - DNA, 416 bp, Homo sapiens; identical to SEQ ID NO: 207038
  chr1:61913159-61913575
  hypo

SEQ ID NO: 248672 - DNA, 117 bp, Homo sapiens; identical to SEQ ID NO: 207039
  chr1:62119988-62120105
  hypo

SEQ ID NO: 248673 - DNA, 36 bp, Homo sapiens
  chr1:62213623-62213659
  hypo
gcgaaggctggagccgcctcctgggttcaagtgatt

SEQ ID NO: 248674 - DNA, 58 bp, Homo sapiens; identical to SEQ ID NO: 207042
  chr1:62729380-62729438
  hypo

SEQ ID NO: 248675 - DNA, 60 bp, Homo sapiens
  chr1:62836529-62836589
  hypo
agctctcatactttggtatgcggcataagtgctctatgcgtacttcctattcaacagaga

SEQ ID NO: 248676 - DNA, 38 bp, Homo sapiens
  chr1:63831676-63831714
  hypo
cctgggcaacaagagaacaagagcgaaactgcgtctca

SEQ ID NO: 248677 - DNA, 224 bp, Homo sapiens
  chr1:63832612-63832836
  hypo
acagccgtccatgcgtgattggacagaagcctagactgagatggaaatagtggaactggaaaggaagggatcaatgcaaaaggaaaagtgtgcaggtcttactaacttactagataggtatttttggcaagtttgggaccaggtgattcaagctgcccgctggggcacgtgtagtggctactcgagggcagggctgtccttttgcacaacgcacaggctctcgc

SEQ ID NO: 248678 - DNA, 41 bp, Homo sapiens
  chr1:64014770-64014811
  hypo
gtaggcggagcttcgccaaggctggcgcagtcggttttgac

SEQ ID NO: 248679 - DNA, 184 bp, Homo sapiens
  chr1:64104294-64104478
  hypo
ccctcacatggccacgctaacagtcctgctgtgatgtaactttgatttcatgcctttgaagggtggctagtgctacaaagattgctttgtatgagaccccaactggctggaagttttttgggaatttgatggacgcgagcaaactgtccctttgtggggaggagagcttcgggaccggtaagtc

SEQ ID NO: 248680 - DNA, 130 bp, Homo sapiens; identical to SEQ ID NO: 207044
  chr1:64383872-64384002
  hypo

SEQ ID NO: 248681 - DNA, 149 bp, Homo sapiens
  chr1:64734441-64734590
  hypo
attaacatggcatgccaaatcgtgccatttgataacggagtgtgtcatgtatagtaaaactccacaactgacgcataccctccactggatatgacgtcagatctgaagttaaggttctataggaacgcgaggccccagcccccttgtga

SEQ ID NO: 248682 - DNA, 68 bp, Homo sapiens
  chr1:65316659-65316727
  hypo
tgctgagccggggccgtgggaccggtgtgcgggcgcttgctgcttcagtcattcgacaagtgcttatt

SEQ ID NO: 248683 - DNA, 91 bp, Homo sapiens
  chr1:65513412-65513503
  hypo
aaagtcatacagatcgcacagagcttacattctagtggagtcaggcagcgttaaacacagtaagtatactgaagtacgttagtgtggacgt

SEQ ID NO: 248684 - DNA, 81 bp, Homo sapiens
  chr1:65796414-65796495
  hypo
gttgggattacaggcgtgtgccaccgcgcccagccttgaaggcttatttcttgctcatataaaagtcggatctggaatgga

SEQ ID NO: 248685 - DNA, 127 bp, Homo sapiens
  chr1:66834312-66834439
  hypo
attgtaattccattttttttcggtgcatatgtcataattataatgcaactaaaatgttctcgggtttagtaccaagcgtactagtatgagaggcatgagatgttccggcagtatttacacctaattt

SEQ ID NO: 248686 - DNA, 111 bp, Homo sapiens
  chr1:68174580-68174691
  hypo
tgtaattctgccataaaggccgagaccagacaaagctgcaaaaaaacactagcaacccagactccagggcatccatcacgtgggcaccacggtgctccacactgagttcta

SEQ ID NO: 248687 - DNA, 36 bp, Homo sapiens
  chr1:68344803-68344839
  hypo
tgagccaccgcgcccggcctctgtgtcatttctgaa

SEQ ID NO: 248688 - DNA, 130 bp, Homo sapiens
  chr1:68629018-68629148
  hypo
ccacggcaaaaggcgcccactctggaggccgcggtggcggtggctcccgcccctcccaccccaccctgcggcggtggcggtggcggtggctgcagctgtgcagcctcccctcagcgcagcatggctccct

SEQ ID NO: 248689 - DNA, 70 bp, Homo sapiens
  chr1:68703995-68704065
  hypo
cagaaacacctgccccggacagtgattcctgtgatatgcagacaacacccagtaccgtggcagacttggc

SEQ ID NO: 248690 - DNA, 35 bp, Homo sapiens
  chr1:69982630-69982665
  hypo
agtgttaaaatagggccaggcgcggtggctcacgc

SEQ ID NO: 248691 - DNA, 34 bp, Homo sapiens
  chr1:69982905-69982939
  hypo
agagcgagactccgtctcaaaaaaaaagagataa

SEQ ID NO: 248692 - DNA, 45 bp, Homo sapiens; identical to SEQ ID NO: 207048
  chr1:70661586-70661631
  hypo

SEQ ID NO: 248693 - DNA, 102 bp, Homo sapiens
  chr1:70710352-70710454
  hypo
ttttacactattaggcggtcaagaagcagatcgagacggcggtcacattctaagtctaggagtcggcgacgatccaaaagcccaaggcggagaagatctcat

SEQ ID NO: 248694 - DNA, 35 bp, Homo sapiens
  chr1:70720484-70720519
  hypo
ggattacaggcatgagccaccgtgcccggccgatg

SEQ ID NO: 248695 - DNA, 216 bp, Homo sapiens
  chr1:71519814-71520030
  hypo
cacccagctggaggcggatgggctgcgcttctcaaattgctttgaggaacgttcttttagtggggagggagtgcctttcctgaagaagtccttgggatggacatgctgatcctgaatgagtcttaagaagtacaggtttcccaagacccggagaagacagcaagcctgtgttcccagccagcgctagtggcagctgggttccgggcaggtggagcc

SEQ ID NO: 248696 - DNA, 36 bp, Homo sapiens; identical to SEQ ID NO: 207050
  chr1:71555024-71555060
  hypo

SEQ ID NO: 248697 - DNA, 34 bp, Homo sapiens; identical to SEQ ID NO: 207051
  chr1:72383170-72383204
  hypo

SEQ ID NO: 248698 - DNA, 34 bp, Homo sapiens
  chr1:72383444-72383478
  hypo
agagcgagactccgtcttaaaaaaaaaaaaaaaa

SEQ ID NO: 248699 - DNA, 144 bp, Homo sapiens
  chr1:72740462-72740606
  hypo
agctgtgtaaaagatcgggtagaaaaagtgggccaggtgatcagagttatttgcatcctcagccaccccatcaagaacaccaatgatgccaactcctgccagatcattattccacagaaccaagtcaatcgaaagtcagatatc

SEQ ID NO: 248700 - DNA, 41 bp, Homo sapiens; identical to SEQ ID NO: 207052
  chr1:73222393-73222434
  hypo

SEQ ID NO: 248701 - DNA, 73 bp, Homo sapiens
  chr1:77165571-77165644
  hypo
ggtgccggccgacaccgaggtggtttgtactccgcctactgcctatatcgacttcgcccggcagaagctagat

SEQ ID NO: 248702 - DNA, 95 bp, Homo sapiens
  chr1:77510044-77510139
  hypo
agcctgagggtcatcgcgcattccagcatccagaggatcctccgcaaccgccatgacctgctcaacgtgagccagggcaccgtgttcatcttctg

SEQ ID NO: 248703 - DNA, 35 bp, Homo sapiens
  chr1:78152467-78152502
  hypo
catgaaaagtgcaggtcacccgtctgggaagtgag

SEQ ID NO: 248704 - DNA, 162 bp, Homo sapiens; identical to SEQ ID NO: 207053
  chr1:78254759-78254921
  hypo

SEQ ID NO: 248705 - DNA, 90 bp, Homo sapiens; identical to SEQ ID NO: 207054
  chr1:78458353-78458443
  hypo

SEQ ID NO: 248706 - DNA, 80 bp, Homo sapiens; identical to SEQ ID NO: 207055
  chr1:78463740-78463820
  hypo

SEQ ID NO: 248707 - DNA, 35 bp, Homo sapiens
  chr1:78510240-78510275
  hypo
tgagccaccgcgccggcctcctaaagaattcttaa

SEQ ID NO: 248708 - DNA, 31 bp, Homo sapiens
  chr1:79267843-79267874
  hypo
caattatgtcggaagggttccatgttgatta

SEQ ID NO: 248709 - DNA, 129 bp, Homo sapiens; identical to SEQ ID NO: 207056
  chr1:83243221-83243350
  hypo

SEQ ID NO: 248710 - DNA, 38 bp, Homo sapiens
  chr1:84944530-84944568
  hypo
gcctgggcattaaagcaaggctccgtctcaaaaagatg

SEQ ID NO: 248711 - DNA, 38 bp, Homo sapiens
  chr1:85646087-85646125
  hypo
ttctaggccggacgcggtggctcacacctgtaatccca

SEQ ID NO: 248712 - DNA, 256 bp, Homo sapiens
  chr1:85743256-85743512
  hypo
caaacatttattgagtccttactaatatgttctaggcaacttatactatgagtcctccattttatagggggagactgatgaagagacgactatccccagaccgtattttaactactatggcgctgtgtaagaagcaacctgagaagtgtggatgaaaagctacaggtagagccctgggcccaagacggtggcttggacaacatgctaaataaactataaactagatggtatttgaagctacgagagtagataaaaa

SEQ ID NO: 248713 - DNA, 98 bp, Homo sapiens
  chr1:86048506-86048604
  hypo
cggcccaagtactgcggttcctgcgtggacggccgatgctgcacgccccagctgaccaggactgtgaagatgcggttccgctgcgaagatggggagac

SEQ ID NO: 248714 - DNA, 145 bp, Homo sapiens
  chr1:86175121-86175266
  hypo
ataaatatattaggcgaaagtgcctaatgcccggtattgctgaataacattgcattgtatgaatgtggcacgttttttcatgcatgtaccagttggtgggcatttggcttgtttccagtttgggctattacgaataattctgctt

SEQ ID NO: 248715 - DNA, 105 bp, Homo sapiens
  chr1:86277766-86277871
  hypo
atgtcaaatggctacgctctcgttctctgttttgcccattatgaactcggtaataatcgaattcactgaaccataaaattgaatgtataccgcagcactctattc

SEQ ID NO: 248716 - DNA, 100 bp, Homo sapiens
  chr1:86860849-86860949
  hypo
cagttgcacttaaaactccaagaacctcattcattcaaaaacacttgaaaccgtactatgcgttgcgtgatgaggaaactgtcttcgaaatagattttat

SEQ ID NO: 248717 - DNA, 212 bp, Homo sapiens
  chr1:86973442-86973654
  hypo
ggttgtctgggttaaacatgcgcatctgggtgatggccgctatagttattctttcttgtatctgtttgctagacatctgcagatggctctgtgctgctacccagcgcgtcgacaaccagggaagaacgatagaagtttaccttgcattggatgaccagcacgctctaagaattaaagaagggggagacgtcgggggtgcatggcaacacatt

SEQ ID NO: 248718 - DNA, 90 bp, Homo sapiens
  chr1:87299759-87299849
  hypo
aatggaacctgaattagatgcgtcgagagacccaaacattaagaacagaaagagctggattcacgagtcatggggcccaaaatggcatca

SEQ ID NO: 248719 - DNA, 168 bp, Homo sapiens
  chr1:87607280-87607448
  hypo
tcagtactcccctggaccagcgtcatcatcctgggccccatgtggctgcccatcgcatacaggaggcctaattgtatgtctgctgtgtgtggcatgactccttcgaatggcgttccttttcccaccccgtggcattgctctgctctcgcagtctctctccatagtaac

SEQ ID NO: 248720 - DNA, 84 bp, Homo sapiens; identical to SEQ ID NO: 207063
  chr1:89148474-89148558
  hypo

SEQ ID NO: 248721 - DNA, 77 bp, Homo sapiens
  chr1:89228941-89229018
  hypo
cagggagctccttttcgcagggaaaagacacaatgagatttcaagtttagaaagttcacatccatccggccacatgt

SEQ ID NO: 248722 - DNA, 36 bp, Homo sapiens
  chr1:89451827-89451863
  hypo
cactccagcctgggcggcaagagtgagagactgtat

SEQ ID NO: 248723 - DNA, 105 bp, Homo sapiens
  chr1:89919387-89919492
  hypo
ctggaaagagccatggtgggcgcctgcatggctacctctatcaggccctgcagcaggcccaaaaatgcagaaagcaagaccgtcgctgtcaaggagcttctaggc

SEQ ID NO: 248724 - DNA, 34 bp, Homo sapiens
  chr1:89984977-89985011
  hypo
gattacaggcgtgagccaccgcgcccagccaaga

SEQ ID NO: 248725 - DNA, 255 bp, Homo sapiens
  chr1:90075874-90076129
  hypo
cccggctgtgacatcgcccacacttggcctcaactccaccctgtgattggagccaacagcagggagaggccaggcagtggaagcagacaccttcaagcctacgggggctaacaatggggattcccaggtcccctgagagtgcagagatgcccgggtctgcagctgcaacctgggcggccgtagaggcgcctgggagggtggggctcctgcctgctcctcgctcctgcaggctccgtggaacgctgcaccactcct

SEQ ID NO: 248726 - DNA, 162 bp, Homo sapiens
  chr1:90400241-90400403
  hypo
ttgagatgccttcacgtgaagttcactgatgtggctgaaattcctgcctgggtgtatttgctcaaaaaccttcgagagttgtacttaataggcaatttgaactctgaaaacaataagatgataggacttgaatctctccgagagttgcggcaccttaagatt

SEQ ID NO: 248727 - DNA, 198 bp, Homo sapiens; identical to SEQ ID NO: 207066
  chr1:90448905-90449103
  hypo

SEQ ID NO: 248728 - DNA, 45 bp, Homo sapiens
  chr1:90725982-90726027
  hypo
agaaagttttagtgattggacggaaaagcaaaccaaccggccagg

SEQ ID NO: 248729 - DNA, 34 bp, Homo sapiens
  chr1:91072761-91072795
  hypo
actgtattagtctgctctcacgctgctatgaaga

SEQ ID NO: 248730 - DNA, 35 bp, Homo sapiens
  chr1:91483484-91483519
  hypo
cccgcgcctgggaaacagaccgagactccgtcccc

SEQ ID NO: 248731 - DNA, 216 bp, Homo sapiens
  chr1:92001228-92001444
  hypo
tggccaacctgggcgaggcgggcgccgcgccggcagctagggggaagtcggccaacaattgggccacctcctcctcttcctcctgcttggacgacggtcttccgcctggactgtggagcctcgccgaccgttcgtcctcacagccaccccatgggcaaccagcgcggtgcaggctcattgtgtctgcgacaggcagaagccgagcgggtcccaacg

SEQ ID NO: 248732 - DNA, 32 bp, Homo sapiens
  chr1:92068723-92068755
  hypo
acaggcatgagccaccgcgccaggccatgcct

SEQ ID NO: 248733 - DNA, 195 bp, Homo sapiens
  chr1:92102535-92102730
  hypo
ctgacatttacatagcgggtgatctcagtgagttattcaacctctcggagggccagttttgtcattcataaaataagtgatccttagggctgaataagctaatatgaataaactatttaatacatataagcattcagtaagtggtacttattattttccgagatagtaaagcaattccgccgtttttactataaa

SEQ ID NO: 248734 - DNA, 44 bp, Homo sapiens
  chr1:92371564-92371608
  hypo
attttaaagataattctggacgggcgcggtggctcacgcctgta

SEQ ID NO: 248735 - DNA, 43 bp, Homo sapiens
  chr1:92662385-92662428
  hypo
acaggcgtcagccaccacccccggccactagcccatgttttca

SEQ ID NO: 248736 - DNA, 190 bp, Homo sapiens
  chr1:92683500-92683690
  hypo
caggcaccctgggcgctctgccctaccggcggcgcctctcactgctcacggaacgttctggaagtttgggaaaccctgagcggtctctgaggacctggtgagcaggtgggtttgcagcgctggggatgaggcctcggcagacctgtctcttcgcgtttttctttcttcgttcttcgccggcgtagtgctc

SEQ ID NO: 248737 - DNA, 34 bp, Homo sapiens
  chr1:93647454-93647488
  hypo
agccaccgcgcccggactgggagttatttcttgc

SEQ ID NO: 248738 - DNA, 44 bp, Homo sapiens
  chr1:93973207-93973251
  hypo
ttatttatttatttatgagacggagtttcacgctttctcccagg

SEQ ID NO: 248739 - DNA, 33 bp, Homo sapiens
  chr1:93975136-93975169
  hypo
atatataaaatgtagtcaatcggaggagccaag

SEQ ID NO: 248740 - DNA, 99 bp, Homo sapiens
  chr1:94033359-94033458
  hypo
gggtgtactggtgccgcagagcagtccacgtcttttctaaccttgtgatctggaagaaaggtggtgttttggaaaaggttctttttaaaattacctttt

SEQ ID NO: 248741 - DNA, 140 bp, Homo sapiens
  chr1:94041432-94041572
  hypo
cgctgtaggccatgcgccctgaagtactgttaccccagggctaggctggtgctgcgcctctctttgttctaaaacctgctgctctgatgcctggaaggagctgggagggtcggaagtgcagaggacggcactgctcacct

SEQ ID NO: 248742 - DNA, 167 bp, Homo sapiens
  chr1:94043256-94043423
  hypo
catgcacgcttcctcgcatatttagacagctgccctctgtcagaggtcccaaaccctgtacttctgaggggtgtcccccacgctctgggtggcgagattaaaaggcctgtgattgattcaggtttgctctggaaaacctggcagatgggcggcggcccctgctctcc

SEQ ID NO: 248743 - DNA, 598 bp, Homo sapiens
  chr1:94047863-94048461
  hypo
gtccatgctcagtacgtgctgggcgatgaccttggggtcgttgttggtgaacagttcttttgcacgtttcaacattgctgtttccaggggcttattctcagggggaaggaactttgactcaaactcgttgggcctgaaggaggagacagtctccaggaggggcgtcacaaactcgcccttgtcccactgccccttctccatctgagctgccgcaggttcccaaggtctttccctgtcatcatcatcaaggatcaagtagttgacgccagagttccggggacctggcgcctcattctgcttggctgtgagcagttctgtgtggcttccctgggcacatgagggtagctttgctcccctgccgcagcctgtggcaaacgctgggttcagttcacagtagttggcctctgagttgagccaggcagagggagacgagggaaccttgaggaacggcaccttgcagggcttaggcgggggcttagggcacagttgactgtctgatcccctcagcgcctccccagccctggcgtctgaggagaccctccgaaccactgctgggctcagggcaggctcgcttcccgtcctgaacacaggtgagttt

SEQ ID NO: 248744 - DNA, 92 bp, Homo sapiens
  chr1:94345695-94345787
  hypo
tgtgtgcatgtctttagggacggcatctaaaagagaggaggccgtccctgacttttttttttggagacggagtcttgctctgtcgcccaggg

SEQ ID NO: 248745 - DNA, 32 bp, Homo sapiens
  chr1:94346027-94346059
  hypo
gggattataggcctaaacgacctcgcccagcc

SEQ ID NO: 248746 - DNA, 66 bp, Homo sapiens; identical to SEQ ID NO: 207071
  chr1:94354603-94354669
  hypo

SEQ ID NO: 248747 - DNA, 192 bp, Homo sapiens
  chr1:94466588-94466780
  hypo
ctctgatgatgctcacgatgacgttccacagcatgcggcgtgcctgggggtccatccctgtggtgggctcatcctggggggtggagagaaggttgggggcacaggctgggagctggcccttctgattactgcttccccctgggctggctcccctgtggaggatgagctgacagaaggcgcacacagtcactc

SEQ ID NO: 248748 - DNA, 278 bp, Homo sapiens; identical to SEQ ID NO: 207072
  chr1:94495948-94496226
  hypo

SEQ ID NO: 248749 - DNA, 43 bp, Homo sapiens; identical to SEQ ID NO: 207073
  chr1:94507308-94507351
  hypo

SEQ ID NO: 248750 - DNA, 102 bp, Homo sapiens; identical to SEQ ID NO: 207074
  chr1:94507711-94507813
  hypo

SEQ ID NO: 248751 - DNA, 102 bp, Homo sapiens; identical to SEQ ID NO: 207075
  chr1:94546400-94546502
  hypo

SEQ ID NO: 248752 - DNA, 49 bp, Homo sapiens
  chr1:94719184-94719233
  hypo
ggaacacacacgcacgcacgcacgcacgcacgcacgcacgcacatgcac

SEQ ID NO: 248753 - DNA, 31 bp, Homo sapiens
  chr1:95222491-95222522
  hypo
atgcagctctttggccgggcacggtggttca

SEQ ID NO: 248754 - DNA, 106 bp, Homo sapiens
  chr1:95315114-95315220
  hypo
gagggactctgagccgctttcacctcttatgaagaggcgccaggtgatcgggtggcgagcccgctgcacagtgcccgattgtctcattccacgtcccacaggcagc

SEQ ID NO: 248755 - DNA, 143 bp, Homo sapiens
  chr1:95340131-95340274
  hypo
caggcagctaggaactcctgcgaggcaattgagtggtcagtgcaaatgacttcgacttcctcctaagtgtgcggctcccgaagacaagaataccagccactcactggcacttactatgtaccggatactgtgctactttatgt

SEQ ID NO: 248756 - DNA, 151 bp, Homo sapiens
  chr1:95343781-95343932
  hypo
ccgtctcacaaaaaaaccaaaacaaacaaacaaacaaaaaaaaaacagagaaacttggttggggcccaaagaatgcgaggctcctgacctcgcttagtgccctgtccccagtccccagcctggagcttggccaaagcggaccttccatgtg

SEQ ID NO: 248757 - DNA, 222 bp, Homo sapiens
  chr1:97185211-97185433
  hypo
gagaaccaatcaatcaatatcgatcgagcgaatgtggggaataccaagaattaataccatagttcccgccctttggtagcttgcacattcaattgttgagtgaaaacacatgtatgaaaccacaaatatgtgaaaagtgattattagtggcactaataacagatcctttattttaaggtttaaggtgaagtggttattgtaggaaatttgatatgtggtttt

SEQ ID NO: 248758 - DNA, 42 bp, Homo sapiens; identical to SEQ ID NO: 207083
  chr1:97185733-97185775
  hypo

SEQ ID NO: 248759 - DNA, 83 bp, Homo sapiens
  chr1:98336379-98336462
  hypo
actgtgattaaaaacgctgctgccattgtctacctattcaggcctctagcattttacgtgggttccaccgattagtgtttgaa

SEQ ID NO: 248760 - DNA, 168 bp, Homo sapiens; identical to SEQ ID NO: 207088
  chr1:99667088-99667256
  hypo

SEQ ID NO: 248761 - DNA, 163 bp, Homo sapiens
  chr1:100106764-100106927
  hypo
ataaaaaataaacaccgtattcttagcgtgacactacttctggcctccagaagtctgagaagttataaagagagaaagacgggaagaaaaagagagagaaagaaagagagaagagtgagaaggagaatgagcatccagttttttaacacgggatctggtttca

SEQ ID NO: 248762 - DNA, 138 bp, Homo sapiens; identical to SEQ ID NO: 226528
  chr1:100437131-100437269
  hypo

SEQ ID NO: 248763 - DNA, 181 bp, Homo sapiens; identical to SEQ ID NO: 207089
  chr1:100500499-100500680
  hypo

SEQ ID NO: 248764 - DNA, 194 bp, Homo sapiens
  chr1:100928310-100928504
  hypo
acagacgctggcttcgagcactatgacctcttcttcatagatggcagcacacccagtgacaacatcgtgcgaaggttcctgaacatctgtgagaacaccgaaggggccatcgccgttcactgcaaaggtgtgtgcaaggcctcggtggtggtggctgtgcttatcgaaggggcgggccaaggaagagcaaataa

SEQ ID NO: 248765 - DNA, 216 bp, Homo sapiens
  chr1:100931955-100932171
  hypo
tagaaggcaaattacgcagaaatcttaatcataaagggagagccccactgagaccaaaattaaacctcactcttcgaaagaacattgatgtttgatctggggcaagggttccttcagattaaaacagaacacacacacacacctcatctaatgaaacagagtatgaatacttcttaaaaaggaagggttagccgggagtggtggcccacgcctgta

SEQ ID NO: 248766 - DNA, 35 bp, Homo sapiens; identical to SEQ ID NO: 207092
  chr1:101675509-101675544
  hypo

SEQ ID NO: 248767 - DNA, 120 bp, Homo sapiens
  chr1:101721447-101721567
  hypo
ctgctcctgactcaccactgttcgctcttgtgaggaacagttggtcaggaagccgcgcagcagccatggcttttaagaataccgggcactttgggaggccgaggtggacggatcacaagg

SEQ ID NO: 248768 - DNA, 90 bp, Homo sapiens
  chr1:101721807-101721897
  hypo
caaaaaaaaaaaaaaaaaaaaaaaaagaattccggaaacacactcgtggagccagaggtggcaattcaccgaattcgaatcactgtaaca

SEQ ID NO: 248769 - DNA, 32 bp, Homo sapiens
  chr1:102292873-102292905
  hypo
aattttttttttttttgagacggagtctcact

SEQ ID NO: 248770 - DNA, 105 bp, Homo sapiens
  chr1:108230624-108230729
  hypo
ttgcactaattctacggaatttcagtaattcggcaaatgtcgggcagtgacacaacatttcatgacggggacgcatctaccaacttctggcgataagggccaccc

SEQ ID NO: 248771 - DNA, 44 bp, Homo sapiens
  chr1:108314147-108314191
  hypo
tacaagcgcgagctaccgcgcccggcctgttgttagcttttcta

SEQ ID NO: 248772 - DNA, 350 bp, Homo sapiens
  chr1:108735214-108735564
  hypo
caaaagagatctccgtagagggagtccatcgaggatgtctccctcgcagctccgcggcctgagtgagccccagcggggtggaagtgcgaccgacgaacgggatctctgcccaccacacacgtccagtgggaagaggcctaagacagcatcctcctcaggggcgccaaacacaatgcaccttcatcggttaaagctctggaaggagagggctcatcctaacggcttcagcgcaaaggcgcgagcgcgcaggacccgggacctgcgtgggaccgcactctgggctgcgctgggagaccgcggagttcctgcctcactcacgtctgatcagaagccccggctcccactccagg

SEQ ID NO: 248773 - DNA, 203 bp, Homo sapiens
  chr1:109241833-109242036
  hypo
gtagaagtcatcatcgggagggccatgggtcttctagttttgacagagaattagaaagagagaaagaacgccagcgactagagcgtgaagccaaagaaagggagaaagaacggcgaagatcccgaagtattgaccgggggttagaacgcaggcgcagcagaagtagggaaaggcatagaagtcgcagtcgaagtcgtgatagg

SEQ ID NO: 248774 - DNA, 68 bp, Homo sapiens
  chr1:109585417-109585485
  hypo
atccaggaagtataaccataaggaagaatacaattacacaaacctgtaagaacatcattctcggccag

SEQ ID NO: 248775 - DNA, 38 bp, Homo sapiens
  chr1:109585725-109585763
  hypo
gcactccggcctgggtgacagagcgagagactccgtct

SEQ ID NO: 248776 - DNA, 104 bp, Homo sapiens; identical to SEQ ID NO: 207097
  chr1:109609236-109609340
  hypo

SEQ ID NO: 248777 - DNA, 91 bp, Homo sapiens
  chr1:109646190-109646281
  hypo
ccccggacatccggcggatctcattaatgttggcgccttgggggccgattacacagccaattaagttatctggaatggtgaatttgtgggt

SEQ ID NO: 248778 - DNA, 331 bp, Homo sapiens
  chr1:109646881-109647212
  hypo
ggattacagaagttagccaccgcgcccctccatagtttgagtagatgtatccaaacttgcttagcctttcacctctggagaactggagtcaattcgggtgaatccggtcccgccgtgcatcatggcaaagtgagattgttgtcttgccacctggttcagcttggccagatcaagcggagaaatgatgtgttgtccttgaatcgagtaggcatctagaggtggtccctccaggtcacgggtgcctcgggggtagcccacagccttgctgcaacgatcttggccgcccgcgcagatgactggggacttggccggcatgggctggtatggaatg

SEQ ID NO: 248779 - DNA, 33 bp, Homo sapiens
  chr1:109679037-109679070
  hypo
tcccttgtggcttccgaaggaaccagccctgcc

SEQ ID NO: 248780 - DNA, 92 bp, Homo sapiens
  chr1:109679130-109679222
  hypo
aaagccacccagtctgtggcactttgttacagcagccctgaaagacgaatgcaggcaccgtgaggtagaacatccctcgcgaacagggcaca

SEQ ID NO: 248781 - DNA, 76 bp, Homo sapiens; identical to SEQ ID NO: 207098
  chr1:109725168-109725244
  hypo

SEQ ID NO: 248782 - DNA, 145 bp, Homo sapiens
  chr1:109741855-109742000
  hypo
aggacaccccctcccctccccgcataacagcagctaacatcttgacgggcactagcgtcttgaggaagacgttttggatatgctgcgcctaaactgactggggagatggggagcaaagcagggcgtcttgacccagtagtggtgt

SEQ ID NO: 248783 - DNA, 137 bp, Homo sapiens
  chr1:109772086-109772223
  hypo
atcctgaagtgtgacgcggagcggataaagttggaagcagagcggtttgagaacctccgagagattgggaaccttctgcacccttctgtacccatcagtaacgatgaggtaggtggctgtgccgcagcaggaggctg

SEQ ID NO: 248784 - DNA, 600 bp, Homo sapiens; identical to SEQ ID NO: 207099
  chr1:109795509-109796109
  hypo

SEQ ID NO: 248785 - DNA, 357 bp, Homo sapiens
  chr1:109797580-109797937
  hypo
cccagcctgcctttggtgagcgtggccaggcactggcagagaagcgcccccattaagccttcggtctcccaccagggcagagccctagaccttggttccctagtctagagaaggctcggggcaacatccaggacggctcctcctggcccggcagctctggccccaccctctcccttcggccctgacccttggaggcagtcaccacggcaaccccaaagttcagggaggccggggtgagggggagctgactcccactgcccctttgttttcctcctcttgttctttgtctcttctttctttcccgcccctgcccatgcggagccctgcagcactgcctctctccggtgccctctccct

SEQ ID NO: 248786 - DNA, 35 bp, Homo sapiens; identical to SEQ ID NO: 207100
  chr1:109801647-109801682
  hypo

SEQ ID NO: 248787 - DNA, 113 bp, Homo sapiens; identical to SEQ ID NO: 207101
  chr1:109805486-109805599
  hypo

SEQ ID NO: 248788 - DNA, 31 bp, Homo sapiens
  chr1:109805822-109805853
  hypo
gtgaaccagtgggacgcgttcagctgcgagt

SEQ ID NO: 248789 - DNA, 67 bp, Homo sapiens; identical to SEQ ID NO: 207102
  chr1:109812120-109812187
  hypo

SEQ ID NO: 248790 - DNA, 262 bp, Homo sapiens; identical to SEQ ID NO: 207103
  chr1:109816071-109816333
  hypo

SEQ ID NO: 248791 - DNA, 296 bp, Homo sapiens
  chr1:109839444-109839740
  hypo
tgtttcactgagtccgcactggttttcagcaaagacacggaaggcataggagttgccgatgatgaggtcagagacgatgcagctggtgcggtgatagtgctccagcaccgtgaaccacagctgcggggccgaacatgatgccagaaatcagccaccccatgtggagctaccagaggcctgtcccaacatgccctcttccaccctccttccttcccagctggcctcaccccggattttgtgtcagccttctgcaccgtgtatcccagaagtgctgtattccccgtatcttggggcgg

SEQ ID NO: 248792 - DNA, 78 bp, Homo sapiens; identical to SEQ ID NO: 207105
  chr1:110042271-110042349
  hypo

SEQ ID NO: 248793 - DNA, 260 bp, Homo sapiens
  chr1:110073072-110073332
  hypo
tctccacttcatggcgcagctaatggcctggaaaaaactggccagctgttccccagctgtgacataatgagctcagggacgatcaatgccgttccggtctctaattaggccagggagctggctgcagcgagagtgcggcctgtttcttgagggcaccacttctactccagtccccagctgctgtctgttggcagccacctgggcccatgcatctacgtaccagaggagcagacagggccctccagcggcccttgggaggg

SEQ ID NO: 248794 - DNA, 170 bp, Homo sapiens; identical to SEQ ID NO: 207107
  chr1:110085339-110085509
  hypo

SEQ ID NO: 248795 - DNA, 44 bp, Homo sapiens; identical to SEQ ID NO: 207108
  chr1:110085848-110085892
  hypo

SEQ ID NO: 248796 - DNA, 102 bp, Homo sapiens; identical to SEQ ID NO: 207109
  chr1:110167962-110168064
  hypo

SEQ ID NO: 248797 - DNA, 270 bp, Homo sapiens; identical to SEQ ID NO: 207110
  chr1:110170706-110170976
  hypo

SEQ ID NO: 248798 - DNA, 37 bp, Homo sapiens
  chr1:110196412-110196449
  hypo
agaagtgcccaggcgcgttggctcacgcctgtaatcc

SEQ ID NO: 248799 - DNA, 156 bp, Homo sapiens
  chr1:110305360-110305516
  hypo
aggactctgaggctcaaagacggtaacaggcctgaggtcacaaatgaacgtttaatagagagcaacccagatctgtccgattgcaagcttcgtgttttaatggtttataaacatgcctctgccgctgggctgtgcgcagtcacagagggagtctag

SEQ ID NO: 248800 - DNA, 37 bp, Homo sapiens; identical to SEQ ID NO: 207111
  chr1:110338324-110338361
  hypo

SEQ ID NO: 248801 - DNA, 151 bp, Homo sapiens
  chr1:110471934-110472085
  hypo
agagagaggagcctgaagttcgtggggcgggacagcgtcggcctgatttcccgtaaaggtgtgcagcctgagagacgggaagaggaggcctctggacctgctggtctgcactgacagcctgaagggtctacaccctcggctcacctaagtg

SEQ ID NO: 248802 - DNA, 189 bp, Homo sapiens
  chr1:110561015-110561204
  hypo
gggagcacttggatcgcatgaaaaacagttgtatcgtatgcaatatgggccactccaacacagaaatcgatgtggtaaggcttctctcatttgttgctaggcatttctctactacctttcattaataaccatagtcaactgtgctttcttcctttcagaccagcctccgcactccggagctgacgtggg

SEQ ID NO: 248803 - DNA, 94 bp, Homo sapiens
  chr1:110726680-110726774
  hypo
aagcacgctgtttccgacgatcagtgaggcaattatacaagcctgttttttctgtttttgttggttttttttgacggagtctcgctctgttgcc

SEQ ID NO: 248804 - DNA, 37 bp, Homo sapiens
  chr1:110737245-110737282
  hypo
atgacgcacttccccgcctccccgttctggtccgtca

SEQ ID NO: 248805 - DNA, 290 bp, Homo sapiens
  chr1:110737984-110738274
  hypo
aaagttagacacaacgccttcctcaggtgctccccgactagtagagcggggctcagaacctgagcatctggatccctcgtgcaggactgagcctgctggcaggagggctgcaggcatgctttggggagggatgtgatgggaggggcctgggtgcccccgagacccccagggccctgcccaccctgcacctttgcccccaaaccggcctcccggctctctgtagtgggctgctgtgtctttgcattcctcgtggggctgttgttcgtccagcgctccggaaactactttgt

SEQ ID NO: 248806 - DNA, 107 bp, Homo sapiens
  chr1:110765710-110765817
  hypo
cgtgcacttccggcgggaggtagagacagagcccatcctgacctacatcgagggcgtatgtgtgctgtggttcacactggagttcctggtgcgcatcgtgtgctgcc

SEQ ID NO: 248807 - DNA, 177 bp, Homo sapiens
  chr1:110771215-110771392
  hypo
gtctccactggcatcgcgttacagcttgccctaccctctgaaaaagttcctgctcacccccttccaccccctcaccggcccaccccctggtcactctgccccttagctgcaccttcccctctgggcacacgcgcacaaacaggcacccttccatgccctcagcgctcactccccagg

SEQ ID NO: 248808 - DNA, 265 bp, Homo sapiens
  chr1:110771991-110772256
  hypo
gcgggctgcctaggcgagggaggcccttccctcaggaagcctctgcccagattcagtggtgactcccactggcggcacctggtgtcccttctgcgccccgagctgcagcatcgctctccacgctgcttcctctgcttctgcgacagttcttcttccctctccctctccctcaaactcccagccctgcctctgagtcacctgccattcccacccagcctctgcgctctgtattcctgccagaaccggagactcatctaatttctat

SEQ ID NO: 248809 - DNA, 734 bp, Homo sapiens
  chr1:110883456-110884190
  hypo
gatttggcaccatacgcaccatagactaccgaaaaggtgatagttgggcatatatccagtatgaaagcctggatgcagcgcatgctgcctggacccatatgcggggcttcccacttggtggcccagatcgacgccttagagtagactttgccgacaccgaacatcgttaccagcagcagtatctgcagcctctgcccttgactcattatgagctggtgacagatgcttttggacatcgggcaccagaccctttgaggggtgctcgggataggacaccacccttactatacagagatcgtgatagggacctttatcctgactctgattgggtgccacccccacccccagtccgagaacgcagcactcggactgcagctacttctgtgcctgcttacgagccactggatagcctagatcgcaggcgggatggttggtccttggaccgggacagaggtgatcgagatctgcccagcagcagagaccagcctaggaagcgaaggctgcctgaggagagtggaggacgtcatctggataggtctcctgagagtgaccgcccacgaaaacgtcactgcgctccttctcctgaccgcagtccagaattgagcagtagccgggatcgttacaacagcgacaatgatcgatcttcccgtcttctcttggaaaggccctctccaatcagagacagacgaggtagtttggagaagagccagggtgacaagcgagaccgtaaaaac

SEQ ID NO: 248810 - DNA, 33 bp, Homo sapiens; identical to SEQ ID NO: 207116
  chr1:110947365-110947398
  hypo

SEQ ID NO: 248811 - DNA, 120 bp, Homo sapiens; identical to SEQ ID NO: 207117
  chr1:110947698-110947818
  hypo

SEQ ID NO: 248812 - DNA, 32 bp, Homo sapiens
  chr1:111001561-111001593
  hypo
agagagagagggggccgggcgcggtggctcac

SEQ ID NO: 248813 - DNA, 151 bp, Homo sapiens; identical to SEQ ID NO: 207118
  chr1:111022638-111022789
  hypo

SEQ ID NO: 248814 - DNA, 39 bp, Homo sapiens
  chr1:111204441-111204480
  hypo
aatgtcagccgggcgcggtggctcacgcctataatccca

SEQ ID NO: 248815 - DNA, 227 bp, Homo sapiens
  chr1:111216247-111216474
  hypo
atggacgccttcagcgtttgcccgaggatctgcagccccttggagtggcgcgacagcttgaagatgcggaagacccttaccaggcggatgaccctcaggatggccagagacatggcctgctgtccattgccctgtcgttcggccagctcggtacccagagtgataaaataaggaatgatggccacaatgtcgatcaggttcatgatgtttcgcgagaaggtggcttt

SEQ ID NO: 248816 - DNA, 99 bp, Homo sapiens
  chr1:111296098-111296197
  hypo
caacttctgcctcccgcatgcaagtgcctgcaccagcctctgtcgccaggccgcagtgcagtggtgcgatcttcactacaacctccgccttccgggctc

SEQ ID NO: 248817 - DNA, 159 bp, Homo sapiens
  chr1:111496808-111496967
  hypo
acctttctgcagcccgaataacattattatatccttacaaaaatttaaaagtcttttggacacgtgagagtgggtcaaaatattacattgacattttgttattgttgctgttgagacagggcccggctctgtcatccagactggagtgtaggtgtacaa

SEQ ID NO: 248818 - DNA, 162 bp, Homo sapiens
  chr1:112084792-112084954
  hypo
ataatcctttgaaggaagatcgtttagaccagcttaatgaaacagacatccttcgcgtactgacggaaacactggcggcacatattgaggccgtatttcaggatcagacctgccggttcgaacacacgcgacaagagcaaagaagttaaaagagaagtgtct

SEQ ID NO: 248819 - DNA, 34 bp, Homo sapiens
  chr1:112151467-112151501
  hypo
cagcagtacagtccagcttcggctcggcatcggg

SEQ ID NO: 248820 - DNA, 76 bp, Homo sapiens
  chr1:112288929-112289005
  hypo
ccaagaaatgctgccgccgcttaacaagtgaagatgcatactggagaataggaactgaacacgcgaaggagtttcg

SEQ ID NO: 248821 - DNA, 172 bp, Homo sapiens; identical to SEQ ID NO: 207121
  chr1:112317425-112317597
  hypo

SEQ ID NO: 248822 - DNA, 1035 bp, Homo sapiens; identical to SEQ ID NO: 207122
  chr1:112524370-112525405
  hypo

SEQ ID NO: 248823 - DNA, 161 bp, Homo sapiens
  chr1:113059791-113059952
  hypo
gttcctgtactctgcgcacctgctggcgtgcactctcagatttccgccgcacaggtgattacctgcggcgacgctatgatggggctgtgcaggtgatggccacccaagatggtgccaacttcaccgcagcccgccaaggctatcgccgtgccacccggact

SEQ ID NO: 248824 - DNA, 150 bp, Homo sapiens
  chr1:113067109-113067259
  hypo
gacacagagttctccgtaagcaatcctgcagagccgccccctgggtgcagaaatgaaatacgggagagcttcacattacacagagacctgtagctcacacctggttattgatggccttggtggaggcctctgccccgaccctccacttgg

SEQ ID NO: 248825 - DNA, 197 bp, Homo sapiens
  chr1:113185130-113185327
  hypo
ctggccgaccaccctctttttaatgtaggtatacagagttgattgcatcttcctttgtgcctcactctgcatttattacctgcttgctacattactatctaggcatcaggtccttgagggtagtgacaatgtcttatccagtcttcggtctttatttattgatacttctcttcctagtttgccgaatgggtgaatta

SEQ ID NO: 248826 - DNA, 117 bp, Homo sapiens
  chr1:113230414-113230531
  hypo
tacgaggtaagtctcgctttcctccaattttatagaggaggaaagcgaggctctgagaggtgaggtcaactgagctgacctggctagagttgtcaagtgggccgcccccctctgccc

SEQ ID NO: 248827 - DNA, 205 bp, Homo sapiens; identical to SEQ ID NO: 207124
  chr1:113244294-113244499
  hypo

SEQ ID NO: 248828 - DNA, 155 bp, Homo sapiens; identical to SEQ ID NO: 207126
  chr1:113290951-113291106
  hypo

SEQ ID NO: 248829 - DNA, 91 bp, Homo sapiens
  chr1:113412275-113412366
  hypo
gagatgtttttcagaactaacgccaatgagtccaaagaccacaccaaggaaccaagtcggtctgagaatgcagtttcttcagctgggcgcg

SEQ ID NO: 248830 - DNA, 35 bp, Homo sapiens
  chr1:113442040-113442075
  hypo
aactccatcctcccggccaaaaccaagcttcttaa

SEQ ID NO: 248831 - DNA, 154 bp, Homo sapiens
  chr1:113465948-113466102
  hypo
atccctaaagccacgcggccgccaactccagggagctgatgcttccaaccactgcacgttgctcccgggctgtcgcagtctcctgttgccgccatcatgtcccggccctccacggtgttgggtgccatggagatggggcgccgtagtcacccgc

SEQ ID NO: 248832 - DNA, 76 bp, Homo sapiens
  chr1:113630283-113630359
  hypo
attttagtcttctgtcttttgggaggtacttttaaaaaaagaaataggaaaggcatgcttacggggaacacgagta

SEQ ID NO: 248833 - DNA, 41 bp, Homo sapiens
  chr1:114246758-114246799
  hypo
ccacatcaactgaacgctgtggcccccgtctctgtggagtg

SEQ ID NO: 248834 - DNA, 34 bp, Homo sapiens
  chr1:114355897-114355931
  hypo
gtatttatttagagacgggcggggcggggctcgg

SEQ ID NO: 248835 - DNA, 34 bp, Homo sapiens
  chr1:114435047-114435081
  hypo
gttcaggcgaggcacggtagctcatgcctgtaat

SEQ ID NO: 248836 - DNA, 136 bp, Homo sapiens; identical to SEQ ID NO: 207130
  chr1:114522549-114522685
  hypo

SEQ ID NO: 248837 - DNA, 340 bp, Homo sapiens
  chr1:114522990-114523330
  hypo
atgctgctgagctgcgggacttcaagaacaagatgctgccactgctggaggtggcagagaaggagcgggaggcactcagaactgaggccgacaccatctccgggagagtggatcgtctggagcgggaggtagactatctggagacccagaacccagctctgccctgtgtagagtttgatgagaaggtgactggaggccctgggaccaaaggcaagggaagaaggaatgagaagtacgatatggtgacaggtaaataatctgaaagcaggcccctaactcttctcagaaccgatattcttccttccttgcttcttactctttttttcgctttgtcccagtc

SEQ ID NO: 248838 - DNA, 38 bp, Homo sapiens
  chr1:115184837-115184875
  hypo
ctaggattacaggtgtgagccaccgcgcccagctaata

SEQ ID NO: 248839 - DNA, 80 bp, Homo sapiens
  chr1:115261262-115261342
  hypo
gaagaaccattaggcgaggagcactggcatcatccagagtgatattcttcaagcgattgaccaaccgatcaggtcgagga

SEQ ID NO: 248840 - DNA, 279 bp, Homo sapiens
  chr1:115829155-115829434
  hypo
cacacggggtgaacggagtcgccgctttttaaacagcctggggtccacagtaatgttgcgggtctgccccgccacgcgtgcagctatcgccgctgccggggcgctgcgggctctgcgaagggcagtgtcaagggaatgctgaagtttagtccagtgggcttgggggatggtgtgtcctgcagggacattgctctctgagtgtggttccgcctgtatgccgatcagaaaagctgtgatcagagtgtagaacaacatggacattacgctatgcacctggaa

SEQ ID NO: 248841 - DNA, 457 bp, Homo sapiens
  chr1:116213986-116214443
  hypo
cctggctgcaaagccgccactcaactctgctccagcccaggtttcggggagccgggatccacttgggcaggccgggagcctcagactccagacttttcatggtgcgctccttcctgcttactcaggaggaaggcgaggcagtccagcatcctgggtggagtggaggtgtttcgagtccatatctaaatctttttcttagagcaccctaagcaggctgctgtctttgatccccatgcctctgctgtttatcttggtgtgattcatcactgtaatttaagacgtggagagagcaaagttcccatcccaggcaggggaggcgcagtgcaggttggactgtgtaaggaaatggcagcatggcgaggtttgtgccgcggcctacaagcagggctgcatgctccccaggcagactgtggcagagccaagcccctcacttgtagggaagcgtgtctcctaggtg

SEQ ID NO: 248842 - DNA, 112 bp, Homo sapiens
  chr1:116214943-116215055
  hypo
ccaaaagccaggtacgctttccagccttccgatattggttcaaagaatttggctgccgaagcttttgtgtagctgaggcaccagcaggcccgaggcacgagtgaatccaggt

SEQ ID NO: 248843 - DNA, 159 bp, Homo sapiens
  chr1:116219341-116219500
  hypo
agacttaacctgccttagggcgatgccgacctcagccagcacctggtatacttggatctcgcaggctgctgctggaggttccgagtagctgcctgtaccaggcctgccccagtcaattcattagcctttcagtaagacgttttatgccactgagtattt

SEQ ID NO: 248844 - DNA, 36 bp, Homo sapiens; identical to SEQ ID NO: 207135
  chr1:116224397-116224433
  hypo

SEQ ID NO: 248845 - DNA, 156 bp, Homo sapiens
  chr1:116225057-116225213
  hypo
acagcctccaaattccgagcagccaagcatatggccgggctgaaagtctacaatgtagatggtatgtgccttgaaagggtgtccgtggtgctcacaggggcacagttgggtgactatttaagattcatggtacgtttggttcgacttcttctctgg

SEQ ID NO: 248846 - DNA, 100 bp, Homo sapiens; identical to SEQ ID NO: 207136
  chr1:116226508-116226608
  hypo

SEQ ID NO: 248847 - DNA, 132 bp, Homo sapiens
  chr1:116233750-116233882
  hypo
acggtacctcagtgcgggccccaccctgcaatatgacaaggaccgctggctctctacacagtggaggcttgtcagtgatgaggctgtgactaatggattacgggatggaattgtgttcgtccttaagtgctt

SEQ ID NO: 248848 - DNA, 186 bp, Homo sapiens
  chr1:116295788-116295974
  hypo
tgctgatctagggctcgggggagaggtcctgcgtgagaggtcaaggcttgaggacaggtgacatctttgggagacgagtatgaaagaaagccacagggtcaagggctggctgtctcagaaggaagagaaagaagcctaccctggaggcagagcggagctatgggagaagtgcggggagagaaagga

SEQ ID NO: 248849 - DNA, 285 bp, Homo sapiens
  chr1:116573985-116574270
  hypo
gattcattcctgaatcacctcgttggttatactcccagggtcgactgagtgaggctgaagaggcgctgtacctcattgccaagaggaaccgcaaactcaagtgcacgttctcactaacacacccagccaacaggagctgcagggagactggaagtttcctggatctctttcgttaccgggtcctgttaggacacactttgatcctgatgttcatctggtaattatactaaggcgtgttctgttgctctttaactaaggttgctcgagcttctcttgatatcctgc

SEQ ID NO: 248850 - DNA, 51 bp, Homo sapiens
  chr1:116840629-116840680
  hypo
agcagggggtggggccggtcggggaggctggggctgcgtgggaacttgggg

SEQ ID NO: 248851 - DNA, 143 bp, Homo sapiens
  chr1:116935455-116935598
  hypo
gatgatgtctctgttcacagcgggcagttgcaggagatgcctctgagtcagcactcttaaagtgcatagagctgtgctgtggttccgtgaaggagatgagagaaagatacgccaaaatcgtcgagatacccttcaactccacc

SEQ ID NO: 248852 - DNA, 56 bp, Homo sapiens
  chr1:116952565-116952621
  hypo
cagatctgcttcccaggctgcggctgtctgcgtacggggatgtgtcccttgcctcc

SEQ ID NO: 248853 - DNA, 61 bp, Homo sapiens
  chr1:117060147-117060208
  hypo
actgaccacagcaaccgactccacaaaaccaaaggtcttaacccctcgcctacctccttgt

SEQ ID NO: 248854 - DNA, 203 bp, Homo sapiens; identical to SEQ ID NO: 207137
  chr1:117076615-117076818
  hypo

SEQ ID NO: 248855 - DNA, 160 bp, Homo sapiens; identical to SEQ ID NO: 207138
  chr1:117077074-117077234
  hypo

SEQ ID NO: 248856 - DNA, 76 bp, Homo sapiens
  chr1:117127238-117127314
  hypo
gtggaagcttggggacgtggaccctcacctggtcgcatgactgtcagagctgtctgcccagcggtgtcctctgccc

SEQ ID NO: 248857 - DNA, 171 bp, Homo sapiens; identical to SEQ ID NO: 207139
  chr1:117131423-117131594
  hypo

SEQ ID NO: 248858 - DNA, 34 bp, Homo sapiens; identical to SEQ ID NO: 207140
  chr1:117157580-117157614
  hypo

SEQ ID NO: 248859 - DNA, 37 bp, Homo sapiens
  chr1:117250043-117250080
  hypo
tgggattgcaggcatgagccaccgtacttggcctaac

SEQ ID NO: 248860 - DNA, 73 bp, Homo sapiens; identical to SEQ ID NO: 207142
  chr1:117297901-117297974
  hypo

SEQ ID NO: 248861 - DNA, 96 bp, Homo sapiens
  chr1:117450853-117450949
  hypo
atttttttttagagacggtgtctcacaatgttgcccgagtggtctcaaacttctagcctcaaataaaaaaaaaaaagaaagaaaaaagaaaaagaa

SEQ ID NO: 248862 - DNA, 35 bp, Homo sapiens; identical to SEQ ID NO: 207143
  chr1:117451189-117451224
  hypo

SEQ ID NO: 248863 - DNA, 49 bp, Homo sapiens
  chr1:117490699-117490748
  hypo
cttactggggccagcgccatgccgttgatgccagcgacttgctagaagg

SEQ ID NO: 248864 - DNA, 69 bp, Homo sapiens; identical to SEQ ID NO: 207144
  chr1:117503897-117503966
  hypo

SEQ ID NO: 248865 - DNA, 75 bp, Homo sapiens
  chr1:117527381-117527456
  hypo
gatcggaagggcatcgtgaccacctcccggagggactggaagagcgacctcagcctggagcgcgtgagtgtgctg

SEQ ID NO: 248866 - DNA, 226 bp, Homo sapiens
  chr1:117529538-117529764
  hypo
caggagacacggcgcgagcgccgcaggctcatgtcgatggagatggactaggctggcccgggaggggagtgacagagggacgttctaggagcaattggggcaagaagaggacagtgatattttaaaacaaagtgtgttacactaaaaaccagtcctctctaatctcaggtgggacttggcgctctctcttttctgcatgtcaagttctgagcgcggacatgtttac

SEQ ID NO: 248867 - DNA, 42 bp, Homo sapiens
  chr1:117560924-117560966
  hypo
acatcttccaccagcttattcgaatcacccacaatggcacta

SEQ ID NO: 248868 - DNA, 219 bp, Homo sapiens
  chr1:117630359-117630578
  hypo
ccctccgaatgaaacgctttgcctccactccttctcccaggttaatttttttaaacctgcttcaagaatcttttctggaccactcccttcccaccttcccccggtttggttgaatgcctctgccagcaccttgtgcttacataagttatagcactttgtttcttcagcagacgttgagtatccactatgggtcaggtgctgtttcgtcaagagcagcca

SEQ ID NO: 248869 - DNA, 113 bp, Homo sapiens
  chr1:117665255-117665368
  hypo
acggagggctcctgcctggtcacagtgagacaatggacggtggcaatgagggacaagccctttgtgggcttaaaactaattgggaagatgaacacgtccgacccctttaactt

SEQ ID NO: 248870 - DNA, 166 bp, Homo sapiens
  chr1:117918952-117919118
  hypo
caggcatacagctccgcttattatgtaaccatgtcatgtgaggcgcattaggtgatcacccatgtgagtgtgtgcttggcttggagccactatggtctgtgaaaggtctaattaccctgctaacgtggtacaaaaggctcgcgccaaggctcgctcacgcccagag

SEQ ID NO: 248871 - DNA, 169 bp, Homo sapiens
  chr1:118083728-118083897
  hypo
tgtgcaggaccagcttttttcggcactgtccacagcacagtccctgaagacgtcaggactgagaagaaaactggagactgctggaagcctcccaaagacatgtcaggcagggatgttctcctgaaagggcacccgtgtgacgcaatccgcagttccctctgggcattca

SEQ ID NO: 248872 - DNA, 52 bp, Homo sapiens
  chr1:118114932-118114984
  hypo
tggtggatccggaccgattctagtcagtctgactctacgggccacataccca

SEQ ID NO: 248873 - DNA, 151 bp, Homo sapiens; identical to SEQ ID NO: 207145
  chr1:118147372-118147523
  hypo

SEQ ID NO: 248874 - DNA, 80 bp, Homo sapiens; identical to SEQ ID NO: 207146
  chr1:118163137-118163217
  hypo

SEQ ID NO: 248875 - DNA, 233 bp, Homo sapiens; identical to SEQ ID NO: 207147
  chr1:118163673-118163906
  hypo

SEQ ID NO: 248876 - DNA, 228 bp, Homo sapiens; identical to SEQ ID NO: 207148
  chr1:118166362-118166590
  hypo

SEQ ID NO: 248877 - DNA, 150 bp, Homo sapiens; identical to SEQ ID NO: 207149
  chr1:118172978-118173128
  hypo

SEQ ID NO: 248878 - DNA, 336 bp, Homo sapiens
  chr1:118173564-118173900
  hypo
gtttctgtcagtgccgcccagaatctagggagctggagcctgtcgggaggcttggtttcataccattcctcacccagctcagagcaacgcaggctacctgttctggccatgactggatcacaggtctcccagctcagggcattttcaccacagcaggccatcccagggccaccttttacttaggaagtttccgaaaatgggaaatgtccctaagggaaaggcatgagaagctggagtcgctgcctttctttcgggtgcttccctggaaaaaaggtatccgaggctatagtgttcgagagagagagagatggagacgggcagcaccacagcaacttt

SEQ ID NO: 248879 - DNA, 177 bp, Homo sapiens
  chr1:118198080-118198257
  hypo
tctcaaaacatatacacacacgcgcacacgcgtgcacacacacacgcacacacacacacacttgatgtggattgtgggaccagagcattcaggactttacagctctaaaggaccttcgagctcattgagctcttgaccaccttaatgtcaagaatcgcccaaagtacccatttaaaa

SEQ ID NO: 248880 - DNA, 92 bp, Homo sapiens
  chr1:118223360-118223452
  hypo
gaaggaggtggtttcgctgaaagatgattgcctctcataaaatgacggccatagttcaagttcttcagcatccagctcgccacatactatgt

SEQ ID NO: 248881 - DNA, 170 bp, Homo sapiens; identical to SEQ ID NO: 207152
  chr1:120166012-120166182
  hypo

SEQ ID NO: 248882 - DNA, 39 bp, Homo sapiens; identical to SEQ ID NO: 207153
  chr1:120166427-120166466
  hypo

SEQ ID NO: 248883 - DNA, 153 bp, Homo sapiens
  chr1:120321239-120321392
  hypo
aagtgctttgttcaagtgcacgtagctggttaagtggtggtgccagggactccggactcctactctcgtgaaaactcttgtgcctgaaaattattgtaaaatatctggaattattattattatttatttttattttttgagacggagtctcgc

SEQ ID NO: 248884 - DNA, 32 bp, Homo sapiens
  chr1:120321632-120321664
  hypo
acaggcgagagccaccgcgcccggcctggaat

SEQ ID NO: 248885 - DNA, 34 bp, Homo sapiens; identical to SEQ ID NO: 207154
  chr1:150283344-150283378
  hypo

SEQ ID NO: 248886 - DNA, 186 bp, Homo sapiens
  chr1:150484152-150484338
  hypo
agaacatctgccacctgaggcgcttccgctctgtgccacgcaacctgccagctactgaccccctacaaagggagctgctggcactgatccagctggagagggagttccagcgctgctgccgccaggggaacaatcacacctgtacatggaaggccgtaagtgggcgtcccagcctccctgagagcc

SEQ ID NO: 248887 - DNA, 95 bp, Homo sapiens
  chr1:150502358-150502453
  hypo
caccgcgcccagcctgtgaatttcttaaagtatgcaaaatgcggtgtgtctgtgtgtgtgcatttttctggggcgagtatctgtagcttacatca

SEQ ID NO: 248888 - DNA, 76 bp, Homo sapiens
  chr1:150504349-150504425
  hypo
cccactcctctgcctgccttcgaagctccgtcaaaatgcaagtgcagatggctgacacccttgctctgtcgcccag

SEQ ID NO: 248889 - DNA, 34 bp, Homo sapiens
  chr1:150519104-150519138
  hypo
aggcatgagccaccgcgcccggcccaattcctac

SEQ ID NO: 248890 - DNA, 39 bp, Homo sapiens
  chr1:150519664-150519703
  hypo
gtaaaaatataggccgggagcagtggctcatgtctgtaa

SEQ ID NO: 248891 - DNA, 120 bp, Homo sapiens
  chr1:150520494-150520614
  hypo
gagtgaaactccatctcaaaaaaaaaaagaaaaaaaaaagataaaactaatagatggattgctcttgtggttaaaaaaattcacaaaaataacattacatagctgggtgcggtggctcac

SEQ ID NO: 248892 - DNA, 110 bp, Homo sapiens; identical to SEQ ID NO: 207155
  chr1:150529747-150529857
  hypo

SEQ ID NO: 248893 - DNA, 180 bp, Homo sapiens
  chr1:150565322-150565502
  hypo
agccaccgcacctggcctggtttaccctttcattgacagtggagcctgtgcccactgcattaaagttgaagctctgtcactggcgatttggcagattcccctagagctgtcgccaattccagccatatgtgtcttgaattcatgctttttgctttttatattcaagctggtggttttagg

SEQ ID NO: 248894 - DNA, 87 bp, Homo sapiens; identical to SEQ ID NO: 207156
  chr1:150579404-150579491
  hypo

SEQ ID NO: 248895 - DNA, 43 bp, Homo sapiens; identical to SEQ ID NO: 207157
  chr1:150581803-150581846
  hypo

SEQ ID NO: 248896 - DNA, 89 bp, Homo sapiens
  chr1:150603043-150603132
  hypo
taacatttcctgggcgtctgtctgtatgtggatggtactgtgttagttggggggggtacgtgtatagtaaggcagtctctgcccttaga

SEQ ID NO: 248897 - DNA, 138 bp, Homo sapiens; identical to SEQ ID NO: 207158
  chr1:150633720-150633858
  hypo

SEQ ID NO: 248898 - DNA, 38 bp, Homo sapiens; identical to SEQ ID NO: 207159
  chr1:150643983-150644021
  hypo

SEQ ID NO: 248899 - DNA, 34 bp, Homo sapiens
  chr1:150722022-150722056
  hypo
gcctcgcctcaccccgccccgcctcaccccgccc

SEQ ID NO: 248900 - DNA, 136 bp, Homo sapiens
  chr1:150722391-150722527
  hypo
agctagaattacaggcatgaaccaccgtgctcagccaatatcctttctttctttctttaaattctaattattgtttattttattttttaccacttctgtagaggaagaaagaaggatgacgcgcatctacaccaac

SEQ ID NO: 248901 - DNA, 41 bp, Homo sapiens
  chr1:150748731-150748772
  hypo
ttacagatctgagccactgcgcccagcctatttattgtttt

SEQ ID NO: 248902 - DNA, 120 bp, Homo sapiens
  chr1:150850362-150850482
  hypo
actgttgggattacaggcgtgagccaccacacctggccagtgaggagtttttaatagggaatcaataagatgatggctgtgcagatttattttcttttttctttatttttttctgagacg

SEQ ID NO: 248903 - DNA, 37 bp, Homo sapiens
  chr1:150858612-150858649
  hypo
ggattacaagcgtgagccaccgcgcccggcctgactt

SEQ ID NO: 248904 - DNA, 77 bp, Homo sapiens
  chr1:150889716-150889793
  hypo
ctgaagtgctgggattacaggcgtgagcccggcctagcttttttttttttaaacacggttaaagagtattctattgt

SEQ ID NO: 248905 - DNA, 42 bp, Homo sapiens
  chr1:150890073-150890115
  hypo
atcgcagggctggccgggtgccgtggctcacacctgtaatat

SEQ ID NO: 248906 - DNA, 66 bp, Homo sapiens
  chr1:150935072-150935138
  hypo
agctctcgaaattacggttacaatccttctcctgtgaagcctgaaggacttcgccgcccacctagt

SEQ ID NO: 248907 - DNA, 402 bp, Homo sapiens
  chr1:150941388-150941790
  hypo
cttacagctcaaagaagtatcgaacgatgaggaagagcaaggccaggggcagcgtgatatagagatctgaggctttggcgtagacacgtccatctcggtcttctagatcggcccaggtcaagttcacaggcagccacagacgttcccaccagaagtaatcatacaaggtctggagcatcctgagtgaggggcaaaggggagggcatcaagagggagtagctatggaggaagagatagatgaataaaagttttcaggatgtatcaaaaggagaagggggcagagagtcgaactctagatccctatcctggctatgtagccttgggcaaatcagtttcctcatctgtaatacggtggctttccagttttaacatttactgttaggccggccgtgatggctcatg

SEQ ID NO: 248908 - DNA, 37 bp, Homo sapiens; identical to SEQ ID NO: 207162
  chr1:151019715-151019752
  hypo

SEQ ID NO: 248909 - DNA, 31 bp, Homo sapiens; identical to SEQ ID NO: 207163
  chr1:151098357-151098388
  hypo

SEQ ID NO: 248910 - DNA, 317 bp, Homo sapiens
  chr1:151105803-151106120
  hypo
gagagagggcgcgggagccccggagtctcgatgtccttgccccgacgtcggtgggcgcggcgacaagcacaggagaccaggaggccagagactgaggcgcccagggcaaaagctgcggccacactggccaggaggagtgggatggggacggagcgggaggccgaggctgggggcaggtcccggcgcacgcctgccgaccgagagggaggagggaggctcagccaaggggaggcggtgcggggtacctaggcccagaggcgccggcagttcccaggcctgacatcatcgtccctcccgctgctactcagcctcactcc

SEQ ID NO: 248911 - DNA, 99 bp, Homo sapiens
  chr1:151146165-151146264
  hypo
ctccaggaggtagaatgctgcgtcacgaagggacactggaaagcctgagtcctctacaaactcaagagtccttagccccctgatctctcaagaactgaa

SEQ ID NO: 248912 - DNA, 64 bp, Homo sapiens; identical to SEQ ID NO: 207164
  chr1:151148217-151148281
  hypo

SEQ ID NO: 248913 - DNA, 120 bp, Homo sapiens
  chr1:151169638-151169758
  hypo
gcatggggatattctatggatgttcgggtcctaggttactttatgaggacccacaagacatctggaaagaggataaccaggtcattctgggggttacaaaacctgttttttttgtttgtt

SEQ ID NO: 248914 - DNA, 148 bp, Homo sapiens
  chr1:151170058-151170206
  hypo
aacctgttttaatggagttatttcatgggccatgagtttgagaggatctatctgaccgactcttaccccgaatgttttaccattcctctttatttattcattccacagataattatggagcccctactatgtacgaagtcactggagg

SEQ ID NO: 248915 - DNA, 36 bp, Homo sapiens
  chr1:151173584-151173620
  hypo
taggcgtgagccaccgtgccccacctgggtttttat

SEQ ID NO: 248916 - DNA, 35 bp, Homo sapiens
  chr1:151231642-151231677
  hypo
tgcgcttgaacctgtgcctgcgcttgaacctgtgc

SEQ ID NO: 248917 - DNA, 266 bp, Homo sapiens
  chr1:151252542-151252808
  hypo
caggtgggtattataatccccgttttactcatgagaaaacaggatctgggaggttgagcgacttgcccattgcgaccatagggcaagtggtggctccaggattcccatccagaagttctgattcatacttcaaaggagctcggaaactctccgggtgcgccggggagtcctggttccggtgtcctgggactcctgggcagggtaacgaaaccacttttaaaaactttgccgggcccggtgggtcacatctgtaatcccagcacttt

SEQ ID NO: 248918 - DNA, 56 bp, Homo sapiens
  chr1:151293165-151293221
  hypo
ccctgccacaccttcgtagggcactctcatcagagggtcaccgattcaacggggac

SEQ ID NO: 248919 - DNA, 32 bp, Homo sapiens
  chr1:151322965-151322997
  hypo
gttcttttttttttcgagacggattcttgctc

SEQ ID NO: 248920 - DNA, 31 bp, Homo sapiens
  chr1:151323237-151323268
  hypo
caggcgtgagctaccgcgtgcggcctcagat

SEQ ID NO: 248921 - DNA, 242 bp, Homo sapiens
  chr1:151338720-151338962
  hypo
gggaggggagggccagagggcgtatgtcacctcgttcttgtagaagcgctggatggtggagctgagtgcgcagcccacaaagccttgggcagcgtctgggttgtgcaggaagcggatctccaagggaataagcccatcttttagagacagggtctgcacaatctcatggcgctgccagtcccatacatataagtggctcccgtacagtcctggggtgggagtggggccggaggataggctca

SEQ ID NO: 248922 - DNA, 169 bp, Homo sapiens; identical to SEQ ID NO: 207168
  chr1:151339197-151339366
  hypo

SEQ ID NO: 248923 - DNA, 390 bp, Homo sapiens
  chr1:151345676-151346066
  hypo
accagctcgtgctctttagtgggtgcctgggtgtgtgtggatttgtgtgtctgggcatgtgtgtgttcctgtatacctgcgtgttgctcgtgcacgtgcctgcatgagtgtgtatctgtgcctgtgtgtgaatttccacgtgtgtgaatgtgcctgtgagtgtgcttgtgtgtatttgtgcgtgtgtgtgtgtgcgcgcctctgtatgtgcctaccagagtatctacgcctgtgtgtgtgtgtgtgtgtgtgtgcgcgcctctgtgagtatgtgcttgctagagtatctacgcctgtgtggacatgtgcataagtgcttgtgtatgtgtagtgtgtggctatgtggctgtgcatgtgcttgtgtaagcctgcgcacgtatgtgttcctgt

SEQ ID NO: 248924 - DNA, 177 bp, Homo sapiens
  chr1:151356360-151356537
  hypo
ctaggtttggatttgcgttctctgacccgatactgccaccaccaccatctatagacatcctggatgtctcatacactatcacagtgccccacactgagttaccacttctgacaaagggtctcactgtacagtgaaagacgggtaatgatacccagcgtgtgacgagtcctgcaagtg

SEQ ID NO: 248925 - DNA, 77 bp, Homo sapiens
  chr1:151373754-151373831
  hypo
gccagaccgaggcccgcgacttagtagaacgctgcatgcgagtgctgtactaccgagatgcccgttcttacaaccgg

SEQ ID NO: 248926 - DNA, 284 bp, Homo sapiens; identical to SEQ ID NO: 207169
  chr1:151378239-151378523
  hypo

SEQ ID NO: 248927 - DNA, 34 bp, Homo sapiens
  chr1:151378888-151378922
  hypo
gtacatattcttcacgttccggtcatgcactcgg

SEQ ID NO: 248928 - DNA, 225 bp, Homo sapiens
  chr1:151481571-151481796
  hypo
cttccttgaagaacagatgacgaaggcggtgactcagaggctcccacttatccttgtaattcgtgttcatggtgctgggtaaccacccaaattggtatttactacaaatatactaagtatcctaattgctaaggtgttatctaggggagtttaggcgcttccgcctttccaatatctgagtcaatttaatatcccacattaaaaaaaaaaatctccttacaaaca

SEQ ID NO: 248929 - DNA, 61 bp, Homo sapiens; identical to SEQ ID NO: 207171
  chr1:151557511-151557572
  hypo

SEQ ID NO: 248930 - DNA, 104 bp, Homo sapiens; identical to SEQ ID NO: 207172
  chr1:151597623-151597727
  hypo

SEQ ID NO: 248931 - DNA, 196 bp, Homo sapiens; identical to SEQ ID NO: 207174
  chr1:151699289-151699485
  hypo

SEQ ID NO: 248932 - DNA, 85 bp, Homo sapiens
  chr1:151742598-151742683
  hypo
agggagagggagcggccaaacattttaactgtttttctgtggctcctagtttgactgcaaccctggagtacgtggaagagaagac

SEQ ID NO: 248933 - DNA, 80 bp, Homo sapiens
  chr1:151829048-151829128
  hypo
gaggggatcctcaggcggccctgacagctggaagctggttccagcaaggtggccccaggaggaaagagctgtcctcctaa

SEQ ID NO: 248934 - DNA, 33 bp, Homo sapiens
  chr1:151952135-151952168
  hypo
tgttgacggagtctcgctctgtcgcccaggctg

SEQ ID NO: 248935 - DNA, 336 bp, Homo sapiens
  chr1:152191329-152191665
  hypo
gccagacccatgtcggccactgctggaagaccgaccggagccagacccatgtcggccatagctgggagactgccctgacccagacccacgctggccgtggcctggagactggccagatccagagccatgtcggccgcggcccgaagcgtgatgggaggcagactcatgctgaccatagctggaagattgacctgagctagagtcatgttggccggagcttgatgactgccctgacgtagatccatgtcgtccctggctagagaagtgacctgaggcagaaccatgctgactatagccctgtcctgagccagactcgtgttgcccaaaaccagaagc

SEQ ID NO: 248936 - DNA, 401 bp, Homo sapiens
  chr1:152192944-152193345
  hypo
gagcttgatgcctgccctgacgtagatccatgttgtccctggctagaggagtgacctgagccagaaccatgcttactatagccagaggactgtcctgagccagactcatgttgcccaaagccagaagtctggcctgagccagactcataatggccacggctgtaagagtaacttgagccagacccgtgttggccgtggctggaggagtgccccgaaccggacccatgtcggacgtggctaggagactggcgagatccagacccttgtcggccgtggcccaaagactgacgggaaccagacccatgctgaccatagctggaagacgaacctgagctagatctgtgtcgttcacccctagatgactgtcctgacctagagccgtgttgtccgtagccagagga

SEQ ID NO: 248937 - DNA, 332 bp, Homo sapiens; identical to SEQ ID NO: 207175
  chr1:152733097-152733429
  hypo

SEQ ID NO: 248938 - DNA, 91 bp, Homo sapiens
  chr1:153265798-153265889
  hypo
cggggagtccaagccggcagggagaaggcacgcgggcagcaaagaggcactacgaggccggggccgagtccatgggcgcttgcggtgggag

SEQ ID NO: 248939 - DNA, 32 bp, Homo sapiens; identical to SEQ ID NO: 207176
  chr1:153352635-153352667
  hypo

SEQ ID NO: 248940 - DNA, 512 bp, Homo sapiens
  chr1:153352907-153353419
  hypo
ctccgtctcggaaaaaaaaaaaaatctggtaacagaagaatgggatgatccagaatgcgtgttgcctgtatgcttcgtaattagccttaattacgtaattagccttaattctcatgatatcagtatcatgagaagagaaatcgcaatggcaatgcacgtattggcgtcatccatgaactcaaaatcacctcccagttcagaacttgaaaagtgatactgatccggatcagccagggcactcaacaaaatcaggagtaccacggcgttgatgatcaggtaccagacacctaacaggatggtgctggtgcggacatggaggcacaggcagcagctgttggagtagaaccgcatccagggtgcgaccagggcgtgaccatcgtcattgctcctggagcagaggcgcgaggacgagcccaagtttccaggagcgttgacctcctcgcccagactccgccacgcggctgctgcagactcctcggctgctccggcttccggcccgctcaccggtgtgc

SEQ ID NO: 248941 - DNA, 161 bp, Homo sapiens
  chr1:153519006-153519167
  hypo
taaggctcagggtcggggcggggggatctggaggggaacaggctcacacccaaaggaggctctgggaccacctcaggaacgtcagtgggaaaggtcctgggtgaggtagtgatggagtggagtggcagtgaggcgtgggggctcacggatagatctcaggt

SEQ ID NO: 248942 - DNA, 153 bp, Homo sapiens; identical to SEQ ID NO: 207178
  chr1:153537353-153537506
  hypo

SEQ ID NO: 248943 - DNA, 52 bp, Homo sapiens
  chr1:153539592-153539644
  hypo
gagggtgagggacaagggagcgcaatgcatcgattttcacagccattctttc

SEQ ID NO: 248944 - DNA, 491 bp, Homo sapiens
  chr1:153540018-153540509
  hypo
taaaaagcctggcagtgaggcgctccagactcggcctgctgctgcgtgtcccttaaacacaccggcacatgcaactagtgtggccaagaccctcggcttgcgctgacccctctgttcagaacgtgcccacacatgcccatgccctctatcctgctgaaatccaacccccccttcaaaggccactgcagggagccttcccagggcccaaccggattcagtgtctacctgttctgtcctgtacaaagcgccccttttgcccttttcgtgtgtacttagagaattctgattttgactgaatcacctgtgtacttgttttctctcagcctcacccccacatggtgagctcaccggtcttactcatttctgcatgaggtaagggtctcgcccacaccaggtgccaaccagtgcttacggctaccacatggcaacaggggtcactggaggagtgcttaggagcaagggagtccttctcaccccgtgaaatcacacca

SEQ ID NO: 248945 - DNA, 122 bp, Homo sapiens; identical to SEQ ID NO: 207181
  chr1:153914346-153914468
  hypo

SEQ ID NO: 248946 - DNA, 48 bp, Homo sapiens
  chr1:153937100-153937148
  hypo
ccttaagtaaaagaggaatgtgaagacttcttaaggggccgggcgcgg

SEQ ID NO: 248947 - DNA, 180 bp, Homo sapiens; identical to SEQ ID NO: 207183
  chr1:153937388-153937568
  hypo

SEQ ID NO: 248948 - DNA, 90 bp, Homo sapiens
  chr1:154098520-154098610
  hypo
ggcgtgagccaccgcgcccggccaagaaatgtttttaatgaaacctgaaaccccaaatgatatatacacaatgaccgcaaatgcagatat

SEQ ID NO: 248949 - DNA, 32 bp, Homo sapiens; identical to SEQ ID NO: 207186
  chr1:154115066-154115098
  hypo

SEQ ID NO: 248950 - DNA, 57 bp, Homo sapiens; identical to SEQ ID NO: 207187
  chr1:154116696-154116753
  hypo

SEQ ID NO: 248951 - DNA, 234 bp, Homo sapiens; identical to SEQ ID NO: 207188
  chr1:154179783-154180017
  hypo

SEQ ID NO: 248952 - DNA, 31 bp, Homo sapiens; identical to SEQ ID NO: 207189
  chr1:154243765-154243796
  hypo

SEQ ID NO: 248953 - DNA, 78 bp, Homo sapiens
  chr1:154273378-154273456
  hypo
tcgaattcctgggctcaagtgattctcacgcccgggatggaaggcatgaaccaccgcgcccagccactttacttcttc

SEQ ID NO: 248954 - DNA, 77 bp, Homo sapiens
  chr1:154315741-154315818
  hypo
acttcaacaacatccgcaagcggatgtcggtcataggtgaggccaggcctggggtgctggggcgtttggggacagca

SEQ ID NO: 248955 - DNA, 95 bp, Homo sapiens; identical to SEQ ID NO: 207192
  chr1:154343720-154343815
  hypo

SEQ ID NO: 248956 - DNA, 183 bp, Homo sapiens; identical to SEQ ID NO: 207193
  chr1:154402829-154403012
  hypo

SEQ ID NO: 248957 - DNA, 133 bp, Homo sapiens
  chr1:154407564-154407697
  hypo
ctttctacagactacggtttgagctcagatatcgggctgaacggtcaaagacattcacaacatggatggtaaatttatgttttacttctggtcagagaggcgcccctagatgcttaggcgtagtagaaagggt

SEQ ID NO: 248958 - DNA, 302 bp, Homo sapiens
  chr1:154685555-154685857
  hypo
gttaccatggccatcgttaccgtctggtccttgctagcatgcttcacagccgtgcaaactcaagcccaacctcaggagtccctcaatgtgcagctcataaaatgacacggaaaaggtttagtcagctcattaatttcacgcagagacacacctgagcgatttcacttaagaaacaaacaccaagtttcaaaagcccacaagacataccggtagattgcaaatgaaacaaacttgagcctaggtatttttgaaccaagcagaaatttttctttgcttgcctggtcccgcgctgtccagtgcga

SEQ ID NO: 248959 - DNA, 91 bp, Homo sapiens
  chr1:154808780-154808871
  hypo
ggaacaccccacctgatactcgactggccttaatttgggctcctgccccccgtctattttgccctgcaccggttacagaatattagttcta

SEQ ID NO: 248960 - DNA, 241 bp, Homo sapiens; identical to SEQ ID NO: 207194
  chr1:154931248-154931489
  hypo

SEQ ID NO: 248961 - DNA, 39 bp, Homo sapiens
  chr1:154933540-154933579
  hypo
ctgaggtttccccaacctcttttctctcagccatgctct

SEQ ID NO: 248962 - DNA, 61 bp, Homo sapiens
  chr1:154933609-154933670
  hypo
gcttatttattcaacaaatgctaacaaggggtgcaatatgaaaaatagattgtgaagatga

SEQ ID NO: 248963 - DNA, 37 bp, Homo sapiens
  chr1:154944721-154944758
  hypo
aaaaaaaaaaaaatacgtattccccccagctcacctt

SEQ ID NO: 248964 - DNA, 180 bp, Homo sapiens
  chr1:154954398-154954578
  hypo
attacaggcgtgagtcaccgcgcccggcctttttttctttttttcaattgagagaactcaagcaatcctccctcctcagactcccaaagtgctgcgcccgaccaagggttttgaagagtaaaatttggcaaggtgtggtttaccagtcctacaaagaatgaattcggcccggcgcggtgg

SEQ ID NO: 248965 - DNA, 154 bp, Homo sapiens
  chr1:154965405-154965559
  hypo
accgtgcggaacccggccctgaagtgcctgagcccaggaggacaccccacataccgtccagcctatctactggagaacgaagaagaggagcggaactcccgcacatgacctcccaccctaggagggagggaaggacaccgtcctagggtataac

SEQ ID NO: 248966 - DNA, 36 bp, Homo sapiens; identical to SEQ ID NO: 207196
  chr1:154987689-154987725
  hypo

SEQ ID NO: 248967 - DNA, 31 bp, Homo sapiens
  chr1:155005174-155005205
  hypo
aagaacttgcggacccggtcagccacctctt

SEQ ID NO: 248968 - DNA, 242 bp, Homo sapiens
  chr1:155012856-155013098
  hypo
tgtatagttctaggcgatgggcactatttgcagagggaagctgagcgggtttgagaaagtgctggttatacagggaggtgaccaaccagggcctctttctccagggccagtagccaatctgcgacacaatctcaacaacgtgatcgcatcgctgggctgcaccgtggagctgcagatcaacaacacccgcgcagcttggcgcatctccacagcccccttacgggccatgttcaaggacctgc

SEQ ID NO: 248969 - DNA, 106 bp, Homo sapiens
  chr1:155065377-155065483
  hypo
taggcacatactaacgccccactgtctataacacactcacgcaggcaccagaccccacacagggcaaggggctcccaggtaccctgagccgcgcttgcatccaggg

SEQ ID NO: 248970 - DNA, 37 bp, Homo sapiens; identical to SEQ ID NO: 207198
  chr1:155082409-155082446
  hypo

SEQ ID NO: 248971 - DNA, 32 bp, Homo sapiens; identical to SEQ ID NO: 207200
  chr1:155149477-155149509
  hypo

SEQ ID NO: 248972 - DNA, 122 bp, Homo sapiens; identical to SEQ ID NO: 207201
  chr1:155149965-155150087
  hypo

SEQ ID NO: 248973 - DNA, 182 bp, Homo sapiens
  chr1:155152069-155152251
  hypo
gccaggccctgactgacacccgctgtctcttccaacagtgcctgaggcccccgtcattgacacccagcgcacctttgcctatgatcagatcttcctgtgctggcggctgcccccccattcaccacctgcctggcactataccgttgagttccggcgcacggatgtgcctgctcagccaggcc

SEQ ID NO: 248974 - DNA, 81 bp, Homo sapiens
  chr1:155152431-155152512
  hypo
gtcgtgcaaagggcatggggtatgccagggcctaggccctgacggttggttccggtggccgctagagaggccatataacat

SEQ ID NO: 248975 - DNA, 147 bp, Homo sapiens
  chr1:155156247-155156394
  hypo
tcgtccccaacacccgcttctgcaggtacgacccggacagcgggcacgacagcggtgccgaggatgccacagtggaggcgtcgccacccttcgctttcctaaccattggcatgggcaagatcctgctggggtcgggggcaagctcaa

SEQ ID NO: 248976 - DNA, 137 bp, Homo sapiens
  chr1:155160920-155161057
  hypo
ggtagccctggcagaggtgccgttgtgcaccagagtagaagctgagcctgatgcagagcctgaggccgaggtgacattgtggactggaggggcggtggagcccaaggcgggcctgttgtccggggccgaggtgacac

SEQ ID NO: 248977 - DNA, 340 bp, Homo sapiens; identical to SEQ ID NO: 226529
  chr1:155161748-155162088
  hypo

SEQ ID NO: 248978 - DNA, 108 bp, Homo sapiens
  chr1:155311712-155311820
  hypo
ggaaggagactcaccgagaaatcttttttgggagtgagcttcttggggaagtgatcaaaagcatagggtttggtgcagacaggatagcggttccggtggatcttgtaa

SEQ ID NO: 248979 - DNA, 87 bp, Homo sapiens
  chr1:155362561-155362648
  hypo
ataattgttattcccgggagggttagcctgatgtaatctactctttcaataccaaaagtagaattcctcgtctttttttttttttga

SEQ ID NO: 248980 - DNA, 223 bp, Homo sapiens
  chr1:155363622-155363845
  hypo
gtgagccaccgcacccagccttctccttttctttcatttgtacggcaaatatttgataaacttctattatgtaccaggtgctgggaaatccagggagagtaagaaagacaatgatcctgtactgccggagattataatctaatggaggagccaaataaatattgtaattatagatatagagagtgatgttatctagaacaaagagagacgaagcctcttttga

SEQ ID NO: 248981 - DNA, 183 bp, Homo sapiens; identical to SEQ ID NO: 207206
  chr1:155403643-155403826
  hypo

SEQ ID NO: 248982 - DNA, 34 bp, Homo sapiens
  chr1:155412080-155412114
  hypo
aaaaaaaaaacacaaaggcccggcaaggtggctt

SEQ ID NO: 248983 - DNA, 82 bp, Homo sapiens; identical to SEQ ID NO: 207207
  chr1:155466712-155466794
  hypo

SEQ ID NO: 248984 - DNA, 180 bp, Homo sapiens
  chr1:155516123-155516303
  hypo
aaaaaaaaaaagaaattattgcattaccataatggtaaaggggaaagggaggtgaacaggtgacagtgagtaaagatttgcttatatcgtcatctaaccactagcattccttacatgagtttatttccacttttaagagcactctgggttgggcgcggtggctcatgcctataatcccag

SEQ ID NO: 248985 - DNA, 135 bp, Homo sapiens
  chr1:155518910-155519045
  hypo
gagtatacaaacagggaggtcgagacgaacctgggcaataaagcatgactctctctctacaaaaaccaaaaaaattacccgaatattgtgtcgtgagcctgtaatcccacctacgcaggaagctgaggtaggaaa

SEQ ID NO: 248986 - DNA, 120 bp, Homo sapiens
  chr1:155578925-155579045
  hypo
gtttctaaatacacacaagaatgttaatcatagcacctaatagcccaaaaattggaaacaatcccaaaagctattatcagcagtatatatatatatatatatatatatattttttttttt

SEQ ID NO: 248987 - DNA, 33 bp, Homo sapiens
  chr1:155620901-155620934
  hypo
attcttcggtggggcgcggtggctcacgcctgt

SEQ ID NO: 248988 - DNA, 75 bp, Homo sapiens; identical to SEQ ID NO: 207208
  chr1:155640724-155640799
  hypo

SEQ ID NO: 248989 - DNA, 151 bp, Homo sapiens
  chr1:155654055-155654206
  hypo
acaaaaaaccatagcgagacctaatctcaattaaaaaaataaagaaattgtatacacatacatgcacatatatgcacactacacacacatatcacatgtacgttttgagaaaaataacaccatgaacctactacccgttaaaaattagaga

SEQ ID NO: 248990 - DNA, 101 bp, Homo sapiens
  chr1:155659966-155660067
  hypo
aagagtaggtaatgtcggtgatagatataaagaaaggaaaagatctccagatgtggaatcttctactggatcctgtaacagaaagaagacattaggctggg

SEQ ID NO: 248991 - DNA, 33 bp, Homo sapiens
  chr1:155674456-155674489
  hypo
taggagtgctttggcgtcttcattaaatagtat

SEQ ID NO: 248992 - DNA, 82 bp, Homo sapiens
  chr1:155862237-155862319
  hypo
aggcatgcaccaccacgacacacgtgctaccacacctggctaacttaaaaaaattttctgtggagacaggctggttggaact

SEQ ID NO: 248993 - DNA, 34 bp, Homo sapiens
  chr1:155881927-155881961
  hypo
ctgggccgggcgggcgcggtggctcacacctgta

SEQ ID NO: 248994 - DNA, 58 bp, Homo sapiens
  chr1:155893764-155893822
  hypo
ataggtttaaatgaaaattatttcagacttatcacagctcactttaagatttgctttt

SEQ ID NO: 248995 - DNA, 465 bp, Homo sapiens
  chr1:155911574-155912039
  hypo
tgctgatgatgctccgatgcctgtcaaattcctagccctgaggctcatggttgccctggcctatgggcttgtgggggccattggcttgctgggaaatttggcggtgctgtgggtactgagtaactgtgcccggagagcccctggcccaccttcagacaccttcgtcttcaacctggctctggcggacctgggactggcactcactctccccttttgggcagccgagtcggcactggactttcactggcccttcggaggtgccctctgcaagatggttctgacggccactgtcctcaacgtctatgccagcatcttcctcatcacagcgctgagcgttgctcgctactgggtggtggccatggctgcggggccaggcacccacctctcactcttctgggcccgaatagccaccctggcagtgtgggcggcggctgccctggtgacggtgcccacagctgtcttcgg

SEQ ID NO: 248996 - DNA, 161 bp, Homo sapiens
  chr1:155912490-155912651
  hypo
ctgtggccccagggcggaggctgggtgcaacaggtggccctaaagcaggtaggcaggcggtgggtcgcaagcaacccccgggagagccgcccttctaccctgctcaccaacctggacagagggacacccgggtgaagggcgcaagctgaacacactcctct

SEQ ID NO: 248997 - DNA, 202 bp, Homo sapiens
  chr1:155931417-155931619
  hypo
tgaattcctgcctagtctgccgagcaggtctgacctttgaagcgccccgtcgctgtcttccagagcaggcagccatcgtggatgagtttgcgcctcagaagttcctctcggccaaaggggcccttgccaggcactggggtttgggcccgagggtccatgcggttgtagatctcctgcagacgggcccctttctccagctgat

SEQ ID NO: 248998 - DNA, 174 bp, Homo sapiens
  chr1:155954283-155954457
  hypo
cttcctcccccacccgcttcacctagatcaggttcccaagctgcaggtgcatgtgacgctattcctgagggcgggcagtgggcagcagggagagagggcggggtctaagcagggcagagctgaagaatttaggagccatgggaacagagcaccgggttatgtggagacagtggc

SEQ ID NO: 248999 - DNA, 36 bp, Homo sapiens
  chr1:155972836-155972872
  hypo
ctacaaaactgattgtcagccgggcatggtggctca

SEQ ID NO: 249000 - DNA, 120 bp, Homo sapiens
  chr1:156009312-156009432
  hypo
ttacagaagtgagccaccgcctggctagcttggcttttcattcttgtcattcctctaattatctcctgtaaatgtttgcccaaggggtatttggaaagcacaagccttgattatgaacaa

SEQ ID NO: 249001 - DNA, 100 bp, Homo sapiens
  chr1:156010523-156010623
  hypo
tgagccaccgcgcccagccagtccacagaatttaacttgggttgcacctggactggacaccacctagtttagctctctcgtgccttgcacaaagctgggt

SEQ ID NO: 249002 - DNA, 144 bp, Homo sapiens
  chr1:156030708-156030852
  hypo
gctcattagttgggggaccggccctcaccacagattccagaagcccagcaatgcacactcagccctcagtgggctgtctctgaaggtcctgtccctttttcgcttcccccccgctggagctgcttctcccgcttgcgggagccc

SEQ ID NO: 249003 - DNA, 36 bp, Homo sapiens; identical to SEQ ID NO: 207213
  chr1:156032532-156032568
  hypo

SEQ ID NO: 249004 - DNA, 317 bp, Homo sapiens; identical to SEQ ID NO: 207214
  chr1:156047207-156047524
  hypo

SEQ ID NO: 249005 - DNA, 266 bp, Homo sapiens
  chr1:156111314-156111580
  hypo
tgagggcatagggccgcacacaaacactgccccacaagctggcagcacggcgggggcggcagccggggactcagcagttaaggtgtccacacacgtggtcacctcacatgatgctcacagcacaagtcagcactcagcagccacatttcattatgtaaaaaaaaaaaagttgttgttgttaaaatgtaatacatgcttggcctagcgtggtggcacgcacgcctgtagtcccagcaactcctggcctgaggcgggaaaattgtctg

SEQ ID NO: 249006 - DNA, 143 bp, Homo sapiens; identical to SEQ ID NO: 207216
  chr1:156143323-156143466
  hypo

SEQ ID NO: 249007 - DNA, 196 bp, Homo sapiens; identical to SEQ ID NO: 207217
  chr1:156179133-156179329
  hypo

SEQ ID NO: 249008 - DNA, 38 bp, Homo sapiens; identical to SEQ ID NO: 207218
  chr1:156239861-156239899
  hypo

SEQ ID NO: 249009 - DNA, 37 bp, Homo sapiens; identical to SEQ ID NO: 60959
  chr1:156254134-156254171
  hypo

SEQ ID NO: 249010 - DNA, 495 bp, Homo sapiens; identical to SEQ ID NO: 207220
  chr1:156255262-156255757
  hypo

SEQ ID NO: 249011 - DNA, 190 bp, Homo sapiens; identical to SEQ ID NO: 207221
  chr1:156256080-156256270
  hypo

SEQ ID NO: 249012 - DNA, 36 bp, Homo sapiens
  chr1:156269034-156269070
  hypo
acttccgttcacccggatttcggcaagagttacaat

SEQ ID NO: 249013 - DNA, 84 bp, Homo sapiens; identical to SEQ ID NO: 207222
  chr1:156276623-156276707
  hypo

SEQ ID NO: 249014 - DNA, 150 bp, Homo sapiens; identical to SEQ ID NO: 207223
  chr1:156362387-156362537
  hypo

SEQ ID NO: 249015 - DNA, 324 bp, Homo sapiens
  chr1:156432018-156432342
  hypo
agtacagatggtcatcggcattttgcagatgaggaaacccaaggcatgaagcctgactcctgtgtgctcccacaactaaggctagcacccacagccttaaccatgcttcatggattttaggcgttcataggcctgtctctgccatcgtatatggcccctcacactccgcgttcgcctctgcagcacctgggctaggtacagagaagcagccacaccctgttcggaggaagccaagccggatctgctttcctccacagccgctccatctgccccagggcacggctgtgccaggtatgagggaggaggcagggttttttttttttt

SEQ ID NO: 249016 - DNA, 144 bp, Homo sapiens; identical to SEQ ID NO: 207225
  chr1:156432942-156433086
  hypo

SEQ ID NO: 249017 - DNA, 126 bp, Homo sapiens
  chr1:156433373-156433499
  hypo
tgagacatgtggaagtgccccgccctgaaggccgccccccattcttccctgctgagatgaagcactgcctctcaccctgatggggccacaccagtccttccttcccatcctcgcggcaccaaagaa

SEQ ID NO: 249018 - DNA, 37 bp, Homo sapiens
  chr1:156441193-156441230
  hypo
tacaggtgtgagccaccgcgcccggccagaatcaact

SEQ ID NO: 249019 - DNA, 288 bp, Homo sapiens
  chr1:156445328-156445616
  hypo
gggaagggagacatcgtccatcccctgtctctctggagcccactctccatccatcacactgcagcacacgccccggcagaggcgtgctggcatctgcgaggggaatgtggggcctggcgtggcgtgtgcctgcgcgtatgcacacacgtgtgtggggctgtcagctccatctgccgctgagtcacttgtttattccaactccatgctggggccgaaactgccgccgtgttggccgccaaagcctgcctgccttttccagcctctctggcctcccgtcagggagttagg

SEQ ID NO: 249020 - DNA, 221 bp, Homo sapiens; identical to SEQ ID NO: 207226
  chr1:156553586-156553807
  hypo

SEQ ID NO: 249021 - DNA, 240 bp, Homo sapiens
  chr1:156572018-156572258
  hypo
accgtgaccggcctcatcaaacactttttgactcaccattgtgtgccagaacttgtccctttggtactgggggataaaaagacgcataagacacaggtcttgatttaggggaacacccagtctagcctgggaaacttgggaccttgagtgggattagatggaggacatgccagtgggacttggagaaagatacaggatgggtgagacgcggtggctcatgcctgtaatcccagcactttg

SEQ ID NO: 249022 - DNA, 39 bp, Homo sapiens; identical to SEQ ID NO: 207229
  chr1:156664565-156664604
  hypo

SEQ ID NO: 249023 - DNA, 101 bp, Homo sapiens
  chr1:156667364-156667465
  hypo
gaagtgggaggccctggccccggggcaccctggtcttgcagggagaggaggcttataggctatgaagcgtgaccactgactgtcagcgctgatgaagggag

SEQ ID NO: 249024 - DNA, 341 bp, Homo sapiens
  chr1:156754046-156754387
  hypo
tgtatttatagtagatgaaaaaggagtcatgcaagatgttggcgtgctgagactgagcaaaggcagtcctgttaccaggatagcttcctggaggaggtagactggctcagaaggcgcccccactgtaagactgaagactgtaaagaacaatcttccaggtggtaggaagaaatgagtagatagaggaattctgagctcttaaggcagagtggggacttaggactgcaaaatgttgtagccatgaccccagatatgtgacaagtcagacacttcaaggtagcctgagggtgtgctccgccctgtacctcagtgtggttcctatgaaccggagcctctgggcg

SEQ ID NO: 249025 - DNA, 42 bp, Homo sapiens
  chr1:156768640-156768682
  hypo
aaaaaaaaaaagatttatgacattgtacgcaatgaaaaacac

SEQ ID NO: 249026 - DNA, 132 bp, Homo sapiens
  chr1:156785630-156785762
  hypo
gtactcctcattttcgttctctctctctgtgccccagcccgttggcagacccggatcattcctgccttctcttggagtggcctttgtccatctgcaagtccttccccatgggagggtgggagagatgaggga

SEQ ID NO: 249027 - DNA, 391 bp, Homo sapiens
  chr1:156823676-156824067
  hypo
cacgatgtggttggcgccaggtgctggctgcagcagtccccagtcaatggtggagaggtggcagagctcctggttcttctccacacgcacagccccacgcagcacggccccaagtgcaggcagtgccacgtcacgcagatgtggcatctcaaagatgaccagtgcatagcccaggaagaggcgcgtcccgcggatgactgctaggttggggaagaggtcgcgcaggctctccagtccgtagacacggaagagcagcaggtagtcggtgacctgggtgaggcgagggaagctgaggccgcggaagtcctccccggtggctgtgaacatgagcaggatctgcaggtggccctccaccacgctgcagttctccagctgacgaagctctgccacc

SEQ ID NO: 249028 - DNA, 103 bp, Homo sapiens
  chr1:156838291-156838394
  hypo
gccaggtgtgcccacgctgaaggtccaggtgcccaatgcctcggtggatgtgggggacgacgtgctgctgcggtgccaggtggaggggcggggcctggagcag

SEQ ID NO: 249029 - DNA, 266 bp, Homo sapiens
  chr1:156849661-156849927
  hypo
agtgctgggattacaggcgtgaaccaccgagcttgtgtatttatttttaatgatggggctggggtaggctgtgccttgacgggctgtcccaggcgcccctggaattgatgcagtgtccgcccgtggcaggtgggaggccgcaccatgctgcccattcgctggatgccgcccgagagcatcctgtaccgtaagttcaccaccgagagcgacgtgtggagcttcggcgtggtgctctgggagatcttcacctacggcaagcagccctg

SEQ ID NO: 249030 - DNA, 143 bp, Homo sapiens
  chr1:157458773-157458916
  hypo
gacttggcaaccagccggacactgattccattcctgcttctaccgctaagctctgtcatccagcagatcctcaatggcctcatctggaaaatgggataatacttcctctgcagggttgctgggaggactaaatagatagaaga

SEQ ID NO: 249031 - DNA, 167 bp, Homo sapiens
  chr1:157678816-157678983
  hypo
ctccaagtcgtcgacgaaggtctagttctgtgggtagaagaaggagctttagcctttccccaagccgccggagccacacccccagccgccagagaagatcaaagtctgtggtaagaagacgaagcttcagtatctcaccaatcagattaaggcgatcaagaacaccc

SEQ ID NO: 249032 - DNA, 876 bp, Homo sapiens
  chr1:157895154-157896030
  hypo
ctgaatctgctagccggcggctccctgctggggtcagtttccttctgtagcagcgaggatgctccaaggtgacgacaagaaacagggcgtgaggagggtaagaggccctatgggcactgtagtcttgtgatgggggaggtggtggcagcggcagcggtggcagagagctagaggagggtgagaaggtggacgcggggccatgtatcccgagctcttcaccagagcccagcacagctctgccggaagcacccctgcagggttagaccagcaggtgcgaggtgcgacgtgggaaagagtccagggccggcggggtgctatgaggcgaggacttcctgagccgaggaccgggtgggttgtgagttgcgaccagcctcgctgacggaccctactacctctttcagttccagtgtcgcgtcttctcctcagcttcattgctcctggcgccctggccttcattggccatgtggtggagcttcactgcgaagacaggagagcgtctgcacccattctgttttggtgttaccatgaaaatgtgactctggggaaagcctcagcaccttctggaggaggagcgtccttcaacctctccgtcgccgcagagcattctgggaactactcctgtgaggccgacaatggctggggatcccagcgcagtgaggtggtggcactcacggtcacaggtgggacatggcaaacagctccttccagagagcttgttgcaattataccaagcaatggctggtgcttcctttccttcggaaatttctgctcctcgaggaatcagagttcctctagaaagcgccttaatgctccagggctctccctgtaattgggttttttgtttgtttgttttgttttttgtttcggcttttgttt

SEQ ID NO: 249033 - DNA, 140 bp, Homo sapiens
  chr1:158059255-158059395
  hypo
cctggctccccacccgaggctgctctctctgcccaggtcctgagtaacagcaaccagctgctgctgaagtcggtgactcaggcagacgctggcacctacacctgccgggccatcgtgcctcgaatcggagtggctgagcg

SEQ ID NO: 249034 - DNA, 82 bp, Homo sapiens
  chr1:158098452-158098534
  hypo
atgtgtagtctatgccgttttatcatacctgtagattcttgcagccaccgctgcaatcaagataacagaactattttatcac

SEQ ID NO: 249035 - DNA, 153 bp, Homo sapiens
  chr1:158237094-158237247
  hypo
ccttcatggctccttcatcccggtggtgcagaacgtgtgtgccaggtgcctgcggccgctgcacgtaagagccctggtgaagctaggctgcctggccactgccgctcctcccgcctgagctgctgagaccccgacaccatgtgttaaaagaac

SEQ ID NO: 249036 - DNA, 245 bp, Homo sapiens
  chr1:158669637-158669882
  hypo
aagagtaggtggcagagaagcgtaggtacatgagagtcacactgccaaagaagagcgaaaagacaatgaagtgagagacacacgtggaaaatgctgtgcggcggcctccagctgaatgaatacgtagaattacagccacaataccatcgtaggacatgaagatgagcatcacagctgtaataatctccactgcatgaatgacatccactacctgaatcatgacgatggctcgtgtgtctgtgcag

SEQ ID NO: 249037 - DNA, 114 bp, Homo sapiens
  chr1:158710951-158711065
  hypo
caacagcataaatcaaaacacgtacggtgggtttatgtgcagatttgttacacggggattttgcgtgaagctgaggtttggagtacggatctcgtcactcaggtagtgagcata

SEQ ID NO: 249038 - DNA, 33 bp, Homo sapiens; identical to SEQ ID NO: 207239
  chr1:158753870-158753903
  hypo

SEQ ID NO: 249039 - DNA, 120 bp, Homo sapiens
  chr1:158992059-158992179
  hypo
ccactttttgatgggattatttgtatgtgcaatgcttgttccctggtgccataaataaatagcatttgaatatcaatttaattttttcagcaaggccatttttatactttttgtagaaag

SEQ ID NO: 249040 - DNA, 146 bp, Homo sapiens
  chr1:159075005-159075151
  hypo
actggctccatgtgaggctacgactggaccagacgtactgcaactggcgtctggacagggggaatgcagtagcatccaaaagcttgcagatgccagaaaccacagacctccaaagagggtgttacagccctcgcccgtggaccccc

SEQ ID NO: 249041 - DNA, 39 bp, Homo sapiens
  chr1:159202104-159202143
  hypo
gagccaccgcgcccagccgacatggtcttgtgtttacaa

SEQ ID NO: 249042 - DNA, 45 bp, Homo sapiens; identical to SEQ ID NO: 207241
  chr1:159229596-159229641
  hypo

SEQ ID NO: 249043 - DNA, 37 bp, Homo sapiens
  chr1:159714653-159714690
  hypo
caaggttggttgggcgccgtggctcacgcctgtaatc

SEQ ID NO: 249044 - DNA, 175 bp, Homo sapiens; identical to SEQ ID NO: 207243
  chr1:159842714-159842889
  hypo

SEQ ID NO: 249045 - DNA, 141 bp, Homo sapiens
  chr1:159869543-159869684
  hypo
accgcgcccggcccaccagtgctttttcccacaccacatccacaatctttggtccacagaggccccgctgtaatggcaacggggagagggttggggcatccctttctccccaactcctccgctcagcgcgctccacatttc

SEQ ID NO: 249046 - DNA, 194 bp, Homo sapiens
  chr1:159909833-159910027
  hypo
acaggccatctaatattaggcgttgtcaccatatttaatcctcccaagaattccattgtagctgaaggaattaatgttaagtttctttccaaaatcacatggctagtaagtgacaaagccaggcttctttctccagacgcggcgtgctttccatggacacgggtgttaggaccgagtgctgttcagggcactgg

SEQ ID NO: 249047 - DNA, 101 bp, Homo sapiens
  chr1:159931577-159931678
  hypo
tgaggctacaaagacggactgcaggccgctcactgggggcgtatagacctgctgagtttataagttatgcactcaagaagtttacctttggccgggcgtgg

SEQ ID NO: 249048 - DNA, 240 bp, Homo sapiens
  chr1:159931918-159932158
  hypo
gcctggggacagagcaagactccatctcaaaaaaaaaaaaggtttacctttgacggcaaggggaacagaggatgggaggcaaagggaaaacatggggtagagggataattttattgccaatgatttcgttttaagagtggagatgaggctacaaagatggactgcaggcggctcactgggggtatatagacctactgagtttataagttatgcactcaagaagtttacctttggcccggg

SEQ ID NO: 249049 - DNA, 41 bp, Homo sapiens; identical to SEQ ID NO: 207246
  chr1:159932218-159932259
  hypo

SEQ ID NO: 249050 - DNA, 60 bp, Homo sapiens; identical to SEQ ID NO: 207247
  chr1:160063720-160063780
  hypo

SEQ ID NO: 249051 - DNA, 217 bp, Homo sapiens
  chr1:160121081-160121298
  hypo
tttttgagtcatctatttggcatacctctaagcctccaaagtctgcaggaccacacaagaactttgttctagttctgccctcagactgaaactctttctgtagcagggcctgctccaatcgtcctcaaacccaaagactgagacttctaggttcttggttaaaaccttcatgaggcctttgcgacagcagacctggaccatcgccaaggcaagactt

SEQ ID NO: 249052 - DNA, 42 bp, Homo sapiens
  chr1:160121590-160121632
  hypo
cctcttcccagcggacggctggaggaccgctcagtctctcct

SEQ ID NO: 249053 - DNA, 104 bp, Homo sapiens
  chr1:160155212-160155316
  hypo
ttatgtttctgtctcgtgcctctcctctccactcccgatcactaatcccacaggatttgacctcctcaaaggtagggctcaggccgggcacgatggctcatgcc

SEQ ID NO: 249054 - DNA, 267 bp, Homo sapiens
  chr1:160255643-160255910
  hypo
ttgtttccctcaaatattatcttttctgaaacgctttccttggccattcccgttccttttcttcctaacactgaacagtatctgacatactatctaccgtacttttttattctccgctccccaccctgcagaatttaaacaccatgaacgcaaagattttcgtctgttgtcttcactgctgtaaagcccaactcccaggctagggtttaaaacttagtaggcattcattggccactctttgctctcgcagtccctaatcaggcacat

SEQ ID NO: 249055 - DNA, 147 bp, Homo sapiens; identical to SEQ ID NO: 207248
  chr1:160293181-160293328
  hypo

SEQ ID NO: 249056 - DNA, 156 bp, Homo sapiens
  chr1:160385715-160385871
  hypo
gtgacatgcgtggcggagggagggttgggggctgttaagaggtgggcacgtgcaggggtggtagggtagagtggctgctgagaagaccctggtccaccactggactttctgtgccttttctggcttcctgccgcagggaccgccgggaccgacacc

SEQ ID NO: 249057 - DNA, 40 bp, Homo sapiens
  chr1:160508426-160508466
  hypo
acccacctcagcctcccaatacaggcgtgagccactgtgc

SEQ ID NO: 249058 - DNA, 165 bp, Homo sapiens
  chr1:160523240-160523405
  hypo
cacgctcagcaacccggtgtggtgagtacggaagcccattgcgatgtctggaaatagaagatgcagtgagtcttgattctcaggaaataggcccaagaggctgggcaggtttgcccacagtcaggggcattatgaaaattgggtgccctccgaaggagtgccaaa

SEQ ID NO: 249059 - DNA, 97 bp, Homo sapiens
  chr1:160693864-160693961
  hypo
gtcaacttctcacccgtggtaacccgagccctggtattatacacataggtcctgtcctcctgaaaacgggtcaggactggccaggcgcagtggctca

SEQ ID NO: 249060 - DNA, 34 bp, Homo sapiens
  chr1:160752824-160752858
  hypo
ggggtgaaaacaaccctgaacgcaggtgactcta

SEQ ID NO: 249061 - DNA, 233 bp, Homo sapiens
  chr1:160771682-160771915
  hypo
acgtgtgagcgtgcgggagggctaggccctcgcccccacctgccactggagaccgctccgccatccccacctcaccgccgcgcagcagagctggaagggtcctgccgatgggaccctgccaggcccagtgccactgccccccgaggctgctagacgtgggcgttaggcgtgtcccacccacccgccgcctcccatggcacgtcgggaacaccggagccgccaacttggagact

SEQ ID NO: 249062 - DNA, 78 bp, Homo sapiens
  chr1:160865083-160865161
  hypo
tgggcgggtgaaacgattaccacccatagtgcgaggagagccatcgacagatattggcccaccgccgatgggcgcctg

SEQ ID NO: 249063 - DNA, 127 bp, Homo sapiens
  chr1:160878333-160878460
  hypo
ggaatattgggctttctcctcgagaacaggtaggagacaactgaacccctcctgatgatgaaagacctgtcgttggagaatcgaccagcaatgatagcgatgactcggaaggcatctgacattacct

SEQ ID NO: 249064 - DNA, 45 bp, Homo sapiens
  chr1:160902456-160902501
  hypo
cctctccctctgtccttctccggctttccacggtctccctctgtt

SEQ ID NO: 249065 - DNA, 55 bp, Homo sapiens; identical to SEQ ID NO: 207253
  chr1:160924874-160924929
  hypo

SEQ ID NO: 249066 - DNA, 322 bp, Homo sapiens
  chr1:160953510-160953832
  hypo
ttagaggcagaatacgattttttttccctttttttttttttaatgtagagtgtctcgctctatcgcccggtggtgcagtgccaaagatcataactcacggcaggctcaaactcctgggctccagcgggtctcccacttcggcctaccaaagtgctgggattacagtgcgaaccacggctccagggacaataactgcaatattaaagtaactgaagcttcaggcccccgtccaaggtcctgtacccaattttgtattttttcttaaagagatcctcaatcggtgccgggctcagtgactcacgcctgtaatcccagcacttgg

SEQ ID NO: 249067 - DNA, 36 bp, Homo sapiens; identical to SEQ ID NO: 207254
  chr1:160985844-160985880
  hypo

SEQ ID NO: 249068 - DNA, 35 bp, Homo sapiens; identical to SEQ ID NO: 207255
  chr1:160986420-160986455
  hypo

SEQ ID NO: 249069 - DNA, 175 bp, Homo sapiens
  chr1:161007587-161007762
  hypo
ctctataggctccagcgtagttgcgagccctgtggagacaaagaagcgtgagagactgacaggaatgacaggcagtccccatcacctcccagctagcagccacacctccccgtacccagtgtatccaagactccgggccagctgcgtggcctggaggccccgcttgcccatctga

SEQ ID NO: 249070 - DNA, 255 bp, Homo sapiens
  chr1:161044440-161044695
  hypo
ctcattgctgacatggcagacgtagatgccgctgtgctcagtggtcagtgggggaaagcccaaagtgtccccatccactcgtaccccactgggcagaggcccatccagcctggaagacagggaagctgaagggtgccagccgggaagggctgaagccaccaccacccaacgtgtccagacagctctccaccctccacccccatgacgtcacccagagccgcaggctgttcccacggtgcccctccctccaccagg

SEQ ID NO: 249071 - DNA, 32 bp, Homo sapiens
  chr1:161055748-161055780
  hypo
ataggcgtgagccaccacgcctggccccctcc

SEQ ID NO: 249072 - DNA, 189 bp, Homo sapiens; identical to SEQ ID NO: 207256
  chr1:161145675-161145864
  hypo

SEQ ID NO: 249073 - DNA, 274 bp, Homo sapiens
  chr1:161166336-161166610
  hypo
ggggcctcacctgacgggtaaacagaatggctgtgtcaaagtggtcagggtccgagtcctcaggggtgttgaggccccgctgccaggcacagaagctgcgcagggtctgggcagcactgggccccacttggggcccctcctcgcctgaccccaggatcactagccgagtcaccaccaagctgacaggattgcggatgcttgggtgcttgaaggccttggctgctgctgccatcactgttagcaggtagcgctttagccccgcaccgtggaatgc

SEQ ID NO: 249074 - DNA, 37 bp, Homo sapiens
  chr1:161305961-161305998
  hypo
taggaggcccggtgcggtggctcatgcctgtaatccc

SEQ ID NO: 249075 - DNA, 240 bp, Homo sapiens; identical to SEQ ID NO: 207257
  chr1:161367367-161367607
  hypo

SEQ ID NO: 249076 - DNA, 164 bp, Homo sapiens
  chr1:161367787-161367951
  hypo
gccaaaaaatgttttattttaaattcaaaatgctgtaatggaggctgggtgcagtggctttttttactcagcatacttgagattcatgttgttgtatatgtgagcagttccgtcctttttttggctgagtaacattccattgtatggatcggtctttcacttgt

SEQ ID NO: 249077 - DNA, 36 bp, Homo sapiens
  chr1:161370747-161370783
  hypo
ctggatgaaagagcaaaacttcgtcaaaaaaaaaaa

SEQ ID NO: 249078 - DNA, 196 bp, Homo sapiens
  chr1:161450371-161450567
  hypo
ggtagaattcttgcctgccacgcaggaggcccaggtttgattcctggcccatgcagcacgccctcccattttggtgctgcagcagcaccaaggcgtagctgcgttcgcctctgccgcctccttacactcggggcacgtgagcttgtcctgcactggctgcgctcccacgcatgacgcccctctgccctttcttcca

SEQ ID NO: 249079 - DNA, 41 bp, Homo sapiens
  chr1:161879452-161879493
  hypo
gtgaacagtaagggccggtcacagaggctcacacctgtaat

SEQ ID NO: 249080 - DNA, 242 bp, Homo sapiens; identical to SEQ ID NO: 207262
  chr1:161953579-161953821
  hypo

SEQ ID NO: 249081 - DNA, 187 bp, Homo sapiens
  chr1:161982118-161982305
  hypo
attagctggtgaaacgatatatcccccagggtcaggaatgcttctttgatcatgcctttcagtccagaaacacaaaagccaccaaagctttaggtgtgggggagaagccctcagcaatgcctgtgccagtacattctggggagcggaccagttctgggtctggtaaatccatcgtggacttaaatct

SEQ ID NO: 249082 - DNA, 45 bp, Homo sapiens; identical to SEQ ID NO: 207264
  chr1:162116825-162116870
  hypo

SEQ ID NO: 249083 - DNA, 87 bp, Homo sapiens; identical to SEQ ID NO: 207265
  chr1:162335161-162335248
  hypo

SEQ ID NO: 249084 - DNA, 224 bp, Homo sapiens; identical to SEQ ID NO: 207266
  chr1:162343771-162343995
  hypo

SEQ ID NO: 249085 - DNA, 85 bp, Homo sapiens
  chr1:162344602-162344687
  hypo
aggggtacaaagggccgttggatcttggggcaggagaggctgcttttagttggtaagccttggtatttgtcgaggccttcccctc

SEQ ID NO: 249086 - DNA, 48 bp, Homo sapiens
  chr1:162346580-162346628
  hypo
attctgaccactgcgggggtacagagatcacacgcctgctctggagag

SEQ ID NO: 249087 - DNA, 153 bp, Homo sapiens
  chr1:162351643-162351796
  hypo
tcctcatcatgcctctctgtcgcctctttgttcatagttgaccacggcatgtttgagaatttgaacacagccctcactccaaagctccaggccagccgctccttcccccacttgtccaagcccgtggcccccggctctgcccctctgggctct

SEQ ID NO: 249088 - DNA, 37 bp, Homo sapiens; identical to SEQ ID NO: 207267
  chr1:162426947-162426984
  hypo

SEQ ID NO: 249089 - DNA, 36 bp, Homo sapiens; identical to SEQ ID NO: 207268
  chr1:162427224-162427260
  hypo

SEQ ID NO: 249090 - DNA, 162 bp, Homo sapiens
  chr1:162428146-162428308
  hypo
tcagagaagtggttttcatgcgcgtttgcctaatgactaatgtgttgaacgacttttcacgtgctggcaaataagcacatgaaatgcacatgaaaaccagatgagacaccactccatacatatgataatgtctaaaattacggtgagcagaccaactatttg

SEQ ID NO: 249091 - DNA, 32 bp, Homo sapiens; identical to SEQ ID NO: 226530
  chr1:163378351-163378383
  hypo

SEQ ID NO: 249092 - DNA, 286 bp, Homo sapiens
  chr1:163392834-163393120
  hypo
attgccttctcagttgtccccgccagtggtattgtggtattgccggcccccacctcccgcacagcggtgcttcacggaattcctgaggcgtactgggagcaccggcacagccgccgccatttcccggcaggggcacatgggagcgacagcgaggcgtcagggccggaagtgtccctgtctttgccctcgttggctactgcggggcaggctgggaccgaggctgtgtgcagaggcctttggtggctgcgcacgttggggaggggacgtagaactcagagtgattttg

SEQ ID NO: 249093 - DNA, 143 bp, Homo sapiens
  chr1:163662092-163662235
  hypo
ggaaccggaggcaacgaacattggaaccagcagtcactcctctctcgggggagcaggctctgtgcgggccccacagcagcattcaggtgtgttacagccatgttctttcaagccctgctgtctggggacggctaagtgccaac

SEQ ID NO: 249094 - DNA, 45 bp, Homo sapiens; identical to SEQ ID NO: 207270
  chr1:163872823-163872868
  hypo

SEQ ID NO: 249095 - DNA, 43 bp, Homo sapiens
  chr1:163900506-163900549
  hypo
aaagtggccaggcgcggtggctcacacctgtaatcccagaact

SEQ ID NO: 249096 - DNA, 38 bp, Homo sapiens
  chr1:164079141-164079179
  hypo
ctgggattacaggcatgagccaccgcgcccggccctcc

SEQ ID NO: 249097 - DNA, 34 bp, Homo sapiens; identical to SEQ ID NO: 207271
  chr1:164518130-164518164
  hypo

SEQ ID NO: 249098 - DNA, 43 bp, Homo sapiens; identical to SEQ ID NO: 207272
  chr1:164550441-164550484
  hypo

SEQ ID NO: 249099 - DNA, 42 bp, Homo sapiens
  chr1:164550724-164550766
  hypo
agtggtgggattacaggcatgagccaccgcacccagccccct

SEQ ID NO: 249100 - DNA, 104 bp, Homo sapiens; identical to SEQ ID NO: 207273
  chr1:164590520-164590624
  hypo

SEQ ID NO: 249101 - DNA, 173 bp, Homo sapiens; identical to SEQ ID NO: 207274
  chr1:164604712-164604885
  hypo

SEQ ID NO: 249102 - DNA, 327 bp, Homo sapiens
  chr1:164637870-164638197
  hypo
gtaacatactcttcccctttcgccttaccttccccaggcgcagccaacacttgacatctttttatcagatgagcttggcactgccaggaccggctcctcgcgccaatgtggcagcagccacagcccctcagcttgttagactgaaagaatgtgccgttttaattaatgatatgtaaatatccttgaatgggccgcatttgcatattaagagagatttgcggaatctgcggagtaatatattttaattaaggattaattaaaaataatgggaatttcatttcgcctggcagaatccgtttagattttagcacacgtctgcttgggagt

SEQ ID NO: 249103 - DNA, 125 bp, Homo sapiens
  chr1:164651958-164652083
  hypo
agtaatcaggccactgtgctcggggacataaaacctgtggctgctgccattgcagagtcccgtcatggatcagagttcgtccctgggaaacaacttgtgccgacggaaggagttcttcctttgct

SEQ ID NO: 249104 - DNA, 63 bp, Homo sapiens
  chr1:164658204-164658267
  hypo
tgtgtctggctggagggtggcgtcgcgcctccccttggtgccgcaggccacgcagagaggcaa

SEQ ID NO: 249105 - DNA, 271 bp, Homo sapiens
  chr1:164667272-164667543
  hypo
tggattttctagtgtcgggctcttctcttttttaggaagggagaagcgggtctgggaaattaaagtgcctgtatctcccagggcaccgattgttaagagggttgggacctcagtatgttttttttccattctgccacacctgagatagaaaaaagaaataccacggtccctcgggtagcagtagagggtgagagcaagactcctacctctgaatgccgttagatttagaagttcattttgactgctttacgatacaaagttgagtaataat

SEQ ID NO: 249106 - DNA, 42 bp, Homo sapiens
  chr1:164723970-164724012
  hypo
tttatgggcatgatatgcttcgtgatttttttgtgttaagta

SEQ ID NO: 249107 - DNA, 193 bp, Homo sapiens; identical to SEQ ID NO: 207277
  chr1:164753547-164753740
  hypo

SEQ ID NO: 249108 - DNA, 336 bp, Homo sapiens; identical to SEQ ID NO: 207278
  chr1:164761683-164762019
  hypo

SEQ ID NO: 249109 - DNA, 36 bp, Homo sapiens; identical to SEQ ID NO: 207279
  chr1:164765528-164765564
  hypo

SEQ ID NO: 249110 - DNA, 556 bp, Homo sapiens
  chr1:164768739-164769295
  hypo
taaataaaaataaaaattcaacattatcgccaaaactttgagccacaggggctgaaagggacgtctaccacaaactatcctagttttctttatttgcacaagtctctagaaaagcccacgtggcctaatgtcatagacttgatgcgtgttgaggcttggaccctcaatgacggtgttgattgtcctgccattccaggcctgcaacgagttcaccacccacgtgatgaatctcctgcgagagcaaagccggaccaggcccatctccccaaaggagattgagcggatggtcagcatcatccaccgcaagttcagctccatccagatgcagctcaagcagagcacgtgcgaggcggtgatgatcctgcgttcccgatttctggatgcgcggtgagtctcccatggggctgtcctgccctctctgggagtccctgatctggggctggagtccacagccgctgcccccttcaggctctagtttcaccccatcaacgctgaaccaagtgataccctgaggatggttctgcgagactagatgggccatcggtttcacacagta

SEQ ID NO: 249111 - DNA, 88 bp, Homo sapiens
  chr1:164776128-164776216
  hypo
tatcaccctcttcactttcacggaagaagctgatcgaaatcacccagctgatattcaattgaccgaggattcaaaaccaagatggggc

SEQ ID NO: 249112 - DNA, 193 bp, Homo sapiens; identical to SEQ ID NO: 207280
  chr1:164790953-164791146
  hypo

SEQ ID NO: 249113 - DNA, 32 bp, Homo sapiens
  chr1:165495513-165495545
  hypo
gctagttaaagaattcaggccgggcgcagtgg

SEQ ID NO: 249114 - DNA, 85 bp, Homo sapiens
  chr1:165711411-165711496
  hypo
caaagcctgccgaacggcaatatgttcagaaactgaataatgccctaaaataaagaattgttcagccagagaccttaattatcgg

SEQ ID NO: 249115 - DNA, 146 bp, Homo sapiens
  chr1:165809090-165809236
  hypo
tcacttgccggtaccgtgattcatgttctgtgcagatgtgctgtcagaacaggctggttggccagccttcccccaccccggcccccgccccagacagagtcctgctgtgctgcccaggctggagtgtggcgcgatctcggcccact

SEQ ID NO: 249116 - DNA, 42 bp, Homo sapiens
  chr1:166266744-166266786
  hypo
ggtgagccactgcgcccggccgagggtgtttatttttctgga

SEQ ID NO: 249117 - DNA, 36 bp, Homo sapiens
  chr1:166479112-166479148
  hypo
tctcttttttttttttgagacggagtctctctctgt

SEQ ID NO: 249118 - DNA, 35 bp, Homo sapiens
  chr1:166479388-166479423
  hypo
gagccaccgcgcccggcaatctgactcctctctta

SEQ ID NO: 249119 - DNA, 31 bp, Homo sapiens
  chr1:166958567-166958598
  hypo
caggaagtttgaccgcgctgccatgccgaac

SEQ ID NO: 249120 - DNA, 109 bp, Homo sapiens
  chr1:167032009-167032118
  hypo
ttacagcaacatggtgctgtcgttgtgtggagccataaaacggtggtgtgtctggggcagcgggggtccgtgacggctgagagggaccggcctggataaggaatgggaa

SEQ ID NO: 249121 - DNA, 279 bp, Homo sapiens; identical to SEQ ID NO: 207282
  chr1:167096197-167096476
  hypo

SEQ ID NO: 249122 - DNA, 98 bp, Homo sapiens; identical to SEQ ID NO: 207284
  chr1:167221025-167221123
  hypo

SEQ ID NO: 249123 - DNA, 266 bp, Homo sapiens
  chr1:167393532-167393798
  hypo
tatcttccctaaggtcaggtcggggaaagaaagacttccagcttcttacctctgcgtgcatgggcacgtgtgcattgctcagtccgcaggaggtctcactccgcaggaaacgctctcctcccgcataagtctgtacttccatcccctcatctgtggtagtagtgaaggctaggtgagtaagcgtgggctgttctacccaccagaagtccaggagctgttgtatacctcatttctaactcgtgaccgagtgacttgctttaactttc

SEQ ID NO: 249124 - DNA, 213 bp, Homo sapiens
  chr1:167430239-167430452
  hypo
gcgctgtgagcattcgcctatgacgtactttgcgtggatcaaaggccccacaaagcctgccgtgcctgcagctgccacgctggggacatgctggggacgtgggcgatcgtgggctgagaggcagactgctgggctgccgcctcccatggcagctttctcccatgggagggagttcaccttgcggcttccaaactcagccgggccgcccctagg

SEQ ID NO: 249125 - DNA, 104 bp, Homo sapiens
  chr1:167443921-167444025
  hypo
ctcccactggccaacgatggaacaacttgagcatataagaaaaacgactgccatgggttaaaactgtctttttttttttttttttttttgacggagtcttgctc

SEQ ID NO: 249126 - DNA, 221 bp, Homo sapiens
  chr1:167486829-167487050
  hypo
ggctgggcgctgctcgtggtggtgacttaaccaggcacatcgtctcatctgccccgtgttctgtcaatgccgggccctctggctgggctagatggccgcctaaggggcaggctggggtgagtcacggagcctgggatggtgcgtcacccggcagtcccaggcgtgggtgtggggacagccatgacaaggctgagcctagacacggacgcttggccatgagg

SEQ ID NO: 249127 - DNA, 161 bp, Homo sapiens; identical to SEQ ID NO: 207288
  chr1:167487339-167487500
  hypo

SEQ ID NO: 249128 - DNA, 216 bp, Homo sapiens
  chr1:167524973-167525189
  hypo
cattaagcttggggtcggcggtttcatgaatttattgcccccgctgcccttccctgctccatgtaagggacattccttttgcttcttctaagatggcctgtctcattctctcacgggtgctcctgattctgctattctggaaactggtcaataagctcatagcacctggcctccattctttatgactttaagctttggtcacgtctttttggagca

SEQ ID NO: 249129 - DNA, 32 bp, Homo sapiens
  chr1:167690802-167690834
  hypo
ctttctgtcttttctttctttttaaggtaaat

SEQ ID NO: 249130 - DNA, 45 bp, Homo sapiens
  chr1:167732418-167732463
  hypo
ttgcagctaggcctcgaggaagggatctggtttaagaaaatcctt

SEQ ID NO: 249131 - DNA, 80 bp, Homo sapiens
  chr1:167823388-167823468
  hypo
ctttagccgagtccagtgagtcccaggcaatgttaagttcgcttacaatctggaatatcggatccaataattcctggctc

SEQ ID NO: 249132 - DNA, 42 bp, Homo sapiens
  chr1:167844893-167844935
  hypo
agaagtactacttggctgggcgcagtgactcacgcctgtaat

SEQ ID NO: 249133 - DNA, 39 bp, Homo sapiens
  chr1:167852542-167852581
  hypo
tgggattacaggcgtgagccaccacgcccagcctctagg

SEQ ID NO: 249134 - DNA, 283 bp, Homo sapiens
  chr1:168054673-168054956
  hypo
cagtgacatgctcccaaggccgcggcacaggcggtgatgggaactcctccccgggccagcctctcaggctgcagccccacggcaccctgaggccctcatctctgctcggcagctaaaacatctccttcttcgatgctctgcaactgcagcctctggctcacaagagttctgctgcctcggcggcccccgaagccgccccccgggacagtccgtgctgtaaccaagacccctggcaaagcctcctccccaaataagttgattttggcttcggcctcaatggctt

SEQ ID NO: 249135 - DNA, 65 bp, Homo sapiens; identical to SEQ ID NO: 207290
  chr1:168058062-168058127
  hypo

SEQ ID NO: 249136 - DNA, 41 bp, Homo sapiens
  chr1:168062078-168062119
  hypo
gagtcagtgtccttcgcaggagataacgggaaaggctctat

SEQ ID NO: 249137 - DNA, 36 bp, Homo sapiens
  chr1:168104282-168104318
  hypo
caaagagaacggttcggatatcgttgcggccttgga

SEQ ID NO: 249138 - DNA, 45 bp, Homo sapiens
  chr1:168116116-168116161
  hypo
tattacctattagaactacacgtagaagccgggtgcggtggctct

SEQ ID NO: 249139 - DNA, 240 bp, Homo sapiens
  chr1:168150755-168150995
  hypo
ccatataactttctgtgacaaattgccgattggtgcaaaagtaattgcggtttttaattgcaaaaccgcaattacttttgcaccaacataatacaatatataattatattatatataaagcagtcagcttcaaactggggcccccatgtaatttacttacagattctctaagcgatggctgtatacatggagagttttaagggaataaaattccatatctacgatctccttatgtattat

SEQ ID NO: 249140 - DNA, 36 bp, Homo sapiens
  chr1:168151295-168151331
  hypo
cgtcccccaccctccgccaaaaaaaaaaaaatgcct

SEQ ID NO: 249141 - DNA, 32 bp, Homo sapiens; identical to SEQ ID NO: 207292
  chr1:168151564-168151596
  hypo

SEQ ID NO: 249142 - DNA, 141 bp, Homo sapiens
  chr1:168198888-168199029
  hypo
gccaatcctactaccgctcttttcttcccacctgcagctagttcttttcgcaccttggcaaggtaagttctttggtttttgcatgactaggaagagtggtagcttctcattttattctgtccttggcgagagcttaaatgc

SEQ ID NO: 249143 - DNA, 389 bp, Homo sapiens
  chr1:168250292-168250681
  hypo
tgggtaacggctctcggcaaagttcgagaagtgcctatggccatgagtgagctgggcactcggaagcccagcgatggcactgtttctcatctgctcaatgtggtggagagtgagcttcaggcagggagggaaaaaggcgaccctacggagaagcaacttcagatcatcctggaggatgcacctctctggcagagattcaaggaagtcactaatgagatgattgtgaccaagaatggcaggtgagtttatctgccgccccgcgtgggctggcagggcttggcaggagagatgagaccccttgaatattgaagaggctgccgctcttcactcagaggcggcgggatctgattaaacatgcttacaggaacgactgtctccaatggctttcc

SEQ ID NO: 249144 - DNA, 186 bp, Homo sapiens
  chr1:168260494-168260680
  hypo
tggaagtacgtcaacggggaatgggtgcccgctggcaagccagaggtctccagccacagctgcgtctacattcacccggactcccccaactttggggcccactggatgaaagctcccatctccttcagcaaagtgaagctgaccaacaagctcaatggaggcgggcaggtacgaatgaggcgggca

SEQ ID NO: 249145 - DNA, 233 bp, Homo sapiens
  chr1:168399587-168399820
  hypo
ttcttggcagagtacgagagaaaggcctgactgaagccatcaaacttctttcagggagctgttggctgcaaggagagcctcagctgaggacagtgtctgagagaataacctcctcaggccccgcggagggacggatgcgtgcgggtcacagccagccattgctcagagcagcgtgggcggccgggagggcccacacagcacttgactgctgcgctgcagccatcattcccagc

SEQ ID NO: 249146 - DNA, 44 bp, Homo sapiens
  chr1:168445204-168445248
  hypo
gattctgtcactgcacttcagcaacagagcgagggcaacagagc

SEQ ID NO: 249147 - DNA, 31 bp, Homo sapiens
  chr1:168698961-168698992
  hypo
ccttgagtataagcgcgggtataccagtttg

SEQ ID NO: 249148 - DNA, 89 bp, Homo sapiens; identical to SEQ ID NO: 207293
  chr1:168878540-168878629
  hypo

SEQ ID NO: 249149 - DNA, 126 bp, Homo sapiens
  chr1:168882770-168882896
  hypo
agttttcatagctaacgaagaggtggggccaaaattcaaaccaagacacttcattgccaaacagtgtctgtgctcttaaagtccgatgcctccctaccccaagactccctccgacaagcagcaggg

SEQ ID NO: 249150 - DNA, 59 bp, Homo sapiens
  chr1:169096470-169096529
  hypo
gtgaaccgaaagaacgaggagactttaatcatgaacgaggagagcgaaaggtctgcaga

SEQ ID NO: 249151 - DNA, 41 bp, Homo sapiens
  chr1:169355662-169355703
  hypo
aaactgacctcctggggggccgaggcaggcagatcacaagg

SEQ ID NO: 249152 - DNA, 101 bp, Homo sapiens
  chr1:169457178-169457279
  hypo
agtactcgtctcaaaaaacaaaacaacaataacaaaaacagctttccatcccttccctgaggcttgggtacctgaaccacgttaatctgtaaatcactgct

SEQ ID NO: 249153 - DNA, 88 bp, Homo sapiens
  chr1:169575559-169575647
  hypo
atgtatgtatatcaagtacaatgcagatagaatgtttatactgaatccacacatttctttcttctgagaatcccgtaacctccagtat

SEQ ID NO: 249154 - DNA, 183 bp, Homo sapiens
  chr1:169838011-169838194
  hypo
aagagcaggcagcagtgttccggaagcagctggcgtcaccacaccagatgccctcacctgaagaagtcatgagatagtaaggtgcagagcgctggccgacattttggaatgggattcagcaaagttgagtgcaaggtctgttgaaagctggagagaacatccgctgaaactgaaatccagagc

SEQ ID NO: 249155 - DNA, 78 bp, Homo sapiens
  chr1:169850180-169850258
  hypo
gcgtgagccaccgtgcccaggtgaaggccacatatttacctcttcagttatttaatcgctatttaaagcagatattgt

SEQ ID NO: 249156 - DNA, 90 bp, Homo sapiens; identical to SEQ ID NO: 207296
  chr1:170064328-170064418
  hypo

SEQ ID NO: 249157 - DNA, 120 bp, Homo sapiens
  chr1:171452992-171453112
  hypo
gcgcccggccatacgtgtcagtcttatgaccttggttaatgtaatttcatctgattgctgaagttgttctccattgctcaagacagatgatttggctgggcgtggtggctcatgccggta

SEQ ID NO: 249158 - DNA, 32 bp, Homo sapiens
  chr1:171519335-171519367
  hypo
tacaggatgaagaacgccgaaagaaggaagaa

SEQ ID NO: 249159 - DNA, 90 bp, Homo sapiens
  chr1:171554194-171554284
  hypo
cttgagccaccacacctggctgctttttgttttttgtttttttttaattaagggggaaaaaacaacttaggtttccgtgtaattatttat

SEQ ID NO: 249160 - DNA, 276 bp, Homo sapiens
  chr1:171554921-171555197
  hypo
agaagaatggagatacggttgagggttgagtgtctcttaccgaaatgcttgggaccagaaatgtctcggatttcagattggtttttttttgtgtgtttgcgtatacataatgaggtgtcttggggcgaggggcctgtctaaacatgaaattcctttgtttcatacatactttatacatataacctgaaggtaattttaagcaacattttaaataactttgtgcatgaaacagaagttctgacctcacttcgactgatccgtcgcaggaggtcaggt

SEQ ID NO: 249161 - DNA, 199 bp, Homo sapiens
  chr1:171570073-171570272
  hypo
ccctgaccgggaaacgaggcagacaaaacctgggtagttaaggggctacccgaggcagccccttaggcggcttaggcctgctgtgtggagcatccctgcaggggactccagccagcctgagtgaagccatccgaagagcgatcccaggtagagaattgccccggtggaacgcctcgccagagcagtgcgtagcaggccc

SEQ ID NO: 249162 - DNA, 40 bp, Homo sapiens
  chr1:171625525-171625565
  hypo
acactgacccttggccgggcgcggtgactcatgcctgtaa

SEQ ID NO: 249163 - DNA, 41 bp, Homo sapiens; identical to SEQ ID NO: 207299
  chr1:171640197-171640238
  hypo

SEQ ID NO: 249164 - DNA, 208 bp, Homo sapiens
  chr1:171707342-171707550
  hypo
ctcaagctattctgcttcagcgtcccaagtgcggcgattgcaggcatgagcaaccacgcccggatggtttttcttctattattcacaaagggaatgaaaacatattttgaatcttttgtttttaaagcttaagattccgaacttaccctttcacttttcacagaacctgtgacatcatcatcattgaggtggcgcttaaacttgggag

SEQ ID NO: 249165 - DNA, 439 bp, Homo sapiens
  chr1:172357767-172358206
  hypo
gcaaggcccacatccggccgaggaccagctcctgccattccctctcctggcccccactctggggctcctccagtcccattccgtccaggcccattacctcctttccccagcagcagtgactccttcggagcccctccacaagttccatctaggcctacgagggccccgcccagtgtcccaaggtaaggcatggagcagaaattgggggggtagtgcgccttggttctcttctcatagaatgacagacaaaatttatttgaaagagaaaattgcaaagatcttatcgtacgtgtttgcagttttcacaatgaacagagactataggaaaattgccaaccctgttatgccatttaaaaatcacttgtgatcattgaaatttctcatttatcaattggcacagactaaataggactaaagaacactccgtcccaatgaatga

SEQ ID NO: 249166 - DNA, 77 bp, Homo sapiens; identical to SEQ ID NO: 207301
  chr1:172449159-172449236
  hypo

SEQ ID NO: 249167 - DNA, 35 bp, Homo sapiens; identical to SEQ ID NO: 207302
  chr1:173714249-173714284
  hypo

SEQ ID NO: 249168 - DNA, 36 bp, Homo sapiens
  chr1:173795057-173795093
  hypo
gccttaaaaaaatccttcttcggccgggcgcggtgg

SEQ ID NO: 249169 - DNA, 99 bp, Homo sapiens
  chr1:173993031-173993130
  hypo
cttaagcagtatgatttttacgttgtttatttttatctcgtcaatatttcaattaaaaatacgttaaaggacagatagatgcagtggctcacgcctgta

SEQ ID NO: 249170 - DNA, 36 bp, Homo sapiens
  chr1:174048026-174048062
  hypo
aggctgagagtagtggctcacgctggcaatcccagc

SEQ ID NO: 249171 - DNA, 79 bp, Homo sapiens; identical to SEQ ID NO: 207303
  chr1:174166676-174166755
  hypo

SEQ ID NO: 249172 - DNA, 50 bp, Homo sapiens
  chr1:174634545-174634595
  hypo
ctttcttgtctgcctcgcctcgccccgccccgccccgccccgcctcgcct

SEQ ID NO: 249173 - DNA, 148 bp, Homo sapiens
  chr1:175014791-175014939
  hypo
gaggctccgggctcgggacagcggggtggcgcccgggcggcgcgggtagcccgacatcgccgcgggcccggcggggcaggacctgcctagcccggcagcggcggctccatggcccgggctccgccagtgccgcggccagtgtagccgc

SEQ ID NO: 249174 - DNA, 152 bp, Homo sapiens
  chr1:175048678-175048830
  hypo
gcggacacggcgagtgcgtgcgcggcgtgtgccagtgccacgaagacttcatgtcggaggactgcagcgagaagcgctgtcccggcgactgcagcggccacggcttctgtgacacgggcgagtgctactgcgaggagggcttcacaggcctg

SEQ ID NO: 249175 - DNA, 365 bp, Homo sapiens
  chr1:175355012-175355377
  hypo
gaaacctcttgcttccttctcgcggtgtctatgacaaggccaatgctctgacacaccttgcctcattcctaatactcctcttgctgtgatgacaccaccggttggctccacccctctttccctccttgtgcgtctctcccccaccgcagccttacctgttgtgaactgagtggtggcagaatcgctctcgttggtccctcggacggcactgactgacacctcgtatcgggagccaggccgcagggcctgcactgagtattggctcaggggaggctgcagccggaaggtggtcctcccaccttccccgcccaccaggccatatttcaaaagaatgaaatcgactttggctcgagggggaatccact

SEQ ID NO: 249176 - DNA, 259 bp, Homo sapiens
  chr1:175365710-175365969
  hypo
gaggatgttgctaatgacagcgtagacgctgatgttgtaggtgagacctggctccagctccgtgatggtgacaccactccaatctccaggcacccgctgctggagctggaggccccccagggccgtcggctggtaagagatcacatattccgtcactgccatcggcccgtcccattccagctcaatggacctgtcgctgataccagccactcgcaagtcctctggaggggcaactaccgggaggcaatacacagatagc

SEQ ID NO: 249177 - DNA, 444 bp, Homo sapiens
  chr1:175372294-175372738
  hypo
ctggtagccctcttcacagacgcagagcccctcctcacattgtcctcgcccactgcaggcattcagacactgccgctggccgcagtcctcaccaacgtagccctcctcgcataaacaggtaccgttggcacatctccccttccccgaacagtccccagggcacctcagttccctgcagtcctcgccagtgtagggctcttcacagacacactccccgtccacgcagagcccccgggagctgcagtctgttgggcaccggagttcggaacagtcatccccgctgtactcgctgtcacagatgcactggccatccacacacaccccccggctggagcaacccagcgggcagtagggctccgagcaattcttgccaaaccagccttcgttgcagatgcagccacaggactcaaagctaaagttgccgtggccactgcagtgagggat

SEQ ID NO: 249178 - DNA, 419 bp, Homo sapiens
  chr1:175375034-175375453
  hypo
ttgctgtgctgaaccgatgaaccattacctgactcatccccccaaaatcaggttaatgtatttcaaactggctatgcagtgtagaaaatccctgaactgaatccctcggggaagaactgcatttagatcttagagacatattaaccggcagctacagactaggacacttttttcctttgaccgtgtgaagagatgccggggttttgctgggagtgcgttttcgctggaagtgcattggtccttcttgttcactctccctctctgctcagccctctccttcccctcctgagaccacgctgcgagctcccggactctacctgtggcagcactttcttggcagcagttggcgttgcactggtctcgcagcaccgacacctccctctccagcatctcgatccggctcagcagctcctgcagca

SEQ ID NO: 249179 - DNA, 234 bp, Homo sapiens
  chr1:175384412-175384646
  hypo
gtcagtggaggcagcgctgggctgctgggagaactcggagccagctcctctccatcagcgctgggcctttattgggcctgtcagatttctgaaaagaacccgagggcagaaaactcccagcagacaggactccatggctggcccagagctgtcaacaaggacatggaatggtgtgggaggatgtgctgggccagcctgggtgctgcctcccactaggcgcggctgcccaacgcc

SEQ ID NO: 249180 - DNA, 36 bp, Homo sapiens
  chr1:175385845-175385881
  hypo
ttgaaatataagaagtgggccgggtgcggtggctca

SEQ ID NO: 249181 - DNA, 146 bp, Homo sapiens; identical to SEQ ID NO: 207308
  chr1:175957580-175957726
  hypo

SEQ ID NO: 249182 - DNA, 37 bp, Homo sapiens
  chr1:176694918-176694955
  hypo
ttcttttcttttttttgagacggagtctcgctctgtc

SEQ ID NO: 249183 - DNA, 37 bp, Homo sapiens
  chr1:176695195-176695232
  hypo
gtgagccaccgcgcccggccagagttttcacttctct

SEQ ID NO: 249184 - DNA, 44 bp, Homo sapiens
  chr1:178099911-178099955
  hypo
aaaaataacatttgtcgcctgtaatcccagcactttgggaggcc

SEQ ID NO: 249185 - DNA, 150 bp, Homo sapiens; identical to SEQ ID NO: 207312
  chr1:178271749-178271899
  hypo

SEQ ID NO: 249186 - DNA, 82 bp, Homo sapiens
  chr1:178362729-178362811
  hypo
gaccagtactggtccatggccctggggttgaggacccctgatctataggagagtttcttccttctttcgctctcattccata

SEQ ID NO: 249187 - DNA, 39 bp, Homo sapiens
  chr1:178465304-178465343
  hypo
cagccccatgcagggcgcccctcccgccggcctctccag

SEQ ID NO: 249188 - DNA, 131 bp, Homo sapiens
  chr1:178469645-178469776
  hypo
cattcccaatgtgggagctgcgtttcccacagtgcttttgctaaagttgtgtgccgtggccgcagtacccctgccaaccatcggagcaggcacagtggaaacagccctgcggccagcttgagagattttct

SEQ ID NO: 249189 - DNA, 125 bp, Homo sapiens
  chr1:178514076-178514201
  hypo
agaatcatggcaagcgagaaactgtcgttcataagagttcaagaaaatgaatattctctcaactctgtgagggccagtgggttccaggcgagatgagacaacttggtgagcgtcgtaactgagct

SEQ ID NO: 249190 - DNA, 206 bp, Homo sapiens
  chr1:178531644-178531850
  hypo
agccaccgcacccgacctctactttttagctataatgatttgcaagggcaaaaatttcacggtacaaggagctttcttttgaaacaatgagtaagctcttcacaagtaccaacatgtcgggaaccgtaaacccttgtcgcgggggaaaagctagtctaactgtatcctagaggctctaggttcaggctgaacggaagtacatgtcg

SEQ ID NO: 249191 - DNA, 41 bp, Homo sapiens
  chr1:178828802-178828843
  hypo
aaaccatgccacatcatacacgaagcacttttttttttttt

SEQ ID NO: 249192 - DNA, 41 bp, Homo sapiens
  chr1:178829083-178829124
  hypo
cctcgtgatccacccgtctcggctacacaaagcacttctac

SEQ ID NO: 249193 - DNA, 229 bp, Homo sapiens; identical to SEQ ID NO: 207315
  chr1:178928477-178928706
  hypo

SEQ ID NO: 249194 - DNA, 83 bp, Homo sapiens; identical to SEQ ID NO: 207316
  chr1:178988892-178988975
  hypo

SEQ ID NO: 249195 - DNA, 160 bp, Homo sapiens
  chr1:178994188-178994348
  hypo
ggcacactaagtttgcgctttagtatatggtgaataaatggatggacacagtggcggctctgtataagtcagctgaaagcaaacaaagggaaggcagaatctttcattcacacgatttatccgcgcccactgggtgcactacggtcgggcattggcgacc

SEQ ID NO: 249196 - DNA, 34 bp, Homo sapiens; identical to SEQ ID NO: 207317
  chr1:179046571-179046605
  hypo

SEQ ID NO: 249197 - DNA, 43 bp, Homo sapiens; identical to SEQ ID NO: 207318
  chr1:179229272-179229315
  hypo

SEQ ID NO: 249198 - DNA, 35 bp, Homo sapiens
  chr1:179262289-179262324
  hypo
ggattacaggcgtgagccaccgcacctggcctcaa

SEQ ID NO: 249199 - DNA, 97 bp, Homo sapiens
  chr1:179333923-179334020
  hypo
gctgggattacaggcgtgagccaccggccgctgatggtattctttcctgagggcagattttcacgccagaagccccgacaattatacctgagctggt

SEQ ID NO: 249200 - DNA, 268 bp, Homo sapiens
  chr1:179557861-179558129
  hypo
caatggatccatgccaactacgagcagaagctcttcctggccccgctaccctgcacggagctgtccctgggccagcacccgcttcgggccaccgcagacgaagaccggcagatggccatcctgctgctggtgcacagctcctgggacaaggtgaaagaaacctttggggagggagacagagatggccgcactgcactgcatctggcctgccacaagggaagtgtggtcctggtgcagctcctgatctggtaccgggtggacgtcatgg

SEQ ID NO: 249201 - DNA, 48 bp, Homo sapiens; identical to SEQ ID NO: 207319
  chr1:179782918-179782966
  hypo

SEQ ID NO: 249202 - DNA, 76 bp, Homo sapiens
  chr1:179835816-179835892
  hypo
ggagtgagccaccgtgcccgggtgcccaccacctagttttattggtttatacaccgtgtcattctgagaaggcaag

SEQ ID NO: 249203 - DNA, 73 bp, Homo sapiens
  chr1:180039480-180039553
  hypo
tgttagaatgcaggcgacaattatatcagctcggtgggcaacaaaaggtctcatttaacgtcacatggtctag

SEQ ID NO: 249204 - DNA, 299 bp, Homo sapiens
  chr1:180097383-180097682
  hypo
gcattcaaacccaaaacatacgcttcgaaccactctacggatcactggtgaccagctcaggatgccagcaagagcaggcctcccatgagagagcgtcgtgcagtttgctggatacggtgggaatgacccatatttgagctcccaggggagaagcaaatgggggacaggactggacagccaaggtgcagggcatcctctgggaaggcgcgtggctcggaacacaaaggcttcccgggtgcagcatgggagggagcccgggccaggcttcttgggtccacgcctagctctgccactcagac

SEQ ID NO: 249205 - DNA, 291 bp, Homo sapiens
  chr1:180134709-180135000
  hypo
ttggtctgcagggccgacctctccaaacttgagagttctgtgccacatgatttggcccctgccactgccctctcacggcttgtgtgtcttcctctgtgcgcaccttggcttccagctggagcagcctccatgtgggtggaactttggtggatgctcacggggcacctgacctggaacctgagctcaggagagctgcctggtatatgagcttgtttcttctcagttcctgggctgtggcccagaatggtgccattattctctctgccaatgtttcagcggccagcagccttg

SEQ ID NO: 249206 - DNA, 216 bp, Homo sapiens
  chr1:180137306-180137522
  hypo
cagaggctcctcagcgccaccccatgtcacgcagcgcacgcagcctggatgcctcaggtgagtcaccatctcctgaactgcctggctggctgtgggaggggcactgggagggccctcgctgggctcctcagccctcccctgcctccagacgggcagcacctggcagggccagtctggtagtcatctgtccacagaccaacacggtggcctcccccg

SEQ ID NO: 249207 - DNA, 173 bp, Homo sapiens
  chr1:180138813-180138986
  hypo
agctggtgtgtggctgctgctggactgtgtggcagtccatccatctgtcagcagccactgcgggcctacttgctgggtgcccagcaccgcactcaccactgcaggcgtggccaggagcgtgagatccccagagcccatggccagtgagaggcggccagggataggtacccagg

SEQ ID NO: 249208 - DNA, 96 bp, Homo sapiens
  chr1:180223403-180223499
  hypo
caggcaggcagagatgggtgcgccagaggctcccggtagcgggatggaggccgctgtgtcgcaggggagctgtgcggctgctgggccaggccagga

SEQ ID NO: 249209 - DNA, 296 bp, Homo sapiens
  chr1:180235627-180235923
  hypo
gcatcatctgcaaccggcagctggccacgggggacgaattctacctcatggaggacgggcggctggtgtgcaaggaagactacgagacagccaagcagaacggtaagcagcatggccccgcatggtcccctctccaggcctttgtttgggccacgccctctgcctgaggtgcccttctcatggcgtcccacctgcccatccctcagagccctactcatgcaccgccacctctgagaagcgtcccagatctccacactgagagtaaatgctgaacacctccccggccgttagcactc

SEQ ID NO: 249210 - DNA, 34 bp, Homo sapiens
  chr1:180302703-180302737
  hypo
ctgacagctcccagtgtgagcgacgcagaagacg

SEQ ID NO: 249211 - DNA, 136 bp, Homo sapiens
  chr1:180404662-180404798
  hypo
ggcatgagcgaccatgcccagcctggatgaattttgagactgcaaagtcccgagtaacccagagcaactttgcagttggctacaagacttatgaattccagcttcacactaatatgaatgacgggacagagtttgg

SEQ ID NO: 249212 - DNA, 96 bp, Homo sapiens; identical to SEQ ID NO: 207322
  chr1:180477770-180477866
  hypo

SEQ ID NO: 249213 - DNA, 95 bp, Homo sapiens; identical to SEQ ID NO: 207323
  chr1:180478106-180478201
  hypo

SEQ ID NO: 249214 - DNA, 120 bp, Homo sapiens; identical to SEQ ID NO: 207324
  chr1:180497354-180497474
  hypo

SEQ ID NO: 249215 - DNA, 101 bp, Homo sapiens; identical to SEQ ID NO: 207325
  chr1:180497654-180497755
  hypo

SEQ ID NO: 249216 - DNA, 94 bp, Homo sapiens; identical to SEQ ID NO: 207329
  chr1:180885147-180885241
  hypo

SEQ ID NO: 249217 - DNA, 178 bp, Homo sapiens
  chr1:180888525-180888703
  hypo
cacagtgttgaggagcgtgactacagaaaggcctgtgggcctcagccggctctgctcccctgtctgcgccctgttcaagttgccttctgtctttttccctctttctgtgcggagccctggaggagagggctggggcagatgccctcttctgcagaggtggtgccgcctctgcctgcag

SEQ ID NO: 249218 - DNA, 41 bp, Homo sapiens; identical to SEQ ID NO: 207330
  chr1:180891951-180891992
  hypo

SEQ ID NO: 249219 - DNA, 101 bp, Homo sapiens; identical to SEQ ID NO: 207331
  chr1:180892052-180892153
  hypo

SEQ ID NO: 249220 - DNA, 126 bp, Homo sapiens; identical to SEQ ID NO: 207332
  chr1:180896512-180896638
  hypo

SEQ ID NO: 249221 - DNA, 346 bp, Homo sapiens
  chr1:180917326-180917672
  hypo
agtgctggggcctccgtgtcccaggccatcctccaacagcagagggtcgcttcttccaggctccaaggggctgtgaggagggctggcttgcgccccgcactgaaccggcaggatgctggtattaacttgctggctttcacatccgactctatatgagcctgtgagaacagcaggctttgccttctgcttctaattggatacaacatagagatcacacatcctcaacaaaggccatttccagcagacaataaatgcctatgacagcaggctgtcatatttgtgtcacgaatttcagttgcgaaacctacccgagtctccccaaaatggcaggcgtgacgtcagtgtc

SEQ ID NO: 249222 - DNA, 296 bp, Homo sapiens
  chr1:180918319-180918615
  hypo
gagtgagccgagctgggctgcgaacagcgagggtgccaaaggctgcgctgagcagcctgaattccgccagtgctgatgcccacaccaggggtgtgccccgcagtccctccagcaaactcagcttgtgtctcagcccctgtgtccacccagcatgaagcatgggcatcagggggtccagcctgccctgggagagccagcacctcacttactctcccaggtgggagcagctggaggggaatttgaaaggtttccagccgcggttgaggccggcgggcgggggttgggggcagggggcc

SEQ ID NO: 249223 - DNA, 230 bp, Homo sapiens; identical to SEQ ID NO: 61280
  chr1:180919549-180919779
  hypo

SEQ ID NO: 249224 - DNA, 202 bp, Homo sapiens
  chr1:180925239-180925441
  hypo
tggcaagaagctctgcccagcgctctctggctgtgggttggccaggtcggagtgctggaccctgaggaaaggggctgcggggactggcgctgatatgtgcccatggagccagggcttaacagctgccctgccagtcctggagggtatccggagctctcctgtggctgccaggctgcctgccgggcctgcctttgtcttgtcc

SEQ ID NO: 249225 - DNA, 220 bp, Homo sapiens
  chr1:180945761-180945981
  hypo
tggcacaccattggcgccgatctggaaggcaggacatggggattagctctcacagggactccacattccccaagatacagttatatggaatttatggcaccctttgaagcagaaaaggggcagaacgtgcaaatgacggggccatgatcttacacctgcctaggtgcctgatgctctaatgctgctctgttcttggcctgcacttcgcatgcagtcacaa

SEQ ID NO: 249226 - DNA, 151 bp, Homo sapiens; identical to SEQ ID NO: 207334
  chr1:181066372-181066523
  hypo

SEQ ID NO: 249227 - DNA, 65 bp, Homo sapiens
  chr1:181111089-181111154
  hypo
caggcttgattgattttaaacgttctgcccctttgtttttccacgtcaacaaattcacaaatcat

SEQ ID NO: 249228 - DNA, 229 bp, Homo sapiens
  chr1:181382625-181382854
  hypo
gcgggggcctcatcgagcagcgcgacatcatcaaggcccacgaggcgcacaagatgcagagcaccccgcaggcccggcgcaaggaatgggagtgagtatggcggggacgcgggggcgggcatggctggctgggcctgaggtcggggtgggttcctggagcggatgggccccgtgaggccgccctggagggtcgggagatgctttcgctgtgctgcgactaacgagaggc

SEQ ID NO: 249229 - DNA, 162 bp, Homo sapiens; identical to SEQ ID NO: 207335
  chr1:181765803-181765965
  hypo

SEQ ID NO: 249230 - DNA, 364 bp, Homo sapiens
  chr1:181767549-181767913
  hypo
cctgattcgacacgcgggcagcatctctccacctgctgatggaagcgaggagggctccccgctgacctcccaagctctggagagcaacaatgcttgcctgaccgagtcttccaactctccgcacccccagcagagccaacatgcctccccacagcgctacatctccgagccctacttggccctgcacgaagactcccacgcctcagactgtggtgaggaggagacgctcactttcgaagcagccgtggctactagcctgggccgttccaacaccatcggctcagccccacccctgcggcatagctggcagatgcccaacgggcactatcggcggcggaggcgcggggggcctgggccaggcatg

SEQ ID NO: 249231 - DNA, 104 bp, Homo sapiens
  chr1:181979314-181979418
  hypo
ggctccctctccctcttcctcgtctcccactttccacggtctccctctgatgccgctccctcgtctcccactttccacggtctccctctgatgccgagccgagg

SEQ ID NO: 249232 - DNA, 40 bp, Homo sapiens
  chr1:182148663-182148703
  hypo
taactccattaactccgtctctgggtgatagacactaaag

SEQ ID NO: 249233 - DNA, 33 bp, Homo sapiens
  chr1:182230564-182230597
  hypo
gccactgcgcccggccacatttgcattcttata

SEQ ID NO: 249234 - DNA, 69 bp, Homo sapiens
  chr1:182637878-182637947
  hypo
tattctctctcctgcgacagcgggcatcttatgtgtctactcgcgcttgcaaatcgcagggtgtctgac

SEQ ID NO: 249235 - DNA, 39 bp, Homo sapiens; identical to SEQ ID NO: 207340
  chr1:182767636-182767675
  hypo

SEQ ID NO: 249236 - DNA, 31 bp, Homo sapiens
  chr1:182807579-182807610
  hypo
ccaggcagaatgcccgccttcactgagctta

SEQ ID NO: 249237 - DNA, 190 bp, Homo sapiens; identical to SEQ ID NO: 207341
  chr1:182827758-182827948
  hypo

SEQ ID NO: 249238 - DNA, 40 bp, Homo sapiens; identical to SEQ ID NO: 207342
  chr1:182856866-182856906
  hypo

SEQ ID NO: 249239 - DNA, 317 bp, Homo sapiens
  chr1:183129205-183129522
  hypo
ggctccgtcactgggcgtgtgcatgactgtacttccctctgccgcagacacctcagccaccgtctagccaggcaaacctgtttggtgtgctcactgcatgatgaaggcgggtgtggctcccagtgggagtgtcccgcctccagaacatggccagaggctacagaatcagacttttgccaaaggaagaaagagcgcctgaagcatgtgttcaccgggcaactatgaatggcttgactgggtggagccttcagtatctttttagttaagccttttagtctcaaaaatggaagaggcaaagctcaattcttaaagatcac

SEQ ID NO: 249240 - DNA, 42 bp, Homo sapiens
  chr1:183132281-183132323
  hypo
aggtggcaggttcaatggatcgtaggctccagagggttgaga

SEQ ID NO: 249241 - DNA, 136 bp, Homo sapiens; identical to SEQ ID NO: 207345
  chr1:183338766-183338902
  hypo

SEQ ID NO: 249242 - DNA, 33 bp, Homo sapiens
  chr1:183443725-183443758
  hypo
aataaaagatacgaagtgttttgagtccaaagg

SEQ ID NO: 249243 - DNA, 36 bp, Homo sapiens
  chr1:183462995-183463031
  hypo
tgagtcatagcacccggccactttactggttttctg

SEQ ID NO: 249244 - DNA, 136 bp, Homo sapiens
  chr1:183551069-183551205
  hypo
gggattacaggcgtgagccacctcgcctcgccaactaagtgtcgtttttaaacatgtctctgaaagcaccggcctgcttcccagccccctcgttccctgctgcaggcctcttttcggcctctccacttgtttaccc

SEQ ID NO: 249245 - DNA, 174 bp, Homo sapiens
  chr1:183944151-183944325
  hypo
ccatggttctagtttttggacgactgatttggatacacctgagatgacagttgtcaagaaatcaaacatctgtttttaccagaatgtagtctgaccatttttccctcgcagttcgaagggctgcctgtcgtagtttcatcacatgggcaaaccgggaggttggccagtgctttg

SEQ ID NO: 249246 - DNA, 165 bp, Homo sapiens
  chr1:184333001-184333166
  hypo
ttcctcctgggtccccggcagaggctggggtgggctatttagcttctctgcagtgttgcttccagctcggatggaagctctctgagcccagggccttagcacaggtgacacacagcccacaggcctgggacaggcaggcagatgagtgcccgagcttggcaccat

SEQ ID NO: 249247 - DNA, 165 bp, Homo sapiens
  chr1:184442501-184442666
  hypo
ttacctctctctaagcgctgtggtttcaggaaggtaaacaatagagcatgtgaggttgggagagaaaagctgagcaaagcgaatgaaaaaatggaagctaaaaaaaaaaatgctggagtttacgtgaaggatagcataaactgaagggaacgtcttttgagcaga

SEQ ID NO: 249248 - DNA, 259 bp, Homo sapiens; identical to SEQ ID NO: 207349
  chr1:184448490-184448749
  hypo

SEQ ID NO: 249249 - DNA, 39 bp, Homo sapiens; identical to SEQ ID NO: 207350
  chr1:184720865-184720904
  hypo

SEQ ID NO: 249250 - DNA, 39 bp, Homo sapiens
  chr1:184721204-184721243
  hypo
gttacgtctcctgcccacgtgctatagaaactggattgt

SEQ ID NO: 249251 - DNA, 52 bp, Homo sapiens
  chr1:184764469-184764521
  hypo
gccccaggggctcctcggtgagccctccactggctggcggagaggctgggct

SEQ ID NO: 249252 - DNA, 35 bp, Homo sapiens
  chr1:184934144-184934179
  hypo
cacagggccgggcgcggcggctcacgcctgtaatc

SEQ ID NO: 249253 - DNA, 39 bp, Homo sapiens; identical to SEQ ID NO: 207353
  chr1:185024836-185024875
  hypo

SEQ ID NO: 249254 - DNA, 83 bp, Homo sapiens; identical to SEQ ID NO: 207354
  chr1:185336198-185336281
  hypo

SEQ ID NO: 249255 - DNA, 167 bp, Homo sapiens
  chr1:185554768-185554935
  hypo
ttggaaatcccaagcgggcaccaatgacttactgactcactgactgtgccgtccttttcacccctatttttgagggttccattatgatcctttgtagttttcctcacatggggcaccacctgccagggtctgacccgcagacgtaggctgcacgatggaagaataac

SEQ ID NO: 249256 - DNA, 176 bp, Homo sapiens; identical to SEQ ID NO: 207355
  chr1:188612098-188612274
  hypo

SEQ ID NO: 249257 - DNA, 87 bp, Homo sapiens
  chr1:191980832-191980919
  hypo
gttggccgggatggtctcgatctcctaactcgtgatcctcccgcccccgccggccttgcctgggtttacaggcgtgagccatcttgc

SEQ ID NO: 249258 - DNA, 34 bp, Homo sapiens; identical to SEQ ID NO: 207356
  chr1:192197325-192197359
  hypo

SEQ ID NO: 249259 - DNA, 34 bp, Homo sapiens
  chr1:192469717-192469751
  hypo
ggagccaagatggccgaataggaacagctccggt

SEQ ID NO: 249260 - DNA, 417 bp, Homo sapiens; identical to SEQ ID NO: 207357
  chr1:193149421-193149838
  hypo

SEQ ID NO: 249261 - DNA, 164 bp, Homo sapiens
  chr1:193377400-193377564
  hypo
aattctttgaacacctgaaaagaacaaaaaggcagaggaagattggatttgtgctctcctctgcctgtctgcttgaattggacgtcagtcttctgtcctcggtgctccttgttcttaagccttcaggctgggtccggagtctacatcatcggtcctctggctct

SEQ ID NO: 249262 - DNA, 33 bp, Homo sapiens
  chr1:195578617-195578650
  hypo
agactcacaaacaggccaggcgcagtggctcac

SEQ ID NO: 249263 - DNA, 334 bp, Homo sapiens
  chr1:195732354-195732688
  hypo
agagagctggagcacgccccctacctctttggcctctgtggttgctggcgtctcactcaggtttttgggtgccactgtgttcccctcatccagaccctggtacttgcagcggaagccgcctgtggtacacctggtccagctgcagcctcgcaaggagctggtgccggtgccggttcctggagctgcatgccctgccgcagcagctggcgtgcctggctgtgtgcagtggccagaccccacgatcacttgctcacaaaccccttgccactctgtacctggctctgtgcctggcttgcctttggcagccgtgggatccagggtggtagcgtgagcc

SEQ ID NO: 249264 - DNA, 105 bp, Homo sapiens
  chr1:196902782-196902887
  hypo
gctgaggccggagccggctccctcagcttgtggggaggtatggagtgagagccccggaaggagagacgtgggcgggaacccgggctgcgccgcggagcttgtggg

SEQ ID NO: 249265 - DNA, 95 bp, Homo sapiens
  chr1:197091610-197091705
  hypo
cagtttgagtagtacgctgacatatagcgtcaaatggcacatagcaaggatggtaatggtggatcaggtaacataacacacggccgtctgagaaa

SEQ ID NO: 249266 - DNA, 32 bp, Homo sapiens; identical to SEQ ID NO: 207359
  chr1:197116742-197116774
  hypo

SEQ ID NO: 249267 - DNA, 169 bp, Homo sapiens
  chr1:197191297-197191466
  hypo
gtgtcctgccggcccgctccttgttgccctgcactgcgcggccgcagcggcaccatgattgtgtttgccgtgctcctgtcgttggtggcgggtgtttgagggaacgagtttagttcttggtctgttattttcagaaatggaaattggcctataccgggagagtgaatcc

SEQ ID NO: 249268 - DNA, 38 bp, Homo sapiens; identical to SEQ ID NO: 207360
  chr1:197324919-197324957
  hypo

SEQ ID NO: 249269 - DNA, 39 bp, Homo sapiens; identical to SEQ ID NO: 207361
  chr1:197418769-197418808
  hypo

SEQ ID NO: 249270 - DNA, 92 bp, Homo sapiens; identical to SEQ ID NO: 207362
  chr1:197704760-197704852
  hypo

SEQ ID NO: 249271 - DNA, 80 bp, Homo sapiens
  chr1:198124719-198124799
  hypo
tcaaggcctccttttgagatcgtgaacgttttcatttatttatttatttttttgagacggattttcgctctttcacccac

SEQ ID NO: 249272 - DNA, 53 bp, Homo sapiens
  chr1:198181324-198181377
  hypo
tgaacctcattggctgtaaccgatgagcaaacgaaaggtgtgctgtagccaca

SEQ ID NO: 249273 - DNA, 42 bp, Homo sapiens
  chr1:198326487-198326529
  hypo
ttactatagcagttggcacacggtaagaaggaaataagtttt

SEQ ID NO: 249274 - DNA, 181 bp, Homo sapiens; identical to SEQ ID NO: 207363
  chr1:198828046-198828227
  hypo

SEQ ID NO: 249275 - DNA, 156 bp, Homo sapiens; identical to SEQ ID NO: 207364
  chr1:199636236-199636392
  hypo

SEQ ID NO: 249276 - DNA, 41 bp, Homo sapiens
  chr1:200027878-200027919
  hypo
ttacaagcatgaaccaccgcgctgggctgggttttgttttt

SEQ ID NO: 249277 - DNA, 184 bp, Homo sapiens
  chr1:200182774-200182958
  hypo
cagggtgcacttccgcgtggcgaggttcatcatggaggcaggtgtcaagctagggatgcagtccattcccattgccactgcttgcaccatttaccctaagttcttctgcgagaccatcctggacgcctttgacccttacctgattgccatgtcttccatttacttggccggcaaagtggaagag

SEQ ID NO: 249278 - DNA, 32 bp, Homo sapiens
  chr1:200386099-200386131
  hypo
cgtgggccaccgcccccagccaacaacttcat

SEQ ID NO: 249279 - DNA, 81 bp, Homo sapiens
  chr1:200486650-200486731
  hypo
tgtgcttcccactccgggctctcagacgttcgtgtgttgtgaatcattttaggtttgttttctttgcgttacaacttgacc

SEQ ID NO: 249280 - DNA, 34 bp, Homo sapiens; identical to SEQ ID NO: 207366
  chr1:200556912-200556946
  hypo

SEQ ID NO: 249281 - DNA, 92 bp, Homo sapiens; identical to SEQ ID NO: 207367
  chr1:200588800-200588892
  hypo

SEQ ID NO: 249282 - DNA, 39 bp, Homo sapiens; identical to SEQ ID NO: 207368
  chr1:200612481-200612520
  hypo

SEQ ID NO: 249283 - DNA, 76 bp, Homo sapiens
  chr1:200882273-200882349
  hypo
cagcaccctggccccggtccgaggccgcgccctccagctgacgtgcttttccctttctgcgcgcttgggcctgtcc

SEQ ID NO: 249284 - DNA, 48 bp, Homo sapiens
  chr1:200941620-200941668
  hypo
ccgccttcccgggggcgctgggcacaagacctcgcgagtgagaagaca

SEQ ID NO: 249285 - DNA, 111 bp, Homo sapiens; identical to SEQ ID NO: 207370
  chr1:200942600-200942711
  hypo

SEQ ID NO: 249286 - DNA, 50 bp, Homo sapiens; identical to SEQ ID NO: 207371
  chr1:200956136-200956186
  hypo

SEQ ID NO: 249287 - DNA, 176 bp, Homo sapiens
  chr1:200971316-200971492
  hypo
ctggctcatgagctgggtgacgcggttgttgatggcatcgatggcctcctgcatggctttcacccgcagccgcagggccccattctccttctgtagcatggcattctctcggaacagatcactatagccctcagcgccatcctctcctatcactcgcttgccctgggagcaggggc

SEQ ID NO: 249288 - DNA, 78 bp, Homo sapiens; identical to SEQ ID NO: 207372
  chr1:201055718-201055796
  hypo

SEQ ID NO: 249289 - DNA, 259 bp, Homo sapiens
  chr1:201058348-201058607
  hypo
aagggagatggttctgcaggcgcgggcccagacccacccagtaaaggacgtcagtccatccctccatggtaatgcactggtacacggtgagcatggagaagccgaagttgtcgaagtgggtgatgccatggttgggccctggccagccgccccggcactcactgccattgatggtgcaccggcgccctgagcccgtcctggcgcagggcgatggctcttcattctccaccgtggccacgatatctggaggcagaaggca

SEQ ID NO: 249290 - DNA, 36 bp, Homo sapiens
  chr1:201103243-201103279
  hypo
ggcgtgagccaccgcgcccagcccacaaaggttctt

SEQ ID NO: 249291 - DNA, 202 bp, Homo sapiens; identical to SEQ ID NO: 207375
  chr1:201168310-201168512
  hypo

SEQ ID NO: 249292 - DNA, 363 bp, Homo sapiens; identical to SEQ ID NO: 207376
  chr1:201194901-201195264
  hypo

SEQ ID NO: 249293 - DNA, 31 bp, Homo sapiens
  chr1:201238522-201238553
  hypo
tgaataccagggcacgcgctttctgaaaagg

SEQ ID NO: 249294 - DNA, 205 bp, Homo sapiens
  chr1:201244195-201244400
  hypo
ctggcagagagagccgcaagtgacccgtggctcctgactcaagcctggtcagagggagactccgaccctttgggagcagcctgaagcccagggccttactgaacacagatggggcaggtgcccggtcctttgcttgttattggcgatcctaataagaaggcacctggcagaggctttccgcaggaggccccggccatagaaatgg

SEQ ID NO: 249295 - DNA, 152 bp, Homo sapiens
  chr1:201244944-201245096
  hypo
ggacccagacacccaggactttgcaagaccacatcaccatgccgctctctactcagctgcctcttctgacaaatgcaggggctccaagggatgggctctgaggccccttccacctctgccgttctgaagtctccaagcgtagtaatggcaga

SEQ ID NO: 249296 - DNA, 208 bp, Homo sapiens; identical to SEQ ID NO: 207377
  chr1:201261831-201262039
  hypo

SEQ ID NO: 249297 - DNA, 41 bp, Homo sapiens; identical to SEQ ID NO: 207378
  chr1:201276067-201276108
  hypo

SEQ ID NO: 249298 - DNA, 42 bp, Homo sapiens
  chr1:201325776-201325818
  hypo
ctactacaggcacgcgccaccatgcccagctaattttttttt

SEQ ID NO: 249299 - DNA, 117 bp, Homo sapiens
  chr1:201328245-201328362
  hypo
ctggggtgcccaggagggcccgggaactgggggagtgcaggccggaggcaggtgcgagcgaggagcagatctttggtgaaggaggccaggctctatttccagcgcccggtgacttta

SEQ ID NO: 249300 - DNA, 96 bp, Homo sapiens
  chr1:201351265-201351361
  hypo
ctgggtggactgcgcgattgcaggccaattagtgtgtgcacacggggacgatggggtctcccacagtacaccgtggccctccgccgtagggccagg

SEQ ID NO: 249301 - DNA, 169 bp, Homo sapiens; identical to SEQ ID NO: 207379
  chr1:201355458-201355627
  hypo

SEQ ID NO: 249302 - DNA, 316 bp, Homo sapiens
  chr1:201380509-201380825
  hypo
gacttgaggttggcccgcagatccatggacaccttgtgcttggagcccagcagggcccggagcatggcgtcagccgagacacggactcgacgcaggggcgggcgcttgaacttcccacggaggtccatcaccttcagcttcaggtccttaatctgtaggtgagaagcgcccggggctcactggagaggcagctagccacaggacacccttcctgaggacctcagactgctagggttccagccagagatacaccttaaattgtccacccttgaagccagacctatcagcagtcaccaacctttttgtcaccagggac

SEQ ID NO: 249303 - DNA, 225 bp, Homo sapiens
  chr1:201400931-201401156
  hypo
acccctctccgccccgtcacagactatcctgggtttgcgatgtggtaatgcttctcgaagagtggtccaccaactcctgggggtaccatatttatctttgcattggattggcatgtgggctgatagtgcgaaggcaatggtgggtaaaactggtgacttattctttcccatgttgcagtcattggggccaaaaagccagttttatttaagcgtccttgatgaaac

SEQ ID NO: 249304 - DNA, 120 bp, Homo sapiens
  chr1:201432876-201432996
  hypo
tgcctggatacgtcttttccttatgcctgaacccccaccatcagttaccctccggtttgattgaagagcaaagattctatttttttttcttttttttctgagatggagtcttgctttatt

SEQ ID NO: 249305 - DNA, 139 bp, Homo sapiens
  chr1:201797436-201797575
  hypo
gaggcgtgagccactgcgcctcgccacaccctgcatttttaacacctcactggagcgctcatcctctccacctgctccgctattcaggagcggctctgcaccgtaggccatttcccacgaccagctgctgacaaccata

SEQ ID NO: 249306 - DNA, 144 bp, Homo sapiens
  chr1:201851151-201851295
  hypo
ttagttagcagtcacgggaaaattccccattctcacggggatttagactaggtcttaaccatactttaccaagattccagtagcaaagcacccaaaagtaatcgcaataaaattccaatttttgtaggccgggcatagtggctc

SEQ ID NO: 249307 - DNA, 150 bp, Homo sapiens
  chr1:201981161-201981311
  hypo
gagaagaacaagtacgacgcaagcgccattgacttctcacgatgtgacatggatggcgccaccctctgcaattgtgcccttgaggagctgcgtctggtctttgggcctctgggggaccaactccatgcccagctgcgagacctcagtgag

SEQ ID NO: 249308 - DNA, 59 bp, Homo sapiens
  chr1:201981829-201981888
  hypo
cccggcagctgtggcgcaggagccccctcccctggcagctctgacgtctccaccgcagg

SEQ ID NO: 249309 - DNA, 189 bp, Homo sapiens
  chr1:201982339-201982528
  hypo
ccaagcacgggaagcggaaacgaggccggccccgaaagctgagcaaagagtactgggactgtctcgagggcaagaagagcaagcacggtgagctccgggggcacgtgggtcctccctgcgccgggctgagcggcttcctggggcactgcgggttgttgcaggtatcccttctcccgttttctctggcct

SEQ ID NO: 249310 - DNA, 302 bp, Homo sapiens
  chr1:201982936-201983238
  hypo
gatggaggctggccttgcagcgcccagaggcacccacctgtgggagttcatccgggacatcctcatccacccggagctcaacgagggcctcatgaagtgggagaatcggcatgaaggcgtcttcaagttcctgcgctccgaggctgtggcccaactatggggccaaaagaaaaagaacagcaacatgacctacgagaagctgagccgggccatgaggtgagctggcggccaggaccctcacgatacagccggacatggggacaggcgctcacactcccaccgccctctttctggctgccact

SEQ ID NO: 249311 - DNA, 37 bp, Homo sapiens; identical to SEQ ID NO: 207384
  chr1:201984009-201984046
  hypo

SEQ ID NO: 249312 - DNA, 117 bp, Homo sapiens
  chr1:201984365-201984482
  hypo
gggtggatggccggcgactcgtctacaagtttggcaaaaactcaagcggctggaaggaggaagaggttctccagagtcggaactgagggttggaactatacccgggaccaaactcac

SEQ ID NO: 249313 - DNA, 89 bp, Homo sapiens; identical to SEQ ID NO: 207385
  chr1:201997730-201997819
  hypo

SEQ ID NO: 249314 - DNA, 120 bp, Homo sapiens
  chr1:202009833-202009953
  hypo
tacaggcgtaaaccaccgcgcccgaccttctttcacttttttcacacttcggtgaattctgtgcctacttaacctaacctgtgctgactctgcacaatgttaacacactcttcttttttt

SEQ ID NO: 249315 - DNA, 42 bp, Homo sapiens
  chr1:202022787-202022829
  hypo
agatgcagccaggcacggtggctcaagcctgtaatcccagca

SEQ ID NO: 249316 - DNA, 79 bp, Homo sapiens
  chr1:202032892-202032971
  hypo
aacaatgtgagacgctgtctcaaaaaaaaaaaaaaaaaaaaaagcagaataaagacaggattttcgaaaaactttcagg

SEQ ID NO: 249317 - DNA, 140 bp, Homo sapiens
  chr1:202041210-202041350
  hypo
gggtgacgagagtgaaactccgtctcaaaaaaaaaaaaaaaaaagaacgatgaggcccagggaatgccatatatgctaggcggccagtctgggttcttaatgacatttttgcccttcacgtctaaggcctctcaatccct

SEQ ID NO: 249318 - DNA, 258 bp, Homo sapiens
  chr1:202042308-202042566
  hypo
aaaaaaaaaagagggccatagatgtactaaggtttctcagaagtgattagagaagcttcagatgggttttacgcagtcattcaacaagcatttattgagtacctactgtgtgccaggcagtgaggacacaaagatgaaagagtcccagccctcaaagagctcgccgtctgagtggacatgtcaagtaaacaggctattgccgagcaacgtaagtgcgatattagaggtgtgtactccgcatggaggtagagggagtga

SEQ ID NO: 249319 - DNA, 38 bp, Homo sapiens
  chr1:202052584-202052622
  hypo
aaaagttttctcactcggaggctcggtctccccatctg

SEQ ID NO: 249320 - DNA, 42 bp, Homo sapiens
  chr1:202058380-202058422
  hypo
gagtcccagagaagtcgaggtcaaggtcgagtaactgtcttt

SEQ ID NO: 249321 - DNA, 61 bp, Homo sapiens; identical to SEQ ID NO: 207386
  chr1:202097362-202097423
  hypo

SEQ ID NO: 249322 - DNA, 91 bp, Homo sapiens; identical to SEQ ID NO: 207387
  chr1:202115847-202115938
  hypo

SEQ ID NO: 249323 - DNA, 289 bp, Homo sapiens
  chr1:202134668-202134957
  hypo
attccgaattagggcgcctccaccccgcctctccccttcttggttgctgatcaaggctaccagaaagaacagagtgagatgtccccaggtgaggtgggatgagggtgggatgagaaggtacgatgtttccgccacctcttggccagactgggacctcttccctttcacatcagtttccctggttgcaaccttcccccgcccgccgcccccgcctttcaaaagagcacatatgcgcaggcgcacacacggcctggaaaatctcctgagtctgcagtgctgagtttccagg

SEQ ID NO: 249324 - DNA, 189 bp, Homo sapiens
  chr1:202218132-202218321
  hypo
tttgagcatctcctgcgtgatagataccaggtaccttcctcaggctgatctccattcagcagcagggccaccagtaccactcaccgaggctccactgcagccgactcctgacttcgctctctcctccccttcacagtccacaccagtggtgtccatcagttcttcatctacaggcgaagcattcttacc

SEQ ID NO: 249325 - DNA, 98 bp, Homo sapiens
  chr1:202237360-202237458
  hypo
gcacctggcactggcggctggtgctggtgtgggaggctgggccctgccgcctatggaaggcccaagggcatctcctcactgctcggcaggtgccagcc

SEQ ID NO: 249326 - DNA, 461 bp, Homo sapiens
  chr1:202287405-202287866
  hypo
ctgctcactctggccgcagtgcagtgcagcgtctccgtctcctgtgtccgggcctatgggaagtccccctccctgggcagcgttcgagcaggggtcctaggctgcctggcactggcagggctggccgccgcgctgcccctggcctcagtgggagaatacggggcctccccactctgcctgccctacgcgccacctgagggtcagccagcagccctgggcttcaccgtggccctggtgatgatgaactccttctgtttcctggtcgtggccggtgcctacatcaaactgtactgtgacctgccgcggggcgactttgaggccgtgtgggactgcgccatggtgaggcacgtggcctggctcatcttcgcagacgggctcctctactgtcccgtggccttcctcagctttgcctccatgctgggcctcttccctgtcacgcccgaggccgtcaagtctgtcct

SEQ ID NO: 249327 - DNA, 37 bp, Homo sapiens; identical to SEQ ID NO: 207390
  chr1:202306336-202306373
  hypo

SEQ ID NO: 249328 - DNA, 241 bp, Homo sapiens
  chr1:202531788-202532029
  hypo
tctggccagggctccgaaatacttcttagaaaaggcgcaaactacccctgagcattaccttctccccactactttgttctcaaaaccaatttttatctttaatattatctcccacaggttggaatcgggaggtagtaatcctacaaccagtgattcttacggtgaccgggcttcagcaagagcccgtcgggaggcccgggaggcccgcctagccaccctgaccagccgtgtagaagaagac

SEQ ID NO: 249329 - DNA, 37 bp, Homo sapiens
  chr1:202830968-202831005
  hypo
gggggaaacaccctcattctgttttagttttaggact

SEQ ID NO: 249330 - DNA, 39 bp, Homo sapiens
  chr1:202831060-202831099
  hypo
gtgcatacttaagttcagcaaccactgcagaaggaaaga

SEQ ID NO: 249331 - DNA, 31 bp, Homo sapiens
  chr1:202859948-202859979
  hypo
ccctgaaattcaagcgcgtgctaagtgaatt

SEQ ID NO: 249332 - DNA, 101 bp, Homo sapiens
  chr1:202898228-202898329
  hypo
ttacaggcgtcagccacagcgcctagccctttgattcttaagggtactaaaaccatagccaagtgggtagcattctaaatttacaacgtgtccccatcttc

SEQ ID NO: 249333 - DNA, 167 bp, Homo sapiens
  chr1:202933725-202933892
  hypo
tcagtgtaatgcacctgtcccgccggcaatcattcccagtttcttcgccactcggggttctggtggagatttcttgttgggctgaatgttaaaatgccctgagaggtcaggtgaagagagcagtggaagaataaagtcaatacagcgaacttagaaaacaaatgcag

SEQ ID NO: 249334 - DNA, 150 bp, Homo sapiens
  chr1:202934387-202934537
  hypo
ggccctggcccttacgtgcatacacatgtgtacacacagccatactgtgccaagaggactatgggaactgataaagtgggagacaggctcaaggagaagacaggtcattaccttttccagtgtaagtgagcaacccgcttggcccccgaa

SEQ ID NO: 249335 - DNA, 37 bp, Homo sapiens
  chr1:202940666-202940703
  hypo
gaattacaggcatgagccactgcgcctggccccagct

SEQ ID NO: 249336 - DNA, 180 bp, Homo sapiens
  chr1:202995151-202995331
  hypo
gccaggtgcctgaaggcaagcgacacaattcactgaagagcatactacagatgtagtatccggatatcaagtttccccacttaaaaaatgggtgcgatcaaaggaaaagcaaggaacgggcaggagagcaagcgtgaaaggtgacaaacttgacaattacaaggccgagactaaggccaa

SEQ ID NO: 249337 - DNA, 163 bp, Homo sapiens
  chr1:203014550-203014713
  hypo
agttgagccaggcccgggagcgactggtcaccctaacaacaaccgtgactgaactcgaggaggacctgggcacggcccgccgggacctcatcaagtcggaggagctgagcagcaagcatcagcgggacctccgggaggtgcgtgagggcgcaggcctgctctg

SEQ ID NO: 249338 - DNA, 198 bp, Homo sapiens
  chr1:203017685-203017883
  hypo
tggtgcgaggcagacggctgtgcaggtgcgccagcgggaaaagatgaatgaggaccacaacaagcggctgtcggacacagtggaccggctgctcagcgagtccaacgagcgtctgcagctccacctgaaggagcgcatggctgccctggaggagaaggtgcccagaggggcggggttgggatgcgagaggttagtgct

SEQ ID NO: 249339 - DNA, 267 bp, Homo sapiens
  chr1:203098029-203098296
  hypo
ctggtctctgtgcccgggaacgtgctggtgatctgggcggtgaaggtgaaccaggcgctgcgggatgccaccttctgcttcatcgtgtcgctggcggtggctgatgtggccgtgggtgccctggtcatccccctcgccatcctcatcaacattgggccacagacctacttccacacctgcctcatggttgcctgtccggtcctcatcctcacccagagctccatcctggccctgctggcaattgctgtggaccgctacctccgggtc

SEQ ID NO: 249340 - DNA, 330 bp, Homo sapiens
  chr1:203134396-203134726
  hypo
tggtggtgaccccccggagggcggcggtggccatagccggctgctggatcctctccttcgtggtgggactgacccctatgtttggctggaacaatctgagtgcggtggagcgggcctgggcagccaacggcagcatgggggagcccgtgatcaagtgcgagttcgagaaggtcatcagcatggagtacatggtctacttcaacttctttgtgtgggtgctgcccccgcttctcctcatggtcctcatctacctggaggtcttctacctaatccgcaagcagctcaacaagaaggtgtcggcctcctccggcgacccgcagaagtactatg

SEQ ID NO: 249341 - DNA, 187 bp, Homo sapiens
  chr1:203139342-203139529
  hypo
gaggggtgcagagacgcggaggaagaagcagagacagggagagagttagcacagccagctccgggcccaaacccacctgccttctggatgtgggcgagctccttggtgacggtggccgaggtgctgagtccacacaggttttctgagaagacccggaaggagtacgagttgccgatgatgaggtcag

SEQ ID NO: 249342 - DNA, 35 bp, Homo sapiens
  chr1:203140950-203140985
  hypo
gcggaaggatgaagccgtctcgctgggtctcagct

SEQ ID NO: 249343 - DNA, 231 bp, Homo sapiens
  chr1:203192503-203192734
  hypo
tgccatgcagatacgtgaagcagctggctctgggggcagagcagcccccacatgtgctgtgggggctccagctctgggtccctgcacagactggtgatccccgccccgcccagccatacctgtaccagggttgtgaagcgctccttgtctacggcagggctcccctggcttcctgggtactcccagtcaaggtcaaggccgtcaaagctgtatttgcgcagaaacctgatg

SEQ ID NO: 249344 - DNA, 103 bp, Homo sapiens
  chr1:203298362-203298465
  hypo
tatcatacctgtatccttaccgcatagatgtgtcagggaaagaaatgtcatagaagtgaaagcactttatattttctgggttaaaaaaaaggtgtggcgccgg

SEQ ID NO: 249345 - DNA, 87 bp, Homo sapiens
  chr1:203429559-203429646
  hypo
ctgagatggctactaagtaacgtctacagtgtgggtatgctggacaaagggcggattcatatcgccagcaggatgaagcgggagagt

SEQ ID NO: 249346 - DNA, 153 bp, Homo sapiens
  chr1:203455859-203456012
  hypo
aacgacctagtggcgttccatgacttctcctcggacctggagaacgtgccacacctgcgctacctgcggctggatggaaactacttgaagccgcccatcccgctggacctcatgatgtgcttccgcctcctgcagtccgtggtcatctaggcc

SEQ ID NO: 249347 - DNA, 214 bp, Homo sapiens
  chr1:203524540-203524754
  hypo
tctcagatctccaaaggcagcgcaggaaggtagtgcaggaatgtggaaaggcttgcagcgtttggacggagacaggaccctgcgctggagtgggcgaggaggtgggaaacaccctcccgtcatgctcttctcgctcagctttgggaggctgagctttgacacctccttccctccctctcaccccagcctctgcggcccccaattcagctgactc

SEQ ID NO: 249348 - DNA, 125 bp, Homo sapiens
  chr1:203525857-203525982
  hypo
gagcagagtcactagcccagcggatcaaccagatcctgttgttcaagggcagcggcacgagagaggaggggcaccagaggcctgagaattagaaactcagtgacgggatcaggtctgcaagagat

SEQ ID NO: 249349 - DNA, 201 bp, Homo sapiens; identical to SEQ ID NO: 207393
  chr1:203690591-203690792
  hypo

SEQ ID NO: 249350 - DNA, 147 bp, Homo sapiens
  chr1:203708780-203708927
  hypo
ggaggagttgccacgaacaccactcctggatgaggaagaggaggaaaatcctgacaaggcttctaagtttgggactagggtgctcctgttggatggtgaggtcactccatatgccaatacaaacaacaatgcggtggattgcaacca

SEQ ID NO: 249351 - DNA, 161 bp, Homo sapiens
  chr1:204003761-204003922
  hypo
ctgccaccatgccggcgtatgttactaagttttggggtaatttgttatgcagcaataactctttcaagagactagagaggtgagagtttcgcaggggggcagtcttttaaagcagttccccataaaaatgtccttaaacaggacaggcatggtggctcaca

SEQ ID NO: 249352 - DNA, 283 bp, Homo sapiens
  chr1:204093885-204094168
  hypo
agcgcacctgcatcgtggagggcaagcggctgcgcgtgggagagtacaaggccctgatgaggacccggcgtcaggatgcccgccagagctacgtgatcccgtgagcaggcccccccgcaggcagccaggagactgtgtgtacatgtgtagctctcatgagtggctgggtgtcagtgtgtggcctgcctttgtgtgtgaccccaggggtgctgtgtgtatgcgtacgtgtgtgtgttatctgtgtatagctgagcctgcacgtgcgacccgactgtgtatggct

SEQ ID NO: 249353 - DNA, 76 bp, Homo sapiens
  chr1:204123782-204123858
  hypo
ctccacctgagtcccgttgatggcagatggatggcatcatccctgcacgcaagaacctgtgcgctaggcgaatgtg

SEQ ID NO: 249354 - DNA, 38 bp, Homo sapiens
  chr1:204124154-204124192
  hypo
aggcgaagccaatgcggttgttacgccgatcaaactct

SEQ ID NO: 249355 - DNA, 223 bp, Homo sapiens
  chr1:204124903-204125126
  hypo
ccagcctttctccctgccaccgagggggccgactcgaacctcacctgaaatacatagtccgcgctggtgagcgtgtattctttgcctcccaggtggaaagagatgtcggggagtgtagggccctcgttacacttcacgacatactggggtggggggcaaagagagccttcttgagtatggaagacgtctcagcagacaaggagtcctgcgctggtggcctggt

SEQ ID NO: 249356 - DNA, 35 bp, Homo sapiens
  chr1:204137844-204137879
  hypo
attacaggcgtgagccactgcgcctggcccgcctt

SEQ ID NO: 249357 - DNA, 34 bp, Homo sapiens
  chr1:204166951-204166985
  hypo
aatgggctgaagacgctaacttttttttttttga

SEQ ID NO: 249358 - DNA, 172 bp, Homo sapiens
  chr1:204197176-204197348
  hypo
ctggcagggtggagcgaggcccagcccctctcaccagacagcatgcggcccctgcgggaggcctcggtcgccagggcgcaggagatttcaatccgcttctcctgctcctgcagctggctctctgagtcctggggcacgtccacagagtccccctcgccgatgggcaccacgt

SEQ ID NO: 249359 - DNA, 399 bp, Homo sapiens
  chr1:204197939-204198338
  hypo
tccaggtcaatgtaccgttcagggatgaggactttgtctggagtggagagctatggaggggctggggtcaccacctctgtcccttcccagagtctcccactacagcccttcctggctccactcacctccttattgatgtccacgtcataatgctggggctctagctccattttgcgaagccgggcaatttcctcccggggtgtctcgtaggcatgcccgccaggctcctctgcccgcagggctgcctccaggttggagatgtctacctcatggatgctgcggtggcggcgcacctaggggacagcagcatcgtgattgcaccatggctacccatgcctccaggcagctctagctatgccctgtcctcgctttcccttcccagctcgcctgatctagctg

SEQ ID NO: 249360 - DNA, 195 bp, Homo sapiens; identical to SEQ ID NO: 207397
  chr1:204199536-204199731
  hypo

SEQ ID NO: 249361 - DNA, 58 bp, Homo sapiens; identical to SEQ ID NO: 207398
  chr1:204212336-204212394
  hypo

SEQ ID NO: 249362 - DNA, 103 bp, Homo sapiens; identical to SEQ ID NO: 207399
  chr1:204217170-204217273
  hypo

SEQ ID NO: 249363 - DNA, 52 bp, Homo sapiens
  chr1:204217934-204217986
  hypo
gctccctgggttaccgtggtcgcctgagacagctccacgcggatgttgatga

SEQ ID NO: 249364 - DNA, 424 bp, Homo sapiens; identical to SEQ ID NO: 207400
  chr1:204226524-204226948
  hypo

SEQ ID NO: 249365 - DNA, 305 bp, Homo sapiens; identical to SEQ ID NO: 207401
  chr1:204228355-204228660
  hypo

SEQ ID NO: 249366 - DNA, 100 bp, Homo sapiens
  chr1:204299942-204300042
  hypo
agatcaccctggctcagagccgaaaacaaacagcatctccagcctcatactgagtttggcctttcagtaccctgggttctggaaagaacaagcatctcgg

SEQ ID NO: 249367 - DNA, 165 bp, Homo sapiens
  chr1:204346113-204346278
  hypo
attactgagagtagcaaaggcgcgctctctctcaagaatgccaaacatacagtgggcatcgtccccctccctcttgaccacagccccataaagaagcaggacaggagaggagaactgctgtcctgggcacgctgagtctggggcgagggttgccaggaactgagt

SEQ ID NO: 249368 - DNA, 193 bp, Homo sapiens
  chr1:204407991-204408184
  hypo
gtggttaaagagctgtgtgccggcatcaggcacacacacacaccagacgcactccccacccacaaccctaccttctcatactcgtcctccccagggttgtgtttctgcagccagtctgccaggggccggtccttgaacgagccggtcaccccatgctccacctggatcttacgcagggtctcagcattaggga

SEQ ID NO: 249369 - DNA, 250 bp, Homo sapiens
  chr1:204424236-204424486
  hypo
tgtgtgcgcgtgcacgtgcatgcgcaagtgagaagggtgggggaggaagacgacatatgccgacatgaatgccaacacacgggggtccctgtggctcatgacaggtgcctgacagaagaggtcagagaaggccccggtttcccaggctgcctcctttgttctctgccaatcgcccagaggaatacattaagtaaggaacaaagagagaaggggaagggggttggggaaaggggaccggcaggggcggggt

SEQ ID NO: 249370 - DNA, 43 bp, Homo sapiens; identical to SEQ ID NO: 207404
  chr1:204486800-204486843
  hypo

SEQ ID NO: 249371 - DNA, 43 bp, Homo sapiens; identical to SEQ ID NO: 207405
  chr1:204487138-204487181
  hypo

SEQ ID NO: 249372 - DNA, 120 bp, Homo sapiens
  chr1:204493508-204493628
  hypo
ccatttaccctttccctgatgtggcttgttagtcatcagttttaataattgttgccttttgttagaaaaaggcataaatgaaggttaacttaagtttatttaaaaatctattttccggct

SEQ ID NO: 249373 - DNA, 96 bp, Homo sapiens
  chr1:204518656-204518752
  hypo
tgagaaaagaccacgagacgggaacattattcatggaaggacgggccatcttgtcacttgttttcactgtgccagaagactaaagaaggctggggc

SEQ ID NO: 249374 - DNA, 624 bp, Homo sapiens
  chr1:204530910-204531534
  hypo
gcactgggggataccgtgatgaagatgaacatggttcctgttctcctgtctagggaaactggttaagcatgtaaatattagcatagtgaatgttttgttgtgagactacatgctgctatgagaaatacagaagggggacgtaatgtagccaagagcttctgaacaacctccgggaagagatgagctgagattaaaggaaggttaggagttaggagaggaagggaaaagtgccgtagttaggaggaaacatgccaaggtcttgaggtgagaaaacagtggcatctgggaagaactagaaagtttagtgtcgctgaaagcatggacagagagagatgagtgaattgaattgcctgggcatcctgggaacgggaagacaccctgatggcagggaacccgcgcctgcgctttcggggtcaggtccaggtctgccccgccagggctgaagccagctcctggtggggctgcagtgaggcggaagaggtgggatgctgctgcctggcggtgctgcggcggcagacctccacgaggaggtcctgggctaccgcggggtacacaggcgggcggaaaagggggagcagagtcagggggcagttgggaagctcggagacaaaaggagggagggag

SEQ ID NO: 249375 - DNA, 263 bp, Homo sapiens
  chr1:204531594-204531857
  hypo
ccgaccctgcttagtttccgagatctggcgtgttcagggtggtatggccgtagacactaatggtggtgcctggctgcctcttcaagagcccggcccagccacgcccgcccgactccaggcgtcactgccaccccagggtcgtggggctcggactggggacccctgagctgctcgcctgcggtcggactgctctccccttctacgcccaagcaccgccggtctgccctgctgcgccttccaccggcctcccagagcctccagcc

SEQ ID NO: 249376 - DNA, 178 bp, Homo sapiens; identical to SEQ ID NO: 207409
  chr1:204537857-204538035
  hypo

SEQ ID NO: 249377 - DNA, 121 bp, Homo sapiens
  chr1:204540721-204540842
  hypo
caaattaatgtcagcattcccgatggcttctgtatgcatctgctctttggattcttttttgagcggtcgtaacatcttactagttcccttattaatcgacgagttaaatcattggcatgtc

SEQ ID NO: 249378 - DNA, 100 bp, Homo sapiens
  chr1:204607424-204607524
  hypo
tcattgaatccccccgcaccgttggagtcagaactactggcacccttattttacaggcaaggaaactgaggcttacagatgtgaagtaacttgcccaagg

SEQ ID NO: 249379 - DNA, 103 bp, Homo sapiens
  chr1:204665810-204665913
  hypo
actataaaaggagagcgtgagggatctttgtgaatggaacagttccgtgtcttgattatggcgtgattacatgaatcttcacacgtggtaaaattgcatggaa

SEQ ID NO: 249380 - DNA, 46 bp, Homo sapiens
  chr1:204721217-204721263
  hypo
tgtagccgcccaacccgcagctacagacccacgcctcctgctgtat

SEQ ID NO: 249381 - DNA, 102 bp, Homo sapiens; identical to SEQ ID NO: 207410
  chr1:204913446-204913548
  hypo

SEQ ID NO: 249382 - DNA, 195 bp, Homo sapiens
  chr1:204915799-204915994
  hypo
gtggtcatgtacggcgagggcattggcatttctggcaatttctatagaaacaagttaaagtacctggccttcctctgcaagtggatgaacaccaacccttcccgaggcccccaccatccctgggctgccagccttctttttcggcagaccccacggggcatgctaccccacaagaccaagcgaggccagccgccc

SEQ ID NO: 249383 - DNA, 212 bp, Homo sapiens; identical to SEQ ID NO: 207411
  chr1:204948536-204948748
  hypo

SEQ ID NO: 249384 - DNA, 212 bp, Homo sapiens
  chr1:204950968-204951180
  hypo
ttgtcaagtggaggcggagagagactcgagaggcctggaacaacgtcacagtgtggggctctcgctacgtggtggggcagaccccagtctacgtgccctatgagatccgagtccaggctgaaaatgacttcgggaagggccctgagccagagtccgtcatcggttactccggagaagattgtgagtagtctcctccccgtccccccatcagg

SEQ ID NO: 249385 - DNA, 199 bp, Homo sapiens; identical to SEQ ID NO: 207412
  chr1:204954945-204955144
  hypo

SEQ ID NO: 249386 - DNA, 313 bp, Homo sapiens; identical to SEQ ID NO: 207413
  chr1:204955353-204955666
  hypo

SEQ ID NO: 249387 - DNA, 382 bp, Homo sapiens
  chr1:205038772-205039154
  hypo
ctctgactcaaacgcggataacttcctgtcccccttccacgcacccgctgccccttacgcgaatccacgctgcaggcgtaggcgtccagggccgctactcttggcaaaggttgggtggggccagggaacgggcagggacacatgccgcggaccctcgcccatgccatgctcttgcccctcagcccatgtcacgggagtaccagaacggagacggcttcggctacctgctgtccttccgcaggcagggcagcactcactggcagaccgcccgggtgcctggcgccgatgcccagtactttgtctacagcaacgagagcgtccggccctacacgccctttgaggtcaagatccgcagctacaaccgccgcggggatgggcccga

SEQ ID NO: 249388 - DNA, 45 bp, Homo sapiens
  chr1:205144484-205144529
  hypo
gctgggattacaggcgtgagccaccgtgcccgccagaagctgcct

SEQ ID NO: 249389 - DNA, 41 bp, Homo sapiens
  chr1:205186851-205186892
  hypo
tcatcagtaagacagtagatcggcattgcttttctttttct

SEQ ID NO: 249390 - DNA, 101 bp, Homo sapiens
  chr1:205210756-205210857
  hypo
agcagggtatgtccgaccatgactccccagatgagaaggagcgctctccggagatgcatcgcgtctcctacgccatgtccctgcacgacctgcccgcccgg

SEQ ID NO: 249391 - DNA, 70 bp, Homo sapiens
  chr1:205238244-205238314
  hypo
tgagcaggaggctcgcgacgacaatgtggcagagtatctgaaactggccaacaacgcggacaagcagcag

SEQ ID NO: 249392 - DNA, 256 bp, Homo sapiens
  chr1:205245773-205246029
  hypo
cactcagccagaagagcagtcggggtggtgacagcagcgatgcccgccagacacagggcctcccaggagagcactcccgccttggtccccccataccccaaggctcgactgtccggatgaagcatcctgggcccagcggtgccacctcagccatgcgcctgcctccaggcagccatccactaagctggctctgattccaaaagccccagaggtgatcctgagaggtctgggtgcccagtctcggcgccctgccagc

SEQ ID NO: 249393 - DNA, 32 bp, Homo sapiens; identical to SEQ ID NO: 207415
  chr1:205269967-205269999
  hypo

SEQ ID NO: 249394 - DNA, 306 bp, Homo sapiens
  chr1:205273331-205273637
  hypo
cgggacttcttgagcgaatgctggcgctccaggccaggggtggtgcttcccccaccaggtgcatgctgcttgaagaagctgcacaccttggccccattctccaggagggggcgggaggaacgccggagccagtcagccatggaggcgcgggcagagtcactgccagggtgcccaccctcatgcggagcctcctgctctcccactcgggtggcgtagccccagttgacccaccagtgactggccacatcctccagggtggcccggcgggtggggttcaccatcaacagccaccggatcaggccacag

SEQ ID NO: 249395 - DNA, 86 bp, Homo sapiens
  chr1:205310685-205310771
  hypo
actacaagcctgggtcgacagcaccggctcagtgccttctgttaccctattccatcaccctaattgccacctgttactgaataatc

SEQ ID NO: 249396 - DNA, 48 bp, Homo sapiens
  chr1:205476129-205476177
  hypo
ctgcctacttgggccgtcccgcactcgggaatgcgtcctacactgtag

SEQ ID NO: 249397 - DNA, 188 bp, Homo sapiens
  chr1:205548918-205549106
  hypo
gccatctccctggtgtttgccgtcatccccttctgccgcgacgtgaaggtgctggcctcagtcatggcgctggcgggcttggccatgggctgcatcgacaccgtggccaacatgcagctggtaaggatgtaccagaaggactcggccgtcttcctccaggtaagcccggccagcaggcacagggctgg

SEQ ID NO: 249398 - DNA, 107 bp, Homo sapiens
  chr1:205631155-205631262
  hypo
ctcgagtgccgaatcgctgcaccagccggtccatgaccagagagaagaccagggagatggcgcactgcaggaacagccccaggctgcccatccgaacgcctgcagag

SEQ ID NO: 249399 - DNA, 145 bp, Homo sapiens
  chr1:205631578-205631723
  hypo
cctgagctggaaggcgctggtgagattatttggaaagtcgttgggggagcagagggcacactgcggctggaaccaggcagatctgaaatccagccttaactcctccactccctctagactttgaataagctccgcctttccttct

SEQ ID NO: 249400 - DNA, 861 bp, Homo sapiens
  chr1:205631753-205632614
  hypo
tcctagagcagccagaggccttcctgaaaccgcaagcagagatgttccacacccatgagaagccgtgtatgcagatggggtccatccccactttcctgacagagaagtcggggccaggatggagaggcaccagcccagacacagccccgagtgtcgtctctggtgggcggctcccacaccagcctctgctggctgccaaggccttaccttcatcatagtgtctccgggcctcggtgcccggctcagctctgggcacgccctggtacagcccctcgcccacgaaatccgtgtaaaacagcgtgaaggtcatgagtgccatccagctgcacagctcagccacgaagagccggcgcagggtgcggggcatgcggcagcacagctggtgcagccggggaagcagggcgcccaggttccggaaagccaagcgggcccggcatggacagcagtggggcgacaaggagggggccgacagcccttctgctggctcggtggggcccagcgctgcctcctcagccaccagcagtgtggctgctacgcaggtgaggaagatgagggtgagcaggccaaagaggcactcctcctgggtgcccaggtagggggccagggcactggtgtcccagtcaatggcaggcaggaggtagcccaggcagcccccaagactgatcatgaaggcatagacagagtaggcctggcgacagtggtccgggtcccggaagaggtcagagagcagggcctccagtggagtgaagcacacctggccacagaagtccagcagccccacgcccaggatgagcagtgccagctccaggggcctgggatccgggcacagcagccctgctagccagccggcccttgggatga

SEQ ID NO: 249401 - DNA, 34 bp, Homo sapiens
  chr1:205721883-205721917
  hypo
ttttttacaatagccatcctaatgagtgtccata

SEQ ID NO: 249402 - DNA, 123 bp, Homo sapiens; identical to SEQ ID NO: 207421
  chr1:207087070-207087193
  hypo

SEQ ID NO: 249403 - DNA, 189 bp, Homo sapiens; identical to SEQ ID NO: 207422
  chr1:207088568-207088757
  hypo

SEQ ID NO: 249404 - DNA, 98 bp, Homo sapiens
  chr1:207105076-207105174
  hypo
tccaaattccctggagttctcgaagtctgacatgctaatgtctgtcctgtagcttctgattgaaactcggtctgtccgggaggaagaggagttggtgt

SEQ ID NO: 249405 - DNA, 183 bp, Homo sapiens
  chr1:207130059-207130242
  hypo
aagcaaggggcacggcgatccagaacatagctgtggaggtgggctgctccgagtggcctttgctgaagtacacaccttgcagagcctgctccctcattggttgaataggatccatgatgtctgtcctatctccgttacaggattatttggggcaggtcattgagaaagcgaacaggaaaatag

SEQ ID NO: 249406 - DNA, 140 bp, Homo sapiens; identical to SEQ ID NO: 207423
  chr1:207182657-207182797
  hypo

SEQ ID NO: 249407 - DNA, 297 bp, Homo sapiens; identical to SEQ ID NO: 207424
  chr1:207195376-207195673
  hypo

SEQ ID NO: 249408 - DNA, 592 bp, Homo sapiens
  chr1:207200594-207201186
  hypo
ctaatgaaaatcggcggaaaaagtctcatttgcccagttgctctctaaggtcgtcccatcctattctctatagagccagggctgactcaggcagaaagcacccactggtgttgtgaatcactccccaacaatgaaagagaaggtgcagtgagccaggatgggtggcaggaaaggatagggcagggcagggcagggcaggtgtgcagagagcagaccaggttgcgggagggagagtattacgtacagatccagagcgggtggaggtgctgctcatcatgctgtcacagctgccgacacgggtcacgggttctgagccagtccccgctggccacagctccctctcgggcatcacccgaaacaaggtgcagggatggcaaagggggcttctagaggggaagcgaggggaagtgaacaatgtcccaagccgggcctgaaaagagaagaatcaaagccacacatgagccgaggcttcggcaaggctctgcccaggccctgggcggcatggcgggaaggacaccaagcaagcagagagctggaaggggggcatgaacagccactgcccgacacccccggcctgcatggaaggaccctg

SEQ ID NO: 249409 - DNA, 153 bp, Homo sapiens
  chr1:207227084-207227237
  hypo
ctagggagagggtgcggagcagggcttgagaatgcactagaggagaaatgacgacgtgctagggctgtcttggggtccagttactgtttttccttcagggaatatgttcgagattttcccacgtccctcacttttttcttttctttctttctt

SEQ ID NO: 249410 - DNA, 92 bp, Homo sapiens
  chr1:207227537-207227629
  hypo
tgcccggcctcactgtttgcaaaactgagtcctaccgttagattggagttaatttcctggtaatgtacttcgtctatacataacccacccca

SEQ ID NO: 249411 - DNA, 127 bp, Homo sapiens
  chr1:207240934-207241061
  hypo
ctcatgaatatccacgtccagcctcgcaccatttacctttgccggcatggagaaagcgagttcaatctcttggggaagattgggggtgactctggcctctcggtgcggggaaagcaggtgagtaatt

SEQ ID NO: 249412 - DNA, 104 bp, Homo sapiens
  chr1:207405710-207405814
  hypo
gaacagactaatccacgggctttagctatctcatagtatcacatctctccccttcattgtcctgtttcctcacagagacttggctataacgggcatggggtctt

SEQ ID NO: 249413 - DNA, 153 bp, Homo sapiens; identical to SEQ ID NO: 207428
  chr1:207478915-207479068
  hypo

SEQ ID NO: 249414 - DNA, 223 bp, Homo sapiens
  chr1:207596170-207596393
  hypo
ggctatgggtgccacgcactatttgcacctcttctaacttctgaatagtctcagttatatcggtatgcctccctggcaaaaggtattgacgagtggaggtaacccatcggggttgtggcagaacttggggctaatgatgtgtatgtccccgcagtaccagctttgctacatgaactgggagtctgaattctccggccatggtgtataagtccagaccatgcaa

SEQ ID NO: 249415 - DNA, 102 bp, Homo sapiens
  chr1:207596453-207596555
  hypo
ggccaagcagccaatgccaagatgcaggaacgcaggtttcaccttcaccgactggccaccataaccgtgagtgaaagcagctttgcccggaaacttatccgg

SEQ ID NO: 249416 - DNA, 108 bp, Homo sapiens
  chr1:207819222-207819330
  hypo
gggagcgtgctgtgcgcaagtggcctgtgtgcggagttcactgtgggcaagacagctcactgtttgctttgagtggagcgagcgcggactctgcggctagggagggca

SEQ ID NO: 249417 - DNA, 36 bp, Homo sapiens
  chr1:207880637-207880673
  hypo
tcatcatgggacatcgtgaaatcatgaaaaaggtag

SEQ ID NO: 249418 - DNA, 42 bp, Homo sapiens
  chr1:207921513-207921555
  hypo
cacctatccccacacgggtagaacatcatggtgccctgcatt

SEQ ID NO: 249419 - DNA, 41 bp, Homo sapiens
  chr1:207921795-207921836
  hypo
actctccactccttaaaaccactccacgtgtgcccatctcg

SEQ ID NO: 249420 - DNA, 124 bp, Homo sapiens
  chr1:207936510-207936634
  hypo
cttgggcctgctgccgtccggcctcccacctccagctgcaattgcattctgacctgggcaagtaggaacacgtagtggagatcctgatggagacctgagccaggcgtcccggagtgctggccag

SEQ ID NO: 249421 - DNA, 37 bp, Homo sapiens; identical to SEQ ID NO: 207429
  chr1:207963085-207963122
  hypo

SEQ ID NO: 249422 - DNA, 41 bp, Homo sapiens
  chr1:207974074-207974115
  hypo
aactggctcactgggccaggcgaggtggttcacgcctgtaa

SEQ ID NO: 249423 - DNA, 409 bp, Homo sapiens
  chr1:207991543-207991952
  hypo
gaggacggtttgtccgcattcagtggcagtggaggtgcatcttctctctcggtcgcaagaaggtggggtggggtggggcggggcggggcggggcggggcggggcggggcggggcggggcggggcgggacgggacgggacggggcgggacggggcggggcagggcggggggatcacgcgcctatagcgcaaagctgcggtatggagaaaagcctagaacccacagccgccatgatgacgcaaacaaaattaaaagggtcaagaactcaaggcccactgtttcacctaagaagaaaaggaagaagatgaaggggagaagagaagctctgatttgggtcaatatggaaaggggaggctgacgcaggctgcccaagagccagcctttagcttagtgacggtgatgcggatccg

SEQ ID NO: 249424 - DNA, 60 bp, Homo sapiens
  chr1:207992293-207992353
  hypo
cctgctgagttacctggtgtcgctcccatcctgatgcccgggcggtggccgccttctctg

SEQ ID NO: 249425 - DNA, 282 bp, Homo sapiens
  chr1:207994389-207994671
  hypo
acactcagcttttccgaactactccaagcaccaggctgatgaggacatgggaaacccacgctctggcaaagccgggcccaggtgttgaacccctacccagacgccttccacctgaatccccacccaggactgtgtccaagggtgggactaggcggctctgcccctagagccaccttcattgcggcagccaccactgtgcctgcctctgctgtgcttttgcccccccttcccctcctccgtcatagcccccgccccccgcccactctgcggaactggcacagc

SEQ ID NO: 249426 - DNA, 103 bp, Homo sapiens
  chr1:207995189-207995292
  hypo
agaagggcggtgctcgtcctaggccagagacccagggcgcactgcgcttccagatgcgcagtcacgggtgggggccactgcgcatggcgcagggcttggtaaa

SEQ ID NO: 249427 - DNA, 212 bp, Homo sapiens; identical to SEQ ID NO: 207432
  chr1:208212991-208213203
  hypo

SEQ ID NO: 249428 - DNA, 78 bp, Homo sapiens
  chr1:208229181-208229259
  hypo
ataactactttcactcctagcgaatatttacttaacatgcaataactgtcttattacgttttagcatattagattcaa

SEQ ID NO: 249429 - DNA, 109 bp, Homo sapiens
  chr1:208231748-208231857
  hypo
tggtgaatcattaccgtgctggcgaatcctgcccgcgcccaggactctgcaccgggtccttttagccaaattcatctctcacagacatctgtaacgattgtgcctgctg

SEQ ID NO: 249430 - DNA, 165 bp, Homo sapiens
  chr1:208328464-208328629
  hypo
aggtgcatggagcgcgaaccccttgcatagtggccgttccagcctgcttttgaaggcagcctctctcagagcaaggaggagtcgtttgactagggtctccacaggaccggtgctggggacacagagggccgcagtcactgggccgaagggatggcagccttctgt

SEQ ID NO: 249431 - DNA, 751 bp, Homo sapiens
  chr1:208404328-208405079
  hypo
tgccaagatgtagagacactcggcctgaaggacccttaagcacctggagtggcatcagtcccttggtgaaggagcacagttagtagacatttgagacccttgaggcgctatcagcccagccccggacctcttggatccctcagcccactgtgagggagagtgacgggcgcagttttctgagaggttgagacagggggaagaatgtgctgatggggagcagggtgggaatggcaggccggggagggaggacctagggcaggagatgaaaagtgctccctgagtgagaatctggccctggatgatgaatggggtgtgagagagaagccgggaaaagggtaaacagccaggagggacccaggagggaagcgggagggaggggtgaggagaaagaatgtggaggtcaaggagcaaagaaaatgctcctggagtgattgactcaagatccaacatgttccgcaccggatgaaggcacatgtgcacacagatgtgcctggtcacccgccctcccctccacacgcctgcgaaggtgtgagcacgtctgtctgctctcctcccagatgcattccatgcccttcggaaaaacctttcttctgatgtttggttctgagtgtgcaagggaccccactgtaatacgaacaagtatttgtgcaatgattttatagtttcctaaaaatttcacatgcatcatcccgctaacgtaccccttactcaagctggtgaggttgagagcagcatacgcatcaccagttta

SEQ ID NO: 249432 - DNA, 34 bp, Homo sapiens
  chr1:208441467-208441501
  hypo
cacttcaccggcgtcgggccgtaacccactttgc

SEQ ID NO: 249433 - DNA, 38 bp, Homo sapiens; identical to SEQ ID NO: 207436
  chr1:208837628-208837666
  hypo

SEQ ID NO: 249434 - DNA, 147 bp, Homo sapiens
  chr1:209014977-209015124
  hypo
tgcaaagcaccttccgctggcagtgtcgagcgctgtggggaaggaaagccacgtctggcattatttaattgacctccccattagcagcgctggctactatggccatggagccagatcatgcagactaaatgccggtccctgagcaca

SEQ ID NO: 249435 - DNA, 223 bp, Homo sapiens
  chr1:209187689-209187912
  hypo
ggccttgacacttctatgagtgcattttcttttttgtttctgcccttgggagtgttctggctctccggggacccatggcagtatatctagcttagaatcggtgattagtaagtgtttttgaaaagattatcccgacaacaaggtgaagagtgtatcagagaggtgccagagtcggaagcctaatacaaggtgtatgggcaagaaataacggtagcgtggacca

SEQ ID NO: 249436 - DNA, 40 bp, Homo sapiens
  chr1:209556781-209556821
  hypo
ctggatagggactcctttccagtagcgcatttaacagaag

SEQ ID NO: 249437 - DNA, 197 bp, Homo sapiens
  chr1:209803089-209803286
  hypo
gtctcctgaatggaagctcccgggcgccggttccggaaatagtgcagctgacaccgctcacagttcttgccttcggtgtggtcccggcaattgtcacacacacctccatatgccccctggctggcggcaaacacagcggggtcaaagtgacatgtctctgagtgcccattgcagtcgcaccctggaaaaagagagtc

SEQ ID NO: 249438 - DNA, 51 bp, Homo sapiens
  chr1:209823346-209823397
  hypo
gtccacaggtagatgaagctcggagaaaccgggtcctcccaacaagcaggt

SEQ ID NO: 249439 - DNA, 101 bp, Homo sapiens
  chr1:209825651-209825752
  hypo
cagagatacagtcctcctcccgcatccggcccgcaccaggcaggtaaagacaggtaacataccttgctgtgtgttctgccgttctttctccagatcgcctg

SEQ ID NO: 249440 - DNA, 96 bp, Homo sapiens
  chr1:209989431-209989527
  hypo
ctcagagcaggcatcgcaacctcccagttactattctgtgctgtggcaagtgccagcttgtcctctcttccccacccagcccgggaaaccggcagc

SEQ ID NO: 249441 - DNA, 213 bp, Homo sapiens
  chr1:209999728-209999941
  hypo
caccccagcctctccgaatctaattaggaatagtagatggtcactagaactgacaagaatcgcattctaatggttttattacaacttctatggtgtgacacagtatcagggaaaacccaaatttcccacagtagcactccaatagcagagctattattttgcttctcatttctctcattttggacgctcctgttttaccgtaaatattcaagt

SEQ ID NO: 249442 - DNA, 40 bp, Homo sapiens
  chr1:210002384-210002424
  hypo
ctggaattacaggcgtgaaccaccgcgcttggcctgtttt

SEQ ID NO: 249443 - DNA, 120 bp, Homo sapiens; identical to SEQ ID NO: 207437
  chr1:210032048-210032168
  hypo

SEQ ID NO: 249444 - DNA, 113 bp, Homo sapiens
  chr1:210495070-210495183
  hypo
agggctggctgctccggctccaagtcgggaagatccagaggccttacttctccaagacaagcagagatcctcaacgttcagacacttctgccggtgtgtgaagcattaaaggt

SEQ ID NO: 249445 - DNA, 46 bp, Homo sapiens; identical to SEQ ID NO: 207440
  chr1:210560011-210560057
  hypo

SEQ ID NO: 249446 - DNA, 148 bp, Homo sapiens
  chr1:210637837-210637985
  hypo
ttgcctttcaggaggactggcgttagcccaggtgctctttttctacgtgaagtacttggtgctctttggcgtgcctgctctgctcatgcgcctggatggactcactccacccgccctcccccgctgcgtgagcaccatgttcagtttc

SEQ ID NO: 249447 - DNA, 42 bp, Homo sapiens
  chr1:210699157-210699199
  hypo
tgtaaaaagctctgagtcagcgatgttgcttagaaagatggg

SEQ ID NO: 249448 - DNA, 31 bp, Homo sapiens; identical to SEQ ID NO: 207441
  chr1:210714466-210714497
  hypo

SEQ ID NO: 249449 - DNA, 691 bp, Homo sapiens
  chr1:210856748-210857439
  hypo
ctcaatattggtcattttggcgtttaaggccttgatgtcctccttcagctcgtgcctcacctccaggactgtggcctgcagcgtctgctcagggatggggtagaacgaatgcttgacctctgccaggatgggactccgatcctggggactcctggcctcacccacgttgtccaggcgcaagtcgctcttggtgatgccactgtcacacgagtctgtcttcttcagtgtggcctcgcctgacgcttttgtcctctcgggaagtgtctccatcgactcagccttggacaccttgttccagtcctcactcttcccgcaagcatctttgaagcgggcccagcttttgcgcttggcacaatcgcccccgccccccttggggcccaggcactcggaccctggcgcctgtagctttgcgtggtctggcaccccggaggtggaggctgcctggaaggatacgggcgtggcaggactctcacgcacggtgaccacgctggccttcacgaggctgtggttggcggaggcatgctctgtaaggacattgcccttctccacatctaggtcatccaggtcccggccccctctctcagctgccagcctggcctctttctgctgtcggaatctctggaagaggcgccggacagggtggtccgggggcaagatcaggggggcctcattctttcgtttcatgcgttct

SEQ ID NO: 249450 - DNA, 105 bp, Homo sapiens
  chr1:211430456-211430561
  hypo
ggcctatcaagccattctaaagcattctttccatgtccagcttcttcttttcctcttctaacccattacagtcaggcatttccaagatttcgccttagacctttt

SEQ ID NO: 249451 - DNA, 76 bp, Homo sapiens
  chr1:211606711-211606787
  hypo
aggtgtgagccaccgtacctggcccatgtacttcttacttagtttttcttcccgcgtcttatgtttacatttgcaa

SEQ ID NO: 249452 - DNA, 242 bp, Homo sapiens
  chr1:211712704-211712946
  hypo
gctcccactctgcacctctgcgacacccttgccttcacgtgaatgtcccttcccttcagcctgcccaaatctccacgtccttctgaacccagcttgcgtgctcacgcctgtgaagtccctgaccatgaaaagccattccttgccctggcccatcagttatagcctgtgcccggcaggcatggattgccgcccgttattccatgtaggtcctccctggtgacggctgtgctgcccaaggacaa

SEQ ID NO: 249453 - DNA, 77 bp, Homo sapiens
  chr1:211801003-211801080
  hypo
tagaggtagtttggcgggggcggtgttctcgtttttttgtgttaatttttttttcttttgagatggagtctcgctct

SEQ ID NO: 249454 - DNA, 70 bp, Homo sapiens
  chr1:211824879-211824949
  hypo
agcacatcctggcagcgtgttctccttagcttatgtcagactcctggatctggtccgccaggcctggttc

SEQ ID NO: 249455 - DNA, 52 bp, Homo sapiens
  chr1:212120899-212120951
  hypo
gggggcactagctgcgggaggtctgttcttgcagacccgattcagcaacgga

SEQ ID NO: 249456 - DNA, 166 bp, Homo sapiens
  chr1:212178248-212178414
  hypo
atgtgattaatggacgccctcatacacagcaggaatgtaaactggttcattgactttggaaaacagtttgacatcatctgttaaaactgaagatacgcattttctgtaagtcagaaatttcattcccaggtatacactctaaagaaatttgcgtgtgtgaactggg

SEQ ID NO: 249457 - DNA, 33 bp, Homo sapiens; identical to SEQ ID NO: 207444
  chr1:212321601-212321634
  hypo

SEQ ID NO: 249458 - DNA, 240 bp, Homo sapiens
  chr1:212330210-212330450
  hypo
ttctccgggtattccggtttcctcccacatcccaaagctgtacccgtgatgctcattggtgtgcctcaatggtcccagtctgagtgagagtgggtgtgtgtgtgagtgtgtcctgcgataggatggtgtcctggccaggatgggttcctgccttgtaccccaagctgccgggatgggctctggcaaccagagatcctgaactggaataagcgggtaaatagtgatcgtacttgattttat

SEQ ID NO: 249459 - DNA, 44 bp, Homo sapiens; identical to SEQ ID NO: 207445
  chr1:212456677-212456721
  hypo

SEQ ID NO: 249460 - DNA, 39 bp, Homo sapiens; identical to SEQ ID NO: 207446
  chr1:212555382-212555421
  hypo

SEQ ID NO: 249461 - DNA, 39 bp, Homo sapiens; identical to SEQ ID NO: 207447
  chr1:212555661-212555700
  hypo

SEQ ID NO: 249462 - DNA, 204 bp, Homo sapiens
  chr1:212605109-212605313
  hypo
catcctcattcctccgcatttatgcacctgatcctttgaccaaagtgctcttccctctagaccgcctccttcgcctcctgtagatttttatgcaaataccctgttctcagtgaggccttccctaacctgcctatttaaaatgaccatccccataaccgggcaccgttcctcacacctgtaatcccagcactttgggtggatgag

SEQ ID NO: 249463 - DNA, 209 bp, Homo sapiens
  chr1:212647420-212647629
  hypo
agaaaaagagagagagagagagagagagagagaacaggtggcttaagataggcaggtgaggagcggggccctcagtgtgagccagttattgtccatgcagccctttggccagccctagctctgctgcagtgtctggatccaagggcttccctcatgtgctggctcagcctggctcctctgctccttcacaggtccgcggatcaaaactc

SEQ ID NO: 249464 - DNA, 32 bp, Homo sapiens
  chr1:212963971-212964003
  hypo
aaaggttaataggccgggcgaggtggctcacg

SEQ ID NO: 249465 - DNA, 473 bp, Homo sapiens
  chr1:213029991-213030464
  hypo
tccagatctcaagacggtgtctggcacataccattcaatacaagtttggtacctggaacccactgaatatgcatgtccagtaactattaactacatgtgttggtgcaagggagaaggtcgagcaaccggatctgctccatcatagcccgtctcagtcgcttcattcaagtcagcggggtgaggttgaggggattccaacttcacaagggcagatttctcatggactctctttctctggttgtactggaacactttctggcgttattcctctgctgggacagcatgaacttatgaaacgtggtcctgtctgccctaaagccagggtctcaccgacaaggacagcgatgctggggcgagaaataaagttcgtcctgggcctgcgtacggtacagcgcccttgggaagcccttgtggagttaagggtgatgcccacttctttgtctccctcattctgtttcggtggctctctcgtt

SEQ ID NO: 249466 - DNA, 42 bp, Homo sapiens
  chr1:213117545-213117587
  hypo
tatagcaatgtgagaatggacgaatacatcctgtctctacaa

SEQ ID NO: 249467 - DNA, 204 bp, Homo sapiens
  chr1:213134379-213134583
  hypo
tgaccatgctgccatcggctctcaggagcacctctctctctggtggctttagccctctgcctgcccccagaagctgggccccagagcgcctccttcataaacacctcctcttctctatttttctgcagccttcaataccccaggtcccaaactacaggctgtcgatgacgatcccagactggctccaggcgatccagaattaca

SEQ ID NO: 249468 - DNA, 180 bp, Homo sapiens
  chr1:213189654-213189834
  hypo
aaacagagcagtgaaaatttttaattgcccaaagtgcagattcccagctgaggctgaacaacgcatcctctgggtgcccatggaactgaggtaccacagaattttgcaattaatgttgcggaagcacagccatagctctcactttaaaatgtacgtgtatgggccgggcgcggtggctca

SEQ ID NO: 249469 - DNA, 35 bp, Homo sapiens
  chr1:214503108-214503143
  hypo
gcatccagtgatgacggcaacgaagcatttgcgcc

SEQ ID NO: 249470 - DNA, 226 bp, Homo sapiens
  chr1:214503350-214503576
  hypo
cagttcaggaattccgtgccttaaagtaaacagcgcattcctccgctgcagcccgccttatcctctgcatgggccctgcaggtgactgcaaaggcacgggaatgacaaggattgagtttacctgtagcagactgaagctttatctttttggaccccgtaggtttttaccagctatattgatctcctgtacccaacggaagatagaaatgaccggttaagagattct

SEQ ID NO: 249471 - DNA, 762 bp, Homo sapiens; identical to SEQ ID NO: 207451
  chr1:214556792-214557554
  hypo

SEQ ID NO: 249472 - DNA, 38 bp, Homo sapiens
  chr1:214557876-214557914
  hypo
gcctgtacgagggcacgatgatcgcgctgtgccggtgg

SEQ ID NO: 249473 - DNA, 124 bp, Homo sapiens
  chr1:214566283-214566407
  hypo
atttataaccctgacgctctttgaaacaaaattaaacacattgggcgcccaaaccgctgaatgtattcagctgaggaacgtcttttgaaggtaaccaagaaaaagacaacgatagagtgagccc

SEQ ID NO: 249474 - DNA, 189 bp, Homo sapiens
  chr1:214569256-214569445
  hypo
atccccctacccacacgtgaggagaagagcctgctgcagtcccctaccggtcaccacattgcattataatttttacttctgtgatgagatctctgatgagaccaagcagaccacaggccccatacccggtgcagggattctgccttcttcgtttctgtgttccaagcactgaatcgagtacctggccca

SEQ ID NO: 249475 - DNA, 363 bp, Homo sapiens
  chr1:214637793-214638156
  hypo
atgatggataagatcacagccgtgctaagaataacaggattcttataaacacatcgtcgcttaggccaaaaaacacaacagatgccaaaaaacagatggctggtcccttcggtgagttctccttcacatacccaacacgcatgcacgcgcacatgcgcacacagacacacccctcttacctctcgcagctccagcctctgggccacagcctccaggcattcttgccctgtgctttccaccgacagcgtgcactcgataacattgctgtccagcaggcgaatccgtgtgacaaagcagttcttgctcaggacgttgtagcgccgtgtccggcggagcttcagaccaaaaggcatggctatgtgg

SEQ ID NO: 249476 - DNA, 51 bp, Homo sapiens; identical to SEQ ID NO: 207454
  chr1:214638186-214638237
  hypo

SEQ ID NO: 249477 - DNA, 200 bp, Homo sapiens
  chr1:214662584-214662784
  hypo
tcatgttatgggtgacgaaactgaggcttgcggaggttgagattttgctcaaggacacaaagccaggaagtggcagagccaaacccaaaaccgtatccatctgtaccatgccctctccccttgcccacccttttcccatatgcgccagtcacctgcaaagagcaggaaccatggaaccaccataccgtttctaatctcca

SEQ ID NO: 249478 - DNA, 209 bp, Homo sapiens; identical to SEQ ID NO: 207455
  chr1:214788823-214789032
  hypo

SEQ ID NO: 249479 - DNA, 171 bp, Homo sapiens; identical to SEQ ID NO: 207456
  chr1:214809712-214809883
  hypo

SEQ ID NO: 249480 - DNA, 99 bp, Homo sapiens
  chr1:214819261-214819360
  hypo
ctgagaagaggcatcgagaaactgagagttcgcattgaggccgatgaaaagaagcagctgcacatcgcagagaaactgaaagaacgcgagcgggagaat

SEQ ID NO: 249481 - DNA, 31 bp, Homo sapiens; identical to SEQ ID NO: 226531
  chr1:215744970-215745001
  hypo

SEQ ID NO: 249482 - DNA, 90 bp, Homo sapiens; identical to SEQ ID NO: 207458
  chr1:215745301-215745391
  hypo

SEQ ID NO: 249483 - DNA, 41 bp, Homo sapiens; identical to SEQ ID NO: 207459
  chr1:215764971-215765012
  hypo

SEQ ID NO: 249484 - DNA, 45 bp, Homo sapiens
  chr1:217805222-217805267
  hypo
ctttttaaaatgaacgtatctgccgggtgtggtggctcacgcctg

SEQ ID NO: 249485 - DNA, 416 bp, Homo sapiens
  chr1:220132077-220132493
  hypo
tgctgaacatcagcgccaccgcaaaaatggtgttcccaaatgctcccacaacatctgcccgaagaaagccgtaagtgctcttcttgtgctgttttatgttactggcccttacaccaaaaaaacctatgatcatggacacaaagtgggaaaggacggcaaaagcatcggaggccaaggagagggagttgccaacgtaagcgatcactagttccatcacaaagaggaggatgctaacgacgcacatgaggattaaacggaagcttcttccggagtatcgccccatggcgtctcggtgccctggcagttcctctccctttcttgggaaggctgagctgctagggaagcagctatagattcagtgattacaactcctgggtaactcttcccttcagccctccggcgcttgtcatatttgg

SEQ ID NO: 249486 - DNA, 38 bp, Homo sapiens; identical to SEQ ID NO: 207463
  chr1:220376260-220376298
  hypo

SEQ ID NO: 249487 - DNA, 37 bp, Homo sapiens; identical to SEQ ID NO: 207464
  chr1:220426847-220426884
  hypo

SEQ ID NO: 249488 - DNA, 378 bp, Homo sapiens
  chr1:221060168-221060546
  hypo
ggagaataacgcgtcggcacgcacacttagctgaggagcggagtctagggaagaaaggtggggaggatgctttatacaaaccgcactttcccctgctcctcacctggccctggaggtttccgctaccgccaaacccagaccgtaggtccacgccctggccccggggctttgaacgtgaagaaaatcatcatcggggaatgtcatgatgtgatttcaggtagaattctgccttatttaggccacctttcgccaggccagggggcacggcagagctggggggctcagggatgaagtgagccgggggggtgagcgcctgagggcgggagtcagaaggacgaataccaccctagtgctcgcaggaggcgcccctgcttccgc

SEQ ID NO: 249489 - DNA, 45 bp, Homo sapiens
  chr1:221660546-221660591
  hypo
gattctataatgcctcgagcctatcttcatcattacatcactgga

SEQ ID NO: 249490 - DNA, 116 bp, Homo sapiens
  chr1:221910203-221910319
  hypo
tccaagtcgactgccgcggtgtctcaccaactcgaaaatgacgaggcctcgcagtggctgcccagggcgcccagtggtgaggtcagcagtgtgtcctgccccgccccattgaggca

SEQ ID NO: 249491 - DNA, 42 bp, Homo sapiens; identical to SEQ ID NO: 207467
  chr1:222222865-222222907
  hypo

SEQ ID NO: 249492 - DNA, 195 bp, Homo sapiens; identical to SEQ ID NO: 207468
  chr1:222260739-222260934
  hypo

SEQ ID NO: 249493 - DNA, 254 bp, Homo sapiens
  chr1:222910923-222911177
  hypo
gggagagtagtacaagatggcgtcagaaagctcgtaggggttaggtatacagccttgtaggccattatgaggagtttggcttttactctaggtgagacgggaacccactggagagttttaagcaaagacatgacatggtctcacttaggatttaacaattctggctccttttcgagcgtagactggagggggccaattaggaggctgctgcaataatctaggtgagagacgacggcaagggtgagagatgatag

SEQ ID NO: 249494 - DNA, 44 bp, Homo sapiens; identical to SEQ ID NO: 207469
  chr1:223003690-223003734
  hypo

SEQ ID NO: 249495 - DNA, 405 bp, Homo sapiens
  chr1:223210752-223211157
  hypo
tacagaggctggggcgagtgcttttgggatcctgccccacgcagcatctaggggcggatgtccgtgcctcccgaagcccaagtgagcagtgtgttacaggctctttcaggtttgccatctgcagatggcttgtgtgttaatcagctcaatggacaaagtgtgacagctttctctatcatctggagctcttgcctagtgtgcgggaaaaataggatcacacgtggtctcgaaggatgagtgcaagattttattgagtagtggaggtgcctctcagcaagatggatggagagtcgggaggaggcatggagtgggaaggtggtcttcccctgaagtccagctgttctcggccccttaggtccttctctgccgtgctgccctactgctttttgtcgctctgttcctctg

SEQ ID NO: 249496 - DNA, 385 bp, Homo sapiens
  chr1:223211666-223212051
  hypo
ggggcgcagggtggccgaggctgcgcgtccacatctcatcattcctggactgttgagattggccattggtgactttacctcctgtctgcgctgtgccagcaaaggtggagcccacaccctggggtagaacagctcttgctcagggagggcccgctctgggcatggttgggctcggggcttcgttgggcccggggcatggttgggctccacgcctgagtctccctgcagctcccacgtgtgtgcctcctcctcagtgagacatagtccctgcagtgtttaaaggtggggatcacatgttttgctcagtggctttggggactgggtgtttctcctctcaaacaaaattgggagccttctgggtctttggccccgcctgcctctgcat

SEQ ID NO: 249497 - DNA, 187 bp, Homo sapiens; identical to SEQ ID NO: 207471
  chr1:223257415-223257602
  hypo

SEQ ID NO: 249498 - DNA, 142 bp, Homo sapiens
  chr1:223315690-223315832
  hypo
ctctgcttgtttgcagttcacggtgctggacggatgtgttcccaacactaggtaacaacaccgctctccctcctccgggagaaagccgcagccgtcgattcccacccaacagggcctcagcgccttcccagggcagcaccct

SEQ ID NO: 249499 - DNA, 164 bp, Homo sapiens; identical to SEQ ID NO: 207474
  chr1:223813496-223813660
  hypo

SEQ ID NO: 249500 - DNA, 56 bp, Homo sapiens; identical to SEQ ID NO: 207475
  chr1:223853104-223853160
  hypo

SEQ ID NO: 249501 - DNA, 198 bp, Homo sapiens; identical to SEQ ID NO: 207476
  chr1:223888417-223888615
  hypo

SEQ ID NO: 249502 - DNA, 100 bp, Homo sapiens; identical to SEQ ID NO: 207477
  chr1:223894433-223894533
  hypo

SEQ ID NO: 249503 - DNA, 194 bp, Homo sapiens
  chr1:223907486-223907680
  hypo
taatttctcaggggtgtgtgcgtgtgtgtgtgtgtgtgtgtgtgtgtgcgcgcgcgcgcgtataatgcagtattggtcattttgttctttcagccttttattttggaggactctagttagatcacaatctgtgaaatgtggtatactgtactctcaccctgattctggcacctggccagcgggtgctgatgggg

SEQ ID NO: 249504 - DNA, 42 bp, Homo sapiens
  chr1:223908289-223908331
  hypo
attacaggcgtgagccactgcgcccagccaagatcattcttt

SEQ ID NO: 249505 - DNA, 203 bp, Homo sapiens
  chr1:223922152-223922355
  hypo
cagtgctcactatttacctttatttcttccttattcggacaccccttgcttccaaagaagagtttcggaaggctcaagacggtgagacagacaccttatgcactgcttcactctcccccgcagctcccctccctcctcactgacccccggccacaaccctctctccttgcccctcaccagccggcacccttggcaaccctggc

SEQ ID NO: 249506 - DNA, 86 bp, Homo sapiens
  chr1:223927891-223927977
  hypo
gagtgagagaacaccgtgccacctggacgctgaaacaccattgagtcacctctgtttgaaatgcttgttccctggtgccgtaaaga

SEQ ID NO: 249507 - DNA, 61 bp, Homo sapiens
  chr1:223953251-223953312
  hypo
gcctggattcagcccgctccttgctgggggagcagcattcgctccgcgcgtgcctctgagc

SEQ ID NO: 249508 - DNA, 104 bp, Homo sapiens; identical to SEQ ID NO: 207479
  chr1:224051404-224051508
  hypo

SEQ ID NO: 249509 - DNA, 101 bp, Homo sapiens; identical to SEQ ID NO: 207480
  chr1:224300432-224300533
  hypo

SEQ ID NO: 249510 - DNA, 139 bp, Homo sapiens; identical to SEQ ID NO: 207481
  chr1:224300563-224300702
  hypo

SEQ ID NO: 249511 - DNA, 263 bp, Homo sapiens; identical to SEQ ID NO: 207482
  chr1:224345147-224345410
  hypo

SEQ ID NO: 249512 - DNA, 90 bp, Homo sapiens; identical to SEQ ID NO: 207483
  chr1:224368628-224368718
  hypo

SEQ ID NO: 249513 - DNA, 119 bp, Homo sapiens
  chr1:224386054-224386173
  hypo
agggccagcatggccgaggcgcctggcagaggaggctctgagagcagaggggagacagagcagtgacacctggagtggaggcctgaaggctgatcagagcccagcgagggtcatgcctg

SEQ ID NO: 249514 - DNA, 89 bp, Homo sapiens
  chr1:224400597-224400686
  hypo
tgatcataaccctccgcatgtctatcttctgagtcacggcggcagtctggaccagctgctcgctattgctaggccggagcacagctgtc

SEQ ID NO: 249515 - DNA, 34 bp, Homo sapiens
  chr1:224447975-224448009
  hypo
tattattttttgagacggagtcttgctctgtcac

SEQ ID NO: 249516 - DNA, 164 bp, Homo sapiens
  chr1:224487331-224487495
  hypo
tgtctctggctatgcgtgccaatttaacaatggaatccaccgcgttttggaaaacaggtagcacctgagaaagttcagctttgctctgcactctgccctttccaccttttttctctttatcctcctagtgttgcccacagctttttcaacgtcagcccgcacca

SEQ ID NO: 249517 - DNA, 43 bp, Homo sapiens
  chr1:224490849-224490892
  hypo
attatggccgggtgcgatgactcacacctgtaatcctagcact

SEQ ID NO: 249518 - DNA, 91 bp, Homo sapiens
  chr1:225113074-225113165
  hypo
acttctggtttacagaactgcgagcataacattttcttgttttaagaacaaatttgtggccaggcgccatggctcacgcctataatcccag

SEQ ID NO: 249519 - DNA, 34 bp, Homo sapiens; identical to SEQ ID NO: 207489
  chr1:225581812-225581846
  hypo

SEQ ID NO: 249520 - DNA, 408 bp, Homo sapiens; identical to SEQ ID NO: 207490
  chr1:225597844-225598252
  hypo

SEQ ID NO: 249521 - DNA, 33 bp, Homo sapiens; identical to SEQ ID NO: 207491
  chr1:225608023-225608056
  hypo

SEQ ID NO: 249522 - DNA, 243 bp, Homo sapiens; identical to SEQ ID NO: 207493
  chr1:225637174-225637417
  hypo

SEQ ID NO: 249523 - DNA, 45 bp, Homo sapiens
  chr1:225696995-225697040
  hypo
ggacactgtcactaaagaggcggcgggtggaaggatgagggagta

SEQ ID NO: 249524 - DNA, 92 bp, Homo sapiens
  chr1:225907936-225908028
  hypo
ataataagtggccactgaaccggtgagtgcgttcttttccatcctatcaaaaagaggatcagaacagttgattcacttggaacagacaacat

SEQ ID NO: 249525 - DNA, 92 bp, Homo sapiens
  chr1:225908328-225908420
  hypo
aaaaaagtacatttacagtcttgccccagggctgtgttaatgctcctgctcgtggcataatatagtcctgagagacacgggctggctggata

SEQ ID NO: 249526 - DNA, 82 bp, Homo sapiens
  chr1:225920484-225920566
  hypo
agaagttgttactcctttctaaagaaacgactaacctacagggactacctgcagaaggagtgggcatcgggtatgttaacag

SEQ ID NO: 249527 - DNA, 43 bp, Homo sapiens
  chr1:225945260-225945303
  hypo
gcaaggggctagatgcggtggctcatgcctgtactcccagcac

SEQ ID NO: 249528 - DNA, 36 bp, Homo sapiens
  chr1:225956132-225956168
  hypo
attgtgtgatgaggcgcagagcgggtatagaatacc

SEQ ID NO: 249529 - DNA, 78 bp, Homo sapiens; identical to SEQ ID NO: 207494
  chr1:225988363-225988441
  hypo

SEQ ID NO: 249530 - DNA, 55 bp, Homo sapiens
  chr1:226026645-226026700
  hypo
accaggctctccttccggcggggtgagcagggagttggcccgaggaagctgggaa

SEQ ID NO: 249531 - DNA, 108 bp, Homo sapiens; identical to SEQ ID NO: 207495
  chr1:226053432-226053540
  hypo

SEQ ID NO: 249532 - DNA, 130 bp, Homo sapiens
  chr1:226059446-226059576
  hypo
tggggaagcccaagggattccgtaccccttcctgcctgcaaattcatccagtctcaaggtcccgggtcatccagctgccatccctcctgtggtatttcccaagttcaggtgccttcgtcgatgcagaaaa

SEQ ID NO: 249533 - DNA, 225 bp, Homo sapiens
  chr1:226062774-226062999
  hypo
tcctcaggctgagccagaaacggtcagttttttcctctgagtttgattcccctgaaggcaggccccgcaggccctgcaatcccccagcagagagcatgcatgcaggcagcaaggcaccacgagaacctgtgctcgggctggcttggcctccgtaagctgggacacctcagcaagcttgtgtccaatggcaacctcagggctggactaagccgcttagctctagac

SEQ ID NO: 249534 - DNA, 390 bp, Homo sapiens
  chr1:226076321-226076711
  hypo
ctgactgcatgcaccgctgcatgctgaggccccgccatcctcacaggcccggccccacctcactgccccttagaccgtggccctcactcagcctcccacagacctctgcaaggccaggagccctttgacaccaccggagtgggcacatctgacctgccccatgggaccaggggcagcagggagggagggcctcacctcggaagctctggctgaacctctttccgcgggagcggtccccgtggctgcgctgcagcagggccacgtactgggccctcacgtgggtggggatgaccagctcctccatgtcggccctgtccagggtgggcacctctttgagctgcagctgccgcagcaggctgcccaggagctgctccccggtcagggcggccc

SEQ ID NO: 249535 - DNA, 311 bp, Homo sapiens
  chr1:226077115-226077426
  hypo
tagaggtggggctctcgttctctgcaagaggctcagttcccccagctgctggtaagtggacctagagtcttgttccttgctgcaaccaaacaactgacaggaaccagaatggctcaggcaacgccagggctctaagggccaatccagtctgcagggatgagcatccgggcccgtgctcagagggtcccggggcctcatgagatcctgagctggtggtccccagttgtgaaaccagatttcccactgttctggggggaccttcctaggcaagggagcctaggagcatttagttccaacggggttttgtccaa

SEQ ID NO: 249536 - DNA, 147 bp, Homo sapiens; identical to SEQ ID NO: 207498
  chr1:226102816-226102963
  hypo

SEQ ID NO: 249537 - DNA, 374 bp, Homo sapiens
  chr1:226109458-226109832
  hypo
tgcccaagaggtgggcgccacccccagtccaagcctgcctgccagcccatcttgctgcctgggttcctagaaggctgagcgagcaaatgagggcctcacataggcaggcccgctgccactgagccccgtgacggcatcgatgaggtcctcttccacctcagtgcagaagcccacgctgctcatgagctgctccaggagctgcccatcctccaccagggcatgggtgcccgtggcgtacactgtagcgccttcctgcactaccacaggtgtgttggtcatgcagcgaatcactttgggggctggctggaatgccatcagcttctagggtgagggagagagccgaatgagtggccagggcacggctcccaccagca

SEQ ID NO: 249538 - DNA, 240 bp, Homo sapiens
  chr1:226163118-226163358
  hypo
taacacaaaaataaagacatggttgtatacacagacactgaaattcctctagcggaaaacaacagcaaatgattaaagataacgttgtttgttgaggacagaagtaataatgttatgggatattcagcaagactaaatgatttattcaccacctgtacagtgaaaactgaagctaaatctgagaattaaggaatcagaaagaacagggcgccgggcgcggtggctcacgtccgtaatccc

SEQ ID NO: 249539 - DNA, 35 bp, Homo sapiens
  chr1:226304036-226304071
  hypo
gggtcagggtgagccgtgttcgggcccttagtgcc

SEQ ID NO: 249540 - DNA, 35 bp, Homo sapiens
  chr1:226310959-226310994
  hypo
ctgggattacatgcgtgagcccccagcctaaaagt

SEQ ID NO: 249541 - DNA, 95 bp, Homo sapiens
  chr1:226311810-226311905
  hypo
ggattgccccttactaggagcggtgtgcggatgctgatcagcccaccgaatgctcaccactgaggggctgcagcggccaggtgtgaggggaagag

SEQ ID NO: 249542 - DNA, 160 bp, Homo sapiens
  chr1:226314868-226315028
  hypo
atagccgctcatgtcggctgacggagcggtgtggggccgcatgcgaagctgcctccgcgccttccccgagcggctggccgcctgcggggccgagtaaggacttctgcgcgcgggagttcgaggccctgcggagctgcttcgccgccgcggccaagaagac

SEQ ID NO: 249543 - DNA, 204 bp, Homo sapiens
  chr1:226596303-226596507
  hypo
ggatcaggggcatgagctaccacgccggccccaaactcttaagtgtgtcctctctcccctgagggcagctgggtccgggaagcgcaggcccccgcctcgggaatatagttgattggcccgaggtggaccctgcagtgctaggtccaccctcctggcttggacgggcgttctaacctgccgtccacagaccgtcgggacaaaata

SEQ ID NO: 249544 - DNA, 342 bp, Homo sapiens; identical to SEQ ID NO: 207503
  chr1:226789939-226790281
  hypo

SEQ ID NO: 249545 - DNA, 376 bp, Homo sapiens
  chr1:226826317-226826693
  hypo
cagagcatctatccagtctgcgagccgctgcagcagcaacacacaagacagaactttgtcatgaacttgtacaacccacactcctggactcggagacagctcgccagctcttgctggcagggagcagcgtgacctcgggcacacaagatggggacaagcaggtctacccacagcaggtctgctgtgaagatttgctgcacgcttggcatgacacctggcagacggcgggcactgttctctctctcagggcatgggaaatgctctctggagctatggggccgatggctaagggagagtcagtgagtgtccgccaagcttccccgcctacccgccgcacgccagggacaagcacatcgccttcttctttactttccaa

SEQ ID NO: 249546 - DNA, 339 bp, Homo sapiens
  chr1:226827391-226827730
  hypo
tcagcagggaccctcgggcagaaactgttctcacccacccaacaccacagagcaggcgagccccatctgaacctggggcagggccagtggaggcacccaggtgtccacgtatggcgcatggaggtggcgtgcacagcagaggggagcctgccctgtgcccagacacaggagaacgcagagggtggcgctgacatccccaggcgagtgaacagtggtaggaaaggcccggaggtgtgaagggcatccaggctgaggatggaggagcatgacccggggctggcctgtcctgggtgcaacagcagggccaagagagagggtcggcctcgacttcccactctg

SEQ ID NO: 249547 - DNA, 427 bp, Homo sapiens
  chr1:226829326-226829753
  hypo
tctcgcctggctttcggtgccaggcaccgtctgggctaaatggagagtcctcggcagagggctgacagctgggcagggctagaagccactctgctctgaggcctgagccccctacacagccatcccgcctgaggaataggctgatgtctccaaatgtctggccttggggcgggccacccacattctgagcctgtgcctggagaagcttacagcttccaaagggcgctgagagaagccaagccccctgaggtgggcacgggtggggcccgaggctgccctcactcgccggcctcaccttgattccctcgatcctgaaccccagggtggccgtggagctgatggtctcccgccactgcatgtaccgtggcttggtcacagcccgctgtgctttttcctcctcggtgggggcctcggggtccacctcgat

SEQ ID NO: 249548 - DNA, 152 bp, Homo sapiens
  chr1:226833941-226834093
  hypo
acatgagcaccgcacgctggacaccatgggggccgacagccttagggaggttcaccaagcctgcacaggggagaaggagccgtgctgtggatgactcagggtggaagggcagcagtttgagaggtaatgagaaaacccggctgcctaaaact

SEQ ID NO: 249549 - DNA, 69 bp, Homo sapiens
  chr1:226834885-226834954
  hypo
tccatcacacagggcgagtcgaagtcggccagcaggtcgtccatctggttgtagcgctccccgtccttc

SEQ ID NO: 249550 - DNA, 267 bp, Homo sapiens
  chr1:226846346-226846613
  hypo
ccgtctccacccgccgtgtgatgttcccgcaggctggatggcaccgaacatcctccacagcgctgctcaccaggcacgaggttcttctcccccgccctttatggaacccatgagcgtagggtagggattactgagcgctgtcgggttggtgaagtccctccttcagaagcaactgctgggcctggggcaggagaacgaggatgatgggtccttaccagcccctgcagaccgggaccccctgcaggggctacacgaaccagctcagtg

SEQ ID NO: 249551 - DNA, 208 bp, Homo sapiens
  chr1:226908275-226908483
  hypo
acataaagtatttgacggaacatgcctggcacataataggcacttctgaaatcattgctgctattatttttattattattgtgcatcctaagactgtttagtattttttacagccgtaccacctgttaattcatattgaactggtagtaaaattataactcccagtgaatttcaaaagaaatattggccgggcgcggccgggcgtggt

SEQ ID NO: 249552 - DNA, 98 bp, Homo sapiens
  chr1:226910144-226910242
  hypo
ggcgggagacggctcggctctcaggagagagcagctgatttttaatgtacagtgtaataccgcaaggtaaacagcatcccagacgctgctccatatgg

SEQ ID NO: 249553 - DNA, 144 bp, Homo sapiens
  chr1:226941995-226942139
  hypo
ctctcgctctgtctcgttctctctctctctctctcatacacacacatgcatgcgtgcatgcatatacaagaatacctacttttattctacttcacagatattgtttttgacaaattgaaggtttgtgacaacgctgcttcaagc

SEQ ID NO: 249554 - DNA, 121 bp, Homo sapiens; identical to SEQ ID NO: 207507
  chr1:227175823-227175944
  hypo

SEQ ID NO: 249555 - DNA, 195 bp, Homo sapiens
  chr1:227191027-227191222
  hypo
acacttggggactgcacttacgctggcacactcgatcgacactctctctgatctccaagcaagtaccatgctcccgggaaagcacacacttgagaaagttacagaaaagcaaccttcagccaagaacattcttccccaagtgaagctacaatgatcacttgataatctacaatcgcactgcttataatccaggaa

SEQ ID NO: 249556 - DNA, 82 bp, Homo sapiens; identical to SEQ ID NO: 207508
  chr1:227248038-227248120
  hypo

SEQ ID NO: 249557 - DNA, 171 bp, Homo sapiens
  chr1:227370569-227370740
  hypo
catgaagcctgcttccgctttccctgccctgggacatcagactccaggttcaccagcctttggacttgcaccagcagcttcccggggaatctcaggacttcagccacagactgaaggctgccatgtcggcttccctggttttccggctttcaaactcggactgagccatta

SEQ ID NO: 249558 - DNA, 44 bp, Homo sapiens; identical to SEQ ID NO: 207509
  chr1:227376422-227376466
  hypo

SEQ ID NO: 249559 - DNA, 35 bp, Homo sapiens
  chr1:227383163-227383198
  hypo
accacgtcggggtaccctaacgttgaactgaccct

SEQ ID NO: 249560 - DNA, 119 bp, Homo sapiens; identical to SEQ ID NO: 207510
  chr1:227422355-227422474
  hypo

SEQ ID NO: 249561 - DNA, 34 bp, Homo sapiens; identical to SEQ ID NO: 207511
  chr1:227463301-227463335
  hypo

SEQ ID NO: 249562 - DNA, 152 bp, Homo sapiens
  chr1:227488575-227488727
  hypo
gaacatcagaagagcgggtaagcgctgctaaaccaaagctacctttgcagttgtatagttgacacgtattctgatgcctcctcatagcacctggcagctccttagttttaagaaataataatcatatccatcctttgcgtcatttacatcat

SEQ ID NO: 249563 - DNA, 210 bp, Homo sapiens; identical to SEQ ID NO: 207512
  chr1:227618270-227618480
  hypo

SEQ ID NO: 249564 - DNA, 64 bp, Homo sapiens
  chr1:227750843-227750907
  hypo
gcgcaccggaatgcgcctcccctttccacccgccagcattcccaagcacgcctcggcttctgac

SEQ ID NO: 249565 - DNA, 181 bp, Homo sapiens
  chr1:227947116-227947297
  hypo
gatgcattggtgctcagaagcgcaagaacctcttcccccgcagagaagagctgctcagtctggcatgcaggttagtgaccgacaaggcagtgagcgcgtgcacagacttctaaaattacaggcagactcagcacgcctgtgggaaatgcctaacagatgcgtcacctagagcagctgctgg

SEQ ID NO: 249566 - DNA, 204 bp, Homo sapiens; identical to SEQ ID NO: 207514
  chr1:227948693-227948897
  hypo

SEQ ID NO: 249567 - DNA, 150 bp, Homo sapiens
  chr1:227955887-227956037
  hypo
cacagggtatgtggcgcacatgcagtctccaggtgcagcttccgtctcgtcttcccctacagttgattcctggaaaaagcaaagctgtctgttgggctgagactgtgcactttggatcttgcagttctgtgtccacgcagggcatgggct

SEQ ID NO: 249568 - DNA, 204 bp, Homo sapiens
  chr1:227961299-227961503
  hypo
gccagccctgctcacgggaagcgctctacactgcgtgccatttcgtatctttatgctgcacatttacggcaccttctccacgtttagatgtgcaggtagttagcgtggtgctccagctacttgtgctgcttggtgctgtggtgtgccatgcaggcctgcagcttgggggggtgtgccccgctacacagccggccaccacaggcc

SEQ ID NO: 249569 - DNA, 747 bp, Homo sapiens; identical to SEQ ID NO: 207515
  chr1:227962631-227963378
  hypo

SEQ ID NO: 249570 - DNA, 78 bp, Homo sapiens; identical to SEQ ID NO: 207516
  chr1:228003875-228003953
  hypo

SEQ ID NO: 249571 - DNA, 84 bp, Homo sapiens
  chr1:228079084-228079168
  hypo
agccctggagcttagctccccggagggcagccatgggggccgagcacatgtgctagaggccccgccaccccctgcatgggtgca

SEQ ID NO: 249572 - DNA, 449 bp, Homo sapiens
  chr1:228081840-228082289
  hypo
tggactgcattcaatgtttccgcaggagaaggggagcaagtggggcggagtgactgcatcctttgggtactggcatgggacaaggtgggtgcccgagagccctggagcacagatgtctgtgcacggctctgtgcaccagcccaggtgcagggtgtccacagtgcaagagcccacaagcacacaaccacaataggtgttcgcacacgagcccaggatgtgtggtgcctgcaggcatgtgcccaggacccaaggtgtccacaaacgtacccatgcccttcacatggactcagacacagggtgtccacgatgcaagcatccacgcacgtgcccatgccacatgcacacaaccatgaagggtgtccatacacaagccccggacacatggtgcttgcaggcatgcgcctgggacctttggttttcacgaacgcgtccatgctcttcacatggac

SEQ ID NO: 249573 - DNA, 278 bp, Homo sapiens
  chr1:228083394-228083672
  hypo
tgagccatcagacacaactacggaagtgcaaaggtcagtcctggaggcggcgagttggcagtagcctgagggtaggacttgcgtctccctgtgtacctgccgcctccaagttcagatgcactggccgttctcgctggggccatgagccaggcagcacccggggcccggcaccccaggcctggactcctgggcctctgctcgctccagtttccggcacctttcccaggaggggctctgggtgagtgctggccctgtaggtccctcggcctgtcgggaga

SEQ ID NO: 249574 - DNA, 45 bp, Homo sapiens
  chr1:228092976-228093021
  hypo
tcaagtcacacacttcgcagagatcagccccgcttcctctgggag

SEQ ID NO: 249575 - DNA, 611 bp, Homo sapiens
  chr1:228109226-228109837
  hypo
tgcaggtgtagacctcctcacgctgcgtgcactgcctgcactccacatagcagcaccaacgcacctggcactggcagggccttgtcaccacccggctctgtgtgttatggccgcggccacagcagatgctctcgcagttcttctcacggtggcacctacggccagcggtgcccggggagaagcggccagccaggcagaagctaggcgagtcatccaggtgcaccagctctggagtgcggggcagcgggtcgctgccacctgcccccgaggcacggccccgtggtggggagatggcacctgcctcgccggcagcttcattggtggtgctgcccaccttgagtgccgtctcatacttgtgcttcagatgcttgcccacctcatggaaaggcgccaactgccgccagcaggtccgcaccgtgcatgagcctgacacgccgtggcacttgcaggtggtctccaccccagccttgatcacctggcagaagggtgcgggagggagggcagtgtgagggctgtgcaggtgggcccagtgagcagaccctgccctggacccccagagggaccccacacccccacccaggcccaggccctgccggcgggcgtcaccactg

SEQ ID NO: 249576 - DNA, 32 bp, Homo sapiens; identical to SEQ ID NO: 207519
  chr1:228111802-228111834
  hypo

SEQ ID NO: 249577 - DNA, 175 bp, Homo sapiens; identical to SEQ ID NO: 207520
  chr1:228111864-228112039
  hypo

SEQ ID NO: 249578 - DNA, 305 bp, Homo sapiens; identical to SEQ ID NO: 207521
  chr1:228112930-228113235
  hypo

SEQ ID NO: 249579 - DNA, 354 bp, Homo sapiens
  chr1:228126652-228127006
  hypo
ccctgccaggctcacggcagcaccagttcatgactgctctccccggtgaagggcccggatgacgacggctccacgggacacccatacctctcaagccccagccacttcccacctctgactgtcattccaggtgcagccatgcaggaggacacaggccagctggagagaaggaagacgtctcaacacccatacgtggctgcggctgccatgccacagggcacacagaacagttccacgctgcagatggggccgcagacagtgctggtctcaggaaccacgggggaggtggctccagggagcggtgacccggtcgcctccttgagccctggaagctggccgcggtggtcagcactg

SEQ ID NO: 249580 - DNA, 144 bp, Homo sapiens
  chr1:228201126-228201270
  hypo
aaacgtgccgctgccgcccagggaaactggcaagtgcgtggccgcgggcacaggagccgctgtgcctgctgggactcgttcaaagtatgtgtcagtaatcccagctgggccggcgggcaggaggaggtgcgggttgggagagct

SEQ ID NO: 249581 - DNA, 70 bp, Homo sapiens
  chr1:228266733-228266803
  hypo
taaaaggaccagaaatcagacgactgtgagcaaactccctggagttcacggaactcaactgtaatttcct

SEQ ID NO: 249582 - DNA, 89 bp, Homo sapiens
  chr1:228280525-228280614
  hypo
tcatggacacaaaacggatgtgaactcacagagctacattttctccctgcccctgttcaggcacagtgaggtgtcggggaatgtagctg

SEQ ID NO: 249583 - DNA, 344 bp, Homo sapiens
  chr1:228280967-228281311
  hypo
cacaagttaggacccgtaccaagaggccctggaattgagggtgggggttgctgtggactctttctccctcttaggaaactctattgggtctccatctgtcacagaagcagtaaatgatgtaggggctgccaggtatagggtcctgtggggatgctggaacatgccgaggcaggacgtgccagccaccctctgcccatatgtgcagcagggccacagatgtgcttgtcggtaggagagaccaagctgtctgtgtgccgatgtcttgacacctgagacttcaggttcacccatcctggttctgccattccattgcagggtggcttccctcctttggggactcttaa

SEQ ID NO: 249584 - DNA, 142 bp, Homo sapiens
  chr1:228282125-228282267
  hypo
ctcataaaaggccctcttttcgttccatttcatgcttgggtttttcatgcgaacctgtcattattagtttttccgcattgcctagagttgcccaaccccataataagaatacgtaggtggcgtgccccattcttgcaggtgt

SEQ ID NO: 249585 - DNA, 65 bp, Homo sapiens
  chr1:228285354-228285419
  hypo
tgaggatgctggccgaggacgagctccgggatgctgtcctcctggtgttcgccaacaagcaggta

SEQ ID NO: 249586 - DNA, 356 bp, Homo sapiens
  chr1:228295266-228295622
  hypo
accacagccacatgtccatccgaaggcgactggtcaccagcacccccaccacagcctcgaccccagcccggcacctggaagcacctggagagggaagcttaccgccagcatgcgccgtggctccctgtagcggatgtggatggtggagccatcctgcttcaccagcagcacggggtagagtcgtgcataagcctggcggtgcacacgagtgagtgaggccctgctgctgtcagctcgccaggaggatgtgtgcaggcggcggagtgcaggtccggtggccttcacggtgctctgcctcagccggctgcagataaatgttcaagctctggtcagccgacagtgctgcagcagagtgc

SEQ ID NO: 249587 - DNA, 266 bp, Homo sapiens
  chr1:228322365-228322631
  hypo
aagacacatctcaattcctgcgtggcaggccaagaataaaataaaggagaacgcagcacaccattcccactggtcaagtggtcgaacccaacatccaagacccagccagcagccaagctcagcgcaacctcccgacctctgactctgactgcaacagggtgagcacatcgccctcgcacacggggccttttacattgtggatgatggagcggctcgcatcctccataaattccatgcacacctgcgaccactgtcctttagagccc

SEQ ID NO: 249588 - DNA, 271 bp, Homo sapiens
  chr1:228342784-228343055
  hypo
tctccagctgtgatcgtcatcacatggaatagtcactagcagcatggaaggcggtgacacagcgacagcctcagggaagggctgaacctgtgtgtgtgcgcctgtgcatgtgtgtgtggcgaggccaggtagcaaaggctcctggtgggagtgggctccagccagtgtgggagccgtgggcagagcacacgaggggatatctggagccaggcgtggaatgggggcaggggacctggcactaaggcaggtgaggccgcggcattcgctctgg

SEQ ID NO: 249589 - DNA, 232 bp, Homo sapiens
  chr1:228361364-228361596
  hypo
gacccttgggctcctcgatggcttccctgggctggaacaggcaggtctggttctcagtggctgtgcacaccgttcccctgcggggccctgcccatccctgctcccacatccagcggactgttgtcatttctgccctaggctctgggactactccggatgatgccctcgggcaggctattgcagttctgccagtccctgggcaaacagggtctgtctgcgctggcccctgtga

SEQ ID NO: 249590 - DNA, 42 bp, Homo sapiens
  chr1:228406668-228406710
  hypo
gtccacatgatggcccgtgtccataggcggtggacttccagg

SEQ ID NO: 249591 - DNA, 204 bp, Homo sapiens
  chr1:228444461-228444665
  hypo
atgtggtacaaggacgggaagaagctgagcttcagctcgaaagtgcgcatggaggctgtgggctgcacacggaggctggtggtgcagcaggcgggccaggcggtcgccggggagtacagctgcgaggcggggagccagcggctctccttccacctgcacgtggcaggtcagtgctttgggggttggagagtgactttgtgtgga

SEQ ID NO: 249592 - DNA, 245 bp, Homo sapiens
  chr1:228459734-228459979
  hypo
ggcccaagcccagacggaggttatgtggtacaaggacgggaagaagctgagctccagctcgaaaatgcgtgtggaggccgtgggctgcacacggaggctggtggtgcaggaggcaggccaggcggacgccggggagtacagctgcgaggctgggggccagcggctctccttccatctgcatgtggctggtgggtgccagggttaggcaaaatggaggtgatgctgagtgtcgggtgtgaaactac

SEQ ID NO: 249593 - DNA, 115 bp, Homo sapiens
  chr1:228461082-228461197
  hypo
acatggtacaaggacgggaagaagctgagctccagctcaaaagtgcacatggaggccagcggctacacacggaggctggtagtgcagcaggcgggccaggcggatgctggggagt

SEQ ID NO: 249594 - DNA, 864 bp, Homo sapiens
  chr1:228461596-228462460
  hypo
atggtgtggagattcgccgcagcaagcggcatgagacagccagccagggggacacccacaccctgaccgtgcatggcgcccaggttctggacagcgccatctacagctgccgtgtgggcgcagaggggcaggacttcccagtgcaggtggaaggtgagccgggcatggggcgtggggcggggactcctccagacacctctgtcccagagctggacaggggcgaagctggggctcaagtctggtctgttaagagcccggctgatgtcccctttgtgcccacagaggtggccgccaagttctgccggctgctggagcctgtgtgcggcgagctgggtggcacggtgacactggcctgcgagctaagcccagcgtgtgcagaggtggtgtggcgctgcggcaacacgcagcttcgggtgggcaagcgcttccagatggtggccgaggggcccgtgcgctcactcactgtgttggggctgcgcgcagaggacgcaggggagtacgtgtgtgagagccgtgatgaccacaccagtgcgcagctcaccgtcagtggtatgtaaggggtcgagtgtccctatccagggcagcctcctggaggaggcggcctttggtactcctgcagcgtaagggctctgccagtcctgtgcgcccgcctcttaagcagtgctcctgtctgcagtgccccgagtggtgaagtttatgtctgggctgagcaccgtggtcgcagaggagggcggcgaggccaccttccagtgcgtggtgtcccccagtgatgtggcagtcgtgtggttccgggacggtgccctgcttcagcccagcgagaagtttgccatatcacagagtggcgccagccacagcctgaccatc

SEQ ID NO: 249595 - DNA, 94 bp, Homo sapiens
  chr1:228464861-228464955
  hypo
acggtgtggagctgcgggcaggcaagacgatggccatcgcagcccagggcgcctgcaggagcctcaccatttaccggtgcgagttcgcggatca

SEQ ID NO: 249596 - DNA, 330 bp, Homo sapiens; identical to SEQ ID NO: 207530
  chr1:228465319-228465649
  hypo

SEQ ID NO: 249597 - DNA, 337 bp, Homo sapiens
  chr1:228466467-228466804
  hypo
tgtcccgggccagcgcccaggtgcggtggttcaagggcagtcaggagctgcagcccgggcccaagtacgagctggtcagtgatggcctctaccgcaagctgatcatcagtgatgtccacgcagaggacgaggacacctacacctgtgacgccggtgatgtcaagaccagtgcacagttcttcgtggaaggtgcaggcagggagggcagctctgcaggttgcttttgttggggggagtctcccaggtccatggtttgccctacactcctggagacgctgggtctgggcagctcaggaggatgctagcatgcatctagcagggcgggggcttgttccca

SEQ ID NO: 249598 - DNA, 254 bp, Homo sapiens
  chr1:228468385-228468639
  hypo
cacacggcgggcacgcgggggctcgtggtgcatgacgtgagccctgaagacgccggcctgtacacctgccacgtgggctccgaggagacccgggcccgggtccgcgtgcacggtgtgtggctgcaggcacggcagagctcagggaagggaggcgtgctgggtgggcatggatgtggggccagccactacctgggtggcccacatcattctctgagattgaagggctgctctgctgagccggggaggtcagggga

SEQ ID NO: 249599 - DNA, 355 bp, Homo sapiens
  chr1:228473690-228474045
  hypo
ctgtcctggggagcgtctgtcctggggagcactgctggccaagcctgcccaggacggtggggcccctgagcagtctgtgcctttgcaggccggagagtgcacatcatcgaggacctggaggatgtggatgtgcaggagggctcctcggccaccttccgttgccggatctccccggccaactacgagcctgtgcactggttcctggacaagacacccctgcatgccaacgagctcaatgagatcgatgcccagcccgggggctaccacgtgctgaccctgcggcagctggcgctcaaggactcgggcaccatctactttgaggcgggtgaccagcgggcctcggccgccctgcggg

SEQ ID NO: 249600 - DNA, 112 bp, Homo sapiens
  chr1:228475449-228475561
  hypo
tgctgccacactgcgctgtgtgctgtcatctgtggctgcgcccgtgaagtggtgctatggaaacaacgtcctgaggccaggtgacaaatacagcctacgccaggagggtgcc

SEQ ID NO: 249601 - DNA, 559 bp, Homo sapiens
  chr1:228477493-228478052
  hypo
gtggtgtggcgtggcgtgttcaggtgctcggggccttgaagggcctggctcacttccgtcagggaaagcacatgggataaagccggcccaggtggagggctcgggcaccttacagggaatgcagggaaggactctcccaagctcaagggccttctcgcccaggactggtgggctcccctcacaccacaaggagtgaaccctcagccagtgaaggggcaggttctgggggccaggcacagccatctggatgccagtgcctgaagcaggtagctccggtcacaggcacaagtgttgtagacctttgcggagaggccgggcctccatgcacctccagcggtgtcgacagagcacagacagcttccaaggcatggaggcaccacactaccaggcttgccaggacaccccagaggggcacagacttcgggctctgtcacatggctgtgtagcatgttggagagacacagagaccacaggcgcccgggggctaatctgtgtcctcctcagaccggtggctgaagagcagatgaccagagtggacccctgccggctgcctgaggca

SEQ ID NO: 249602 - DNA, 57 bp, Homo sapiens
  chr1:228479782-228479839
  hypo
tggcctggccatggcggacgccggggagtacttgtgtgtgtgcgggcaggagaggac

SEQ ID NO: 249603 - DNA, 98 bp, Homo sapiens
  chr1:228481995-228482093
  hypo
agcctgaggcaggacgggtccaggtgtgagctgcagatccgtggcctggctgtggtggatgccggggagtactcgtgtgtgtgcgggcaggagaggac

SEQ ID NO: 249604 - DNA, 43 bp, Homo sapiens
  chr1:228494680-228494723
  hypo
gagccgggcgggtgcgagcgtggagtggcgcaagggctcccta

SEQ ID NO: 249605 - DNA, 376 bp, Homo sapiens
  chr1:228504400-228504776
  hypo
catctgcaggctggcgcctggagatcctggagcctctgaaaaacgcggcggtccgggccggcgcacaggcatgcttcacctgcacgctcagcgaggcggtgcccgtgggagaggcgtcctggtacatcaatggcgcggcagtgcagccggatgacagcgactggactgtcaccgccgacggcagtcaccacgccctactgctgcgcagcgcccagccccaccacgccggggaggtcaccttcgcttgccgcgacgccgtggcctctgcgcggctcaccgtgctgggtgggtggtgggcgagcttttccctcccctgcaggtcgggtctggggcgcgccccgcctccagagcttgcgagtgcgtgggtgaccatcct

SEQ ID NO: 249606 - DNA, 397 bp, Homo sapiens
  chr1:228509315-228509712
  hypo
cagatgtgcgagcccgctggctgaaggatggtgtggagctgaccgatgggcggcaccatcacatcgaccagcttggggatggcacctgctctctgctgatcactggcctggaccgtgctgatgctggctgctacacctgtcaggtgagcaacaagtttggccaggtgacccacagtgcctgtgtggtggtcagtgggtcagagagtgaagccgagagctcctctgggggtgagctggacgatgccttccgccgggctgcccgtcggctgcaccggctcttccgcaccaaaagtccggctgaagtttcagatgaggagctcttcctgagtgcagacgagggccctgcagagccagaggagcccgcggactggcagacataccgcgaagatgagcattt

SEQ ID NO: 249607 - DNA, 234 bp, Homo sapiens
  chr1:228526490-228526724
  hypo
ccacagtccctgcacgggaagcaggagctccgtggtcccttacggcagccccctcctgcccagctctgtgatccaggagctgctgagttctgagcaggccttcgtggaggagctgcagttcctgcagagccaccacctgcagcacctggagcgctgcccccacgtgcccatagctgtggccggccagaaggcagtcatcttccgcaatgtgcgggacatcggccgcttccacag

SEQ ID NO: 249608 - DNA, 1002 bp, Homo sapiens
  chr1:228528429-228529431
  hypo
gatccgcaacaaggcgcggaacagacagaactgcgcgctgctggagcaggcctatgccgtggtgtctgccctgccacagcgcgctgagaacaagctgcacgtgtccctcatggagaactacccaggcaccctgcaggccctgggcgagcccatccgccaggttggggagggccaggggccggggccgggagatgcatgtgatgtgggtgggtattggggtgctgggggcttgtatctggggctgccaggaggtggcggtgtgtgcatgagttgggcagagcactgggtacctgggtggctgtggggcctgcaccgctgggcaatctggcccaccacaggctgaccgcagcccacaccctcccccagggccacttcatcgtgtgggagggtgcaccgggggcccgcatgccctggaagggccacaaccgtcacgtgttcctcttccgcaaccacctggtaatctgcaagccccggcgagactcccgcaccgataccgtcagctacgtgttccggaacatgatgaaggtctgcaggctctgggctgctgggcggggctccctgtccctcagcgccggggtggatgccagtggccacacctgcagccgctggtccagggtggcctgaatgtttcctcgtcgggtcccacatctgttgaggatggtcagcccgtgtccccctccctgtgctgacaccctcccccacccacagctgagcagcatcgacctgaacgaccaggtggagggggatgaccgcgccttcgaggtgtggcaggagcgggaggactcggtgcgcaagtacctgctgcaggcacggacagccattatcaagagctcgtgggtgaaggagatctgtggcatccagcagcgtctggccctgcctgtgtggcgtgagtgtccaccttcccgggggcccaggtggctgagccaggatggggcacccggctgcagccgcacaggtccctgcctgggtgggtgtgaggggtgggctcgttcctgggacaga

SEQ ID NO: 249609 - DNA, 60 bp, Homo sapiens
  chr1:228529845-228529905
  hypo
gccgactgcacagccgagctgggtgagacagtcaagctggcctgccgcgtgacgggcaca

SEQ ID NO: 249610 - DNA, 118 bp, Homo sapiens
  chr1:228542268-228542386
  hypo
ctggcaggcctctgcggggtgggcgctgccccctcacttgtgaatcatgctgcgcacggctgcatccctcctgtagtcgcaaatactcactctggcccacagccgatcaggtgacagt

SEQ ID NO: 249611 - DNA, 203 bp, Homo sapiens
  chr1:228552502-228552705
  hypo
cttcacaggcctgacgctcgttcactctgtccgatgcctctgcagagtgggcatgggttgtcctgctctggccatgaccccacccaccctgcctgtggcaggcatccgtcccactcgtccacctgcttgaagctcacgtgtacccgactcctacagccacctgccctgtctcccagcagccgtgcccccgagggtgccacagc

SEQ ID NO: 249612 - DNA, 190 bp, Homo sapiens
  chr1:228553842-228554032
  hypo
gctatcattgagggcgacccacagccctcggtgacctggtacaaggtaggcgcgcaggtccaagtgggtgagattctgggatggccccaggagctggggggcccacgggaggtgggtgcagtccacaccgtgcacttcccccacatcccccctagactggacacacagcaggtgtcggaagcactgctca

SEQ ID NO: 249613 - DNA, 618 bp, Homo sapiens
  chr1:228558792-228559410
  hypo
gacagcccctccctcggcgtagcccggcacctctgcagggacactggtggctcctccagttcctcctcctcctctgacaacgagctcgccccatttgcccgggctaagtcactgccaccctccccggtgacacactcaccactgctgcacccccggggcttcctgcggccctcggccagcctgcctgaggaagccgaggccagtgagcgctccaccgaggccccagctccgcctgcatctcccgagggtgccgggccaccggccgcccagggctgcgtgccccggcacagcgtcatccgcagcctgttctaccaccaggcgggtgagagccctgagcacggggccctggccccggggagcaggcggcacccggcccggcggcggcacctgctgaagggcgggtacattgcgggggcgctgccaggcctgcgcgagccactgatggagcaccgcgtgctggaggaggaggccgccagggaggagcaggccaccctcctggccaaagccccctcattcgagactgccctccggctgcctgcctctggcacccacttggcccctggccacagccactccctggaacatgactctccgagcaccccccgcccctcctcggag

SEQ ID NO: 249614 - DNA, 76 bp, Homo sapiens
  chr1:228559963-228560039
  hypo
cacccaccttgcagcggcctcaggaacaggcgaccatgcgcaagttctccctgggtggtcgcgggggctacgcagg

SEQ ID NO: 249615 - DNA, 38 bp, Homo sapiens
  chr1:228613059-228613097
  hypo
gcccagacctcagcggattgctcgcttttatagagctt

SEQ ID NO: 249616 - DNA, 37 bp, Homo sapiens
  chr1:228614003-228614040
  hypo
gccagcgtgcccggccggcattccacttttacacagt

SEQ ID NO: 249617 - DNA, 35 bp, Homo sapiens
  chr1:228857021-228857056
  hypo
ctgggcaacacagattccatcgcaaaaaataaaaa

SEQ ID NO: 249618 - DNA, 223 bp, Homo sapiens
  chr1:228919237-228919460
  hypo
aagtgcttattacttcccaacgacggggagatgcacacaagcatctaatgtggtgggtggtactagatcgccatgattacctctgcagccacttttggacgctcgatgcagccacattagacactgaccgaggccactgcacacagaccgggtgctgggtattgcgggaaccaaggagcaagccagccagtcctggggctccgtcagcatctggtccactgga

SEQ ID NO: 249619 - DNA, 150 bp, Homo sapiens
  chr1:229038504-229038654
  hypo
gtatgtatctatctatctatcgatcggtcgatcgatcatttattttttatcttgattacaccagataagctgaggattttgcaggtaagcacgtggaagctaaaggccagcaagacttggttaggaatatcaatgcgtcctctctcacgg

SEQ ID NO: 249620 - DNA, 54 bp, Homo sapiens; identical to SEQ ID NO: 207543
  chr1:229073283-229073337
  hypo

SEQ ID NO: 249621 - DNA, 267 bp, Homo sapiens; identical to SEQ ID NO: 207544
  chr1:229104403-229104670
  hypo

SEQ ID NO: 249622 - DNA, 90 bp, Homo sapiens
  chr1:229136329-229136419
  hypo
tatgaccttcttctaggaacgctggactggtaagggacagacgcctcaagtgggcatgtgcatgactccagtaaacgcactgcacacaag

SEQ ID NO: 249623 - DNA, 130 bp, Homo sapiens; identical to SEQ ID NO: 207545
  chr1:229155568-229155698
  hypo

SEQ ID NO: 249624 - DNA, 163 bp, Homo sapiens; identical to SEQ ID NO: 207546
  chr1:229160202-229160365
  hypo

SEQ ID NO: 249625 - DNA, 158 bp, Homo sapiens; identical to SEQ ID NO: 207547
  chr1:229202157-229202315
  hypo

SEQ ID NO: 249626 - DNA, 145 bp, Homo sapiens
  chr1:229223744-229223889
  hypo
caggcctggcctgaaccccacgcttcccctgactccaggacctagcctgacccaccttcgagatttcatctcgggccagcccctcccacgccggggtccggagtcagtgtgggctgtaacccccggggtcaggagtcaatgtggg

SEQ ID NO: 249627 - DNA, 113 bp, Homo sapiens
  chr1:229230354-229230467
  hypo
ctgctcagaccagccgtcacctgaacacagacccacaggcctgcccaccctgccgggccttgctgcagctcttccccaggaccgcatggacgcccttgcgtctttgcaacact

SEQ ID NO: 249628 - DNA, 148 bp, Homo sapiens; identical to SEQ ID NO: 207548
  chr1:229252027-229252175
  hypo

SEQ ID NO: 249629 - DNA, 86 bp, Homo sapiens
  chr1:229256678-229256764
  hypo
gggttttccatttgagaggtcggtgtcagccagtgtgtgcagaccaggccgcctcacagccatgcgagtctaactgtagcccagaa

SEQ ID NO: 249630 - DNA, 51 bp, Homo sapiens
  chr1:229438667-229438718
  hypo
cagctgaggtcaccgcggcgcgcacaggccccgaacgctcaggagtgtggt

SEQ ID NO: 249631 - DNA, 143 bp, Homo sapiens; identical to SEQ ID NO: 207549
  chr1:229462409-229462552
  hypo

SEQ ID NO: 249632 - DNA, 150 bp, Homo sapiens; identical to SEQ ID NO: 207550
  chr1:229606406-229606556
  hypo

SEQ ID NO: 249633 - DNA, 390 bp, Homo sapiens
  chr1:229644848-229645238
  hypo
tccctcaaccactgcgtagcctcttctgccagcgggagggagtaggggagatggggagagggttccttacctgtgtctagtcttcctccactctatcttctcactgccaacacaatgaattaaggcaaacgtaatgctgctcttgggcctgtaaatgcttcagtggctgaccattgccagtaggttatttgctaagctcctttgcaaggtcctatgtgatctaagtcaggttggcttttccgtccgtgttgtacttccagcacttcccacttgcactccacattccgagaacttaaaaacccaaatctccctccagtgcccatgtccatgtttctctcacctggaatgcactccctgccttgttggtccagaaggcgcctaccttccgca

SEQ ID NO: 249634 - DNA, 160 bp, Homo sapiens
  chr1:229677940-229678100
  hypo
ccccattctgctggaaaccacgcggacaggaaggggcctttacctgagtggcttgtgccagggaatcctgagtgactttggtcagtttccgtagatatcgcccataaattacagcaatgattgacactggaggcaccacgctcaaaacaaaggtggccag

SEQ ID NO: 249635 - DNA, 35 bp, Homo sapiens; identical to SEQ ID NO: 207552
  chr1:229678578-229678613
  hypo

SEQ ID NO: 249636 - DNA, 120 bp, Homo sapiens
  chr1:229853311-229853431
  hypo
ggcctcccaaagtgctgggattacaggtggggtgtttcttaaagaaggtttcgagtacatttaacacaaagaggaagcatgtgtcaccggtagagggtcgtgactgcaagttgtccaggt

SEQ ID NO: 249637 - DNA, 62 bp, Homo sapiens
  chr1:230080283-230080345
  hypo
tgtgtgtgtccggcgtcccgctcgcctgcggtagccacgtagactccgcgtcccccccaggc

SEQ ID NO: 249638 - DNA, 61 bp, Homo sapiens
  chr1:230213776-230213837
  hypo
agcccatagcattgccgacgtcattgattgtgagctgcattccagtcgggggtggtggagg

SEQ ID NO: 249639 - DNA, 200 bp, Homo sapiens; identical to SEQ ID NO: 207553
  chr1:230219680-230219880
  hypo

SEQ ID NO: 249640 - DNA, 99 bp, Homo sapiens
  chr1:230250129-230250228
  hypo
tcacttgggaatttcactggcgaaattcagtgaggcacttgaggtttgtaaatgggcagacgtttcccacacgattacgtctgtatgttggaaagatat

SEQ ID NO: 249641 - DNA, 307 bp, Homo sapiens; identical to SEQ ID NO: 207555
  chr1:230256221-230256528
  hypo

SEQ ID NO: 249642 - DNA, 296 bp, Homo sapiens; identical to SEQ ID NO: 207556
  chr1:230266283-230266579
  hypo

SEQ ID NO: 249643 - DNA, 105 bp, Homo sapiens
  chr1:230272604-230272709
  hypo
tcagaccgaagagccggccgtctgtgcattttgcttttcccgcagttcagccgggactctgcttcacggatgctttcacctcacggacagcgaagccagacacac

SEQ ID NO: 249644 - DNA, 253 bp, Homo sapiens; identical to SEQ ID NO: 207557
  chr1:230308282-230308535
  hypo

SEQ ID NO: 249645 - DNA, 289 bp, Homo sapiens
  chr1:230346848-230347137
  hypo
tgtccttatgttgtacttctcggcagctcgcggcgtctcataaacatgcgccgctggcctcctgagattcttgtgacggaaccgctgctccatggtagagctggcccgagcacccactcctcccgcatcaatttgctgcccaactccaactctgtatgccgcaccacagggtcctggtggaggagatgggaggccacacggggtgtcacaggtggggacaggcgcttctctaggcttagctgttctggctttgttggcatttgtggccgtggggcaggtggagtttggg

SEQ ID NO: 249646 - DNA, 219 bp, Homo sapiens
  chr1:230378964-230379183
  hypo
gggcagggaggcgtcgccggttggcatggggttgtgctggccctgtggcttctctctcctgacgtgctttccaactcgcctctgcaggcctcatgcgctcacgggttcggggggccgatgctgcccaagccaaggtcctgaccttcctggacagtcactgcgagtgtaatgagcactggctggagcccctcctggaaagggtggcggaggtgagatgac

SEQ ID NO: 249647 - DNA, 264 bp, Homo sapiens
  chr1:230379468-230379732
  hypo
atgggagcagtttccttccccgcctacagcttcgcagagtgcttagaacattgcccggcacctagcaagtgccatctcttgcagctcgcagagcggggcgtgctggggaagctgtccctggggccacctctctgctcttagtgagtagggcaggttagcccagcaggcttccaggctcctgtgggagagggttgtggctaggaagcatacagggaccggtggggttgtcagagggtgatccgcggctccacttctgcaccttct

SEQ ID NO: 249648 - DNA, 41 bp, Homo sapiens; identical to SEQ ID NO: 207558
  chr1:230393113-230393154
  hypo

SEQ ID NO: 249649 - DNA, 76 bp, Homo sapiens; identical to SEQ ID NO: 207559
  chr1:230393524-230393600
  hypo

SEQ ID NO: 249650 - DNA, 312 bp, Homo sapiens
  chr1:230398099-230398411
  hypo
ccaatggttcagtaagcacccgctgaggctggctccccacaggtccagctcgaggtgctggtggggacagcccaccctctgctgtgtgccgtgatcccagctggagctgctgcacacccagagggagccgcctcagtcacacgccagcagacaggtgcaaatggagtgatgcagacagaaagaaaggaaatcacacctcaagatttattttctttctagaaacacccgccgggcagcagaggtctggatggatgaatacaaaaatttctattatgcagcagtgccttctgctagaaacgttccttatggaaa

SEQ ID NO: 249651 - DNA, 206 bp, Homo sapiens
  chr1:230399606-230399812
  hypo
cagagcccttgtcacggagatttgttggacagttaggtaatgcggcctctctctgttgctcctgttcgctcacttggctctttggaaccgtttcctctgcttttcaagtaacatgccaggcgccaggtggcccatgccccctaggaggagaacaggagagaacacagcgtccttctccctcggatccctgccgtgcaggacagctt

SEQ ID NO: 249652 - DNA, 571 bp, Homo sapiens
  chr1:230404004-230404575
  hypo
atgcagacatgtggataattcgtgtagggttgggtgaagcttacctctggtctgtggatgacaaaacggacgaggtgcccacccaggttccgtactgtctgggtgttgggcctcttgtgatccctggccagcctcacctccgtgtttaatctctggagttcccactgtcactctgcagtgttctgatgatttatggaaggttggagaggtcactcctttctgtgtcagcgcctctgctggaaagcgacacaccttacgctacagcacattaaacagaagcgtgtgctcaggccccggccgagagagttcgtcatcagagtctcgggccccagcttcatcccctgtgcgtcaggctctgtgactggctcaccccccgccagcattgcaccttaattaccgcacagctagtaacacgagacagagtctgggccctgtggaggtggcaggtctacgggaaccaaagactttgtctgtgtagctgctgcctgtgaccctcctcacctgccctcaggaggacagcctgtgtcccgccttcagggctgtggccctcaccccccggtcctgcccagta

SEQ ID NO: 249653 - DNA, 245 bp, Homo sapiens
  chr1:230415001-230415246
  hypo
tcctttgcttgtgcccacactctaaggcactctcctgtgtcttgcagaaatgggaacagatcgagggcaactccaagctgaggcacgtgggcagcaacctgtgcctggacagtcgcacggccaagagcgggggcctaagcgtggaggtgtgtggcccggccctttcgcagcagtggaagttcacgctcaacctgcagcagtaggagggtccgggaggccctgccgtcctgtctcctgcaccattg

SEQ ID NO: 249654 - DNA, 162 bp, Homo sapiens
  chr1:230453225-230453387
  hypo
actgtcactctttagtccagcgaggcttgggtgaagacggcagaagaatgaatcaaagactagcgagacgcaccaagaacagaggtgcgctgccgggggctgacccttggggaggggagggccgaggctgatttatctggcgggctcagcctcacccttcac

SEQ ID NO: 249655 - DNA, 198 bp, Homo sapiens
  chr1:230453610-230453808
  hypo
gagtagctagtgacatggagcgcacaatcaagtctcccgcaggagtctcctcattacgaccgtgtatacatgggtatacacggaagggtgaaggtgccccaccctccccggaacacagttcacacagagctgccaccagcgccagcaccaccgccctacactcaagagaggctgcccggcccccaccagacaggggtc

SEQ ID NO: 249656 - DNA, 210 bp, Homo sapiens
  chr1:230529557-230529767
  hypo
gagactccgtctcaaaaaaaaaaaaaaaaaaaataataggcccggggcccgccagtccacagcctgattagaaacatgtggcttcgcaaggctctccctcactggctccccgccctagagtccgccacacctgccccggcctggcatcctctgcaggcttccagctctcccactcttctggctcattccgcccctgactgggctacaaat

SEQ ID NO: 249657 - DNA, 118 bp, Homo sapiens; identical to SEQ ID NO: 207564
  chr1:230821541-230821659
  hypo

SEQ ID NO: 249658 - DNA, 109 bp, Homo sapiens
  chr1:230827245-230827354
  hypo
gcatgagcgacgacgacaaaatcaggctgcagttggccctagatgttgagtacttgggagagcaggtaacccatcagccgccggcagctccagcgagcctgaaaccaaa

SEQ ID NO: 249659 - DNA, 42 bp, Homo sapiens
  chr1:230841595-230841637
  hypo
ggtgtgtctactccccaccccgcccccagcctgggcaggaca

SEQ ID NO: 249660 - DNA, 35 bp, Homo sapiens
  chr1:230870971-230871006
  hypo
agagcatggaaatctcgccccgactgcagcgggag

SEQ ID NO: 249661 - DNA, 509 bp, Homo sapiens
  chr1:230882795-230883304
  hypo
ccaacctcccttccgactacaaaactctgccattctctgatgcaggagatgggactcaagaccacaccgtgcacttctccgtaaagccacctcctggaccagttgggtttcttgctccttttccttctgaagcaatcctctctctcccatgaggccccctgagcgcactaagcagaggtgccgcctctgagtggaatgtgccaggccccagagctgcctctgagtctgcaggagtgcagagtgggcagagggctctctctgctgttttccatcagggcgtgtcccatctcagtctaacagggaggtgcccagaaaataggtggaggtgagggccactcagcccagtggccctctgagctgttccttcttgaccggcacacacagctcgcttcttcactttcttttccatccactgccggacccaagccagccttccagggagcagccatgccttacctctaccgggccccagggcctcaggcacacccggttcccaaggacgcccggat

SEQ ID NO: 249662 - DNA, 131 bp, Homo sapiens
  chr1:230887782-230887913
  hypo
aacaaatgtacatccaggatcgacacgcacatgcaggacactcacacgtagacaatgctcccaagtgcacatgcaaccagcatacatgtggagcatgcacaagcacacacgtgtaccacacctgggcacac

SEQ ID NO: 249663 - DNA, 196 bp, Homo sapiens
  chr1:230888881-230889077
  hypo
cactccctttccagccaccacggagatcagagtcatttaatgaaatggcgccaaagctacctggagctgggggtgggaatgcaaagacgtgtgagacctggcagaggacaggccagcatttgggaggtccttacttctgccgggcctggggttttggcgcatctaaaaacaccccgtgttcttcagaaattctcct

SEQ ID NO: 249664 - DNA, 147 bp, Homo sapiens
  chr1:230894274-230894421
  hypo
tcagaaagccagaaccagggcgattcggaattagctttcccgatgttcagccctggcgagtctctcttgcctgtgtcaaacagccagaaagggccatattacaatgtcccaagcccagtgacatacggtgctttccagaaatgtgaa

SEQ ID NO: 249665 - DNA, 359 bp, Homo sapiens; identical to SEQ ID NO: 207566
  chr1:230898511-230898870
  hypo

SEQ ID NO: 249666 - DNA, 100 bp, Homo sapiens
  chr1:230928474-230928574
  hypo
aactgtggcctctgcggcccctagagggtagctcccccgggctggctgtcacccatttactgccatcagcgatgcctttcaggcacgctccttctcaagg

SEQ ID NO: 249667 - DNA, 799 bp, Homo sapiens
  chr1:230979103-230979902
  hypo
gcaaacttgggttccgagaacagggtgtcttccccatcgtcctgcctgacatcaggagatggcagcttcccctcgagctgggagggggcagcctcgtgcagtgcactgctgaaggcctggacaggctggggtctctcacgttcggtgctcacgttgggaagaggacgctgctcctgacggagggtgctgggcctttccaccttggcctccctgtccttcggggcaggttcctgccggtagcagggaggcaagaccttttcccccttctccatggacttgatctggctaggggtcagcgactggaactcggcctcaggcccctcccctcgggaccgctcagcattgatcttccagaatgacgcttcctcctccttcctggtggggcccagggcgtccaggctggaggacctgctgccttgggaggacttgagggcctgggagccctgggaagctttggacagtggtctgggctcgctggcggcggtgccgttgctcggctcctggatggatagggcggagatactgaactccatctgactctagggtgggacatgagaaaggacagaaaaaagaaagagatcctgagaatcgaccgtcacaagtgtgccagctcacgcacccctcctcagcataaggacgcacaccagccacacacgagttgttgcccatgtgctggaactgtctgtcctgagtggtgggtatggtcaggactcccatcgcacacctgaaatgcatcagaagcttaaatgccaaggccgggtgacagagtgtgggtggtggtcccctcccaaatctcatg

SEQ ID NO: 249668 - DNA, 120 bp, Homo sapiens; identical to SEQ ID NO: 207568
  chr1:230980022-230980142
  hypo

SEQ ID NO: 249669 - DNA, 124 bp, Homo sapiens
  chr1:230986635-230986759
  hypo
tgggcagcaaagccccgaaagtcacagatagacctgagctccaattgctctccgcccactcgacctgccaggcacctgaccccctgcatcccggtgtcctgacccacagcgtgaacagggacac

SEQ ID NO: 249670 - DNA, 68 bp, Homo sapiens
  chr1:230988836-230988904
  hypo
ccagctcccatcaggcgatcagatgacacataagtgatcccaggcaaggccaacggaagaacagtcca

SEQ ID NO: 249671 - DNA, 168 bp, Homo sapiens
  chr1:230992696-230992864
  hypo
tcagcttttgacagagcctccgccaccctagcttagcctcagacactgggggcaaatgccagggcccacgcagggggagtgcctcaccaacacataagtgtacacattcagccttccagaccccgagtgtgcgttctctgtgcagacgcctcctaacatgaacagcca

SEQ ID NO: 249672 - DNA, 199 bp, Homo sapiens
  chr1:231037666-231037865
  hypo
ctgaggacttactacgcatggcaaacacactaggcaacattcaagagctatgacaggcaagtcacttctcccacctgagcccgtttgtcacctaagtggggataatactagcacttatctcacaggcctcttcaaaggattaaatgagtgaaacaatgtacaacacttagaaaaaattggccaggcgccgtggctcacg

SEQ ID NO: 249673 - DNA, 499 bp, Homo sapiens; identical to SEQ ID NO: 207570
  chr1:231038105-231038604
  hypo

SEQ ID NO: 249674 - DNA, 146 bp, Homo sapiens
  chr1:231046052-231046198
  hypo
aagcaaaagagccacggaagagagcggtgctgcagccaaggcaaaccagggcagggcagggctagcactgcgcactgtgtatgctgccaagctcggcttaaacccatggttttcagaaggtgctggagagccgcagggcacagaga

SEQ ID NO: 249675 - DNA, 201 bp, Homo sapiens; identical to SEQ ID NO: 207571
  chr1:231122192-231122393
  hypo

SEQ ID NO: 249676 - DNA, 40 bp, Homo sapiens; identical to SEQ ID NO: 207572
  chr1:231127690-231127730
  hypo

SEQ ID NO: 249677 - DNA, 330 bp, Homo sapiens
  chr1:231162838-231163168
  hypo
ggtaaacacaggagcctgaacgcttctaggtttcaaaggctctgactccccatgaccccattccagccagacacgtggctccaggcttttctcctgacagtgccatttccaaggtattcccaggcccaccgaggtgatgcacccggcagggagtcgaaagcaaagaggatctctccctggacacttctgcactgtagcacccagatgactcacaaagctgccttgtcgtcaggtggaacactggcctagaaaggaatcctgaccgcctaggaatacagcgcagccccgcacacacctattacacaacccgacacatggcaaaagttcaga

SEQ ID NO: 249678 - DNA, 50 bp, Homo sapiens
  chr1:231163531-231163581
  hypo
ctgcatctgtgaatgctcctcgaccacccgccctgtacctgattccctcc

SEQ ID NO: 249679 - DNA, 132 bp, Homo sapiens
  chr1:231401053-231401185
  hypo
aaatggttggtgagctgctacgaatgtcgggtgcctttttcatgcggcgtacctttggtggcaataaactctactgggctgtattctctgaatatgtaaaaactatgttacgggtaaatgcaaataattccc

SEQ ID NO: 249680 - DNA, 31 bp, Homo sapiens; identical to SEQ ID NO: 207574
  chr1:231409278-231409309
  hypo

SEQ ID NO: 249681 - DNA, 271 bp, Homo sapiens
  chr1:231475548-231475819
  hypo
ggaatgtgttccatccgtctcagcgaaccccttttgaagttgaggccaagaaaggatcttgtagaggtatttttcgtgtaaacttgcttcctagcgcagtaatttacaaatacttgtcaatgatttagactgctgtgaattcgcctgtatgtatcgttaaaaaaagtcactttgccctcagtgaaagcttgaattatggggcaaacaataatgaacaccttatgttttttatagtgcttcatagtaaaaaaaaaaaaaacaaaaaaaaggc

SEQ ID NO: 249682 - DNA, 90 bp, Homo sapiens; identical to SEQ ID NO: 207576
  chr1:231476372-231476462
  hypo

SEQ ID NO: 249683 - DNA, 64 bp, Homo sapiens
  chr1:231713057-231713121
  hypo
tattaggcttattgtttgtcttctttaattaatatgtaacctcgccaaggagaggaatgtttgt

SEQ ID NO: 249684 - DNA, 120 bp, Homo sapiens
  chr1:231738863-231738983
  hypo
cccggcccatttatttttcttatttaaacattttcttcctttgacttgtttgcttgtgtttgttctcagtttttagaatcattaaacattttggccatatagaaaaatatacagaagcct

SEQ ID NO: 249685 - DNA, 79 bp, Homo sapiens
  chr1:231820898-231820977
  hypo
gggaaggactgcttcacttgcgtagaactctccctctctcttgcgctatcttcatatcgatgtctacctttctctttgt

SEQ ID NO: 249686 - DNA, 131 bp, Homo sapiens
  chr1:231893611-231893742
  hypo
gtgtcccaatccctcggcctccctccgattccctccacaactgggaaccgtgctcacagtcggctttccactcaggcacccaacaggtttatcaggcctgtctgcacaggtgttctcggaacctgtgtgag

SEQ ID NO: 249687 - DNA, 138 bp, Homo sapiens
  chr1:232104130-232104268
  hypo
aactcttcccttctcggtaccctgagcagacgtaccagtcacagtaattaatataaaaggtgtccttcctcttgaggcatcacttttaaagcaaaaacaagggaggctgaggcaggagaatggcgtgaacccgggagg

SEQ ID NO: 249688 - DNA, 204 bp, Homo sapiens; identical to SEQ ID NO: 207577
  chr1:232192429-232192633
  hypo

SEQ ID NO: 249689 - DNA, 87 bp, Homo sapiens
  chr1:232466923-232467010
  hypo
agactcaatgagcttgactccgtaaggaacctttacttcaaggagggaagaagaattgttttcgtatttttttggtggagacggggt

SEQ ID NO: 249690 - DNA, 217 bp, Homo sapiens
  chr1:232551394-232551611
  hypo
gtcagtcatcagtcacagcacgggcaccagcccagagtgagtcagaacatgggcaccactgcccctcccagagtcagtcagtcagaacacgggcaccactgccccctcccagagtcagtcagaacacgggcaccactgtccctcccagagtcagtcagtcagaacacgggcaccactgtccctcccagagtcagtcagaacacgggcaccactgtcc

SEQ ID NO: 249691 - DNA, 198 bp, Homo sapiens; identical to SEQ ID NO: 207578
  chr1:232566620-232566818
  hypo

SEQ ID NO: 249692 - DNA, 192 bp, Homo sapiens
  chr1:232568782-232568974
  hypo
atcccactccaagggcgcacacacacagcaaacccctgctgcacgtgcaactgtcaacatggaacaatgttgattagaagcactgattttaagaactccccaatggcagcaacccaaatcatcaatagtagaaggatattcgattaataactatgaatgaatacacggaatactctacgaatgaatggactg

SEQ ID NO: 249693 - DNA, 60 bp, Homo sapiens; identical to SEQ ID NO: 207579
  chr1:232649854-232649914
  hypo

SEQ ID NO: 249694 - DNA, 89 bp, Homo sapiens
  chr1:232889011-232889100
  hypo
gaattatgttgtcatcgaaattcttattggcaaaactgtatgttgaaaaaaaatctgggccgggcgcagtggctcacacctgtaatccc

SEQ ID NO: 249695 - DNA, 61 bp, Homo sapiens; identical to SEQ ID NO: 207581
  chr1:232909165-232909226
  hypo

SEQ ID NO: 249696 - DNA, 203 bp, Homo sapiens; identical to SEQ ID NO: 207582
  chr1:233085194-233085397
  hypo

SEQ ID NO: 249697 - DNA, 153 bp, Homo sapiens
  chr1:233116464-233116617
  hypo
tttaaaggaagaagaggtgccgtggcagaactccacgtgaccgtcccctccctgcacgcagccaggatgagaggagcagagctgagcgccacctccctgtcggtgccacggctgaggtgaggagctcttgccggatggtggggtgggggcagc

SEQ ID NO: 249698 - DNA, 32 bp, Homo sapiens; identical to SEQ ID NO: 207583
  chr1:233264703-233264735
  hypo

SEQ ID NO: 249699 - DNA, 120 bp, Homo sapiens
  chr1:233601759-233601879
  hypo
ttgcccggaggtatggagggagaggcccgggcgggaaccagggctgtacgtgaagcttgtggcgagcccgggttccggctgggtgcaggctcagtggcccgcagtcggagcggccggtcg

SEQ ID NO: 249700 - DNA, 39 bp, Homo sapiens
  chr1:233601999-233602038
  hypo
gcctcttccttgcgggacagggctcgggacctgcagccc

SEQ ID NO: 249701 - DNA, 82 bp, Homo sapiens; identical to SEQ ID NO: 207585
  chr1:233799535-233799617
  hypo

SEQ ID NO: 249702 - DNA, 245 bp, Homo sapiens
  chr1:234342550-234342795
  hypo
ctgggtctgcccaacgttgagcctccgaggacctcattgaacaagaccttgcctgcaggtcccggccagcctgtgctcaggaataactaaggagtggagccgcatcaacctccttcccaaatccggacgtcttcctccgactcaagcccagcctgagggccattctccttgattcacccttggaaacagacaccagccaagggagctgtctcctggcgttgacgaggatccgatttaggtcagta

SEQ ID NO: 249703 - DNA, 127 bp, Homo sapiens
  chr1:234452341-234452468
  hypo
gtccagattgtggccgccatcctcgccatcgctggcattgtgatgatgacctacgctgatggcttccacagccactccgtcatcggcatcgcactggtggtggcctcagcatcgatgtctgccctct

SEQ ID NO: 249704 - DNA, 211 bp, Homo sapiens; identical to SEQ ID NO: 207586
  chr1:234541033-234541244
  hypo

SEQ ID NO: 249705 - DNA, 161 bp, Homo sapiens; identical to SEQ ID NO: 207587
  chr1:234541509-234541670
  hypo

SEQ ID NO: 249706 - DNA, 277 bp, Homo sapiens
  chr1:234587511-234587788
  hypo
atgatgaatgactggatcatcgaagtggtcaggactaaaagacaccacacaggtacaatgagtgagcaagtcaatgacgctaaaggaggttgttctgtgtaggtctttatcaagtcggataatcttaagatattattgtctaacagtgaggtcagccggtatttatcttttaacagtatacacttttctttgcattcctctaaaactggccagactgcgttgcctaattattgctacaaaatacgtgaggcttttcgaatcttgtatttccacaggc

SEQ ID NO: 249707 - DNA, 91 bp, Homo sapiens
  chr1:234604775-234604866
  hypo
ggttggtgcgaaagtcgttgcggtttttgcctttttttttttttttttaaaaaaaaaaaaaaggcaaaaaccgcaacgactttcgcaccaa

SEQ ID NO: 249708 - DNA, 214 bp, Homo sapiens
  chr1:234621221-234621435
  hypo
aaccgctacccctccgtgacctgttaggaaccaggctgcacaggagaaggtgagctgcaggcgagtgggcattatcacctgagctccgcctcctatcaaatcagcagcggccttagattgtcttaccacctgagctccgcctcctatcaaatcagcagccacccccaccttcccggctccatggaaaaattgtcttccacgaaacctggtccct

SEQ ID NO: 249709 - DNA, 45 bp, Homo sapiens
  chr1:234690619-234690664
  hypo
ccttgcaccctggggtgagccgggaggggcgatgcagtccgcacc

SEQ ID NO: 249710 - DNA, 181 bp, Homo sapiens; identical to SEQ ID NO: 207588
  chr1:234691150-234691331
  hypo

SEQ ID NO: 249711 - DNA, 495 bp, Homo sapiens
  chr1:234724571-234725066
  hypo
gtaaaagtgtttcttagaggcggttatgaggattaaatgacccgacagaggcaaaacagctttgtaaaccataaatcattttgttcggagtcaacaggatgactttttcccctcacacaatttagaattatgtacctgttgaggtagcaacgccctcgtttaatcccagccatgtttggtccccaaatgcctctctcactcgcccagagtgatactgaggccacaaaaagctctgctgttttttttttctcgtggtctttctcaattccaacgtggtacacaggtacctggcgtgtgtctgctcagacagtggatggcccttgttcaaagactgatgggaacacctagtgtacgaggtggcgccggggccgcccacaccaacaggccgtgtgctcccatctcactgtgcacgaggaaccggtgtgcttttcggccaggctgcatcaccctccctcccttggctttctgtgtgacgtgcctgtgccagagactgca

SEQ ID NO: 249712 - DNA, 225 bp, Homo sapiens
  chr1:234795442-234795667
  hypo
ggggcagggctggagccctgcggatgctctgatgagtgagaatgagtcacccgctcaggcctctttctgcttaagcagaggtaaaggtccagctttgtaatagccggagtgtgaggatccctcgcactgatctgcccacaatgggccgccggcaggcccagagaccctcaagtctcatcctcagtggtctaccgagctgtgcacggccagcttccctgaattcac

SEQ ID NO: 249713 - DNA, 207 bp, Homo sapiens
  chr1:234797012-234797219
  hypo
ggcccttcgtccaccggggtctgtcctggttcctgggcgagctgtggcagggtctttctggcagtccacccagtgccctgtggcaggcgatcaggaagcagaggcagagcagctgggggaggactgggatgactgaacctctcctgcttaggttcaggggccctcccttcaaggtgcggcctgtgtgagacacgcatccacagcccg

SEQ ID NO: 249714 - DNA, 110 bp, Homo sapiens
  chr1:234808101-234808211
  hypo
ccaaaggtgagaggcgctctaacccatgaggcttttttttccccttcctttctgtcctcactcacagcacctctttctttgccccaaagcgctcccgccacatctgtgcc

SEQ ID NO: 249715 - DNA, 141 bp, Homo sapiens; identical to SEQ ID NO: 198023
  chr1:234828214-234828355
  hypo

SEQ ID NO: 249716 - DNA, 561 bp, Homo sapiens
  chr1:234844950-234845511
  hypo
atgtgaactcattctaaactcgttgggacgtgaactggtgacgtgcctggagctaagatggctctggccctgtgtggagaatgggttgaaggaacacagacgcagcagcagaaccggtgagttttgcctcagggaaattcacattcaaggggacaatcatctcagtctgaagggtacccgggagtttgacaggtgaagagacctctttcaggcagagggaacaaaataagccacagtaagtatgcttggacctgcatagaagtagaaggaagatgaggggtgactgaaaggaagagcagtcaaagatgaggcggggaagcaagccgactgggtgtcaggagcaggctcagggacttgggcttggccggtgagcagtcaaggtgcacagagctgttcctgggtagcgcctctcatggtgccgctgactccaccggggtgaccgctgtgcccggggctgctggtcaggatgcaaaagcactttagagtgaaggtcacctcaggcaacaggcaaaacagacggggctgaagtgagcgcctttcgccacttgagccctgaagtgt

SEQ ID NO: 249717 - DNA, 35 bp, Homo sapiens
  chr1:234863731-234863766
  hypo
tgatttaaatgtattctggccgggcacagtggctc

SEQ ID NO: 249718 - DNA, 210 bp, Homo sapiens
  chr1:234868420-234868630
  hypo
gacaggacaggagagggcacctgggcagtcagccgaggtctctctgcagaggtgatcttcaagcttaagagaagccatctctgtgagacctggggagtggcattccaggaggagggagcagctggtccaaggccacagggcaggaatgagcctagcttgtgtgaggagccaaaagggtgggcgagggcggagagccgggagcaaagcaga

SEQ ID NO: 249719 - DNA, 133 bp, Homo sapiens; identical to SEQ ID NO: 207595
  chr1:234868847-234868980
  hypo

SEQ ID NO: 249720 - DNA, 383 bp, Homo sapiens
  chr1:234869963-234870346
  hypo
attagatttttaaaaattaaatgagtttgttagaaggtgacaagtgctttttaaatgaaatggagtagagtggatggagagaggtggggtgaggaagggcacagctctaagccatgtgaagggtgggcttcttggcaaaggtgacggctgaacagagacttctggaggcgagggagcgagccacatggatctccagggatgagaatcgtaggcacaaggatcggccaactctgagtgggacagctctggggtgtctgagcctgcgggggcggggcacttggctggaggggagagcgagtgggtggtgagtggcagtggatgacatgggaatggggggtgaccaggtccgggttgcccaggggaggactcggaggccatgggga

SEQ ID NO: 249721 - DNA, 284 bp, Homo sapiens; identical to SEQ ID NO: 207597
  chr1:234871741-234872025
  hypo

SEQ ID NO: 249722 - DNA, 162 bp, Homo sapiens
  chr1:234881087-234881249
  hypo
ggttttctctcccgcgtattgtattcctgttgtatattgtacatgtaatgcatgctagctgccatttagaatggaaaagcatgccctcaccacagtcaggcccacattttgctttccgtgttaaagagagaaatggcgtaacgtgctcgtgaagaggcggca

SEQ ID NO: 249723 - DNA, 99 bp, Homo sapiens; identical to SEQ ID NO: 207598
  chr1:234893900-234893999
  hypo

SEQ ID NO: 249724 - DNA, 159 bp, Homo sapiens; identical to SEQ ID NO: 207599
  chr1:234895630-234895789
  hypo

SEQ ID NO: 249725 - DNA, 191 bp, Homo sapiens; identical to SEQ ID NO: 207600
  chr1:234957454-234957645
  hypo

SEQ ID NO: 249726 - DNA, 36 bp, Homo sapiens
  chr1:234960409-234960445
  hypo
cgtgatccgcccaccgaagaattttaaagtatttat

SEQ ID NO: 249727 - DNA, 124 bp, Homo sapiens
  chr1:234964789-234964913
  hypo
acccggtcagtgtgcggcggagcatacgtgcatgcctgggcataccctcttctgcttccgtgttgttggtgctgctgcaccatcagcagctgtacctagttactaaacacgcgagtgctgtaca

SEQ ID NO: 249728 - DNA, 75 bp, Homo sapiens
  chr1:235003815-235003890
  hypo
aaaaaaaaaaaaaatttaattttaatccactcggattttaaaatagcatatcacgatggaaaaagccttgaactt

SEQ ID NO: 249729 - DNA, 85 bp, Homo sapiens
  chr1:235036868-235036953
  hypo
agatggtttagacagcgccacagtcacaaatgcaaacaaacaaacaaaaaaatgtaatttcttttttttttttcttttttctttt

SEQ ID NO: 249730 - DNA, 169 bp, Homo sapiens; identical to SEQ ID NO: 207601
  chr1:235037109-235037278
  hypo

SEQ ID NO: 249731 - DNA, 79 bp, Homo sapiens; identical to SEQ ID NO: 207602
  chr1:235042107-235042186
  hypo

SEQ ID NO: 249732 - DNA, 280 bp, Homo sapiens; identical to SEQ ID NO: 207603
  chr1:235044523-235044803
  hypo

SEQ ID NO: 249733 - DNA, 76 bp, Homo sapiens; identical to SEQ ID NO: 207604
  chr1:235067968-235068044
  hypo

SEQ ID NO: 249734 - DNA, 177 bp, Homo sapiens; identical to SEQ ID NO: 207605
  chr1:235129830-235130007
  hypo

SEQ ID NO: 249735 - DNA, 185 bp, Homo sapiens
  chr1:235260410-235260595
  hypo
ggcatgagccaccgcgcctggtttgttttttttctttcagattttatggctttatttaaacacaaataatatgtacacatggctgcccattcattttcttggcggggcagcccagcattgggattgctgactctgacggcagctgggctgctcttcccgaaacagcgttgcggttcttggttctt

SEQ ID NO: 249736 - DNA, 161 bp, Homo sapiens
  chr1:235267081-235267242
  hypo
aggaaaaaaaaaaaaaaagaagatattctcatgccctttggaaatgaggcacctaagcctcagagaagttaagtgccccagtacgctgcacatttagaactcaaacccaagcccctgcttctaaaaaccgtgttcgttccgccaccccacagctgcccctc

SEQ ID NO: 249737 - DNA, 206 bp, Homo sapiens; identical to SEQ ID NO: 207606
  chr1:235317095-235317301
  hypo

SEQ ID NO: 249738 - DNA, 120 bp, Homo sapiens
  chr1:235325380-235325500
  hypo
accagcctggtcgatctagcgagacttattctctacagaaaagaaattagacgggcaccttcgcgctcggcgcctgtagtcccagcactttgagaggctcgggcaagaggatcccttgag

SEQ ID NO: 249739 - DNA, 40 bp, Homo sapiens
  chr1:235508756-235508796
  hypo
tttggtttgagacagagtctcgctctgtctggcaggctgg

SEQ ID NO: 249740 - DNA, 99 bp, Homo sapiens
  chr1:235542866-235542965
  hypo
aaacacatttctagcgcaaatgtatcgtttgagctagagacccacatccgtcatcaccctctataggcactttaagtatactgacttctctcccaaact

SEQ ID NO: 249741 - DNA, 242 bp, Homo sapiens; identical to SEQ ID NO: 207607
  chr1:235613456-235613698
  hypo

SEQ ID NO: 249742 - DNA, 116 bp, Homo sapiens
  chr1:235665690-235665806
  hypo
taacaaacttgcacgtcctgcacacgtatcccggaacttaaaaaaaaatcccatttattatctgaccagatatacagtactcattcaaagccaaagttaattaacataactagtat

SEQ ID NO: 249743 - DNA, 31 bp, Homo sapiens; identical to SEQ ID NO: 207610
  chr1:235855354-235855385
  hypo

SEQ ID NO: 249744 - DNA, 123 bp, Homo sapiens
  chr1:235872466-235872589
  hypo
tgacagatgttctgcgacacgtagtcagactctagagcctgccgatggatgaggataaaaagacgaggatcattacgcgcccaagggggaaggttgacgtgattaacccgttcaccattctga

SEQ ID NO: 249745 - DNA, 175 bp, Homo sapiens
  chr1:235955184-235955359
  hypo
tgtgccaagatgaaagcagccgatggggaaaactctctctatcagcctctttcttgctccgtgaaactcgtgctcttctcaataaacccatggccttactgtttaaaatcccaggatacttttgtgatgaaacaccgttgcttaaatttggagcgtgcagtaaagggaaggttag

SEQ ID NO: 249746 - DNA, 68 bp, Homo sapiens
  chr1:235973154-235973222
  hypo
agccaccggttcttcggtccaacctgcagaaactactcgactctccaagttgtcgctcagactgcagc

SEQ ID NO: 249747 - DNA, 94 bp, Homo sapiens
  chr1:236062548-236062642
  hypo
gattacaggcatgatccaccacacctggccgactttaactttttttactttagatcactggctccacttctttgaagtccgtgtttcctggatg

SEQ ID NO: 249748 - DNA, 39 bp, Homo sapiens
  chr1:236069953-236069992
  hypo
caacaatgctggaacgcaagaggacgaacatctgcagat

SEQ ID NO: 249749 - DNA, 395 bp, Homo sapiens
  chr1:236081424-236081819
  hypo
cagggaccaccacccgcccccatgcccaacgctgaggaggacactccagcagggatccaccaggtggctgtaaagctaagaaggtgacctcctgggtgtccctcctgaaacacagagcaccgtttgaactgcccgagcgagcggaccagctggcgcacagatcacagagccctgcagtgatcagctgccatctggatctgcccgggtgcaagcaaacggcacagctctggaagcttcctcagggctccaagagagcatctgcgtgttgggaagcctcggatgtgctgcaagacctttgttctgactgtggcaaagcctatgtatgctaggtgtcacattgaattcttttctattaataataacttatctgagattctgcgcgactgtcgctctag

SEQ ID NO: 249750 - DNA, 120 bp, Homo sapiens
  chr1:236121531-236121651
  hypo
catgcgcggtggcctgccagcgctcaggaggggcctcaagtgcagtgcgtttaccaaaattgtgcacaagctcacttgaggcgctctttccttaccagtcgagtgttactagaggaaggt

SEQ ID NO: 249751 - DNA, 185 bp, Homo sapiens
  chr1:236143072-236143257
  hypo
tgggtggaggggcaggcccacgcagcccccatggctacagctgacgtacatcttccagtctgtgaaatacagattcttcccgtagctcgtcacagcaaaaggatactggagcccttcgagagccttgcgtctgctgggctgactggggttcaggcattccgcccgattggtgcctgtgtggagtg

SEQ ID NO: 249752 - DNA, 247 bp, Homo sapiens
  chr1:236155722-236155969
  hypo
taaaccctgcttcacatgggcgcctgctccaaacccatcccaggctcctcgttgccctcatgaccaatactcaggcttagaaacgtggctcacacggtgctgcttctggaaagcctcacccatgagcccaccgccccacgcaagccaggattccgcctcggctccctggtcgctgtctgcttctcctaaagctcatctccctacactgttcctgtctattcaccgtcctttccgcttcttgggggcc

SEQ ID NO: 249753 - DNA, 535 bp, Homo sapiens; identical to SEQ ID NO: 207611
  chr1:236156643-236157178
  hypo

SEQ ID NO: 249754 - DNA, 202 bp, Homo sapiens
  chr1:236161321-236161523
  hypo
gaggagtcagtgggaggtgacgagacaaggcacacagagacatttcgagctctgcacccagatgttcatttgcgactggatcctcgcaaagcagacacagtgacattccataagtgtgttgccagtgaatatttgaagtacctttgtctgtgttgccagttctcatgttggtttgcttaacgtggttgctcccttggtgaga

SEQ ID NO: 249755 - DNA, 97 bp, Homo sapiens
  chr1:236187366-236187463
  hypo
taccatagcaggttcgcccgtctcctcggaagccgatggagcactcgcaggtgaactgtgtcctgggaccagggcgacaggccgcgttggtgtcaca

SEQ ID NO: 249756 - DNA, 181 bp, Homo sapiens; identical to SEQ ID NO: 207612
  chr1:236189253-236189434
  hypo

SEQ ID NO: 249757 - DNA, 311 bp, Homo sapiens
  chr1:236192797-236193108
  hypo
acgaggctagtggccggtctggggctggccctgggacacagctggggctcacctgaggtggagtagtggtacagctccgtgtagggctcaatgtgcacggaggagccgaacggaatctgcggcacgcggccctccagctccgtgtcgatggtcaggtgcccatgctcatcgatgccgctgaaccgctgcttaatgaccagattgcccgggtgccccacgaaggtcacctcagcctggcgagtgaactcaccccctgaaaaacaagatgagactgtcactttgctgactggggagcgcgcccttctgcccgc

SEQ ID NO: 249758 - DNA, 84 bp, Homo sapiens; identical to SEQ ID NO: 207614
  chr1:236194737-236194821
  hypo

SEQ ID NO: 249759 - DNA, 268 bp, Homo sapiens; identical to SEQ ID NO: 207615
  chr1:236212016-236212284
  hypo

SEQ ID NO: 249760 - DNA, 179 bp, Homo sapiens; identical to SEQ ID NO: 207616
  chr1:236274571-236274750
  hypo

SEQ ID NO: 249761 - DNA, 180 bp, Homo sapiens
  chr1:236281071-236281251
  hypo
tgcttctgagaagtcgctgcctccccttctccctttagcctccctggcaaaataagacacttcgattgcggggccacagtcagttctgactctgatatcttacgacacctatcagggatcagcctggacctgttacctgagcggggtgtggcctcctttcctctgcgctttccccacacc

SEQ ID NO: 249762 - DNA, 43 bp, Homo sapiens
  chr1:236315001-236315044
  hypo
gtgagccactgcgcccggcctccctcctcgatttttaaatggc

SEQ ID NO: 249763 - DNA, 33 bp, Homo sapiens
  chr1:236318110-236318143
  hypo
acactgcacactgccgcacgtggcccgggaccc

SEQ ID NO: 249764 - DNA, 103 bp, Homo sapiens
  chr1:236338712-236338815
  hypo
tcagacagcacccacgaggaatcatctggaaaatgtaagtggccagacagtgcgttccccagaggctgctgcatggagtgtgtgtacacgcgggttctggatg

SEQ ID NO: 249765 - DNA, 210 bp, Homo sapiens; identical to SEQ ID NO: 207617
  chr1:236339561-236339771
  hypo

SEQ ID NO: 249766 - DNA, 199 bp, Homo sapiens
  chr1:236451640-236451839
  hypo
ctataaaatccagcgcactccatcacccaccggtctttccttgcagaagcctctgtctcactagagagctactctgctttctctttcttttgcctattaagcctctgctcctaaactcatgtgtgttcctgtcctaaatcttcctggcgcaagacgacgaatcctgggtatttaccccagacaacgaagccacttcaaa

SEQ ID NO: 249767 - DNA, 44 bp, Homo sapiens
  chr1:236514730-236514774
  hypo
atgaggaggctgggcgcggtggctcatgcctataatcccagcac

SEQ ID NO: 249768 - DNA, 120 bp, Homo sapiens; identical to SEQ ID NO: 207621
  chr1:236540755-236540875
  hypo

SEQ ID NO: 249769 - DNA, 56 bp, Homo sapiens; identical to SEQ ID NO: 207622
  chr1:236561305-236561361
  hypo

SEQ ID NO: 249770 - DNA, 153 bp, Homo sapiens
  chr1:236626420-236626573
  hypo
tttcataaatgttattcacacggcatttctctgctatcctcggaatagtgtttgtatcgtgtcactctggcacggggctctacagaacatgtcgagcgtgttgccttccctactgcccacatcgtttgagagaacacattttaaacatttttt

SEQ ID NO: 249771 - DNA, 75 bp, Homo sapiens
  chr1:236645856-236645931
  hypo
taccacagggccgacgtggagaaggttctgcgcaggtgggtggacgaggagtggcccaagcgggagcgtggagac

SEQ ID NO: 249772 - DNA, 312 bp, Homo sapiens
  chr1:236657369-236657681
  hypo
ccagaccatcgacacggcctcaaggccctgcatgacgcctcctgccccaacacctcgtgtcatcttgctctcctctcccgcagctcctgaggctttagccaccctggaattccaagtccccatggtcatttttttttcctgctcaagatatcaccatgtgctgtcccctctgcccttgtctacacccacgtgtccttctcccgccccggccacactcatggggcacactgtccttccctggctaatcctcccacactcgataccactttctctgggatattgcacccgatcttcagccgcagttgtcttcct

SEQ ID NO: 249773 - DNA, 59 bp, Homo sapiens
  chr1:236723110-236723169
  hypo
atatagccgagaacggtctccagcaacctgaaacacagaggctcgctcagcaaacggca

SEQ ID NO: 249774 - DNA, 134 bp, Homo sapiens
  chr1:236802444-236802578
  hypo
agtctcattttagccgtggggatcacgtggcatggcatgtctataatgtcacttgtagagataccgttaccggtttgcccctactgtccagtgaccccactccaaaagcaagcatcacgcgctgtgtgtgcggt

SEQ ID NO: 249775 - DNA, 136 bp, Homo sapiens
  chr1:236907943-236908079
  hypo
tgcagaaggattacgagtcggcgtcgctgacagaggtgcgggctctgctgcggaagcacgaggcgttcgagagcgacctggcagcgcaccaggaccgcgtggagcagatcgcagccatcgcgcaggagctcaagta

SEQ ID NO: 249776 - DNA, 137 bp, Homo sapiens
  chr1:237052580-237052717
  hypo
ccggggcaagtacccgaatcgaggctttcccaagatatttaacgacaaaacagtaggttagtgcagtaagtccttcctttctgcctctgatattcaagctgtgggattgtgactttgaagaccggaatcggtgagga

SEQ ID NO: 249777 - DNA, 161 bp, Homo sapiens
  chr1:237053951-237054112
  hypo
aatcccttcagaggttgttacggtcaaaatgtcaatcgttacgaattatattgtagttgggattaaaagcaccacggaatacgaggcacaggtcgcgtctcccagaggtcactgcaaagtcagtggagttgtatgtgcacgaggaatgtcagtgaggaatg

SEQ ID NO: 249778 - DNA, 271 bp, Homo sapiens
  chr1:237144673-237144944
  hypo
agaaggaggagctgcggaaacagctggatgacctgaaggtggagctgtcccagctgcgcgtcgccaaagtgacaggcggtgcggcctccaagctctctaagatccgagtcgtccacaaatccattgcccattttctcacagttattaaccagactcagaaagaaaacctcaggaaattctacaagggcaagaagtacaagcccctggacctgcggcctaagaagacacgcgccacgcgccaccggctcaacaagcgcgaggagcacctgaa

SEQ ID NO: 249779 - DNA, 38 bp, Homo sapiens
  chr1:237584239-237584277
  hypo
atattaaacataattgtgaccgggcacagggtggctca

SEQ ID NO: 249780 - DNA, 731 bp, Homo sapiens
  chr1:237947071-237947802
  hypo
cttaaaactaaaggatttgacgtcgtctgatacttttaaagaatatgaccccgatggcaagggagtcatttccaagagggacttccacaaagcgatggagagccataagcactacacgcagtcagaaacggaatttcttttgtcttgtgcggagacggatgagaatgaaaccctcgactacgaagagttcgtcaaacgcttccacgaacctgcgaaggacatcggcttcaacgtcgccgtccttctgacaaacctctctgagcacatgcccaacgatacccgacttcagacttttctggaattagcagagagcgtcctgaattatttccagccctttctgggccgcatcgaaatcatgggaagcgccaaacgcatcgagagggtctattttgaaatcagtgagtccagccgaacccagtgggagaagccccaggtcaaggagtccaaaagacagttcatatttgacgtggtcaacgaaggcggagagaaagagaagatggaactctttgtgaacttctgcgaggacaccatctttgaaatgcagctggcggctcagatctcggagtcggacttgaacgagaggtcagcgaataaggaagaaagcgagaaggagaggccggaagagcaggggccgaggatggctttcttctccattctgacggtcaggtcggccctgtttgcgctcaggtacaatatcttgacccttatgcgaatgctcagtctgaagagcc

SEQ ID NO: 249781 - DNA, 45 bp, Homo sapiens; identical to SEQ ID NO: 207626
  chr1:238017558-238017603
  hypo

SEQ ID NO: 249782 - DNA, 520 bp, Homo sapiens
  chr1:238081767-238082287
  hypo
gtcaggcggctattcgccccgtcaaaggcaaaattccacttggtggtgatatactcacctcctacgttaaagcctgtgaaggggtgggaggaactctgcatacagcaatgattatggcacaagctatggcctctattctaatgcctggacaattctctggccaatgcttcctatgcggccagaagggacttgcaaaaagaaattgccctcggcgtgcaggtcgcagtcctttacatcaccaacaacaacaacaaaaaacttttcagcaacaagacgccccaccttctactgtatgcccacgatgccaaaagggctttcactgggcatctcaatgccattccagatttgatattgatggcaatcctttacagccttttaaaaatcagggaaacgggatgaggggccggccccaggcccctttaaacaatggggcattcctcaactctcagcccctggcgtccagccagacgggagccttcccagttcaatccattcaacctccaccccaattcccacttca

SEQ ID NO: 249783 - DNA, 162 bp, Homo sapiens
  chr1:239138492-239138654
  hypo
tctccattgtccagcgtgttcacgttgtagacccttcacactcatcagtcacttagtagccatctcggttctcagatctactgtcgtggtatggcagtgcttgtgttcaagtcaccgttattttactacatactggctttaaaacacaagcgtagtgggccg

SEQ ID NO: 249784 - DNA, 82 bp, Homo sapiens; identical to SEQ ID NO: 207627
  chr1:239509033-239509115
  hypo

SEQ ID NO: 249785 - DNA, 121 bp, Homo sapiens
  chr1:240048929-240049050
  hypo
gtgtacttcagcgacgcattcattgtgttgtgatcacaggcacacctgctcagtgcttcccatatacagcgaccaagccattaatcctccctaaattcaacacctgcgctgaccttcccct

SEQ ID NO: 249786 - DNA, 200 bp, Homo sapiens
  chr1:240064135-240064335
  hypo
atatttttaatccatcgtattcaggcgagcaagatcagtcatttcatttttgtataacttgcctcgaagctgcctgttgtggccccattctgcatagcaaatcaccacaaacttagcagcttacaacaaggttccctgttcagggtctcaacactgaaatcaaggtgttcgcccagctgagtttacgtcttaggcaagac

SEQ ID NO: 249787 - DNA, 171 bp, Homo sapiens
  chr1:240118849-240119020
  hypo
ggtttccaattacccgctgtgccccacctgtggcagagtaaacctacttcctccagactcgcatggcagggactgaccaagaaggaaagcggccctcactccagggttccgtggtgatacctgcatcagcacaccagcccgggggtctgcactcagcggggtctcaggcca

SEQ ID NO: 249788 - DNA, 41 bp, Homo sapiens
  chr1:240372833-240372874
  hypo
gtgagccaccgggcacggccgcaaatcaaattcttaggtaa

SEQ ID NO: 249789 - DNA, 83 bp, Homo sapiens
  chr1:240641239-240641322
  hypo
gtctcaaatcaaacaaacaaacaaaacgacagaaagaaaggacacgtcacttaaaatgaaacggcagttattctgaaagtaga

SEQ ID NO: 249790 - DNA, 319 bp, Homo sapiens
  chr1:241051970-241052289
  hypo
actgcacagccgcgcgttgagaagaggtgctatcaactttcccattttgctgatgaggcaatttaggctggatgagaggacgagactgagtactactttcttggtggaggcgacagtcaaagccaggcattagaccggaatcgactcagttaaccactaggctgtgtgtgacagctggaggttagggaacgcggaggcagagagagggaagcagcgggtgcaaagggcagagctacttcggattttatgacggtcaaaggcctcaatgaagaaagaggtaacatttgtttttgttttgtttttgagacggagtcccact

SEQ ID NO: 249791 - DNA, 45 bp, Homo sapiens; identical to SEQ ID NO: 207628
  chr1:241271635-241271680
  hypo

SEQ ID NO: 249792 - DNA, 150 bp, Homo sapiens; identical to SEQ ID NO: 207629
  chr1:241434339-241434489
  hypo

SEQ ID NO: 249793 - DNA, 84 bp, Homo sapiens; identical to SEQ ID NO: 207633
  chr1:241541312-241541396
  hypo

SEQ ID NO: 249794 - DNA, 88 bp, Homo sapiens; identical to SEQ ID NO: 207634
  chr1:241559203-241559291
  hypo

SEQ ID NO: 249795 - DNA, 80 bp, Homo sapiens
  chr1:241647322-241647402
  hypo
gccgtgagccactgcgcctggacgtgtctatccttttctatagcacctctaggaaacacgaaccatgtccaagatacaat

SEQ ID NO: 249796 - DNA, 202 bp, Homo sapiens
  chr1:241753209-241753411
  hypo
tgtgtttggcattgcgatgagtgggaatgaagaataatactaagtcgcagtgagaaatagctgtatttgttcaaaagcgttctttaagactgtcattattgcagatgcgagcacatgtcaactcaagctggttcatttttcagaagaacatggagagatttcttcatgcgattatgccatcgacctttatccctctctatac

SEQ ID NO: 249797 - DNA, 49 bp, Homo sapiens
  chr1:241755369-241755418
  hypo
ggatagctcacttccggaatacaacatgtttccccgcaaaggccgtgga

SEQ ID NO: 249798 - DNA, 161 bp, Homo sapiens
  chr1:241809726-241809887
  hypo
cacacatcctcccgcgtgggccgtctagcctgtcctttagacagaaagaggttcatttaaaaccctctaaacaccctcttacattggaacattaaattatcacaatacctatattccaaggaagtcctttgcaaagtataggggagcgaggaatggagaca

SEQ ID NO: 249799 - DNA, 129 bp, Homo sapiens
  chr1:242121115-242121244
  hypo
gctgagcggctcctcggagtctaggagcctccctgcagccccggcgcccacctctgggcaggctgagcccggagacacccgggagcccggcgtcaccaccagggaggtgacagacgctgaggagcaaca

SEQ ID NO: 249800 - DNA, 87 bp, Homo sapiens
  chr1:242153594-242153681
  hypo
cagcccaggggctggacttgcgaatgaagaagcctttggatgatttcagctcccagccatttttttttttttttttttcctgagatg

SEQ ID NO: 249801 - DNA, 144 bp, Homo sapiens
  chr1:242689621-242689765
  hypo
aggcaacagtgagccgatatcgcactgcaccctgggcgacagggcaagaccctgtcggaggtgaggctgtgaaaactatacattccattgtatagcatctctgataattttgtttgtttgttttgttttgtttttgagatggag

SEQ ID NO: 249802 - DNA, 325 bp, Homo sapiens; identical to SEQ ID NO: 207636
  chr1:242767712-242768037
  hypo

SEQ ID NO: 249803 - DNA, 77 bp, Homo sapiens
  chr1:243432191-243432268
  hypo
gggctgtcagagtggggcagcggggtgcagcgcggggagggcttttctctttcttcgtgcctctggtgctggagtcc

SEQ ID NO: 249804 - DNA, 161 bp, Homo sapiens; identical to SEQ ID NO: 207637
  chr1:243479808-243479969
  hypo

SEQ ID NO: 249805 - DNA, 131 bp, Homo sapiens; identical to SEQ ID NO: 207638
  chr1:243566401-243566532
  hypo

SEQ ID NO: 249806 - DNA, 685 bp, Homo sapiens; identical to SEQ ID NO: 207639
  chr1:243637530-243638215
  hypo

SEQ ID NO: 249807 - DNA, 335 bp, Homo sapiens
  chr1:243652442-243652777
  hypo
gtactgtgcagaacgcggcgcaggtgggagtccttgggcgggcgtctacaggtggatcttttatgcacctcaacaggccggctttctcacggatcacatcggttagcagtaagctgggagggaggtcccgaagactgtgctgggcacagtgcaggacccagagaagcggagccatgggcccgtcctggtgagggagttaaagtccgtgcaggtgaacagaccccggcccgcgaatcaacgaaccacaccgagtgccaagttgcgccgtgcaggctgcggagggtgcgagagcagggagaagcgggaggacggccgtgggcggcagaacaggcttt

SEQ ID NO: 249808 - DNA, 39 bp, Homo sapiens; identical to SEQ ID NO: 207640
  chr1:243750610-243750649
  hypo

SEQ ID NO: 249809 - DNA, 464 bp, Homo sapiens
  chr1:244142604-244143068
  hypo
cctcctgtagcagtcgctcatcccaagcagcttctgctgtacagtgcgggtaagtgttcaggagtgaactgccccgctttgttacatttcatggaaggactgtggcctccatgccagagctcttcgaacaaaaacactttcaatcccctcattctcattttgtggggattcccagctgaacgggcctggctttttgggagaagtttccagcccgtagctgccttggccaggagtgtggggggtgggacggaaggtacccacgagggtggcgggtggggccatcggccaggagtgtgggggggtgggacggaaggtacccaggagggtggcgggaggggccatcggccaggagtgggggggtggtgggacggaaggtacccacgagggtggcgtgtggggccatcggccaggagtgggggggatgggacggaaggtacccacgagggtggcgggtggggcagatg

SEQ ID NO: 249810 - DNA, 134 bp, Homo sapiens
  chr1:244200736-244200870
  hypo
cactgttcataagtcggctggctgtggagggtagagggtggctgcgtccccaaacagcagggcccagcaagagggaaaagccacacaccttctctgaggggccccccaaaaaatgatcgcggtagcagtagctt

SEQ ID NO: 249811 - DNA, 224 bp, Homo sapiens
  chr1:244218320-244218544
  hypo
tgtcaacgtgcccacgtgctcgctgtgtgggaagactttctcttgcatgtacaccctcaagcgccacgagaggactcactcgggggagaagccctacacatgcacccagtgcggcaagagcttccagtactcgcacaacctgagccgccatgccgtggtgcacacccgcgagaagccgcacgcctgcaagtggtgcgagcgcaggttcacgcagtccggggacc

SEQ ID NO: 249812 - DNA, 253 bp, Homo sapiens
  chr1:244243852-244244105
  hypo
agtaactgcttgtccggcaggagtaagtgcttcagaaatactgagctcagtgaacctgctaaacacaggcaccccggtgagactctgccggatgatgacaaatcgtgttcacattaaccttgtgccctgaaggttgcctttggtgggaagaggcagagaagacgtgagtttcttgccaattccacctggtggagagcctgccaggcctcctgacttgtggtcctgtctctgaccggcacggtggctgcttttc

SEQ ID NO: 249813 - DNA, 216 bp, Homo sapiens; identical to SEQ ID NO: 207642
  chr1:244345254-244345470
  hypo

SEQ ID NO: 249814 - DNA, 218 bp, Homo sapiens
  chr1:244499987-244500205
  hypo
tggtgaccagctgggagtgccgggctccaaggctgagaggtgttgctcaatcagctgaagtgtcctagtccatgaaaagggtacgatttctctttgccgaagagacaatgcgggaaccttaggagaaaacagcaggaaaagacattgctgcccaggtggacacacatctcctccaggtgcgctttccttggcttttgaggcctcgtatatttggacgt

SEQ ID NO: 249815 - DNA, 143 bp, Homo sapiens; identical to SEQ ID NO: 207643
  chr1:244641921-244642064
  hypo

SEQ ID NO: 249816 - DNA, 81 bp, Homo sapiens
  chr1:244758875-244758956
  hypo
gctaggtggattccacaccacggaaggccttctatcaagtcttacggtggagtggcatgatcaaatatttgctttaggctg

SEQ ID NO: 249817 - DNA, 73 bp, Homo sapiens
  chr1:244815257-244815330
  hypo
ttttaaaatccttccgggatctggcctctgcctacctgcccagctcatctagtaccgtcgactccttgcctac

SEQ ID NO: 249818 - DNA, 86 bp, Homo sapiens
  chr1:244823752-244823838
  hypo
ccaccgcacccggtcggatttttcttaagatgggatgtacttacactttccgtttgttgactgtcgaattctctacaagattattt

SEQ ID NO: 249819 - DNA, 89 bp, Homo sapiens
  chr1:244826768-244826857
  hypo
cacctggctgcaaattttaagaataaagtaaaaaatcctacaaatacacaaaggcaaaaaagttacacgggaacaaaatcaggctaatt

SEQ ID NO: 249820 - DNA, 53 bp, Homo sapiens
  chr1:244857963-244858016
  hypo
cagtggcacgtgtgcgtcttattgcgacgctttccaaacgatgatgttgcctt

SEQ ID NO: 249821 - DNA, 39 bp, Homo sapiens
  chr1:244883481-244883520
  hypo
tattttttggtaggcggccggggggaggtttgggacagc

SEQ ID NO: 249822 - DNA, 95 bp, Homo sapiens
  chr1:244896511-244896606
  hypo
aacgcactgcacatgcggcccctgctctcaagtgcgacatgcagcccaccacacgcgcagacagcccaccccacgggaggaactgggagaaggaa

SEQ ID NO: 249823 - DNA, 140 bp, Homo sapiens
  chr1:244902172-244902312
  hypo
gggactgtgtctcggaaaagaaaaaaaaaaacaaaacagaatagttcatcaattatgggaaattaagcttcaaaatctaagtgctcttcttagagacaccggctggatttatgtatagcgctgatggaaattctcttgta

SEQ ID NO: 249824 - DNA, 193 bp, Homo sapiens
  chr1:244920545-244920738
  hypo
ggttggtatagctgtgactacggcacagcaaaccaggcggcggtgcagcccacgcaaccccgaggccattggtgccttttgtggacggctaggccagagccttttctgtcgaagtcaagtgcagagttcgggcaatgcaccgtgtgagtgtgtcagcaatctccaagttctcgaggtgtgcactgaagaggtc

SEQ ID NO: 249825 - DNA, 75 bp, Homo sapiens
  chr1:244924623-244924698
  hypo
tattatgattatttctaagtgtgctgatcccccgtcccgccaccccgcagcggcagaccacgatgtgcaggggag

SEQ ID NO: 249826 - DNA, 508 bp, Homo sapiens
  chr1:245032185-245032693
  hypo
cggcctatatgcagttatcgtataccaattatacctccataaagctggggaggttgggggaggaagacaaaagaattcaggcctgcggggaatgatgggagtgggtaggagaggagagaggggagagaggaaaacacagatcaccagcagcctcgtgggtggttttgtaaaggactttggcttttgctttctgctatggactgaacgtttgtgtccccacaaaagtcctgtgttgaaacctaatcccccatgatattaggagctgaggcctttggaggcaacgaggtcatgagcgtggagccctcatcaatgggattagaaaatttatacagagctgaagagaccagcgttcgtgtcttctgccctgtgaggacacagcaagaaggtgccctgggtggggaggcgggccctcaccagtcactgaggcgctgggcttcttagcttccagaactgcgaccaataagtgtctgttgtttataagctactcggcttatgatgtttgttagaa

SEQ ID NO: 249827 - DNA, 140 bp, Homo sapiens
  chr1:245135714-245135854
  hypo
aggtgtgtatccttgtagtccgtggacagcagcctggacatcactggctgccaccgacctaataatgaatcagtcttcattttaacatgtttgtaggtgatttgtatgtacattaactttcgagaaggccgggcgcggtg

SEQ ID NO: 249828 - DNA, 142 bp, Homo sapiens
  chr1:245205094-245205236
  hypo
cagagagacagtgggatgctcgcgcacagaggggtgaccaggtgagggcacagggagaaaaagtggcgcctacaaattgaggaaggccccagaagcagccgacctgctgacacctttatctgggacctctggcctccggaac

SEQ ID NO: 249829 - DNA, 92 bp, Homo sapiens
  chr1:245209851-245209943
  hypo
tgtctttggcaccagaaatacgatgcgaggatagtgcataggatcattcggtcatttttgcctctagccccgtatttcagaacatgggagga

SEQ ID NO: 249830 - DNA, 305 bp, Homo sapiens
  chr1:245254415-245254720
  hypo
agatgaggatgaaccgcgtgccttcaggacagggcggagacggaggaggaaaggagtgtggtgatcctcggaacatcagcagacaggctgttgatgataggaacacattgcagcggggaaggaggatggctgagatatgaaatacccttcaaggtggacgcatacccaggggcatgtcattcggtggcaggggccagcacggacatgcagcactgaggcgtgtgctagcgcccagtgcgtcgacccaggcacggacttgtttggagcatacaggacagctctgcgttaagacctgtaagccatta

SEQ ID NO: 249831 - DNA, 97 bp, Homo sapiens; identical to SEQ ID NO: 207647
  chr1:245281663-245281760
  hypo

SEQ ID NO: 249832 - DNA, 157 bp, Homo sapiens
  chr1:245370678-245370835
  hypo
accgcacaatctaaactgaacccgattggctaacttgaaagacaactttggcgggaagagctgccacagcaggaggggtaaattacagagtgagtagcagacgtgggctctgtagataaggacttacaagggacttacagtccggtgaagaactaaa

SEQ ID NO: 249833 - DNA, 166 bp, Homo sapiens
  chr1:245377007-245377173
  hypo
gatgcacacgtgaccgtgtgccgcacctttgttctgcccgttccttactccttatttaggtgatgaaagatgtggtgccccaactttaagttccacttgacgcagaatttcctgattgaggatggagcctggggctaccttgaggtaattacgggatagtcgttgt

SEQ ID NO: 249834 - DNA, 95 bp, Homo sapiens
  chr1:245446511-245446606
  hypo
ccgcacaagtccaccgacagcaagcccaatctgcccaagcccacccaccgcgagcccaatctgcctaagcccacccaccgcgagcccaatccgcg

SEQ ID NO: 249835 - DNA, 139 bp, Homo sapiens
  chr1:245481134-245481273
  hypo
aacttgcagatgttcagatgcgcagagttaaggtctaaaacaagaaaagtttgctaacgtagagtggccgctgggtcttatctttccgtcttcaatggccttgaaaaatatggggcacgcatggggatttcacactctt

SEQ ID NO: 249836 - DNA, 82 bp, Homo sapiens
  chr1:245488058-245488140
  hypo
caagcttgttaacacggcaggacaacccaagatgccatgttcctaaagaaaatgggggccgggcacggtggctcatgcctgt

SEQ ID NO: 249837 - DNA, 299 bp, Homo sapiens
  chr1:245494226-245494525
  hypo
gtgcgggaagtccccgcagagagagagcccacgtagtaagtaaggaacgggggcggttagagattctggagaggccggatggaaaatgcacacacggtgagcagaaaccatgatcctgagacgctgatgtccaggagggagcctcagagcaggaacgcagccgcggcagggggcggtgggagtctgcggtatgacgtagggtacgaagggcctgggggtggcagagcagagcctgctgcggaggcacaggcttctcattccgcgcgagtgaccgagacatggatcgcgctcttgccgga

SEQ ID NO: 249838 - DNA, 52 bp, Homo sapiens
  chr1:245496614-245496666
  hypo
acatgatgttaagtcgaatcagccacagtcacaaaagcgcaaatactgtgtg

SEQ ID NO: 249839 - DNA, 99 bp, Homo sapiens; identical to SEQ ID NO: 207648
  chr1:245497279-245497378
  hypo

SEQ ID NO: 249840 - DNA, 1049 bp, Homo sapiens
  chr1:245498869-245499918
  hypo
aaaggagagtcccacgcgggaaaaggagagtgccacgcggggaaaggagagtcccacgaggggaaaggagagtcccacgaggggaaaggggggtcccacgcggggaaagaagggtcccacgcggggaaagaagggtcccacgtggggaaagaagagtcccacgaggggaaaggagggtcccacgcagggagagtcccacgcagggaaaggagagtcccacgcagggaaaggaaggtcccacgcagggaaagaagagccccacgcggagaaggaggagtcccacgaagggaaaggagggtcccacgaagggaaaggagggtcccacgcagggaaagaagagtcccacgcggggagagccccatgcagggaaagagggtcccacgcagggaaaggagagtcccacgcagggaaaggagggtcccacgcagggaaaggagagtcccacgcagggagagtcccacgcagggaaaggagggtcccacgcagggaaaggagagtcccacgcagggaaaggagggtcccacgcagggaaaggagggtcccacgcagggaaagaagagtcccacgcagggagagtcccatgcagggaaagaaggtcccacgcagggaaaggagagtcccacgcagggattgctgttccactctgcatagccgctgggctttctgctgcacggatgccatctagaagaagcaccatccactgttctcagaaagaagagagaggaaggagacaggagtgcgtagagtgagtgggccatcagaaaaaggactgctctggggatgcaggagacccgcttgtaggatttaggggcaccgtgcaagacaggggtcatggtatgcgggtgcctccgactggcggctgcgtggtggatctggccacttggtgaaggtcgcagtgaccttgatctgctctggggagggatgctgttttgcctttcttcacgcacgtggaatcaggactagctggactggcaggaaaaggttctctctggaataatggtttgcttctctgcaggctcgtgcggcggctcgtgcggagccctgtgagc

SEQ ID NO: 249841 - DNA, 146 bp, Homo sapiens
  chr1:245508141-245508287
  hypo
tagctcacagttacatttttcggactgatctacgttgattcgtggaaaaacaggtgataccgcttctttccttctatcccccggcttcagttgagttcattctataccccacccgatgcctccgcgtacacactgtagctaattct

SEQ ID NO: 249842 - DNA, 115 bp, Homo sapiens
  chr1:245512066-245512181
  hypo
cactccagccacgccggcctcttgctgttcccagttacgccaactcgcccccacccagtccttcatgtctgcctgctcccctgcctgggtcgcttccccacgatgcctgctgtgg

SEQ ID NO: 249843 - DNA, 164 bp, Homo sapiens; identical to SEQ ID NO: 207651
  chr1:245525398-245525562
  hypo

SEQ ID NO: 249844 - DNA, 399 bp, Homo sapiens
  chr1:245530128-245530527
  hypo
tctgtaggaccctgctttctcggctgtgattcacgacaaactccaggtccccaacaccatccggaaggcatggaacgaccgggacaaccgctgtgacatttgcgccactcacctgaaccagttgaagcaggaggccatccagatggtgctgacgttggagcaggcagccggcagtgagcactacgacgcctcgccctgctccccgccaccgctctccaacatccccaccctggtggggtcccggcacgtgggtgggctccagcagcccagagactgggcctttgtgcccgccccctgtgccacctccaactacacaggcttcgccaacaagcacggcagcaaacccagcagccttggggtcagcaatggggcggaaaagaagagcgggtccccaaccca

SEQ ID NO: 249845 - DNA, 97 bp, Homo sapiens
  chr1:245537644-245537741
  hypo
gccgattgtggcttcgtggaaagcagaagcgtgtgttctagtatggctgatgtcgggagatgaggtatacacgtgctcttcccggccgaaccacttt

SEQ ID NO: 249846 - DNA, 175 bp, Homo sapiens
  chr1:245548882-245549057
  hypo
gagcaaacctggggcggcgtggagctgtcatgagaatggtattttcgggagctggggaagaggcagagaaggaagggaaaacatttaaagagggcaaaacatggacttcatccgttagctctacagacacggcccttggtagttaggcgacgtgaagccacgtgtactcaggcag

SEQ ID NO: 249847 - DNA, 105 bp, Homo sapiens
  chr1:245576121-245576226
  hypo
agactttcactgctcgttaatggtgcacggaattctcatggacgttgagaatgtcacatgtacacgcacatgcacacgtgtcgacacctgcgcagacacacatgt

SEQ ID NO: 249848 - DNA, 192 bp, Homo sapiens; identical to SEQ ID NO: 207653
  chr1:245576466-245576658
  hypo

SEQ ID NO: 249849 - DNA, 282 bp, Homo sapiens; identical to SEQ ID NO: 207654
  chr1:245582887-245583169
  hypo

SEQ ID NO: 249850 - DNA, 92 bp, Homo sapiens
  chr1:245627555-245627647
  hypo
aatagcagtgaggggtgagtcgatgtctcaggagaggatggcccagacctaggtaatgtgtgtcccgtcccccgacccagtgagcacgtgtg

SEQ ID NO: 249851 - DNA, 120 bp, Homo sapiens
  chr1:245627767-245627887
  hypo
cgcgtgtgggggtgtgtgcccgtgggtgtgtgtgggcgtgtgcatgtgtggatgtgtggcaccatgtgtgtgggtgtgcgtgggtgtgttcctgtgtgggtgtgtgggtgtgtgtgcacg

SEQ ID NO: 249852 - DNA, 129 bp, Homo sapiens
  chr1:245628942-245629071
  hypo
gtcctggcagaaagcggatggcgcgctgcgtctaacggagagtttttggaaaggactgtttacaaaagctgtcgcaggtgcaggcaagccgtggtgcgcagtgctcctgccagccgctggggaggcctg

SEQ ID NO: 249853 - DNA, 164 bp, Homo sapiens
  chr1:245633287-245633451
  hypo
tcagagttggttggcgggagtctcgggggagaaatggggtttgacgtaggccttgaaagaaccgataggattcagacaaacctgagtaatgggagggtgttccgagccacacacactgattgttcagtttggtttgctcagctagaggacgtgttgggaagatg

SEQ ID NO: 249854 - DNA, 35 bp, Homo sapiens
  chr1:245704935-245704970
  hypo
gtagtgaaagaaagacgtggcggtttaatttttta

SEQ ID NO: 249855 - DNA, 37 bp, Homo sapiens
  chr1:245722717-245722754
  hypo
ttttgggtttttgtcgagacggagtcttgctctgtcg

SEQ ID NO: 249856 - DNA, 112 bp, Homo sapiens
  chr1:245752683-245752795
  hypo
gcggtctgtatttacgtgcctgccatctgtccccaggcggcactgagaagggggctgatgctgtcacccctagctccttctgcaggtctcctccgtacgtgccactgccagg

SEQ ID NO: 249857 - DNA, 313 bp, Homo sapiens
  chr1:245753334-245753647
  hypo
tatttaacgacagtcgtaacacatgagtgagctttactcatgtgggccctttattaacaataagccgcctctgtggcggctgggccccgcggggtcggggggtgggggtgcccaacgtggcagggaggcctgcaaggggaggccgaggcgccggtggaagcacaaaccacccggcgagtcagagcaggggtcggggcccctggccgcaccgtgccgcgcatgcgcagggtcccggggtccctggggtcccgggtttgtgcccccggggcggctgggccccgcgggaggggacggccaacgcggaaatgggccc

SEQ ID NO: 249858 - DNA, 151 bp, Homo sapiens; identical to SEQ ID NO: 207655
  chr1:245764442-245764593
  hypo

SEQ ID NO: 249859 - DNA, 211 bp, Homo sapiens
  chr1:245765879-245766090
  hypo
tgaaagtcatgcttcgcatctgttccaccttggctcgagatacttcagaatccagctctttcttaaaggtggacccacggaagaagcagatcaccttgtacgatcccctgacttgtggaggtcaaaatgccttccaaaagagaggcaaccaggttcctccaaagatgtttgccttcgatgcagtttttccacaagacgcttctcaggtggg

SEQ ID NO: 249860 - DNA, 309 bp, Homo sapiens
  chr1:245772566-245772875
  hypo
ggaaaatcctacaccatgatcggaaaggatgattccatgcagaacctgggcatcattccctgtgccatctcttggctcttcaagctcataaacgaacgcaaggaaaagaccggcgcccgtttctcagtccgggtttccgccgtggaagtgtgggggaaggaggagaacctgcgggacctgctgtcggaggtggccacgggcagcctgcaggacggccagtccccgggcgtgtacctctgtgaggaccccatctgcggcacgcaggtgattgcttctgaagcctggctcgccccaaggtggctccctccc

SEQ ID NO: 249861 - DNA, 606 bp, Homo sapiens; identical to SEQ ID NO: 207656
  chr1:245848541-245849147
  hypo

SEQ ID NO: 249862 - DNA, 969 bp, Homo sapiens
  chr1:245849348-245850317
  hypo
cccaggagcgtcccgggcagcagtagccagcacagcgcctccccactcgtgcagagccccagcctccagagcagccgggagagcctcaactcctgcggcttcgtggaaggcaagcccaggcccatgggctccccccggctgggcatcgccagcctgtccaagacctcggagtacaagccacccagctctccttcccagagatgcaaagtctacacccagaagggggtcctgccgtctcccgccccactgcctccctcgagcaaggattccggcgtggcgtctagggagtccttgctgcagcccgaggtgcgtacgcccccggttggaatgagcccccaggttttgaaaaaatccatgtctgctgggagcgaagggttcccggaaactcctgtcgatgatgagcagcaggcagctactccttcagagtccaagaaggagatcctgagcaccacgatggtgacggtgcagcagccactggagctgaacggtgaggacgagctggtgttcacgctggtggaggagctgaccatcagcggggtcctggacagcggccgccccaccagcatcatcagcttcaacagcgactgctctgcacgggccctggcctcgggctcgcggcccgtcagcatcatcagcagcatcagcgaggacctggagtgctactccagcacggcccccgtctccgaggtcagcatcacacagttcttgcccctcccgaagatgagcctggatgagaaggcccaggacgcagggagcagacgctcttccatcagctcctggctgagcgagatgagcgcgggcagtgagggtgagcagtcgtgccacagtttcatagcccagacgtgttttgggcacggggaggcaatggcagaacctgtggcctcggagtttgtcagcagcctccagaacaccgctgtggtgtgcagagagaagcccaaggccagccccgacaacttgctcatcctgtct

SEQ ID NO: 249863 - DNA, 243 bp, Homo sapiens
  chr1:245855705-245855948
  hypo
caaaggctgcagagaaatgtcgggattgagcttggtccgggagggtgcttacatcgggacaggcagagagggcgcagggcatcgaggctgaggcagggatgggactgcaaactcccagcggcaagagcctggcctgtgggcgacacagcgagattaactcaaggagggaccgtcccagcaagcagagcaagacgctagcaaacgcaagccacagtcacacccggaacaaacacaagccacagt

SEQ ID NO: 249864 - DNA, 158 bp, Homo sapiens
  chr1:245859143-245859301
  hypo
acggtgccctggcacgggtattggcaggactctccaggcgtttttaccttctctactcccagctcacacggtgccctggcacgggtattggcaggactctccaggtgtttttctctactcccatctcacacggtgccctggcacgggtattggcagga

SEQ ID NO: 249865 - DNA, 193 bp, Homo sapiens
  chr1:245866076-245866269
  hypo
taggaaaggtgcaaacgtcaaacaccgtggaaggagaaaaggatgggaagcccgaggggtgtccaagccctgtgagactgaaaaagcactttgaggaaccttaaagaccttgtttgtacataagaactgctagcaaaagagacctcactcttctcttgctttcgtgagaaaggaggggcgtggatgtaggatt

SEQ ID NO: 249866 - DNA, 148 bp, Homo sapiens
  chr1:245911712-245911860
  hypo
cgtcagaggacttgcggcgccctctgtgaaagacggggagggctcctgagcgggactcaggaatgtgggttgctactctggattctgccaccgcccatttccttgcttgtgaaataaagtgtggatgactgcacgctctctaagaatc

SEQ ID NO: 249867 - DNA, 566 bp, Homo sapiens
  chr1:245925689-245926255
  hypo
tgtgttgggtgcatcgcacattaggaaatttcctgcacgttgtttttctgtcaggactttcacacagtaggcccttgataaggatttgctgtaccttgctgattcgactggctgacaagtacccccagaccagaaaaggaaagttctccctgaggctgcaacagacggtgcggtgttcttcccccgcctgggtaaacatgccagacatgataaaaagaacagaatagctgagtgccctcagggaatcctagtgttactcccgttggccacacgctgactttatttagagatcaagtaaaggcgctatggctagcattcggcgaaaatgagcactgtggaatctggcttttaagaatcccttcggcatttgtcatttctcttaggtccatgtgggcggctgccagtgttttgggatcagccggcccctggacacgccctgagcaaccctgacgcccgatccttccaccgtcactcttctgcacacaagggcatggcggcccagagggtcctgttaaagtgtcaagcgcttcctatgatacccgcacgccaggtctccatacaaccca

SEQ ID NO: 249868 - DNA, 296 bp, Homo sapiens
  chr1:245986517-245986813
  hypo
ctcttctacattgttcaggacgattgcaaaatccatttctccttctctgtccctgcttctctgcccttcccccaagctttcttgctctctgccacacgtgcgtgtgcacacacacacgcgcgctcgtgcttgctcgctctcgctctctctctctcttttctaaggctccaggcatccgtccctggagaagtgcaccttgggaaggcgatgaaatgaaagaagggcacatcctcctttaaccccaaacatctgaagtcagcgccgcgcactactgcgatttcctgggccaaatgcat

SEQ ID NO: 249869 - DNA, 183 bp, Homo sapiens
  chr1:246019929-246020112
  hypo
gaagagaaggttgcaaaatacgtgcagaacagacacccgtgtaggtgtgtggtcttctttatggatgtggtggacccatgtaaagtttctgtgcttaagagtggcccgagcagggcagcctgagtgtcgaaagggaggatgaggcagaagaatcagtgcagcgctagccaagagtgaggaacc

SEQ ID NO: 249870 - DNA, 87 bp, Homo sapiens
  chr1:246026894-246026981
  hypo
attcacgctgattttgccacgaacttccttgtcattactcaaactgctggccagggtcggaggtgcggcctgtgaccatggaacaga

SEQ ID NO: 249871 - DNA, 78 bp, Homo sapiens
  chr1:246032887-246032965
  hypo
agacagaactgtgccgttgttctcaggtaagaacgagtctcatttgtccattctctctctgaccgcacaagccccttg

SEQ ID NO: 249872 - DNA, 92 bp, Homo sapiens
  chr1:246033506-246033598
  hypo
gttgttcctttcacagcacacgtctaccttgactctaatattactacactaagatcagatacgttcccaccgcagctgtgggtatttgtcaa

SEQ ID NO: 249873 - DNA, 105 bp, Homo sapiens
  chr1:246094296-246094401
  hypo
aggaatgcccgtggtaacagaggaacagcaaagaggctagtgtgaccaaagcggagcaagaaagtagggggcaaaacacgagctcaaagacggagtgggatcact

SEQ ID NO: 249874 - DNA, 133 bp, Homo sapiens; identical to SEQ ID NO: 207661
  chr1:246160270-246160403
  hypo

SEQ ID NO: 249875 - DNA, 32 bp, Homo sapiens
  chr1:246171646-246171678
  hypo
cacatcctgtaatgcgacgtaaataagaaata

SEQ ID NO: 249876 - DNA, 80 bp, Homo sapiens
  chr1:246171884-246171964
  hypo
tctggcagcaacagcgcttggggagtagccgtacctctgaagttttcctttcctttctcgagcaacgcagggagggagct

SEQ ID NO: 249877 - DNA, 189 bp, Homo sapiens
  chr1:246172194-246172383
  hypo
ccaggtgagacaggagagtccggggatgaagaattcggctctggagtcacagactcaagttcaagtgccagccgtaccgcttgctagcagcgtggccttgggcaagtcacttggcttcggtttcctcctcttagctgcaaaatatgaaaaacgggcctgctatgaaacgactggcccatagtcaacact

SEQ ID NO: 249878 - DNA, 230 bp, Homo sapiens
  chr1:246310270-246310500
  hypo
gttttcttgttaatcggcaggcaggcgtgacagtgttcggcagaggacaatctgttcgagaataattagattccccctcgcttcttgcgttggtggcggaagcacccggagtatttacaatacaccattttgcttccatccgagtccatatgttcgctggtcaggttaaaactgaggctgcatggcacatttttcactgtaaacaacgctgccccggcaaaccctagggg

SEQ ID NO: 249879 - DNA, 781 bp, Homo sapiens
  chr1:246310727-246311508
  hypo
aatcaggacgtgctcggtggttgtaattccatctattgatggcagctgctgctgcaacagggaggccggctagggctgcacactccatggaggcggtgggagcctcacccattctgggttggggcaggggctccgtgggtgccactgcagccacccaaatcgtggctgcagaccaggcttcctgctctatggagcaggcaggcgccccgccttcctgggtggggctacagctgcccaaactgatgctggagatcggagcttccctgtgctcttggtgggggccgggagcagacaggatctgccctccagggtagagctgcagcctccctgctgcggctgcagacctgggcttcgcgctcaatcgagcaggcaggagccagggacaagagggagccccacctttactgagttggtggagcgtgaactccgcaggtgcagacctggcatctctgcagcctgcaccctggagggcccgggaagacccgccccccacttcatccctgcaggctcgggggtgtctgctcccgcttcccagcccctctcctctccagatgcctgctctgatctccgaccggggttggggccgagcccggggcagcaggaggcagagagattcctgggtggaaggcggcagtccccgtaaggcccctccttcagaccagggagggcctgaaggctgggggccaggatgccagtccgggaccggagtggggacttgtggtgcctcgtctgggtgcacatggaggaccatgggccaatcggcaggaacttcctcccctct

SEQ ID NO: 249880 - DNA, 263 bp, Homo sapiens
  chr1:246320238-246320501
  hypo
ggtttggataaacaatccaacgtaggcaccattcacaaagaaagggatgctaggaggtacgagggcaaagatgaaaaggtcatacgcagaccgcaaagcttaaaccttcgcctcacatctgtttggaacagcagtagctttttacttagcgcttacatcaccaaagccaatgagtagcgaagtctgggacgaggacaagagctgcccttggcatcactgcctgtcacctgtcccttcggggcgccccctgcctccactgcttg

SEQ ID NO: 249881 - DNA, 221 bp, Homo sapiens
  chr1:246324305-246324526
  hypo
ggactgtgagacaacgccatcagacaagcgagacgatgccatcagacaagacaggtgttccagcgattgctctaggtaagcctcattctctttgttcactggcagcaccaccccgctccaccctgcgcctcatttgcagagtcctctacaaatgaacatgcagcctgcctggcacacctggcacagctcacctgcatgccgccaagcatgacagactgtct

SEQ ID NO: 249882 - DNA, 123 bp, Homo sapiens
  chr1:246324796-246324919
  hypo
tccacctttgatttcgatggtctccttcatgttccccagcccccgtctatgcctccaccttggtatatcatgctctattgtaattattaatttacttttctttctccgcgaatagatgtaccc

SEQ ID NO: 249883 - DNA, 223 bp, Homo sapiens
  chr1:246330193-246330416
  hypo
tatcactacagaggaaaactcgatacccactgaaggcagctgctctcgggtgccccttcccacaagccctagcgaccatcaatctgcactccgtctctatggattcatctactttgaacatttcatacaaacggaatcacagagcatgtggcgtcttgtgtctggctcccttcattaagcataatgtattccgggttcacccgtgctggagcatgtatgggta

SEQ ID NO: 249884 - DNA, 95 bp, Homo sapiens
  chr1:246518821-246518916
  hypo
cagcagggaggctggcggtctggggcaagttctcagccacagtcaccagctgcctggaaacagactccgtgctgctgtgggggcacggtgggagt

SEQ ID NO: 249885 - DNA, 156 bp, Homo sapiens
  chr1:246569252-246569408
  hypo
actctagaattagacggtttgagcctgaatcgctgcaacagtctgttaattattcaaactctctcattctcctgtaggttaaatcgctgcaacagtctgttaattattcaaactctctcattctcctgtaggttaaaatgggatttttttttttta

SEQ ID NO: 249886 - DNA, 74 bp, Homo sapiens; identical to SEQ ID NO: 207664
  chr1:246582057-246582131
  hypo

SEQ ID NO: 249887 - DNA, 86 bp, Homo sapiens
  chr1:246611518-246611604
  hypo
aaaaaaaaataataacataatctcttacatgatcacaatacatgatgctgaagccactattctggagaccacgctttgagaaccaa

SEQ ID NO: 249888 - DNA, 205 bp, Homo sapiens
  chr1:246652177-246652382
  hypo
tttatgagtaccagcgtcacccagggagcttggcaagaatgtagattctgtgccttaaaacactagatattctccggagaggcactgagagccagatttttaacaagtcctctctctctctctccacctcccactccccagtcattctgagggaggtgaatggtaggtcacttctgaagaagcaatgcaggccgggcgcggtggt

SEQ ID NO: 249889 - DNA, 129 bp, Homo sapiens
  chr1:246655156-246655285
  hypo
agacaaggccactctgtgaccgtgatggatcaaaacgaaaacaagaccactctgtaatcatgtctgaacgcaactctgttcaactaccgatgtgctccctggctggacggcaggaactaaagctagagc

SEQ ID NO: 249890 - DNA, 85 bp, Homo sapiens; identical to SEQ ID NO: 207665
  chr1:246783954-246784039
  hypo

SEQ ID NO: 249891 - DNA, 149 bp, Homo sapiens
  chr1:246899321-246899470
  hypo
ggagccagttgtatcgacatcagtggagaacctcaggtataaaaaataaaaaggaaaaacgtagaattaacacataaatttcggtttaatgaagtggaaatatttagtgtaattttgcagacatatttagaagccgacaactcctttct

SEQ ID NO: 249892 - DNA, 326 bp, Homo sapiens
  chr1:246918896-246919222
  hypo
tgtgccactgtttccgtgggcacacgttacctttctccaccttactctggttttgtttggtttgctgccaggagtcagtattattctttgtacacataagcgcatttcctgcccaaatcaaatctcattttatgtcagccataaataccttcagttttaagaagagctgtgtcctccctttggttctggagatcctgctgacggcaaaaacggccttggaccacagctttccaggcatacttgtcatttagaattcctcctcccagcaggcctccgggcttcaagttggcaggaacagcaagggggcttttcggtagatgctgctg

SEQ ID NO: 249893 - DNA, 333 bp, Homo sapiens; identical to SEQ ID NO: 207667
  chr1:246930842-246931175
  hypo

SEQ ID NO: 249894 - DNA, 121 bp, Homo sapiens
  chr1:246931771-246931892
  hypo
gaccttagaaaaggttttatcggctgtgaaattagaaagcagtacaggagcaatagagcccacgactagctgcacatctgaatcacgaaacagtaacaggttcctccgtgcctgcagcaac

SEQ ID NO: 249895 - DNA, 91 bp, Homo sapiens
  chr1:246944244-246944335
  hypo
actgaccttaaaatacggagattagcctggagtatccaggtggccccaatgaaatcacaagggtcttcaatatggccgagagaagcagaag

SEQ ID NO: 249896 - DNA, 52 bp, Homo sapiens
  chr1:246954179-246954231
  hypo
gaaggtctacagctgcggaggatggcaggtggcatctcggggcctcctgtgt

SEQ ID NO: 249897 - DNA, 160 bp, Homo sapiens
  chr1:246969293-246969453
  hypo
caggcgtgaggcaccgcgcccagccgatatccccattgttaagcggtgcatgactgtggtaatacccagtgatttgcacaggaatgttcataatagcactacttataatagcaaaaaacaaagtggggacaatcaaaatgccaatcgagaatgaataaat

SEQ ID NO: 249898 - DNA, 99 bp, Homo sapiens; identical to SEQ ID NO: 207668
  chr1:247017214-247017313
  hypo

SEQ ID NO: 249899 - DNA, 93 bp, Homo sapiens; identical to SEQ ID NO: 207669
  chr1:247027354-247027447
  hypo

SEQ ID NO: 249900 - DNA, 155 bp, Homo sapiens
  chr1:247109075-247109230
  hypo
gcgacggaacctccgcagggtcttcaaagcagctcgatggtcgacgactggaccctgaaaaaaagaaagaaagaaaagcagcttaaggttccgagtagctccttgggatatgatttatgctgaggtgttaaaccggttctgattgaagacttggt

SEQ ID NO: 249901 - DNA, 180 bp, Homo sapiens
  chr1:247146067-247146247
  hypo
atctctatctatttatatccttttaaacatctctcaaataagtttgaaaattttctccgtacaactcttacatattttatgtcagctatagacttaagtattccatatatttgatgcaattatcaatggtgtcttttattttaaaaacaattttctggccgggcacggtggctcacgcct

SEQ ID NO: 249902 - DNA, 181 bp, Homo sapiens
  chr1:247253910-247254091
  hypo
ttccccgggactcacgtggtccttcctcacacgcggctctggtaggatgcattgctctgtacccagggacctctgaggtgacaatggccacggtcatgcagagtgcaagggcacaggctgggtgcctattgtggggaccgtgactgcagcactcccagactatcctcgggcatgttgcccc

SEQ ID NO: 249903 - DNA, 224 bp, Homo sapiens; identical to SEQ ID NO: 207671
  chr1:247348621-247348845
  hypo

SEQ ID NO: 249904 - DNA, 87 bp, Homo sapiens
  chr1:247399634-247399721
  hypo
aaaaagtgtgataaataaaacgggatatttatatacaaacaagaatagtgtggccgggcgcaatggctcacgcctgtaatcccagca

SEQ ID NO: 249905 - DNA, 180 bp, Homo sapiens
  chr1:247527170-247527350
  hypo
accacattttatccaatccactgttgatgggcacctaggttgattccagccaatttatttattccataagtgactcaaaccaataatcatttttttatggaaagttctggaggtagctttccaggtttagaagagcataggtgtttgtggtgtatttaaaatgaatgggccgggtgcggt

SEQ ID NO: 249906 - DNA, 253 bp, Homo sapiens
  chr1:247542060-247542313
  hypo
gagagtaaagagcacgctagcatcacgtgcggccaacctggccacgagctgctctccccgccctccccgcacacgtgtcccttcagggagggagaggaaggtcatgacctggctgcgctgctcgccccacacacgtgtcccttcacggagggaggaggaaggtcgtgcgatgcaggtgttgctccttgcgtcattccctgagctccctttgtgtgtcaagcaatctgggcactgggtacgcagagatgaatat

SEQ ID NO: 249907 - DNA, 833 bp, Homo sapiens
  chr1:247587055-247587888
  hypo
ttaccactcgcttccgatgacaggccccagctgagagcgcatctcaggtggatgtgtgtatactttccccctaacttcctgtctttgccgtagattaccgtaagaagtacagaaagtacgtgagaagcagattccagtgcattgaagacaggaatgcccgtctgggtgagagtgtgagcctcaacaaacgctacacacgactgcgtctcatcaaggagcaccggagccagcaggagagggagcaggagcttctggccatcggcaagaccaagacgtgtgagagccccgtgagtcccattaagatggagttgctgtttgaccccgatgatgagcattctgagcctgtgcacaccgtggtgttccagggggcggcagggattgggaaaacaatcctggccaggaagatgatgttggactgggcgtcggggacactctaccaagacaggtttgactatctgttctatatccactgtcgagaggtgagccttgtgacacagaggagcctgggggacctgatcatgagctgctgccccgacccaaacccacccatccacaagatcgtgagaaaaccctccagaatcctcttcctcatggacggcttcgatgagctgcaaggtgcctttgacgagcacataggaccgctctgcactgactggcagaaggccgagcggggagacattctcctgagcagcctcatcagaaagaagctgcttcccgaggcctctctgctcatcaccacgagacctgtggccctggagaaactgcagcacttgctggaccatcctcggcatgtggagatcctgggtttctccgaggccaaaaggaaagagtac

SEQ ID NO: 249908 - DNA, 193 bp, Homo sapiens
  chr1:247590066-247590259
  hypo
gtatccaaagcacaaggggacgaacctgttcaccagcggggcacgggtgggtgtccccgctcagccagcttccggaggatgggcagtgagagagtgagagaaggaaaggggcagccaggctgggggcttacggtgttgagagagagggcaggtgtgggaaagcagggtacggtttctacggcagcaaacagtt

SEQ ID NO: 249909 - DNA, 289 bp, Homo sapiens; identical to SEQ ID NO: 207674
  chr1:247614675-247614964
  hypo

SEQ ID NO: 249910 - DNA, 37 bp, Homo sapiens
  chr1:247808861-247808898
  hypo
ggacgggctgggcgcggtggctcacgcctgtaatccc

SEQ ID NO: 249911 - DNA, 32 bp, Homo sapiens; identical to SEQ ID NO: 207675
  chr1:248000443-248000475
  hypo

SEQ ID NO: 249912 - DNA, 180 bp, Homo sapiens
  chr1:248003051-248003231
  hypo
tggcttgcttggtcctttctatgtcattgtctttccgggaaattcagactgtggcacaggacgtggcatgcttcatgagattaaaaatatttgtagaattaatgaatcaaacaatgggcaggatttgtagagatcttctaaactggctgaataaaataaactataaaagtgatttaagag

SEQ ID NO: 249913 - DNA, 306 bp, Homo sapiens
  chr1:248027960-248028266
  hypo
tgctggaggccaagcactgacgatgtgatccacggtgtcacctcaggagaaagtggaaatgcagaggcagcgcttcagattggagtttgagaagcatcgtggctttctggcccaggaggagcaacggcagctgaggcggctggaggcggaggagcgagcgacgctgcagagactgcgggagagcaagagccggctggtccagcagagcaaggccctgaaggagctggcggatgagctgcaggagaggtgccagcgcccggccctgggtctgctggaggtgaggccgggtgccagaaaagcaggcag

SEQ ID NO: 249914 - DNA, 35 bp, Homo sapiens
  chr1:248036242-248036277
  hypo
aactctgggccgggcgcggtggctcacgcctgtaa

SEQ ID NO: 249915 - DNA, 61 bp, Homo sapiens
  chr1:248036964-248037025
  hypo
tgggtatcaataaaaattcactagaccgggcgtggcagctcacgcctgtaatcccaacatt

SEQ ID NO: 249916 - DNA, 87 bp, Homo sapiens
  chr1:248047446-248047533
  hypo
cttatatcacaagtcgtttaattataacaaagcactacatctaccaatgcaaaattattattattactattattattattattatgt

SEQ ID NO: 249917 - DNA, 87 bp, Homo sapiens
  chr1:248047953-248048040
  hypo
gcagcctcgacctcctgggcccattgacccccgtacctcagtctcttgagtagctgggaccacacctttgtgcgaccgtgccgggct

SEQ ID NO: 249918 - DNA, 225 bp, Homo sapiens
  chr1:248074827-248075052
  hypo
cttatattgttccttataaccgggggggacgggatgatattagtcccaatgtcgcagagggtgtacaccgcctctgtaatatccacgggggaaaaggatgatacaattcccactatcgaagggggtgtacccccctgttgtattgttcctgatatccagggcgtgaggaaatgatatcactcttaatatcgcagggtgtgtacaccctcacgttgataatgttcg

SEQ ID NO: 249919 - DNA, 769 bp, Homo sapiens
  chr1:248099360-248100129
  hypo
caggccagcaaagacggggtgcagaagagtctcagccagagtgatgtgctgggcagcgtccaattttaccaccctccgcatcaggtcaaacagctgcacgtgctccagagagtcttggagcatgtcactcttcagacgtttgcagttcttcacatatgggctgtcagagctgttctcatcccaaactaggccccatttgtagaaatatttctgcttcttggtacaggagatcacgcgtaatgggatgagccgtagggtcttcaacatcaccaggcgctcttggttttcacaggtctggaagagtgtgaaacctggtagtacttaaagagaaggtagcccatgccctggacatggcaggggcgtgtccagcccagatcaaggatcagttcaggcaggcgacagtgaccgtggtcaccatggcgatgtggtgcccacggtcagaggtggcattggggaagtcagccactcggacgctggtgctcctcactgacttctcatcgctcctgtgctcgctgtagacggtgtttaactcagaatccacatgcaggatgttctcggttttcaggtgtgcgtgggtcagccggttctcgtgcagaaatctaagggtgtggcagagctggtgggccatgtgccagacatgtgggaggggaatggctggatgttattctccttcgggaactcaagggttttcctgcccaggagctcaaaggtgatatgcatggaccgcggagggtgaaccagtcacaccccaagacgcacagcagctggt

SEQ ID NO: 249920 - DNA, 136 bp, Homo sapiens
  chr1:248328623-248328759
  hypo
caggcggctccagtcctcagggggctccagtcctcaggagggcgctccagcacccgtgactcgccaggctccgtctgagacccgtgctaggctcgctctgtccctgcgttccctcgcctctctctccagttgtttt

SEQ ID NO: 249921 - DNA, 400 bp, Homo sapiens
  chr1:248469372-248469772
  hypo
cgaggtggatctgtcggttggaaactagtttctaaaacgccttctgttccgcatgcgtttattctcttcttctgcacagaatttgctccgtggtgagcctggagatgtctctggatggggacagctccattcccagctacttctgcggggctggtggcgcagagatgggcgcaaaggctgaaagtcgcaagtcctgtgcttctggagttcaaatgcttcctttccagcgggtctccttgcgccatggggccgtgctggggtgaatctggggaaaacaacaggagagggaggccagggaacgcagggatggagggagcctaaccacggactcagacggagccaggcgggtcgcgggtgctggagccgcctgaggactggaaccccctgaggacaggagccg

SEQ ID NO: 249922 - DNA, 79 bp, Homo sapiens
  chr1:248470214-248470293
  hypo
gccgcctgaggactggagccgccgcgattgcatccactgcagggacagtggccagggccggccccgaggcctaatcagg

SEQ ID NO: 249923 - DNA, 222 bp, Homo sapiens
  chr1:248685314-248685536
  hypo
atgctgctgtctgccggccactgcgctacatagccattatgcaccccaggttctgtgcgtctctggccggtggagcatggctcagcggcctcatcacctccctaattcagtgctccctcactgtgcagctgcccctctgtggtcatcgcacactggatcatattttctgtgaggtgccagtgctcatcaaactggcctgtgtggatacgactttcaacgagg

SEQ ID NO: 249924 - DNA, 338 bp, Homo sapiens; identical to SEQ ID NO: 207678
  chr1:249106193-249106531
  hypo

SEQ ID NO: 249925 - DNA, 98 bp, Homo sapiens
  chr1:249113999-249114097
  hypo
ggctgcatgcggcccacaggccacgggttggaaaagcttgctctaaattttctcgaagagacttattcaacagaaacgtaacaggagctgcacatgga

SEQ ID NO: 249926 - DNA, 33 bp, Homo sapiens
  chr1:249121616-249121649
  hypo
gtgagccaccacgcccagcctagcttgctattc

SEQ ID NO: 249927 - DNA, 174 bp, Homo sapiens; identical to SEQ ID NO: 207679
  chr1:249141905-249142079
  hypo

SEQ ID NO: 249928 - DNA, 38 bp, Homo sapiens; identical to SEQ ID NO: 207681
  chr1:249172380-249172418
  hypo

SEQ ID NO: 249929 - DNA, 123 bp, Homo sapiens; identical to SEQ ID NO: 207682
  chr1:249212002-249212125
  hypo

SEQ ID NO: 249930 - DNA, 137 bp, Homo sapiens
  chr1:249212377-249212514
  hypo
catctcaagggaggcgaagcaggcggttggagactgagagccgcttcgatatgattgggcactggattatccatcaggacaagaggacccggtgtgccctctgccactcacagaccaacacccggtgtgagaagtgc

SEQ ID NO: 249931 - DNA, 192 bp, Homo sapiens; identical to SEQ ID NO: 207683
  chr1:249218264-249218456
  hypo

SEQ ID NO: 249932 - DNA, 79 bp, Homo sapiens
  chr2:67491-67570
  hypo
aactcccgctcacccgtgagtcacgcagagaacaccaatgaacggctgcaaaactcccgctcacccgtgcatgtcacac

SEQ ID NO: 249933 - DNA, 78 bp, Homo sapiens
  chr2:67750-67828
  hypo
tgtaaaactcccgctcacccgtgtgtcacgcagagaacaccaatgaacgtgctgcaaaactcccgctcacccctgtgt

SEQ ID NO: 249934 - DNA, 201 bp, Homo sapiens
  chr2:142612-142813
  hypo
agtgatactccgtctcaaaaccaaaaaaagaaagaccccgccaggtgttgctgataactcgcccaccatcacagtgaaggagaagctcggcttcacgagagcttcgcctgtgaccgcacctgtgactgaaatggccgtgactcctggtaaggactcgaggttgaatccccagacagtaacgtccaggtcaagggtttataa

SEQ ID NO: 249935 - DNA, 136 bp, Homo sapiens
  chr2:249730-249866
  hypo
ttccatctggaaggcgcgccactacaatcccgctgcctcctctggcagtcaccaggaacccggctttgatcacagacagaattgcaaggcctttagccttcgcaattacgtgagctgttaacgtggaaaacaatgg

SEQ ID NO: 249936 - DNA, 118 bp, Homo sapiens
  chr2:272130-272248
  hypo
tgagccacgttgcccggcaggtaccgtccttggacttgaagttgtgtgttttgtgtttcagtgggtcattgacagcggtgctgtttctgactggaacgtgggccggtccccagaccca

SEQ ID NO: 249937 - DNA, 345 bp, Homo sapiens
  chr2:314483-314828
  hypo
cacagactcaaaatttggagcggatgaggggcaggagcagctcactgattgggccccgactttcccaggtgtctacactgctagagctacgctcacagctgcggacgtgcacgcgctgccagcaactgcaccgagcactcagcgcacacctgctcccacgcgccacgcactcgtgcaggtgccgggagctccgtcgtcagcagccagaggaaagccctgttctcgtggaacctccatcctagcgaggacagaatgaggacgcacaaatcaaatcgagtccacagcgtgtcaggtgacaacatgctgaggagaaacgcagagccagacgaggggcaggcagaaggg

SEQ ID NO: 249938 - DNA, 367 bp, Homo sapiens
  chr2:314858-315225
  hypo
gccccgccgcagggctgtgaggccgccgtgggactggttccaccgacactggaggccaggcgtgggccctccgtaaagtcccccgtgtgggattacgggacaggcggcggaaccccagtttaaccctgggtgtgtttgggcacgcagccatgccgactagaaggacctgagatggattcggttcgcggggaacggaggtgccctagctcccgttcacgaccgcatcttaaaaagcaaagtgagccagtttttcgcaaagatgatttcactggatttccgcgtttagcgtcacgatatgggggcctccgagcgcctctctgggcttccacacaatgggccacatcacgtttctgaccagagaaacaca

SEQ ID NO: 249939 - DNA, 270 bp, Homo sapiens; identical to SEQ ID NO: 207688
  chr2:318853-319123
  hypo

SEQ ID NO: 249940 - DNA, 449 bp, Homo sapiens; identical to SEQ ID NO: 207689
  chr2:319183-319632
  hypo

SEQ ID NO: 249941 - DNA, 320 bp, Homo sapiens; identical to SEQ ID NO: 207690
  chr2:364117-364437
  hypo

SEQ ID NO: 249942 - DNA, 42 bp, Homo sapiens
  chr2:366701-366743
  hypo
agcacctgcacccttgtctgcgctgcttttcctttcaaaccc

SEQ ID NO: 249943 - DNA, 186 bp, Homo sapiens
  chr2:374752-374938
  hypo
ctaggaaatactcagggtctcgcttcctccttcaacatccatccgtgtcttccacaccccatcctgaaccaggcgcccgaattccgagttccgtgttccttctgtcacacgtggctaaagaccggctgctccctagaaaatcactgctttccaaagcgcactgccgagtcttacatgaagtatttt

SEQ ID NO: 249944 - DNA, 42 bp, Homo sapiens
  chr2:416712-416754
  hypo
catacaatttcagggtaaatcgccacttgatgtcattgctaa

SEQ ID NO: 249945 - DNA, 277 bp, Homo sapiens
  chr2:451671-451948
  hypo
aggagagagagggaactgcacgtctgaccaaaagaggaggccgcctggcaccccaggacacatcggcagcctccccagtggaaacgcccaagacaggcgaagaccagaggggacgcatggagacaagtcttcatgtttgccttaagaccgttgtggcgacaatggccttgctttagatgagaaataacagagtgccgtggagccgcggtccccggcctcgctggcaccagggatcggttcaacggaagacagtttttccacggatgggatgggggtg

SEQ ID NO: 249946 - DNA, 117 bp, Homo sapiens
  chr2:465771-465888
  hypo
aacaaagaaaatggcgcttgtgttatatatgacgaaaaattgtaaaacttgaggtcattctataaaaagccgtcctgactttagtacttttctacaaataaacgtgtttttacaacg

SEQ ID NO: 249947 - DNA, 354 bp, Homo sapiens
  chr2:495958-496312
  hypo
cccctggcgatgcccggccccagaggccactccacatggagtcctgggcctcctatccctggtcccttcccccatgtctcggctaccatgaccttgccaccctccccacccggttgaacgcctctcagcactgctttccttcctgcgccctcagcccctcgcacatccggatggctaatcctcctcctgaggaaattcactctctctattttgcgactgttcccagtcacctgagcatcctgagcatcgatggtgagaagctacaggaggccgagcggctgttgacgcccaggaccgtgggcagcaccttgcagggggaaaccggcttcctccggtctcccagaagaagagttc

SEQ ID NO: 249948 - DNA, 361 bp, Homo sapiens
  chr2:497070-497431
  hypo
gaccttgtgccttgagatcacgtcccagcctgtctgtcctcatagcccctccatcccgcagcctctcagaagccgccctccccactgtgccctttcttggtttatattcctgcttgtgcgtgcgtgtcgctaatgcacctacatttttgtatcggtcaaattctttgtgtctcttttggttggtgccagttcagtcaggggagacaggttcctccgtttggttcacgtcagtgtgtcaagttcttagaattagaagtgaactgtgtggatgagcgtggccttgccaagagtgagagcatggagagatgccgagggccggactcaggacacggggccagggagggggcgcaggactaaagga

SEQ ID NO: 249949 - DNA, 390 bp, Homo sapiens
  chr2:502872-503262
  hypo
aaaatggcaaaagtttggggcggtgggcaggaggcccttgccactgtggcgccaggagactgggtaaggcgcccaccacagggctggggatctcaggggcgtctgaagaggaagagctggctcggggcgctcggggtagcacagccacacatccaaccacggcgcgagaatcaaggtgccagaatcacaggacgcgggaatcacgggacgcaggaatcacgggacgcgggaatcacgggacgcgggaatcacgggacgcgggaatcacgggacgcgggaatcacgggacgcgggaatcacagggtgccggaatcaagggacgccagaatcacggggcgcgggaatcaagcttctccataaatgactgacgcaggggagacatgccagaat

SEQ ID NO: 249950 - DNA, 60 bp, Homo sapiens; identical to SEQ ID NO: 207691
  chr2:503731-503791
  hypo

SEQ ID NO: 249951 - DNA, 398 bp, Homo sapiens; identical to SEQ ID NO: 207692
  chr2:522158-522556
  hypo

SEQ ID NO: 249952 - DNA, 393 bp, Homo sapiens
  chr2:582776-583169
  hypo
gcccacagaacctcagccagcgtgtgaggaagaagctccaggcggcggcagccagcgtgtgaggaagaagctccacgcggcggccagtgtgtgaggaagaagctccacgcggcggcggccagtgtgtaagaaagaagctccacgcagcggccagcgtgtgaggaagaagctccacgcagcggccagcgtgtgaggaagaagctccaggcggcggcggccagcgtgtgaggaagaagctccacgcggcggccagtgtgtgagaaaagctccacgcagcggccagcgtgtgaggaagaagctccaggcggcggccgccagcgtgtgaggaagaagctccacgcggcgcttgctcagggaatcctgctccagggcgtgctcacttgctgttattgt

SEQ ID NO: 249953 - DNA, 91 bp, Homo sapiens
  chr2:620188-620279
  hypo
cccgcaggaggagacgctctgcggggagggcgatcgcccagaagtgcccaggagttggcttcggagtcggcacagtcgtctctcctccctg

SEQ ID NO: 249954 - DNA, 192 bp, Homo sapiens
  chr2:720804-720996
  hypo
ttgtggagacagaatttacacgcagtgagatgctcagtgcttctgtgcgtgactcagtgactttggcaacgcggccgccgacaaactcacattcccatcaagacacggagcatttctctcagctgagaaagtcccgcttgggacacttttattcctaatgaataagcgttcgtagttctagtgcccactgat

SEQ ID NO: 249955 - DNA, 103 bp, Homo sapiens
  chr2:796467-796570
  hypo
agctctgccggggccggctgctgtagtggggacttcagtctggtgaatcaatattacgttgcgtggaacgtgaacatggacgccactccgtccgggattcagc

SEQ ID NO: 249956 - DNA, 234 bp, Homo sapiens
  chr2:815047-815281
  hypo
cctcacaggcagtcccaagacggccactcctgtggtgccggctctgcatccatgtccacctgcaggctcagaggagccccgcaccctaatctgcagtggccgccaatcacccctcctgcttctctgccgttaacgtccaccctgggcttgccgggtccttacgtttctgttgttggtggccttgtcctcaccgggcatccccttcatctacacggaagcccctgagatgaggga

SEQ ID NO: 249957 - DNA, 164 bp, Homo sapiens
  chr2:816397-816561
  hypo
agccctcagtgccacatccacgtctctgcactcagccttcagtgccacgttcacgtccctgcactcagccctcagtgccacgttcacgtccctgcactcagccctcagtgccacatccacgtctctgcactcagccctcagtgccacgtccacgtctctgcact

SEQ ID NO: 249958 - DNA, 72 bp, Homo sapiens
  chr2:816591-816663
  hypo
actagccctcagtgccacgttcacgtctctgcactcagccctcagtgccacgttcacgtctctgcactcggc

SEQ ID NO: 249959 - DNA, 200 bp, Homo sapiens
  chr2:816916-817116
  hypo
ctccaaacacaaacagggaacgctgtgaggatgttgaaagggaaggggtggggtggagcacgtgtcttgagcctcccgctggtgcaccacagaggagagacaccgaaagacggtgaatcggatcgagtttgatgccgatggatgaaggtccctgtgcaggtgtcgcaagcccggcaaagacagaagacaaatgtcgagct

SEQ ID NO: 249960 - DNA, 183 bp, Homo sapiens; identical to SEQ ID NO: 207695
  chr2:817146-817329
  hypo

SEQ ID NO: 249961 - DNA, 202 bp, Homo sapiens; identical to SEQ ID NO: 207696
  chr2:817621-817823
  hypo

SEQ ID NO: 249962 - DNA, 199 bp, Homo sapiens
  chr2:858100-858299
  hypo
gcctcccctgatgccgatagcaggaccggcaccctcgttctctgcagtcacactccccatgtgaaagcgtctcctgtgttctttcttccaggatgccattttcaggccggctcctgcacaggcagtgcggtgtggtcactgtgctccactgatccactgaacggggttttataaaaagggcgtgcgactcaggtgggca

SEQ ID NO: 249963 - DNA, 193 bp, Homo sapiens
  chr2:875847-876040
  hypo
tgtctgtttgggagatgctgcgaggccggtttcccgtcgggctgcaaacggcagagcacgcggccctgtcccgggcaggctcggctccaggtggaacccgggacacgtgtacgtcctcagtggggcctccgcattccacactcgagcacatttgaaccccggacacctttacgccctcagtggagcctccatg

SEQ ID NO: 249964 - DNA, 258 bp, Homo sapiens; identical to SEQ ID NO: 207698
  chr2:910392-910650
  hypo

SEQ ID NO: 249965 - DNA, 42 bp, Homo sapiens
  chr2:911370-911412
  hypo
tgacagagactattgtgtttcgcttactgtgttaagttatac

SEQ ID NO: 249966 - DNA, 43 bp, Homo sapiens
  chr2:923173-923216
  hypo
gaccccgagatctgcgggcaacaagcacccccgtgattccaat

SEQ ID NO: 249967 - DNA, 153 bp, Homo sapiens; identical to SEQ ID NO: 207699
  chr2:923246-923399
  hypo

SEQ ID NO: 249968 - DNA, 45 bp, Homo sapiens
  chr2:982994-983039
  hypo
gagatggtccccatggatgtcggcgtcctgatcctgaactgtgaa

SEQ ID NO: 249969 - DNA, 35 bp, Homo sapiens
  chr2:1130681-1130716
  hypo
ggctgcaattcatcgtcatctcattaaaccccagg

SEQ ID NO: 249970 - DNA, 269 bp, Homo sapiens
  chr2:1204032-1204301
  hypo
gcgttcttgccggtcgctggggcggcagcacctggttcattcccagcgagcccggctctgagatcaagatggctcagagagctcaggctcctctttgagaacgtggaatgggaggtgggtggatcctgtggcccagaacctacctccgaccctttcgttgttggactcttgcggggctgctgcgtggtgctgtggtggttgcatggctccttcaccttcccagacgggcttcctgtcgagagccgcagacccgacgaggcctcaccact

SEQ ID NO: 249971 - DNA, 162 bp, Homo sapiens
  chr2:1282738-1282900
  hypo
acaccctgtcagcgcgcgaatcacccctctgtcagtgcgtgaataaccgctgtctgtgcgtgaatcaccccctgtcagtgcgcgattcacccctctgtcagtgcgcgaatgacccctctgtcagtgcgcgaatcacccctgtcagcgcgcgaatcacccgtc

SEQ ID NO: 249972 - DNA, 409 bp, Homo sapiens; identical to SEQ ID NO: 207700
  chr2:1311461-1311870
  hypo

SEQ ID NO: 249973 - DNA, 332 bp, Homo sapiens; identical to SEQ ID NO: 207701
  chr2:1482074-1482406
  hypo

SEQ ID NO: 249974 - DNA, 271 bp, Homo sapiens; identical to SEQ ID NO: 207702
  chr2:1488388-1488659
  hypo

SEQ ID NO: 249975 - DNA, 69 bp, Homo sapiens; identical to SEQ ID NO: 207703
  chr2:1501008-1501077
  hypo

SEQ ID NO: 249976 - DNA, 177 bp, Homo sapiens
  chr2:1506966-1507143
  hypo
gctgcctccagcctggccctcggcggaggctgcacccaggccagctctgttccctccagacagagcagctcctggaagagctcgtgttccccacactgacagcacctgctccatttagagaatgcgcactgggcatgtagagaagacctgtgacacgctacagcttcttttctaaaa

SEQ ID NO: 249977 - DNA, 257 bp, Homo sapiens
  chr2:1516283-1516540
  hypo
gcatggtgctgtccctgccccgctccgcccctgctgggctcctggctgccgaacctgaagtcagggtccgccgcagaacacgtcttcccgctgagccctgcagcccctcaagcagctggctgcctccgaggagcttcctctccgacagctgccgtgtacctccctgacctccctggctgtgactcaggccctccggaggcactgggccaggccgccggtggagcctgatggtggacgatggtggacagtgaccttct

SEQ ID NO: 249978 - DNA, 132 bp, Homo sapiens
  chr2:1520208-1520340
  hypo
ccaagggcaaaacctcacagcgttataccgcgtcccttacagcccaccttgcgaacctttcccgccccggtccgaggcctccagggctccctgggtcctgtggtccactccgagggcactgagagccctccc

SEQ ID NO: 249979 - DNA, 278 bp, Homo sapiens; identical to SEQ ID NO: 207704
  chr2:1543306-1543584
  hypo

SEQ ID NO: 249980 - DNA, 230 bp, Homo sapiens
  chr2:1589539-1589769
  hypo
ccccaaggagagaccgtgggggctgcctgagagcttcagcccagagcagtggcagacaggagaggacggccactcttgaggggcgtgggcggccatcggcaggctgagggggtgggcggctgcgggttgaggggttgggtgcctgtcttcaggctgctcctctacgcaggcccgagcctgtgatcaaggagtcacccagagcccagttatgtctacgggagctcttctca

SEQ ID NO: 249981 - DNA, 108 bp, Homo sapiens
  chr2:1606633-1606741
  hypo
cccaccaggccccaggctgccgcaggggcccaggttcaaggcccttccccgctcctcccccagggtctccagtgtgctggaatctccgtcttctcaccataacctcac

SEQ ID NO: 249982 - DNA, 296 bp, Homo sapiens; identical to SEQ ID NO: 207705
  chr2:1613967-1614263
  hypo

SEQ ID NO: 249983 - DNA, 279 bp, Homo sapiens; identical to SEQ ID NO: 207706
  chr2:1647057-1647336
  hypo

SEQ ID NO: 249984 - DNA, 232 bp, Homo sapiens
  chr2:1651997-1652229
  hypo
aacgtgtgtgccgccgatagattgcagtagaccctgtagtcgtggtagggtgggatcccgtggtcccggccccgctggatgttgatggccgccaggtccagagccaccgtgtgtgccatggagaacagccgctccgtgagctccgtgttcagcagctgcgagggcacacgcattttccccgccaccccgaacagccccctgagaagcggatcgatgccgccctcattcacaa

SEQ ID NO: 249985 - DNA, 96 bp, Homo sapiens
  chr2:1652504-1652600
  hypo
tagtagatggtgtcgccgtcccagtgcgggttcagcttgagcagctccgtggcaatgcggttgtgctcgcggaaccacagcgtgtgcatgctggtc

SEQ ID NO: 249986 - DNA, 451 bp, Homo sapiens
  chr2:1653097-1653548
  hypo
cagcatgtgggtgaactgctcgtcgggtgtgacggtctccgtcccgatcagggtggtggacaccaggcgcggcatgggaagggcgtgcccgttgtacagtcggtgggggttgatgccccgaggggtgttgaagccattctcgtacacggatttcagcaggcgctcgaaggcggtcagcgaggcgccccacatggggtgctgcaggttgttacaggtgccgtcgtgcgtccggtacttctggtggaagcacatgtccgagcagttgttcacgcgccggtgggcggtacagcccgacaggtttgcgatgaggttcaggtactgtggagacaccaggtcgttgtagtggtaacctgggacgtggagaaaagcaagacgcactcaattcccctggaggatgtgtgagggcccggtaccccttggcacctctgccgctgacatggggctatctacc

SEQ ID NO: 249987 - DNA, 121 bp, Homo sapiens
  chr2:1666260-1666381
  hypo
tccagcccccagtccctcaccgatggtggggcagtctcaggcatatgctgtgccgcagggcccacagaggataacaagctctggggagagcccgactctcggagaaggaaacagaggggag

SEQ ID NO: 249988 - DNA, 252 bp, Homo sapiens
  chr2:1669971-1670223
  hypo
ggatggatacccaccctggacgatgatgaaagcggtggcatggacgctgtcaatgttgttggtcgcagagcacgcatactctccgctgtccccctgtacgacgttctgtatgtaaagcccgccagaaggcgtgatgttcacccgcgggtcaactggcaagggtgtgcggtcacctctcgtccaggagatccgcggcggggggtggcctgtggcgctgcactccagcgtgacgctctccccaaccagcacctc

SEQ ID NO: 249989 - DNA, 288 bp, Homo sapiens
  chr2:1688942-1689230
  hypo
caggccacactgagtctctgcggacacctgcagccggagggcccccaaacgcagaccatccctgccccttgccccgggacaggtctgtgctcagcactccgcgcacgaatgggaaacgtgagggaaggaaaaactggagcaggaagacaaggaaaaccgccgtgggcgagcatgacgggcgggcacctgacgcgcgggtcccgaggaaggccgaacccgacagaatccctggagcctcgtctctgccaggcagtgtgctgacagggcgcctgtggttttctggggtcc

SEQ ID NO: 249990 - DNA, 252 bp, Homo sapiens; identical to SEQ ID NO: 207710
  chr2:1709544-1709796
  hypo

SEQ ID NO: 249991 - DNA, 320 bp, Homo sapiens; identical to SEQ ID NO: 207711
  chr2:1771820-1772140
  hypo

SEQ ID NO: 249992 - DNA, 44 bp, Homo sapiens
  chr2:1793414-1793458
  hypo
caaagaagctgcagacacaacgcggtggggaaatgcatatgctg

SEQ ID NO: 249993 - DNA, 98 bp, Homo sapiens
  chr2:1796265-1796363
  hypo
acaccaggaggacctaggagcgcgtggtcgttgccgggggccacagtctactgggtgcgaagaaggggcctctcgctgaaggagaaaggcttcgggcc

SEQ ID NO: 249994 - DNA, 161 bp, Homo sapiens
  chr2:1816188-1816349
  hypo
ataggtgcccagtgacgacttctgaaagcataaaatgtctgaatgcactttgtgatggctcagtgagtggaggcccagggtgagtgtgagtgcacccaggctctggaaggtgcagactgagccctcaaagaggcctgcggcaggattttgcaggacttcca

SEQ ID NO: 249995 - DNA, 84 bp, Homo sapiens
  chr2:1828326-1828410
  hypo
ggggccagcctgtgacaccccggccaggccatgcgagggtggcgccgggacgccgccctctgcggctcctttggggagcactga

SEQ ID NO: 249996 - DNA, 600 bp, Homo sapiens; identical to SEQ ID NO: 207712
  chr2:1846365-1846965
  hypo

SEQ ID NO: 249997 - DNA, 606 bp, Homo sapiens
  chr2:1863598-1864204
  hypo
agcgttggggacagcgcgccggatgagaggggctctgggaaaggggacccgggccgcgctggtgacaggtctgtctccactcctgggcttgttttctggggattctctcgctgcggtttggctgtttggggagcacccaggggctgccacggcagcgtcactgtccatgctgcatgcagtttgtctgtttcccgaccatgcagcctaggactcttcacttatccctctgtgttgatcatgctgccctcgttgccaacactgcgaaccgctgcagggccgaaaggcgccccaagtacatccagcaataggctcctgtccagtgcggcagaacgtacctagcacatcctgacgtcccattcacttaacgggatgtgtccatgggaactgctgccagagcacatgcacgtccagcagcagtggagcggctaagcaagaggctggggccgccggagccagtattggggttggactcggaggacccatgcaaaaaaaaaatacaaaaggtgactggtgcagctgacgcaaggcaacagaaacgccaccccagcctctcgccctcgcgtggaagagtgagtttcatccagggcctgacgcattcaaaccaca

SEQ ID NO: 249998 - DNA, 80 bp, Homo sapiens
  chr2:1880347-1880427
  hypo
tgactctcctggatgctgttcgcccacactgagtccccgcagctgaccctatgcgtgccgccattgaaacctcagcacct

SEQ ID NO: 249999 - DNA, 226 bp, Homo sapiens
  chr2:1887329-1887555
  hypo
tgcacaaatgtattctttttcgctttttggcctgtggtctcagtgaacgtcacagccaggcagggctcacggtgaccctgtgaggtcgactcctagaaagggcatacaaggtgacggtgaactccacctcaaagcatcgacgcgcaaaagtctgccaggcacagaggctttcggaactgggtgtccctcctccgtctgcctcctcgaagtgtcccttttaccctgg

SEQ ID NO: 250000 - DNA, 468 bp, Homo sapiens
  chr2:1895687-1896155
  hypo
taggagatcacggcgtttgccccatacagctgccccgaaagcgccgcgtgtctcggtggctgggtccgcggcccggcctcccccacccgccaggtggctccacctgcccaggcgcgcgtacccgcgtggcgcacaggtcctgcggcttggtgctcaggttctgcggcatctcgcggcagcgcgtggacaggttgaggatggcggtggccgccatgtgggccgcctccatgtcgtgcgtgtagtcgaagctgctcttgctgcacgtgctgctggcgctgctgcccccgccgcagctcaggttgctgctgctgctgggcgcgtagctgctggtgctgctgctgctggggctggggtccttgcagtaccgcttcgctggggagacagggacagggatgactcaggccccggccgcagggcacacggcagacagcacacggcagggcctgcccgccccggcctcagccacac

SEQ ID NO: 250001 - DNA, 132 bp, Homo sapiens
  chr2:1915731-1915863
  hypo
gagaaggcatggagagcagccggtgctccctcccacaccagtgacccacgcgtggcttaccttcggtgggagttcctgttgctgttgacatgcccgcgccccgtgcagcccggagtggggcacttgaggaca

SEQ ID NO: 250002 - DNA, 309 bp, Homo sapiens; identical to SEQ ID NO: 207713
  chr2:1926247-1926556
  hypo

SEQ ID NO: 250003 - DNA, 167 bp, Homo sapiens; identical to SEQ ID NO: 207714
  chr2:1932938-1933105
  hypo

SEQ ID NO: 250004 - DNA, 631 bp, Homo sapiens
  chr2:1940949-1941580
  hypo
agcagcccctgcttcctgttcgactcccctgacccccacatcgactctgcctcagggcggcctccatgccttgcccagagcagctgcagccatcatttcgcacatcaagaagttcctaacgtccgcggccatcagatcgcacatcaagaaggtcctaatgtctgcagccatcagatcgcacagcgagaaggccctaatgtccgcggccatcagatcgcacagcgagaaagccctaacgtctgcggccatcagatcgtacatcgagaaggccctaacgtccgcagccatcagatcgtacgtcgagaaggccctaacgtccgcggccatcagattgcacatcgagaaggccctaatgtccgcagccatcagatcgcacagtgagaaggccctaatgtccacagccatcagatcgcaagtcgagaaggccctaatgtccacagccatcagatcgcacactgagaaggccctaacatccgcggccatcagatcgcacatcgagaaggccctaatgtccacagccatcagatcacaagtcgagaaggccctaacgtccacagccatcagatggcaagtcgagaaggccctaatgtccgcggccatcagatcgcacgtggagaaggccctaaggtga

SEQ ID NO: 250005 - DNA, 64 bp, Homo sapiens
  chr2:1987513-1987577
  hypo
cagggctggaactgcgagcttcacttactgaacccgtgaatggctcagtcgcgttttctaagac

SEQ ID NO: 250006 - DNA, 44 bp, Homo sapiens
  chr2:2125518-2125562
  hypo
agtgctaggattacaggtgtgagccaccgcgttttttcaagctt

SEQ ID NO: 250007 - DNA, 135 bp, Homo sapiens
  chr2:2142636-2142771
  hypo
ataaggactgcctccgaaagcctggtgtggtttcccgcctgggccgcagtaaaggcacactgtgctagctgggcaggccacttgccatgccattctgtcttctaggaactgcactaccaacggcacatgcaaaac

SEQ ID NO: 250008 - DNA, 42 bp, Homo sapiens
  chr2:2166003-2166045
  hypo
gggaatgcagacagtgcctgcggtccacagagaaggtcaggt

SEQ ID NO: 250009 - DNA, 156 bp, Homo sapiens
  chr2:2176564-2176720
  hypo
tgcactgtggccagaagccccgtgctgggcaggggcacctgcactctgtcaccaggagccccgtgctgggcagaggtacctgcactgttgccgcgccgggtgggtgatctcaggacctgatattcttccgccgtcgaccagggtttgaagatgccc

SEQ ID NO: 250010 - DNA, 1156 bp, Homo sapiens
  chr2:2189143-2190299
  hypo
actcaccacaaattgtgtggcgtgcaaactaatatattcacctgattggcctccacacgtgagggggacgcagccgggcctcctcgagtcccgcgttccttctgtgagggggacgcagccaggccttccgggccttcccgagtcccgcgttccttctgtgaggcggacgcagccgggcctcctcgagtcccgcgttccttccgtgagggggacgcagccaggccttccgggccttcccgagtcccgcgttccttctgtgaggcggacgcagccgggcctcccagacgcccgcgttccttacgtgagggggacgcagccgggccttccgggccttcccgagtcccgcgttccttacgtgaggcggacgcagccgggcctcccagacgcccgcgttccttacgtgagggggacgcagccgggccttccgggccttccgggccttcccgagtcccgcgttccttctgtgagggggacgcagccgggcctcccagacgcccgcgttccttacgtgagggggacgcagccgggccttccgggccttcccaagtcccgcgttccttctgtgaggcggacgcagccgggcctcccagacgtccgcgttccttccttgagggggacgcagccaggccttccgggccttcccgagtcccgcgttccttccgtgaggcggacgcagccgggcctcccagacgcccgcgttccttccgtgagggggacgcagccaggccttccgggccttccggagtcccgcgttccttccgtgagggggacgcagccgggcctcccagacgcccgcgttccttacgtgagggggacgcagccaggccttccgggccttcccgagtcccgcgttccttacgtgagggggacgcagccaggccttccgggccttcccgagtcccgcgttcctttcgtgagggggacgtagccgggcctccccgagttccgcggtcattatgtgagggggacgcagccgggccttcccgagtcctgcggtccttactggttaactgtagtcccgcactgttaatgtttttcgttttttgaagccaagatagcgtgctcaccgcaaaagaaatatggacctcgatgaacagataatagggagaatctcatgcacccatcctggaattacgtttttagctttgcccccatc

SEQ ID NO: 250011 - DNA, 115 bp, Homo sapiens
  chr2:2193568-2193683
  hypo
ttctcaggaccgcacggggagaagcagggttctcaggacggcacggggagaagcagcgttctcaggaccgcacggggagaagctcgttctcaggaccgcacggggagaaggagcg

SEQ ID NO: 250012 - DNA, 64 bp, Homo sapiens
  chr2:2325021-2325085
  hypo
cagagaagcacagggtccaccggcagatgcggcactgatttccgaatgttcacaatctaccagg

SEQ ID NO: 250013 - DNA, 121 bp, Homo sapiens
  chr2:2569470-2569591
  hypo
tacctggagtcaccgtcttaccgggggacttgagaggtgggtggagctgaccactttccgggaggaaaggagtctgacagaaaggccgttcctcactggaggacagcgtttgctaaggtgg

SEQ ID NO: 250014 - DNA, 174 bp, Homo sapiens
  chr2:2572706-2572880
  hypo
caccagggcaaggtccacatcgcacctacagaatgagcatctaagcggagtatttcaggtaactctaggccaagacgggggagattgaagaacctttccagactggtggctgacctcctactagatacagcataatgctggctggggctggacggaagagggctgcattttcct

SEQ ID NO: 250015 - DNA, 480 bp, Homo sapiens
  chr2:2575357-2575837
  hypo
agtccggcagatggcggggccagcacctgagatatcccgttcccctgctatgctggagagggccatggtatgaagtggggggcttcacactgcccccggccctgatctgggaggcccttccaggcgaaggcggctcccggcttccccttcctgctgcccctcttcctccccatgcccgcctctccccccacgcctgcctcctccctcccgctcctcgctgcctcctcgcctccaggccacagtttctgtagctgggtcttcagacttcagaagtgtccttttattgtaaagacttcagtggtttcctagaaagcgccggattttcgagctttcttcctggcggggttgctttgtcctgcgcgacagcaggagttgtgggcggccgctgcaaggcccgcgctggccccgtctcccttcgcaggtgtcgaaccaggagtcacctccgcatctgcgcagcagcgggcccggcggaggggctct

SEQ ID NO: 250016 - DNA, 260 bp, Homo sapiens
  chr2:2584324-2584584
  hypo
ctgtgcatgtctgtcgaggatgtatgtatgggtgcgcactatgcatgtctgtcaagggtgtatgtccggggggtgtaccgtgcatgtctctggagggcgtatgtgtgggggatgcactgtgcatgtctgtcgagggtgtatttccggggggtgcactgtgcatgtctgtcgagggtgtatgtgcggggggtgcactgtgcatgtctgtcgagggcatatgtctgggggatgcactgtgcatgtctgtcgaggatgtatgt

SEQ ID NO: 250017 - DNA, 740 bp, Homo sapiens
  chr2:2584644-2585384
  hypo
ctctcgagggtgtatttccggggggtgcactgtgcatgtctgtcgagggtgtatgtccaggggtgcactgtgcatgtcatgtctgtcgaggttgtatgtctgggggtgcacggtgcgtgtctctcgagggtgttatgtccaggggtgcactgtgcatgtctgtagagggcggatgtccggggggtgcattgtgcatgtctgtcgagggcgtatgtccagggatgcactgtgcatgtctgtcgaggatgtatgtccaggaggtgcactgtgcatgtctgtcgagggcgtatgtccgggggtgcactgtgcatgtctctcgagggtgtatttccggggggtgcactgtgcatgtctgtcgagggtgtatgaccgggggtgcactgtgcatgtcatgtctgtcgaggttgtatgtctgggggtgcactgtgcatgtctttcgagggtgtatgtccgggggtgtactgtgcatgtcatgtctgtcgaggttgtatgtctgggggtgcactgtgcatgtctgtcgagggcgtatgtccagggggtacactgtgggtgtctgtggagggtgtatgtccgggaggtgcactatgggtgtctgtcgagggcgtatgtccaagtgtgcactgtgcatgtctgtcgaatgaacagatcaacagtacaaagcaggacgctgacgcaggcgcacagacacgctcggcttccatagatactctctacggagcagcctgcgctgcctcggggct

SEQ ID NO: 250018 - DNA, 346 bp, Homo sapiens
  chr2:2639594-2639940
  hypo
tcatatccagggggcgacttctgagcctgtctccccgcgtgcgcagctttccgtaaggagatcacttcatctgggagtcagccctggccctaggagacctcgtccttatttcacagacaaagaaactgggtctcagcacaaataagaaacatgctggaggctagcagccctgccggtgctgggggctggcgctggagctcaggctacgtgccctgtcaacggctgtatttaggcctctgatgtgtaggcagagggggcatcgctgcccttggatcctgcatgtcagagcttgagcgtgggcccacctcttccacgtggagagtgagagatgcggaagctgaccaca

SEQ ID NO: 250019 - DNA, 102 bp, Homo sapiens
  chr2:2667399-2667501
  hypo
tgggggttgtacatcgccactgacaggtagatcgacgaaagtcccgctgtcctcatgatctcggccaccgtacctggccacatccaccgtgcaccctctccc

SEQ ID NO: 250020 - DNA, 204 bp, Homo sapiens
  chr2:2668976-2669180
  hypo
gcctgcccatgcccacccaccggggagctccttggctcaggctcacaggttccaaggcctccgagttactcgggctgtgcacaggccgccagctcactcacacagacagaggccctcgctgactcacacagtggccgccagctcacacacagacagaagccctcgctcactcacacagaggccgccagctcacttacacagaca

SEQ ID NO: 250021 - DNA, 49 bp, Homo sapiens
  chr2:2672247-2672296
  hypo
agtgggccacacctgtcattcgcttagcggaatcttgatttgttcaaaa

SEQ ID NO: 250022 - DNA, 317 bp, Homo sapiens
  chr2:2673023-2673340
  hypo
gctcaggccccttcatgcagcgaggagtcagggcccccgaatctctgggaggacgcatcctaggggatttcctccacggtgttggaattgaaggacttaatgacgtcccttcccatgcgcacagtgtcccaggcacgtgcctcagcctcacatgccggggcacagggctgccctgcgaggtgggaggaagacctaggtgaggacccggagccaagggctttcctgaccgtgaaattgcaggtgaggacctggagccgagggccggttctagctgctccaagcgcccgagggccaacgttggcagtggcctccaatgc

SEQ ID NO: 250023 - DNA, 50 bp, Homo sapiens
  chr2:2693176-2693226
  hypo
tgacagcctggatgttgtggcgctgaaccgtgtgggtagtcaggtgctcc

SEQ ID NO: 250024 - DNA, 217 bp, Homo sapiens
  chr2:2696881-2697098
  hypo
cacctagttagttcccaactcggtctatcctgggagaccccgagcaacagtctctcttcaccgtggctcctgccggctccctgactagcaacagtctctcttcaccgtggctcctgctggccccctgactactggtcctcataggcgctttccagacacccacaccttctcgacaagccagtgcaatcagctgcccgaaggaagacacagagcttcc

SEQ ID NO: 250025 - DNA, 151 bp, Homo sapiens
  chr2:2705291-2705442
  hypo
tagggacagccccctcccaccgtgcacttggaaattttgcctccccacacccgtacgcgcaaacccacatgcaaggtggagagactccgtcgcatgtcccgagtctgaggacatgaccggagcggagtccgggaagtccctcaggggcaag

SEQ ID NO: 250026 - DNA, 55 bp, Homo sapiens
  chr2:2724721-2724776
  hypo
cccagccacaccaccggcacctgtgtctccacaccctggtcgtgctgccggcacc

SEQ ID NO: 250027 - DNA, 68 bp, Homo sapiens
  chr2:2724806-2724874
  hypo
cacctgcacctccacaccccagccacaccgctggcacctatgtctccacaccccggccatgccgccaa

SEQ ID NO: 250028 - DNA, 415 bp, Homo sapiens
  chr2:2725126-2725541
  hypo
caccccagccacaccgcccgtacctatgtctccacaccccagccatgccatcagcacctgcacctccacaccccggccacaccaccagcatctgcacctccacaccccagccacagcactggcacctatgtctccacaccccggccatgccacccgcacctgggtctccacaccctggccatgctgccggcacctgcacctccacaccccggccacgccaccagcacctgcacctccactccccagccacacctccagcacctatgtctccacaccccagccatgccatcggcacctgcacctccacaccccggccacaccaccagcacctgcacctccacaccccagccacaccgccggcacctatgtctccacaccccggctatgccgcccgcacctgcgtctccacaccctg

SEQ ID NO: 250029 - DNA, 423 bp, Homo sapiens
  chr2:2734118-2734541
  hypo
acactgtgtgttcccctgggcggggtggacccacgggctctgcccaccagcctcttcgaattctcagacgtctcaagaaaacggccatcaggccccgctgtcctcctccacatcctcccttcgctgcacgcctccctccatggtgggagttgccccctccacagggacgtgtcaagccttgatatacccactgcgtaccccagggccacgctcaggagctgccgctggatgaataagaggatttgaacgggaaaagactcccacagtgccccagaggccaggcctctcctctcctacaccagcccgctgtgacctgggcctcaggatggtgaccccagagctgggcaaatggtgccacagccccagccttgcccggctttaacttcctgagggtaaaattccgcaaacatctctgaagaaaga

SEQ ID NO: 250030 - DNA, 150 bp, Homo sapiens
  chr2:2734984-2735134
  hypo
gcagctgccagaatcatgggcggccagtgatgcccaagtctgggctcccctccgacaggagccacctcacggcacagcctctgcacaccccgcaccgtccggcggccttcccttcaccccacactggccgtggcacacctgagaccaggc

SEQ ID NO: 250031 - DNA, 326 bp, Homo sapiens
  chr2:2735622-2735948
  hypo
aatatgagcagaggcggctccaggctgtcagagagaattacgccatggagagattccgacgcctgtctgagactctctctcatggactctcacttccacatggtcctcacacgcatgtggcctggtcccctgggaggccatgcaagatgatactcagtaagacacacagcaatgtgaaggtgaccggccgaccccagcaagacgcagatactcagtaagacacacagcaacgtgaaggtgaccggccgaccccagcaagacgcagatactcagtaagacacacagcaatgtgaaggtgaccggccgaccccagcaagatgcagata

SEQ ID NO: 250032 - DNA, 290 bp, Homo sapiens; identical to SEQ ID NO: 207721
  chr2:2737134-2737424
  hypo

SEQ ID NO: 250033 - DNA, 358 bp, Homo sapiens
  chr2:2755043-2755401
  hypo
ccaggggtggccccggggacacccacctgactccgcaccccccacgagaggggaggatccttgcagacctcacctttgctggcaacgctgcggcccgcaggctcttccccatctgagcgtcctggccccctgttatttttgccacagtgccgcctcatcctccctctcgcatggtctggctcctgagttccctcttccctccagacccctctcactcagccctgggaccccctccaccccacctcggtttcctgcctctcctgtcttgccacccgctttccctcgaaactctgtggctttcagcaaatgctcctctgtccagcccgagcttccctgcagcagcgcgtcctgctgtcca

SEQ ID NO: 250034 - DNA, 251 bp, Homo sapiens
  chr2:2769793-2770044
  hypo
agctggccccgaagcgccacggagtccctcagtcaattcctggcatgtgagcaggaaaagggagcacagaggaggagatgcgggggagccattgcaagggcagcctctaaagcctttctcggttggagtccctgatgtcacgatgagtcgctggtgccattggataacaagagttccacgctcaaggaccgcccctccaggcctggtggaatcagcagtcacggctgactgccctgcgcagtgaagggtgg

SEQ ID NO: 250035 - DNA, 168 bp, Homo sapiens
  chr2:2795035-2795203
  hypo
tgtgagcgtcaccacgatggagcagggcacagggagatctcatgtttgggataaggcagtgaatccggaggaggcctgcagagcagacataaggcatcgcatcgaggggcaggcatgctgtggctcactgacttgcagtaatgcccctggctgcggaacctcccagaa

SEQ ID NO: 250036 - DNA, 454 bp, Homo sapiens
  chr2:2797203-2797657
  hypo
tgctgtgcttagaacggcaccacctcctgcctgcaaaaccatgacagccctcggacagctcccagctccagcatctcctccctcagtcccgctgtgtcactgccactcatccagagtgcaaatctgatcaccgctcgctttaaacactcttcagtaacttcccattttctttcataaatacggcagattcccagccaggctcaccgtggaagccccctggctttgcgcctctccccggcttgaaggcctcggttcttgtcactaggaccaactcctggccgctcactgaagcacacctcatacacagccatccccgtgatcggcagattttgttcctacgaatctacctacttgctaaaatccacttgtagcctccacatgaggtgcacttgcagccatctgtggacgcgaacagagcaggattaatacttgagtcgcccgaggcacagtttct

SEQ ID NO: 250037 - DNA, 160 bp, Homo sapiens
  chr2:2799592-2799752
  hypo
atttaaaactgatcagtgtacgcgcgagagtagccaaagactcagcgcattaaggaggacgctggcgtggggtcagcagggagtgcgcgtgggcagcctcccaccaggcgggtctggcagtgccctggcctcaggcagcgactgcaccctccctccctct

SEQ ID NO: 250038 - DNA, 159 bp, Homo sapiens
  chr2:2800085-2800244
  hypo
aagggacctgagtggtttcccgacttgagaaccgtctgcatcagcctggcttcctgcacagtgtctgcgccggtgcacaccttagaggggagctgcgccatcagatgaaccaggaccctggcggaggaagggggtgccggcagggctcccatggcacct

SEQ ID NO: 250039 - DNA, 147 bp, Homo sapiens; identical to SEQ ID NO: 207722
  chr2:2849145-2849292
  hypo

SEQ ID NO: 250040 - DNA, 420 bp, Homo sapiens
  chr2:2854224-2854644
  hypo
cccttcctgctcccagtcaccggggaagccttcctcagggtttctgcagaagccctgcccactgccccctgcagagagccatcctgccacagagatgcgccccagatgcgtcctggatggatcaagtcactgcgtgtcagggaacggctcctctgctgctcctgatgcctggccacccgtcccggtccacccctcgcgaggaaggccaggcctccgctcctctgcggagcctttcaggaacatgaggccgcctgtgtcagccatcagggtacccaccggcgctgctcatccacctgccacccccacctgccacttactcctagcacaagcaggtgccccatgaatcccgcggaatgagttatttcaggatccgcggaacacacgtaaccagacccccccgtttgttgttttgggggacat

SEQ ID NO: 250041 - DNA, 214 bp, Homo sapiens
  chr2:2876123-2876337
  hypo
tccccagacagcagccagcacgttcctgatatggcagacaatgctgtgtgcaacacatcgtctcctcatctggacacgcgacaatggtgctcccagccgccctcacagtgagcctgggcacgtgacgttctcgccaacggacctcgcacagaagcgatgtgccacttctagtccaaggcagagagtgctccccgacccatctctcttctctggc

SEQ ID NO: 250042 - DNA, 219 bp, Homo sapiens; identical to SEQ ID NO: 207725
  chr2:2879707-2879926
  hypo

SEQ ID NO: 250043 - DNA, 433 bp, Homo sapiens
  chr2:2893356-2893789
  hypo
ccccctgaagccatgatgtgcgcactgtgcagagaagcgagggactggagctcagaaaggaggcgctttggacaaaacccctgaaaacgtggctcggagcaggcagaagcccccgtggagctgccaggaccctgcagagccggccactggaacagttctccccccgacgccgattgccatcaaggttggtggataatgcttatcagaaagaatgttccccaatctgatcataatggatgcagtgtgctgtgtcgaatcacgtcctctttcctgattgcggataagaagaacgtgactcaatcagagcatctgagcagctcagagctaagcagcctcagcaagcacagcatccctggcccggcctcctgcacagcccggcagaaacgccaccaccagtctagaggccggtcccggctctcacccacagcagaaa

SEQ ID NO: 250044 - DNA, 86 bp, Homo sapiens
  chr2:2897936-2898022
  hypo
atgtcctcatgtggcaggagcgaaagaagagcaaaaagaagctaggccgaggtgggcaggtcgcctgaggtcgggagttcaagacc

SEQ ID NO: 250045 - DNA, 85 bp, Homo sapiens
  chr2:2936579-2936664
  hypo
cctcatcaaagtactaaaggcgaggcggaaccacagcttcaccctgagcttcacatgtccacatatgccaggagcttgtgtgtgt

SEQ ID NO: 250046 - DNA, 146 bp, Homo sapiens
  chr2:2939612-2939758
  hypo
ggccccgtcccatccgacctcactaaacatctgcaccagtttagctgctcccaaactccgggcaagggagaggcagggcttccgggaggcctgggctagcgtgaggaggcgaaggctctgctcctccctgacgggcaccgtccgca

SEQ ID NO: 250047 - DNA, 122 bp, Homo sapiens
  chr2:2940296-2940418
  hypo
actcaaggtgacgacgggttcagggggtgcacactcaaggtgatgacgggttcaggggtacacgctcaaggtgacgggttcagggggtgcacactcaaggtgacgacggattcaggggtaca

SEQ ID NO: 250048 - DNA, 142 bp, Homo sapiens
  chr2:2945842-2945984
  hypo
caggtgcaaggatttctcttcgttaagtgtacacgagcccatcccaagtttccgcacatacccaggtgttggtgaagccccacttcattaattcaggctagcgcccaccaacggctgcagcgtcaagcctctgagacatcag

SEQ ID NO: 250049 - DNA, 150 bp, Homo sapiens
  chr2:3039119-3039269
  hypo
tgaccttatcacttccctaccgaaagtctttcactgggcccctgttgcccagcgcaggggtccgagagccctggctgtaagggccagagaggatgtatttcggctttgccaccctgcagtctccgtcgcggtgactcagctctgccatgg

SEQ ID NO: 250050 - DNA, 212 bp, Homo sapiens
  chr2:3041592-3041804
  hypo
ctctcggggtgaggcggcctcagaggaagggagtcggtgcccgagaaaggctgaaatcagaagtgatgtcaagagcctgtgagctgggcgcagcggtatcttcacgccacacctcctggaaagctccgtgtcgaaacatgctgacttctccctcttccgcattccactgccctgtttccatgtgcgtttccgtgacctcacccagtgtgcta

SEQ ID NO: 250051 - DNA, 340 bp, Homo sapiens
  chr2:3063352-3063692
  hypo
ctctcccagaaacaaacagacgagaccaccaccgcctggaacgctgttaatcgtgccggtcaggatctcagcggaaaacgcatggcacctgccaccgtgcatcagaggcactgttcacaacggcgtggacagagtgcaaggaacaaagcaggatgatgaggccccgggggccggcagcagcggtccaggcttacagggcaaggggagaggccgtgaccggggagaaggccttggccctcccgctccgtggggcagcccggctggaaggagctgggagcatacatgcccaccccatctccgccttctcggcaccctccgcggaggccaaggggccagacag

SEQ ID NO: 250052 - DNA, 79 bp, Homo sapiens
  chr2:3066927-3067006
  hypo
tggaaaggacttgccacatgcgagacgttggaatcctgcatcctccccaggcgtaagcgtcactaaccctccttttttt

SEQ ID NO: 250053 - DNA, 167 bp, Homo sapiens
  chr2:3113370-3113537
  hypo
acatgaaccctgagtatatccgagagctgatgggagggcgctgtggaccccgggctgactgcacaggacacacgagcagtcccggcaccgcactttcagaacaggcaccccgcaccaaaaccaggagaagcaacaaggccagaaacgcatactgtagggtcaggaga

SEQ ID NO: 250054 - DNA, 65 bp, Homo sapiens
  chr2:3118887-3118952
  hypo
ttgctgaactttcctgctgccgcttttggggtgactccagcggcgggagagccagcaaaggagac

SEQ ID NO: 250055 - DNA, 101 bp, Homo sapiens; identical to SEQ ID NO: 207726
  chr2:3173339-3173440
  hypo

SEQ ID NO: 250056 - DNA, 249 bp, Homo sapiens
  chr2:3176033-3176282
  hypo
tgtgttatgacacacgatataaaaggctcctggtggctgttctgcaagagttaccggcaggagagaccagcagcaagttctgggtaattacagccgtcatcaggtgagcctggacgttacccggaatcagccctcacacctgcaaggggctccgcgctttctgaagggcttctgcgccgtgcgctgtagtaatggtaatggaagtaggagtaagagtgataataacactatcgtcgtggtaataacttt

SEQ ID NO: 250057 - DNA, 72 bp, Homo sapiens; identical to SEQ ID NO: 207728
  chr2:3201717-3201789
  hypo

SEQ ID NO: 250058 - DNA, 286 bp, Homo sapiens
  chr2:3214976-3215262
  hypo
tgaacaggagggtcgctgctggaaccagcagtcaggttccacgcatgaagttctccactttaacactaacgaaacaagcctctttcctctgtaccacgtctcttccagtttggagaacaagaaagatgaaaacagaacaggctttccaaggtgcgccggcaaggagccatagaacccaccgaccgcccacaaagttcccagcccctccccacgagctctgagattaagctcggcttctgcccactgctctcttggtccccaaaacacaaacgctatttgcattaca

SEQ ID NO: 250059 - DNA, 54 bp, Homo sapiens
  chr2:3215523-3215577
  hypo
gagcgaatcctcacgcaagcttccttctcgctccgccactgtcggctccttgac

SEQ ID NO: 250060 - DNA, 433 bp, Homo sapiens; identical to SEQ ID NO: 207730
  chr2:3260562-3260995
  hypo

SEQ ID NO: 250061 - DNA, 85 bp, Homo sapiens
  chr2:3266889-3266974
  hypo
caggcgctgtcagacggctacgctcaggagacggctgggagagcatggagggaaagctgattgtgaagaacggtgatcatgaggc

SEQ ID NO: 250062 - DNA, 189 bp, Homo sapiens; identical to SEQ ID NO: 207731
  chr2:3280943-3281132
  hypo

SEQ ID NO: 250063 - DNA, 91 bp, Homo sapiens
  chr2:3281349-3281440
  hypo
tgggaactactccccggggtgttcatctggttccttttctcattaattaagtgacccacctgactaggctgagtaacgcccacctgctact

SEQ ID NO: 250064 - DNA, 750 bp, Homo sapiens
  chr2:3285953-3286703
  hypo
gctgggttggtgtcggcaaccatcaccagccccgggccaccgtcaggtgggggcactgcccctctgtgcagcttgcacagaggcctgaagatggacagctctgcggacatggctagcagctgccctggactgaacatgcttttaccctcagaccaagtggtgaaatctgtctttccagccttttgtgtggaaaaaacaaaaaacacagccccacagacttcaatgagcccggcacttcctttcttgtgttccctcgtcactccctcccacctggtgcataaacatacccagattgcggtctctgtctcgttagtcatcccgttcattccctcatgtttaaccttgaaacccgactgccaatgcactgacatcggtgcctacagacggccgcacgggctgctgcgccggctcctggcagggtgtgtgctttgatgggctctgggggcagagccagctggcggcggcaactccgttgcccagggaacagccattgaagtgtgcgctcccgagtctgcaccaggccggcgcctgtcgcggtgctggctgaacctcggcgctgcaggggctgtgcccggcgggtgcccattagtgctctccgtgctccaggaacaaggagcaggtccagaggccccgctcttcccactgacaaacgggcttggtttgctgccttattaatgactacgccactctcaccacccaaacaaaatgcacagagtaggaggaaagaattagcttcgaggaggtgctctt

SEQ ID NO: 250065 - DNA, 56 bp, Homo sapiens
  chr2:3289697-3289753
  hypo
tcgccgggaccctcgcacggagcagaagtcaccgatgtctccgggaccctcacttt

SEQ ID NO: 250066 - DNA, 558 bp, Homo sapiens
  chr2:3290045-3290603
  hypo
acaactgccgtcaccgtgcctgcctgtgtatgacgtgtacacacactgctcctgtgtaaacgtgtggccgtgacatggcctccgttcagctccaggtgtcaagtgccagattccaggaagccccaggagtgggcccagaaggagcagtgccaaggacccccgggggtggggccatcctaccaggcatgtcctgggcacatgggaagaccgagaggtgagggacacttggtgtccgtgacagggaaaggctgaggcatcaggcttcgggctgtgtctaccttggtgactctggaagcgttttcataagcacttgtcatatgtcatatgcagtgtgctccaggggagcaggggatctcacagtccagagtgccccgcagagcacccgagacagcggctggcagagcacaggcagcaatgccccagaggaacaagccagcccctgcgtccccacgtgctgagtccatcctcccagcagctccaagaggcggagctatcaatttcacatacagacaaggaaaccaaggcttggagagttgaagccaccgtccaagaacacac

SEQ ID NO: 250067 - DNA, 77 bp, Homo sapiens
  chr2:3290886-3290963
  hypo
tgcagcaccaagctcgttcaccacgctctagaaaactcattcaacatgttccacaaagctcgtccaccacactccag

SEQ ID NO: 250068 - DNA, 300 bp, Homo sapiens
  chr2:3291143-3291443
  hypo
ccagaaagcttgttcaccacaatccagaaagcgtgttcaccacgctccggaaagctcgttcacaatccagaaagcgcgttcaccacactccagaaagctcgttcaccacactccagaaagttcgttcaccacactccagaaagtttgttcaccacgctccagaaagctcgttcaccacaatctagaaagcgcgttcaccacgctccagaaagcacgttcaccatgctccagaaagttcattcaggctccagaaagttcgttcaccacgctccggaaagctcgttcaccacaatccggaaa

SEQ ID NO: 250069 - DNA, 1052 bp, Homo sapiens
  chr2:3292428-3293480
  hypo
tggactttgccaaacgtgaagatcccgagacaagcccaaccttccatcaagaccaggaaacactgctcagcaggcacggtcagacatggcagcatcagatggcgcatggcctgggacagaggacagacgcgcagcacgcagcagccatgatacagtgggagtggggatgaaaccagattctggtgcaccagccattcctgcatgggatgggtaggagggccaggtgatggcctcggcaacgcccacaggccccagcagccctggccccctgggcagccacaggcccccagcggagccccaccccgcacacagcctccaagtgcctgcacggccgtatctcccgcaattaaaatgcaggctttcaaatccatgacgctcacgcactgctcagctttctggagttttaattgcccatttgctttcttcctaggcaacagaactgctctattaatatctccccaccggtttcaggggagaggggagacaagcgaggatttgtttctgtattaattggcaaacctctttgccgcctgcttcctggacctctcagggctcgctcttcctgtctctttcttctcaatcatttcgctgtctctctcttctctctgggtgatcctccaaattatagttttaaaacaaagaacgccgagctcagggttttctctctgtccagacagaggatggggcgtgtgacccagggacccagagtatgttgttggatctcaaatgcctacaaaaatgacagaaggaacagtctcgtcctctgtgggagaagggcaatggcagacccaaaaccgaactgagggaccacgggatcctgggagccatgccctgctccccactctgcaccagcctcctggccttccgcttctgtgctggttccctcggtctccctcccagcttgtaaacgaggcatgcccagagccatccgtgatcctgtctccctatgtgcaccatgtctaaaatgagccccagggctttgaatcccgtagggtgtgtcaacagcacccaattcacatttcccatgctcatctccccgacgcaggctccca

SEQ ID NO: 250070 - DNA, 103 bp, Homo sapiens
  chr2:3294541-3294644
  hypo
atgaaatggaccgtcggtcatctgggtctttcgcgaatcaaccagcactaattgccatcagattgcatgtgtcagcacacacagacagcgcttccatcacggc

SEQ ID NO: 250071 - DNA, 191 bp, Homo sapiens; identical to SEQ ID NO: 207736
  chr2:3303473-3303664
  hypo

SEQ ID NO: 250072 - DNA, 309 bp, Homo sapiens
  chr2:3313498-3313807
  hypo
ttgagaccccaaaacgacagatgcttcccgatgggagtgaaggttgaagagaccggtccacacctccttctgttctaacaccccccttactacctgttcaaaggaggtaatcatgtgggagagaggcagcagagctgggggttaggaaagagacggtggtgtgggtaggattctccctgcaggctctggcagcgcccctgtgtacgcacaggtgtgcaggctctggcagtgcccgtgtacgcacagggcagggacgctccctgcgctgctccaaactggaatattcgcgtctccccactgcagacacca

SEQ ID NO: 250073 - DNA, 187 bp, Homo sapiens; identical to SEQ ID NO: 207738
  chr2:3321054-3321241
  hypo

SEQ ID NO: 250074 - DNA, 167 bp, Homo sapiens
  chr2:3321984-3322151
  hypo
gagaagctggccccggttctttacagtcttactggaaaaattaattcaaattgggctttgtctaagcaccccctcgtgggctgaaacctggaggaagggccataaacaaagcacccggcaaatgatagagcaggacgccgtgaggagccgtcgtgggctgctccagg

SEQ ID NO: 250075 - DNA, 91 bp, Homo sapiens
  chr2:3325164-3325255
  hypo
tgcccccgccgccccgtctttaagcaggcacttgacgatgaggctgatggattccaacttttctccccacctctcacgtactccattcttt

SEQ ID NO: 250076 - DNA, 337 bp, Homo sapiens
  chr2:3346921-3347258
  hypo
catgcgagctctgccgccccgccacctgccctgtggatgcactctgcagggcggcagcaagccagagtgagaggcagctcccagctggagggaagaaccagtacctcaactctctgttctcagggcaccaccctacacccagctcacctgaaagtataaacaactgttttgttgaataaacatacgcaggtacaggccggctccgaaaacaagcaatgcgagaaagaaacaccgtaactaaggtgagtgcaaaagattaccagggcccaaaagaaagacccattaacaccagctaggcaggtctgcaaaggcggtcgccctgtgagcagtacttaaa

SEQ ID NO: 250077 - DNA, 37 bp, Homo sapiens
  chr2:3347546-3347583
  hypo
cagagctgtggggccgggccaccgagtacagagctgc

SEQ ID NO: 250078 - DNA, 42 bp, Homo sapiens
  chr2:3347859-3347901
  hypo
ttaaaaaatcaagaggcacccgcctagggaaagtgaatgatc

SEQ ID NO: 250079 - DNA, 70 bp, Homo sapiens
  chr2:3349537-3349607
  hypo
tgtttctctttacacggatgcacatgtaggaagggaatgcggccccggggcaccacgcttatctttccct

SEQ ID NO: 250080 - DNA, 559 bp, Homo sapiens
  chr2:3352458-3353017
  hypo
tgcattatgcagtaacgatgcaggtaccgggcattttccagggaatcaacgactgaaaggagcgaggacctgaggcaacaccaggagctattaacccttcccagccaccactccccaggagagctggagctccagagtgagggatggcggcttccgactgtgcaggaggagaccagactccgttgtcacagaaggcaggggcagggctgcagtccacagccagtggagccttcccggcgtctctcctggtctgtgcacatgcgcacaggcgggctgctcgcagccggaaccatggggcccaggctgttcaggatggagctgtcctgattttcaggacatctcaccccagagacacggcatggcaacagcacgggtgcaccctttccacgtgtgtctgtacaaaagtgtacacttcaggtgcaagagcatacccatggcacatgcctcagagctgaactgcaaattcaaaggagagggaagcgagcagagagaggcagacatgcaggtttcagtcccgattctgccacgcaccagctccacactgcgtggggccacctgc

SEQ ID NO: 250081 - DNA, 134 bp, Homo sapiens
  chr2:3372625-3372759
  hypo
tgaatttgctcagcattttgcgatcttaacgaccctccgtgttggtcttttatttgcagttgcagtactgccctttatctttcaagtgtcattaccttcactcagcggtcaacgatcagatctctatcctttca

SEQ ID NO: 250082 - DNA, 85 bp, Homo sapiens; identical to SEQ ID NO: 207742
  chr2:3391389-3391474
  hypo

SEQ ID NO: 250083 - DNA, 492 bp, Homo sapiens; identical to SEQ ID NO: 207743
  chr2:3418353-3418845
  hypo

SEQ ID NO: 250084 - DNA, 149 bp, Homo sapiens
  chr2:3425450-3425599
  hypo
ttgcctaattacacgtgcagcgttgacaaatggcatgcccctccgtgccgtcagcacactgacgttgtcaccattactaacggctggctggcgctgcttccagcaaggtgagcagctgtggccagtggctatgcgtttgggtcatggat

SEQ ID NO: 250085 - DNA, 214 bp, Homo sapiens
  chr2:3427286-3427500
  hypo
ccagccccggcacccgccatctactctgcttctgtgagttcagtgttttcagattccatgtgtaagtgaggtcacacggtgtttgtctttctgtgcctggcttgtttgtctaacgtcatgtcccctaggctcatccacagcacaaacgacgggatttcctccatgaaagctgagtggtattccactgtgcgtcatgccacgttcctttatccgt

SEQ ID NO: 250086 - DNA, 154 bp, Homo sapiens; identical to SEQ ID NO: 207744
  chr2:3446897-3447051
  hypo

SEQ ID NO: 250087 - DNA, 177 bp, Homo sapiens
  chr2:3449779-3449956
  hypo
gggttggggagaaacgagaagggttagtgcagtcacatcctaggaacgtttctctcaggctgactgggcgtggggccaccgtcagtgagagagccactcatgcttctcgttccctccgctggtctacagttccacctgcctctcatcttgtgaatacataaccgcacttcaggtatc

SEQ ID NO: 250088 - DNA, 360 bp, Homo sapiens
  chr2:3452857-3453217
  hypo
gtgaagaagaacatataccacgagttaaaataaatttcccgtgctgctgaaaaatcagtgccgccatcctctgaccctgctcctcccacgcgccctgcaggctgtctccctctggggtcgagagagcttcacagaccatttgggaaagagccaagcaaacacacttctgcaagccatttgcataagtagacataatccatacggaatgatgcactgttcggttgtagtttcattcgtcagtgacctgcatctgcccgcccagtcttgagttcagctccatccctccctgcagttccgcagcctccggcttccccacctcagcttggctgagagtttcacgttcatccaagtgcttcttta

SEQ ID NO: 250089 - DNA, 192 bp, Homo sapiens
  chr2:3456147-3456339
  hypo
aagtccaggccacacgcaagggatgggaatgagactctgccttttgaggagtgctcaggaatgcatggccgcatttaaactgccacactgtggccggtcagctgggtctgttccacttcaggatccacaggcctctcctggccctgcaggacaggctcccctgcctccactccagcccgtcctggtggttgt

SEQ ID NO: 250090 - DNA, 80 bp, Homo sapiens
  chr2:3458785-3458865
  hypo
tggtgtgcggaggcgcagaacaagctcaggagtctgctgacctggtgcgccacaccccggggaccgccagtgggcgtgtt

SEQ ID NO: 250091 - DNA, 43 bp, Homo sapiens; identical to SEQ ID NO: 207747
  chr2:3467375-3467418
  hypo

SEQ ID NO: 250092 - DNA, 330 bp, Homo sapiens
  chr2:3469090-3469420
  hypo
accctcaggcccaactaaaccgcgacagcccccggtgacaggcaggaccccgccgttgcgatgcgcacagctcagaatcccggcccgactgcagtcgggagagcagccgccccctggcagccgagcaccgcgtgctggtttccagcttccccgccagctcctgcgtcagcgtgtcctctctctacaccgcgtctgtatacacttgtgctcttctacacgtgtgaaacccacagtgctgttctcagctctaaagtacgttgggtttttcttcccacaggattatgtgctggccgtggaggcgtatcattcggttatcaagtattacccaga

SEQ ID NO: 250093 - DNA, 42 bp, Homo sapiens
  chr2:3498265-3498307
  hypo
ccaactgactgaatggaacccgttggccaaccttaaaaaacg

SEQ ID NO: 250094 - DNA, 191 bp, Homo sapiens; identical to SEQ ID NO: 207748
  chr2:3504356-3504547
  hypo

SEQ ID NO: 250095 - DNA, 355 bp, Homo sapiens; identical to SEQ ID NO: 207749
  chr2:3582016-3582371
  hypo

SEQ ID NO: 250096 - DNA, 343 bp, Homo sapiens
  chr2:3586878-3587221
  hypo
gcgggcagagacagcggtccacttgccctgtttcccacttcattcatatttgtctttgtccaaaaccctaccaccatatactggcggcttcccgtatcaccaaagaatcttaatttgggggcgtattttgatgaaagttgttctttgacaaatacttatgtcaacacaatatcagagtcaccttgtgccaattcctgtctctcaatgggcaattaagaaccaaagctgcttgaacgagctggccagcatagtcaacgccttctgtgtgccaggagacacaatgcaggcagatgcagccggccctccccatgttacccctgagtgtttacgaactgaggaacca

SEQ ID NO: 250097 - DNA, 71 bp, Homo sapiens; identical to SEQ ID NO: 207750
  chr2:3593598-3593669
  hypo

SEQ ID NO: 250098 - DNA, 80 bp, Homo sapiens
  chr2:3648215-3648295
  hypo
gcattcaggatggcgtcccccaggggagggcgcgtggatgggagcggggctggggctttggggccggtgaggcaggtgca

SEQ ID NO: 250099 - DNA, 186 bp, Homo sapiens
  chr2:3649283-3649469
  hypo
agttctgtcatcttcggcaagtgaagctctcccacgcgcgtgcccaagccctggctccgccctaactctaatcctctctcccttcccgccccgccccttcatcaacccttgcctcagtggaaacggacatttaacatggaatgttcatggcagtaaccctagccgtctccacgtcatctttttgtc

SEQ ID NO: 250100 - DNA, 91 bp, Homo sapiens; identical to SEQ ID NO: 207751
  chr2:3675048-3675139
  hypo

SEQ ID NO: 250101 - DNA, 282 bp, Homo sapiens; identical to SEQ ID NO: 207752
  chr2:3675169-3675451
  hypo

SEQ ID NO: 250102 - DNA, 470 bp, Homo sapiens
  chr2:3681100-3681570
  hypo
ggggttctgagaaacccttgcgctggctgcttgctgattgtgagggtgctgtgagcgcgtccagcctgatctggcagcctggacctcctcgcgaggggacagagcggggaccacagctgaccgacgggggagcggcgtgaagacgtggagggggaaataagaagcataaacattgaggctgtcccaaccttcctcctgatggtcagcacagaacctctggaatagtgcggtggagagctgggcgagtttgtctttggacagaaggcccgaggaagatgcgtgttcccgaccttcctcctcatggtcagcacagaacctcaggaccggtgcggtggagagctgggtacaggaggcccgaggaagacacatgtttcctgcgcagacagggcctgggacaacacgaaacagcagatgtgcattttcagggaatatcagcttttctgtaggaccctctgcgggaggccgagcag

SEQ ID NO: 250103 - DNA, 290 bp, Homo sapiens
  chr2:3685679-3685969
  hypo
ctgggctcagtctgcacctgcgggttctaattgcaccgtctccgctgctgcatttggctgcacggccgtggtaaggcgggcagatcagctgcgcctcccgtgatgagagactgaggccaggacaggcaaggggttgctcagaaggtgctgctcctatgcgcccccgccccccgccatctggtcagtggacgtctttggagcgcctggcttgttccaggtctatgctgggctctgggggacgaagtcggtgggagggcaaggagctggccgtccctgagctcttcaggtgt

SEQ ID NO: 250104 - DNA, 170 bp, Homo sapiens
  chr2:3695326-3695496
  hypo
cctctcctgatggacactagcgttgtctcagccttcactccctggtgatcactaacgcatcctctcctgatggacactagcgttgtctcagccttcactctcgcaacccagctgcggtcaggctccttgactgcaccttgatgtgcgccggtgagaccctatctgtaggg

SEQ ID NO: 250105 - DNA, 308 bp, Homo sapiens; identical to SEQ ID NO: 207754
  chr2:3714208-3714516
  hypo

SEQ ID NO: 250106 - DNA, 293 bp, Homo sapiens
  chr2:3810772-3811065
  hypo
gcatttggatgagcactggccgactgccagcctggctctgagatccctccctgtctgaagtgttgtggtccccagcacagccccaggaggcaggcaccatctccattctatcgcacctcagagagacctgagaccacacagctgacgtggtgggcccgcgacccagcgctggtgagcgcggctcgagatgtcacccagctcaggagatcccactgccagccaggctcctagaatggtcatggatttttctaaaatggaaatttaattagcacggtaactgaaggctccttgcc

SEQ ID NO: 250107 - DNA, 58 bp, Homo sapiens
  chr2:3833857-3833915
  hypo
atgtttcccgcccccgccctccacgtgcagtgaacctctcgtgcagatgtgtcccgcc

SEQ ID NO: 250108 - DNA, 36 bp, Homo sapiens
  chr2:3888395-3888431
  hypo
gggtggccgctctgcgagtttcgcagtgaaagtgtc

SEQ ID NO: 250109 - DNA, 42 bp, Homo sapiens
  chr2:3919766-3919808
  hypo
aacaggtgagggactggtcccggtctctggcctgggcttggg

SEQ ID NO: 250110 - DNA, 265 bp, Homo sapiens
  chr2:3990855-3991120
  hypo
tctctccctgctacctgcaccgatactgacaccaaatgaagttctcgcaccccggactccctctctgggtgccaccgacattacagctagacttttgctttcctatccaccctgtattctaagctccctgggtcagggtctgcctgttcctcacctgtgtttcctgtgggcccagtggctgctgttgcgcacctggggagaagagactgcaagagggaacctccctgtgcgcccttggggtgcgtttcctcgccttgtcctcact

SEQ ID NO: 250111 - DNA, 184 bp, Homo sapiens
  chr2:4976754-4976938
  hypo
aggaatagtgaatgcgtgacaaagccctagcatattaaatgtaaacacatgagaacattccagcagaacaacaaggaaggcaagcgatgcaggtgccgacaaaacgcagtggctccggatgtgccctcgacggaagggaagccatgaggggaagcagagaaaagggtgtcgatagagaaggagg

SEQ ID NO: 250112 - DNA, 102 bp, Homo sapiens
  chr2:5584526-5584628
  hypo
acagaggcctgctccgctcgcgtgagaactcacggcacccaccgcaagagagaaactcaaggggggacaatgaccgcaggaccaaggcgcaggaagggcatc

SEQ ID NO: 250113 - DNA, 79 bp, Homo sapiens
  chr2:5694955-5695034
  hypo
tgagaggatgagaatgaggtcggaagaaagatttttcttttttttttttttttcaggcggagtctcgctgtatacccca

SEQ ID NO: 250114 - DNA, 141 bp, Homo sapiens
  chr2:6024405-6024546
  hypo
ggtggaaggattccagatagcggagatgagaaaagcgggaagcaaagtagcatgaacagctgtagaaaggactcgggtgtgccctagaaatatgtgttatgttctccgctttttttttgagatggagtctcgctctgtcgc

SEQ ID NO: 250115 - DNA, 211 bp, Homo sapiens
  chr2:6402889-6403100
  hypo
gtaaggacctgcatagaaggcgcggctcaggctgaagtagagcaggacgataacaaagtgaaagaggagaggcgaggagaggcgggaaggggcggagcacgtgtttcggatgggcgcatagaatggagacttccgggccatgtcaggccttttgcttttactgtgagtgaagccataggacgaccctgcacagagctgacgtgatccaata

SEQ ID NO: 250116 - DNA, 110 bp, Homo sapiens
  chr2:6635591-6635701
  hypo
gagccgatgaggatcggggcgtcctgtcggacagtaggcaccaggtgaccgccaagtgcttggacccaggcagtctggcctgggaagaaggtccccggggagcagaacag

SEQ ID NO: 250117 - DNA, 270 bp, Homo sapiens; identical to SEQ ID NO: 207757
  chr2:7073081-7073351
  hypo

SEQ ID NO: 250118 - DNA, 130 bp, Homo sapiens
  chr2:7099078-7099208
  hypo
agatcatcttgcaggtgcagcgtgggcgtccagttactgctctccggggcttgctcccctgatcactctcttactgccctcagagcacagaacacgtgatgctcctggcgaagcacctcattgactcatt

SEQ ID NO: 250119 - DNA, 98 bp, Homo sapiens; identical to SEQ ID NO: 207758
  chr2:7109819-7109917
  hypo

SEQ ID NO: 250120 - DNA, 136 bp, Homo sapiens
  chr2:7128200-7128336
  hypo
gtgtcaaagtgtttcgtttaaaaataaacttttattttagggcagtttagatttagatttacagatttagttttagatacagatttagatggaccgatatggatttagatttagaaaatgacgcaggtagtacaga

SEQ ID NO: 250121 - DNA, 46 bp, Homo sapiens
  chr2:7149569-7149615
  hypo
gagagcacaggaggcggcgggtctaaaggctcgacagaagcaagaa

SEQ ID NO: 250122 - DNA, 298 bp, Homo sapiens
  chr2:7164398-7164696
  hypo
ctcagtctgtgaagtggagccgatgcttccagcatagccagtgctcctgggtctcccgtgggatccgtttgtgcagagtcctcacggcgtttctcccacagtgctgctttcaaaatggaagaagatgacgcgcccatcaagcgctgccccaagtgcaaagtctacatcgagcgagacgaaggctgcgcgcagatgatgtgcaagaactgcaagcacgccttctgctggtactgcctggagtctctggacgtgagtacggccttcagcttcaccttgcggcatttagctttgaggttta

SEQ ID NO: 250123 - DNA, 33 bp, Homo sapiens
  chr2:7180010-7180043
  hypo
cagtgtcaggctggacgccgtgatttcagggac

SEQ ID NO: 250124 - DNA, 112 bp, Homo sapiens
  chr2:7229710-7229822
  hypo
gtggcaggagccgcgttacgagctgcctccttggagaaacagcctcacatctgtgagaagggcctgcggtggagcccatactcaggtggaaggaaccgggaggtttctggcc

SEQ ID NO: 250125 - DNA, 102 bp, Homo sapiens; identical to SEQ ID NO: 207760
  chr2:7237053-7237155
  hypo

SEQ ID NO: 250126 - DNA, 182 bp, Homo sapiens; identical to SEQ ID NO: 207761
  chr2:7907358-7907540
  hypo

SEQ ID NO: 250127 - DNA, 41 bp, Homo sapiens
  chr2:7931304-7931345
  hypo
ggcaccgccgggcgcggttgctcacgcctgtaatcccagca

SEQ ID NO: 250128 - DNA, 101 bp, Homo sapiens
  chr2:7931525-7931626
  hypo
agcttggaggcaccgaaaaaaagccttgggaagcatcctgggaaggaatgcactttggctggaacatactgtatgtgaagatgagccgggcaagatgagcc

SEQ ID NO: 250129 - DNA, 151 bp, Homo sapiens
  chr2:8214269-8214420
  hypo
tgctgccagacaaaaagaaacgtacgatacttatcacggcagaaaaaggaattgctcctgttccaattaaaatctgcctaaagccttggacatttcccaagaaggccagtctttgctcctgtacgttcccgtaactcttacctgaaacctc

SEQ ID NO: 250130 - DNA, 155 bp, Homo sapiens
  chr2:8364597-8364752
  hypo
attccagagctgctcgctcctccctcctctgcttcttgctttgctggacacccgggtctccttggtcttccagatcttccccgtgttattccctcagactggaaactgctcccctctgtggggcgtggccaatttctgctcgtttttcggaggtg

SEQ ID NO: 250131 - DNA, 57 bp, Homo sapiens
  chr2:8476167-8476224
  hypo
atagggagtggcactgtgctcggcatttttacatacgtcaccttgaatgattctcct

SEQ ID NO: 250132 - DNA, 120 bp, Homo sapiens; identical to SEQ ID NO: 207762
  chr2:8647532-8647652
  hypo

SEQ ID NO: 250133 - DNA, 125 bp, Homo sapiens; identical to SEQ ID NO: 207763
  chr2:8647900-8648025
  hypo

SEQ ID NO: 250134 - DNA, 31 bp, Homo sapiens; identical to SEQ ID NO: 207764
  chr2:8648363-8648394
  hypo

SEQ ID NO: 250135 - DNA, 269 bp, Homo sapiens
  chr2:8658286-8658555
  hypo
gattccagtggggtgcgggagtgggaagcactccatccgggccgagggaggagtcatttcccagctccagtcagcacctgtttctccgcctctggcccatggtaggaagggagctgccaggcatcccgcccttgaggcctctgagcgaacgagagctggttcacaagctcggaacctggaggctcagaatgcggcggctgctagctgtgtgacaatggacaggtcactgaggtccctggcaatgggtgggaggtcgttagcgctccttg

SEQ ID NO: 250136 - DNA, 68 bp, Homo sapiens
  chr2:8668756-8668824
  hypo
ttccggcacatcctcggtccactcgatgtgtattcacctgccaaaacctgaaacgtacagacacattc

SEQ ID NO: 250137 - DNA, 165 bp, Homo sapiens; identical to SEQ ID NO: 207765
  chr2:8691181-8691346
  hypo

SEQ ID NO: 250138 - DNA, 183 bp, Homo sapiens
  chr2:8706973-8707156
  hypo
aataaaaccagcttcggaaaatgtaaacccagagcaaggtgatccgtcactaaaatttcctgggaggaagctcaccttccgtgaccataaattgttggtgagccatctcacctattgtgcggtgctctccaaacagacacctgttgccatagcaaccctcacatctgtcgctaccttagaaga

SEQ ID NO: 250139 - DNA, 192 bp, Homo sapiens
  chr2:8713198-8713390
  hypo
ctagatgccaacgtcgggttctaccgctgactagctgcgtcttggccatgttatttcacttctttgtgcctcagtttcctcactggtaaaatggaaagaacaagaagaataatgtctacattatgagagcgttatgccatttcagtgaggtgatacttgtgccagctccgcgaagccagaggcagacagcct

SEQ ID NO: 250140 - DNA, 241 bp, Homo sapiens
  chr2:8735925-8736166
  hypo
agaaagcagccacacggcagcccgaatgctcatgcgttccagagcattctccaggaactttctcattcatccctccacacttttctgcttttcaaaataatgctggtacagggccagacacacacgcatgccacacacatgcactagactccctacaggctcacagacacacaccagtgcacacactgcgcgttcctctctgctgacatctgagcgaggcaggttcacaagcagccagcgg

SEQ ID NO: 250141 - DNA, 48 bp, Homo sapiens; identical to SEQ ID NO: 207767
  chr2:8736256-8736304
  hypo

SEQ ID NO: 250142 - DNA, 224 bp, Homo sapiens
  chr2:8768417-8768641
  hypo
ccctcccagcagggcgtccctccgctgcaccctcatggatgccccatccacctgatggcagcccctccttagttctggccactccttcagcaccaaggcctgggaggtggcttaggaggtgaagaggaaggagcagcagggatgccccgaggcagacgcccgggagtcatgcactagggcctcccagggctgactgggccaggcacctgcgcaaccctcactga

SEQ ID NO: 250143 - DNA, 156 bp, Homo sapiens
  chr2:8833973-8834129
  hypo
ctctctctgagagctcggggggtttctgtctcctgacggggccctgactggtaccccaggctccatgagagcaccgtggacaacaggagcagccgaacacgcagaatctgcgggaaggggaatcgggcagtgggtgcggcccgtgcaaaggcccgg

SEQ ID NO: 250144 - DNA, 590 bp, Homo sapiens
  chr2:8834448-8835038
  hypo
catggtgggggacagtgggccggagcaaggcagccaggggcccagtgcgaggagaggagaacggacaggatgggggaggcccatcacacccagcctcacaggccgcgctaagagctttggcctttactttgtgtaaactgggaccttggagagctttgcgcaggagagtgatggaaccaaactatttagcagccacatttcttttaatgtttctcgtttataggttacacatttgttgttattattattgatttaataatactgtgtcaagataaagttgtcaaaatcacggcacccaaacttcacattataaaattttaatcacaacctgttttatcacaatcgctttgcagcaacggaaattattcgtagtaattattaagttggtgcaaaattatttgtggtttttgccatcacttttaatggcaaacgccgcaaataattttgcaccaacctaaatattataactaaggaaacgaatagaatggtgtgcatcagaggtacctccgccagtgcttaccccgtttgttatagagggacgggttgtccctgctgcttttttatggagcgctatatcaaaagggctgagt

SEQ ID NO: 250145 - DNA, 39 bp, Homo sapiens
  chr2:8849818-8849857
  hypo
ctctgctgagacactagccacgcctcgtctccttccagg

SEQ ID NO: 250146 - DNA, 194 bp, Homo sapiens
  chr2:8849887-8850081
  hypo
cctgccgtccccgcctttcctatgccctttgtccttgtaggttgacgcctgtgtcagcagagagaggaaagagacgcaggcgatcattctcccgtccttacgtggcagacagggttatttgcgtagattgaccgagatgagtgtcctgcactctgaagaaccttggtggctcctccttcggaattgatttaagc

SEQ ID NO: 250147 - DNA, 171 bp, Homo sapiens; identical to SEQ ID NO: 207775
  chr2:8854102-8854273
  hypo

SEQ ID NO: 250148 - DNA, 231 bp, Homo sapiens
  chr2:8860513-8860744
  hypo
atcacctgcagatccggactccgttcctgtctaccagtgaggctgctgtgactcgaaggaagagccaagaggaaggagccggggaaagctggggctgccttggctgagcacgtgttttatgctctccaccaaccttgtctacgagggaagatggagacaaatgctgcccaggcctgcgcagccgagagtggtggacactgggggaagccggtaccgcggtgtgcgtggaaa

SEQ ID NO: 250149 - DNA, 62 bp, Homo sapiens
  chr2:8868790-8868852
  hypo
aacgcactgcacagcgctgctgggcgctagcatgctgtgggcacaaacgcttcataaagcac

SEQ ID NO: 250150 - DNA, 292 bp, Homo sapiens
  chr2:8870179-8870471
  hypo
tcaccagccctccccgcatctactctcctaacagctcaggacagccccgtcacactactgccagccctggtgactcactttgttggcaatttttaaagccctcttcattatgtacttcctactcttcagaacctctgtgataagcaatacccctgccatacagaacgctggatctcggtttactcagcctctccctgtagcgtcacaggctgtgcactcacctaggtgagcccctaagagcagggtttgcttctgcttcacctaacgccacgtcttccctcaaatgtgtggt

SEQ ID NO: 250151 - DNA, 317 bp, Homo sapiens
  chr2:8978038-8978355
  hypo
ttccggatccaggagcgagacctctgcctttcgcggggcctgtagttcacactccttccaggtctcccagcacctcccctcacctccttcagcctccacattcctaggccttgctgccaacaagcgtcaatcttgatttttgaaaaggtccaaggatgattacgacgtgcgtaggttgcgaaccatcgaaaagcacccaccaatgtgtcaacctggcaactcaggaaaaagccaataaggagcctgacttcatcagaagttggtgcggggtggggacaatggctcactcctgtaatcccagcattttgggaggccaa

SEQ ID NO: 250152 - DNA, 187 bp, Homo sapiens; identical to SEQ ID NO: 207778
  chr2:8983020-8983207
  hypo

SEQ ID NO: 250153 - DNA, 166 bp, Homo sapiens; identical to SEQ ID NO: 207779
  chr2:9002474-9002640
  hypo

SEQ ID NO: 250154 - DNA, 104 bp, Homo sapiens
  chr2:9076991-9077095
  hypo
agttataaagaaaattttcagcttaacttctcaaggttaacaggcttccactcttgaatatcgcagaacacgccacattgtgctgccttcgccagggaaaatat

SEQ ID NO: 250155 - DNA, 389 bp, Homo sapiens; identical to SEQ ID NO: 207780
  chr2:9078568-9078957
  hypo

SEQ ID NO: 250156 - DNA, 101 bp, Homo sapiens
  chr2:9134399-9134500
  hypo
agagtagaatacagtgaaagcggggcatgatgggactgttcggagggccctaaccaacagggcagcccaggcattctctcgcagcactgcttcctggagtt

SEQ ID NO: 250157 - DNA, 101 bp, Homo sapiens
  chr2:9135654-9135755
  hypo
gccttacgttttggcgagtacatgttaatgtgttaaatataaacattttttaaaaatacattccattttttttttttttttttgagacggagtctcgctct

SEQ ID NO: 250158 - DNA, 96 bp, Homo sapiens; identical to SEQ ID NO: 207783
  chr2:9218664-9218760
  hypo

SEQ ID NO: 250159 - DNA, 31 bp, Homo sapiens
  chr2:9234917-9234948
  hypo
aggcacagtggctaacgcctgtaatcccagc

SEQ ID NO: 250160 - DNA, 796 bp, Homo sapiens
  chr2:9236516-9237312
  hypo
tgaggaatcagctgcggcccgcagagaggcagggttttcccttggtggcacaggcagacacatacccggccccacagtggtctcctccatctggggtcccatcagagccatcgctccctcctggagttccgctcagtggcctgccccagggggcccccgcacagccacagggctgtgggaagggaatggtccaggcaggccggtcaggccggctcccccagatcccttggctccccccaggagctggcttctcactcctcacagacaacaagggcgctatgagatgtcatcagagatgccaccaaacaccacaggcaagggacccgtcactcagcccgggctgctgaacgtgctgaggcggctctgatatgcccagaaagtgcccaagcaggtgacacttgggccaggacaggcacacggagatgacctcccactgcctccccaaggatgaccctgctactctgactgagagggtcttcaggtcaagggcggggagggtggcaacagacaccaaagccgagggctctgagcaggctcagaagccgggtgtggagcgggagggtgggggcgcagtggcaggggctgctgcagggccagctgtgccagcaggggtgggggcaggggctcagcggagccggagtgccaggagctaaagaccacccacgccctcttctcggagggcgagcaggccagggagagcgacttaagccacatgaactttcccattatccctgaaggagcggggttcttgttggtattctacctgcacagctgcgtgagacgcagatatggaaaa

SEQ ID NO: 250161 - DNA, 270 bp, Homo sapiens
  chr2:9244226-9244496
  hypo
caacactcaacaaacgcttgtggaaggagtgaacaaatgacaagtcacgaaacctaaatacaggtatgtcacaagaagccctccaggcagcgagtcacttagcactgcacaggtagcaactttctaaaatattttacctttagtattgtcatttcatatttctgtctttctcttactttagtgtactattttatggtgtcttaaaccatcacgcaattccacgggtatgcagcacaaagaattgagaagtaattccgataagagcagggg

SEQ ID NO: 250162 - DNA, 265 bp, Homo sapiens; identical to SEQ ID NO: 207784
  chr2:9245035-9245300
  hypo

SEQ ID NO: 250163 - DNA, 141 bp, Homo sapiens
  chr2:9250220-9250361
  hypo
tggaacctgtcgagcgccgaaggcccagccctgcggtctcgtgaccttgcccctgccctcccagagcagagtgctctgtggctccatcccctgcagagagcacaggctgggtgagagttggggcgccggggttgggactgc

SEQ ID NO: 250164 - DNA, 174 bp, Homo sapiens
  chr2:9250674-9250848
  hypo
tgcctgcagagatggcggcctgctctctaggtcaggccaggttcccgggagccgaggtctggctgttattccaggagtgcccagccccagagctgccacctcaggcccctggaagttctgcagcctgagctgccgtcctcagaccactctgcctctgagcgtgcaagaggctca

SEQ ID NO: 250165 - DNA, 59 bp, Homo sapiens; identical to SEQ ID NO: 207785
  chr2:9251105-9251164
  hypo

SEQ ID NO: 250166 - DNA, 141 bp, Homo sapiens
  chr2:9289579-9289720
  hypo
taaagagcaggtgacgatcattggacaaaacccctgggccactttcccatctccagggcagcccctggctggggggatcctggtgacgttcagcggctctgggctctgtgtggacctggacagggccgaccagctccttcc

SEQ ID NO: 250167 - DNA, 188 bp, Homo sapiens
  chr2:9289933-9290121
  hypo
tacttaagcccccagggccccggtttcttgtctgtgtaatgggatcaatagcgcctcctccaagacgccatggggacttgctgggataccgtgtgagggcctcaggccgatggcatgcagggagtcctcagtgcccgggacgcgttgactgttccagcagccagtgcggggtgtttgggtgggaagga

SEQ ID NO: 250168 - DNA, 276 bp, Homo sapiens
  chr2:9352726-9353002
  hypo
aattcttcccatgcaccccacgtttccaggcaccggtgccttcctttgtggagcatatacatgcattccaggcccgcactgtctgatgaggcagcctaagacaaatccagctctcagccgccacattgcaagtactcagtagccacacgtggctggtggctaccatattggctcagcaaccaccgggagagccatcacctggaaacttgctgaaatgcagagccccgggttccacccaggacaatttttacagcatctccacgtacaccacaggca

SEQ ID NO: 250169 - DNA, 174 bp, Homo sapiens; identical to SEQ ID NO: 207789
  chr2:9409365-9409539
  hypo

SEQ ID NO: 250170 - DNA, 95 bp, Homo sapiens
  chr2:9427258-9427353
  hypo
gcttctgactgctgcggcatgctgcctggtgctgaggcgggaagttgctgggggcacacggtggagaaaacaagcagcaacgtggggaacaccct

SEQ ID NO: 250171 - DNA, 470 bp, Homo sapiens; identical to SEQ ID NO: 207790
  chr2:9455454-9455924
  hypo

SEQ ID NO: 250172 - DNA, 138 bp, Homo sapiens; identical to SEQ ID NO: 207791
  chr2:9456808-9456946
  hypo

SEQ ID NO: 250173 - DNA, 231 bp, Homo sapiens
  chr2:9481656-9481887
  hypo
ctgattaatatgcgcggcacgaacagtgttagcggtgttgtcacatgatttcaccacttactttgtgcagggctttttttctcccccaaatcaatagacgtatttcttggttgtgcagttgagtctcctgacaggtttatttttagtctttcacagagacgctgtacaggtgagcagtatttctccacattccttccacagcattgttctcagcaacgttgaaagctggat

SEQ ID NO: 250174 - DNA, 180 bp, Homo sapiens; identical to SEQ ID NO: 207792
  chr2:9513162-9513342
  hypo

SEQ ID NO: 250175 - DNA, 488 bp, Homo sapiens
  chr2:9518892-9519380
  hypo
cccagccatgtaggcagggacggtgccaggtcccaccaccttggcgatgatttacagaaaccgttcactcggggactgtctgcctttcctgtgcccgtagcccaggctccctgccgggcagtccctggtcgtccagcctgtgacacactatgctctctctctgttcctgttctcgggcagtgggaacctggataaacagacagggaaaggcagcacagccctgcactactgctgcctgaccgacaatgccgagtgcctcaagttgctcctgcgggggaaggcctccatcgagataggtgagtgggcccgggccccgggggtgggctcagctgcaccctggcctctgcctcctgtctgccatccaagcgctgctcttggaaacagggccaaccctgtgggctcttgttagtgccaaagagaaggagaacctaccgctaatgagaaagagcctctccctgcctgttccacgaggccgcattcaccatctg

SEQ ID NO: 250176 - DNA, 42 bp, Homo sapiens
  chr2:9608090-9608132
  hypo
ctgtgacctgctaggtcagccgtttgtgtttcatttaataca

SEQ ID NO: 250177 - DNA, 401 bp, Homo sapiens; identical to SEQ ID NO: 207793
  chr2:9609462-9609863
  hypo

SEQ ID NO: 250178 - DNA, 216 bp, Homo sapiens
  chr2:9649999-9650215
  hypo
catccctagggaaacgcctaggaatggaatacgtttctgagctctcattatgatcattatacacagcctctttccaaaccacataaaaaattctcgacacacacataccttattgttctcgtgatcgccactcacagctatgggatacatgacatatttccctccctggtcctcattcggggcacattctgctagaccatccggatcatgttctgc

SEQ ID NO: 250179 - DNA, 131 bp, Homo sapiens
  chr2:9676812-9676943
  hypo
agctccatactaaccaaccacgtgtccagtgaagaagtcctgccattttacagtgtactcgctttcgtttttaccatccaccaccacgaccttgaaattttgtgaaaaacgttcagtacttgatgtcaggt

SEQ ID NO: 250180 - DNA, 32 bp, Homo sapiens
  chr2:9694210-9694242
  hypo
aaaaaccttacgatctgcaaatgttatgaatt

SEQ ID NO: 250181 - DNA, 260 bp, Homo sapiens
  chr2:9720411-9720671
  hypo
atgaagtgtgggttaaggagtaaactggcaagtttgccccaaattcgatttcatgatgatcttgacatctacacagtggtgtcacttaacaggagtatgttctgaaaaacgcctcgttaggcgacttcatcgttgtgcaaatatcacaggatgtacttacacaagtacatggcagagcctactacacacctaggctatgtagtaaagcctatattcctaggctacaaacacgtacagcacgttaccgtactaactactgt

SEQ ID NO: 250182 - DNA, 49 bp, Homo sapiens
  chr2:9727412-9727461
  hypo
ataaaatactaacacgtatctcatactttcagctcgtatgtatcttccc

SEQ ID NO: 250183 - DNA, 42 bp, Homo sapiens
  chr2:9737397-9737439
  hypo
ttcatctatggaaatattttcgatcattaataaaatgaatgc

SEQ ID NO: 250184 - DNA, 104 bp, Homo sapiens
  chr2:9768526-9768630
  hypo
tcttccccgacttacgccatcataaaaagcagaatttataagagccacaaaataaaacgaatattcctttggctcagagtcaccttgctcgagaacaagaaaaa

SEQ ID NO: 250185 - DNA, 100 bp, Homo sapiens
  chr2:9785031-9785131
  hypo
actccagagttcttcgaaagtgagttcatcgctggccagagtttcaagtacagagtcattctcttggttagcgtagaagtaactgcgctacagtaactga

SEQ ID NO: 250186 - DNA, 134 bp, Homo sapiens
  chr2:9785578-9785712
  hypo
ctgcattgatgggttcccagcgagaaaagctgtgcgaggacgtggctgcttcaggagagtgaagtgctgctcgggctaatcctgaggaggctgagaaactcaacacatggcacgtgagtagtgtttgtggctct

SEQ ID NO: 250187 - DNA, 90 bp, Homo sapiens
  chr2:9853195-9853285
  hypo
atgagatctaacaaccggtgggcattggtggatgagttctgtcttaccttgtgtttatcttttgaaatctaggtaatcttagccaggagc

SEQ ID NO: 250188 - DNA, 194 bp, Homo sapiens
  chr2:9921427-9921621
  hypo
cccttgtagactcccgatttccaacccctggttggcggctgggaggtgtggaaagggagtactgggcgccaggaaaatggggttcccggaagatgactcaggcagccccagaatatgtctccatcactaatagagtccagaagcaagcctgtgcccatccactgcgatgagggtttctacgtgatgttactgtc

SEQ ID NO: 250189 - DNA, 122 bp, Homo sapiens
  chr2:9937923-9938045
  hypo
ctggccagcatgtgcggtcgcgtgaagacctgctaacagcaggagctggggactccctgaaggcgctgacctcggccgactcccccaagaattcccagaccctggcacgggtgccggcacat

SEQ ID NO: 250190 - DNA, 42 bp, Homo sapiens
  chr2:9942207-9942249
  hypo
gacagctcctgggggtttgtcggcctgatcagaataagcaaa

SEQ ID NO: 250191 - DNA, 235 bp, Homo sapiens
  chr2:9948880-9949115
  hypo
acaggcctggccaccgtgggggtctttgttcgccggtgctggagggcaatgggtaggctcccctaagacacaggcaaagtaagcgatgcagcacgccccacccccctcccccccacccgccgccggaaagacactcaggtcaagcaggtttgggtgcctggcaaggcagcgggagagtttcaggcctgtacccctccaatttcctcctggtctttctctccgacacagcactggc

SEQ ID NO: 250192 - DNA, 175 bp, Homo sapiens
  chr2:9952204-9952379
  hypo
cctgccccggcggccgggccagttccccccgggagccccggtgtccccctcctgtgtgtcctgctggttcccggcagatgctccgggcgccactgctctgttagccgctgttggcctcctcctgtcacatgtttatgcttgtagtagcagaatccaaatccgggccattatcgca

SEQ ID NO: 250193 - DNA, 710 bp, Homo sapiens
  chr2:9960204-9960914
  hypo
gatatcagcctgccaggtgtcggcagtcaccgtgggcctctcttctctcttcatacaccaggaaccaacccagccaggttaaaggacttgcccaaggtcacgcggaggaaagctggttggtgccaagtggttaggagagaaagggtgaggtcatgagagcaaacctaagagggctgctaccgactcccaggatgaaatcacagatgaagtcacagaatcggaatgctggctttgggagagaccgccctgctccttcaggaagctgggggtgggggcgggagtgggggcggggagcaggtgcaggggaaggggtaagagctcagactctggacttagaaggatccgattgatgattccagatcccagtggcttcatgaacgtgggcgagttacacaacttctcggtctcctgcttttctccttagtaaaacaacccatgccccacggaggtgccgtaaagacagaacgactctgcagatagcgttaagcacgatgccagccaccttggaggcgcacagtacatacggctcatggcatttcagggagcggcaagccagttgctgccaacccgcccgatgactgtgtctaaggcggaatctggaagcctctctgagcctccgtctccctcactgtcccctcggggtgagggaggccactctataaggagaccatgtgtgtggaagcaccttgggaaacgctgcgcgcaggccg

SEQ ID NO: 250194 - DNA, 37 bp, Homo sapiens; identical to SEQ ID NO: 207795
  chr2:9977944-9977981
  hypo

SEQ ID NO: 250195 - DNA, 134 bp, Homo sapiens
  chr2:10008084-10008218
  hypo
catgtgtggggtcattgatgcgcgatgttttcagtggtgaagatattagcgctgtaagagagatgttcatggaagaaggagacctgatggcagggctggcagccggtttcctcgcccatccttgtctgtgactc

SEQ ID NO: 250196 - DNA, 151 bp, Homo sapiens
  chr2:10047574-10047725
  hypo
cagaaagctaaaagcggttttaaacatgctgagacaatagccgcccctcctcaacgcctttaaaggtgaccaggtagcctctggggctcggggaaagctttcggcaagtatgtcacacacaccctgcctgagtaagcgctgcccctttgat

SEQ ID NO: 250197 - DNA, 213 bp, Homo sapiens; identical to SEQ ID NO: 207796
  chr2:10110633-10110846
  hypo

SEQ ID NO: 250198 - DNA, 300 bp, Homo sapiens; identical to SEQ ID NO: 207797
  chr2:10150735-10151035
  hypo

SEQ ID NO: 250199 - DNA, 120 bp, Homo sapiens; identical to SEQ ID NO: 207798
  chr2:10151095-10151215
  hypo

SEQ ID NO: 250200 - DNA, 540 bp, Homo sapiens
  chr2:10152955-10153495
  hypo
aggcgtgtgtatgggcaggtcaggtggacaggactgaatatgggggggtcaggtgggcaggcgtgcgtatggtcgggtcatgtgggcaggcgtgcttatgggcaggtcaggtgggcaggtgtgcatgtgggagagtcaggtggacaggattgaatatgggcgggtcaggtgcgcagacatgcgtatggccgggtcacgtgggcaggcgtgcgtttgggcgggtcaggtgggcaggggtgcatatgggcgggtcaggtggacaggcgcacgtatgggtgagtaagatggacaggcatgtgtgtgggagagtcaggtgaacaggattgcttatgggctagtcaggtggacaggtgtgcgtatgggtgtgcctatgggagagtcaggtggacaggattgcgtatagccggatcaggtgggcaggcatgcgtatgagcgagtcaggtgggcagacatgcgtatgggcgggtcaggtggacaggcgtgtgtataggcaggtcaggtggacaggcgtgcatatgggtatgtgtatgggcgggtcag

SEQ ID NO: 250201 - DNA, 660 bp, Homo sapiens
  chr2:10153555-10154215
  hypo
gggcaggcgtttgtatgggcgggtcaggtgggcaggagttcttatggtcgggtcaggtgggcaggcgtgcatatggtcggtttaggtggacaggcgtgtgtatgggtgtgcgtatggacgagtcaggtgggcaggcatcctacaggcgggtcaggtgggcaggcgtttgtatgggtgggtcaggtgggcaggtgttcttatggtcgggtcaggtgggcagacgtgcatatggtcgggtcaggtggacaggcatgtgtatgggtgtgcgtatggacgagtcaggtggacaggcgtgcgtatgggagagtcaggtggacaggcatgtgtatgggcgagtcaggtggacacgcgtgcgtatgggcaagtcaggtgggcaggcatgcgtatgggagagtcaggtggacagccctgcgtatgagcgagtcaggtggacaggattgcgtatgggcaagtcaggtggacaggcgtgcgtatgagtgagtcaggtggacaggattgcgtatgggagagtcaggtggacagccctgcgtatgagcgagtcaggtggacaggattgcttatgggcaagtcaggtggacaggcgtgcgtatgagcgagtcaggtggacaggattgcgtatgggagagtcaggtggacaggcgtgcatatgagcgagtcagg

SEQ ID NO: 250202 - DNA, 120 bp, Homo sapiens
  chr2:10154875-10154995
  hypo
catgcgtacgggcaggtcaggtgggcaggcgtgcatacgggcaggtcaggtgtgcaggtgtttgtatgggcgggtcaggtgggcaggcgttcgtatggtcaggtcaggtgggcaggtgtt

SEQ ID NO: 250203 - DNA, 240 bp, Homo sapiens
  chr2:10155175-10155415
  hypo
gcgtatgggcgagttaggtggacaggcatgtgtatggacgagtcagatgggcaggtgtgcgtatgggtgtgcgtatgggcgagtcaggtggacaggattgcgtatgatcgggtcaggtgggcaggcatgtgtatgggcaggtcaggtggacaggattgaatatgggggggtcaggtgggcaggcgtgcgtatggtcgggtcatgtgggcaggcgtgcttatgggcgggtctggtggacag

SEQ ID NO: 250204 - DNA, 180 bp, Homo sapiens; identical to SEQ ID NO: 207805
  chr2:10155775-10155955
  hypo

SEQ ID NO: 250205 - DNA, 375 bp, Homo sapiens
  chr2:10156255-10156630
  hypo
tggctgtgcgtttgggcgagtcaggtgggcagacgtgcgtatgggcagtcaggtggacaggcgtgtgtatgggtgagtcaggtggaccactgtgtgtacgggcgagtcaggtggaccggcgtgcatatgggcaggtcaggtgggtaggcgtgtgtatggatgtgcatatgggcgggtcaggtggacaggtgtgtatatgggtgtacatgtgtgcacaggtgctactttactctgtgttcaacacgtgttcgtggacgtgctccaggcccaaggcgaaggaataggatgtagcaggggcagggtctccgccccatactcagagtccttgggctccgggaagacacaaccgataagtggttacggggatgcctggga

SEQ ID NO: 250206 - DNA, 531 bp, Homo sapiens
  chr2:10161988-10162519
  hypo
gacttgagatcagccgctcagattaggtgatcagaagcattttgtcacggagacacggagttctgggccggctcttatcttcagggcatctggtagggtggaaagcacttcaagtcatgcgccaagcccacgtcctattccctgggcccattcccttccgttgaagtgctggaggcagagctcgcagctgaagacctacaggcggctctccctcgtgtctgggcatgagcggtctgtggaggcagcagccaggctgtgtccaggtagccctgacggccactgcacaagagcagtgtcgggtagagtccgagcacccatcagctcagccccaggctccatcagaggcggtggaacgggccctgaggatgcctcagtcctgggccttagtgggaggccttccaggtgaagccctggggaccaggtagccctgctcagcaagcagccctggaccctacctcagcagccccggaccccacctcggccgccgcaggaagccaaggggatgagggaccaactcgggaaatggtgggt

SEQ ID NO: 250207 - DNA, 160 bp, Homo sapiens
  chr2:10178432-10178592
  hypo
gctgcccacagcccccgactctgggccagcttacaaggactcagcacgtgctcttagcagcctcttttccaggggcaggcagctgggacaaagcagcactggacccgagctggagggatggatcccgggccctccactcactggccgacaatgacgggca

SEQ ID NO: 250208 - DNA, 114 bp, Homo sapiens
  chr2:10181969-10182083
  hypo
attctagggaacagcaagtgcgaggacctggagacggcagaggggctggtgggacaggcgcccaagaggaggcccaggctgtccctccggggcgtggggagaggcatggggctg

SEQ ID NO: 250209 - DNA, 126 bp, Homo sapiens
  chr2:10195850-10195976
  hypo
tgctctcccatgtgctcacacgtgcacgagcgtgccccactgctgggaacagagaatgctctcacggatccaccaatcaatgtcagcagcaggtgtccaggcaacgtgggtgagtggggacaagtg

SEQ ID NO: 250210 - DNA, 42 bp, Homo sapiens
  chr2:10226144-10226186
  hypo
agatggcaaaactgaggctccgaagagtggggagctggccta

SEQ ID NO: 250211 - DNA, 128 bp, Homo sapiens
  chr2:10281145-10281273
  hypo
tggggctgcatctcgcccacgtcgctgtcatgtgcggggcccacgttgtgagttgtgtgtctgctcactattgtgctgtagcctctggaagttgcttaggagcttgggatttcgtggagaggtgggag

SEQ ID NO: 250212 - DNA, 37 bp, Homo sapiens; identical to SEQ ID NO: 207809
  chr2:10289569-10289606
  hypo

SEQ ID NO: 250213 - DNA, 265 bp, Homo sapiens
  chr2:10302790-10303055
  hypo
cacctgcacccccccgccgccccccacccccctgccgaggcctggggagtcacagctcttcctgatcttgctgtgtggcctcgggcagggcgtttgccctctctgggcctcaggcactccatcttgacaataaggccattgcacttgctattcacattgggccacctgtgccagccatccatgacaggggttctttaggtagagacaaatggcctgcaggggcggggacccccggggcatggccgtccactgcaggtcccaggag

SEQ ID NO: 250214 - DNA, 278 bp, Homo sapiens
  chr2:10306804-10307082
  hypo
gcctgcaaagccctcgccctgttccctatggcgcaccagctgcttggatgctcccacgcagcagtgccttgtcatcacattctatttgctgagcggcgatggaacaggccctgcgtccccgcctgtgtcctaagcactccacaagcatgagcgtgtctagatggtgatggtttgctcatggtctctctctcagagcttttaccctggcggggttgggagcgtggcaatgggtcaccactgaccctgttaggaaacaagtgtgtctgtacgtgccactt

SEQ ID NO: 250215 - DNA, 152 bp, Homo sapiens
  chr2:10307112-10307264
  hypo
ggggccagtgtcagcaggatggcagatgctttgagaacacggctaagaactctgccttctggagcaggatgtcaaatgctgtttgattcaggcatgtgacacctgtcaagagccctggcacagctgctctcgagacacgcctcgactgccac

SEQ ID NO: 250216 - DNA, 120 bp, Homo sapiens
  chr2:10320484-10320604
  hypo
ggccattgtatttccgtcaccctggagagaaatctgtgaccaaatggttaaaaaaaattccaagtcattcattattcaccctcgctgcataatgcatgaaggctgcgggccaggcccatt

SEQ ID NO: 250217 - DNA, 82 bp, Homo sapiens
  chr2:10327405-10327487
  hypo
gttgtcatggaaaccggtcacgcagggctcggtagcaggaccctccttcctacctctgccacggtgccgcaggctcagaggg

SEQ ID NO: 250218 - DNA, 150 bp, Homo sapiens; identical to SEQ ID NO: 207810
  chr2:10328931-10329081
  hypo

SEQ ID NO: 250219 - DNA, 628 bp, Homo sapiens
  chr2:10334459-10335087
  hypo
aggctgctgactggcggggctctgggggtaaggccttggtcctgccgtgcctcctcctggctcatctgtgacacagaaatgacagttcctactccccagcttgtgcgggcccaaatgggatggggtgtgtgtgtgaggactggggcctaggcctgtgcagggcaggttgtgttactaacgtccccccgtggctcctgggctaacggtgcacttctccgtcctgcttcactgccttatggcacgtgtccatttccccaaccaccggtgggccccgggtggcttggccggcctggtgtcccgtgcccagcatgggctctggcccaagttagcacttgctgcctaagtgcctctgccttttactcacctccatctggagcgggctcagtggggttcctgctggggctctacgggggcatccagactttgccctctgaccagccccactgtcctgtccttccctcccctgcgtcctcatctgtcactccttggtcacagccgccccctgactttcctccctgcctccttggcatggtgggaaacatgcgagttccatttctgaggctgccttgtgcctgatcttgggcaagttgcttgctagacctctcggcgtctccgttctcagcggtgc

SEQ ID NO: 250220 - DNA, 192 bp, Homo sapiens
  chr2:10344636-10344828
  hypo
gtggtcactggctgtgaccccgccagccctgctcagcgctgtgcccagccctgggtgcagggaggtgcggtttgctctcagaggagcagctagctgggagcatccgaggccattagggacaggacgctaatgcatcggcgccccattgattctgcctggcttttgtgaacacgtctgcgctgactaatttgt

SEQ ID NO: 250221 - DNA, 139 bp, Homo sapiens
  chr2:10381451-10381590
  hypo
gaaggggtgaggcccggcctgggggccgtgggcagaggccaccggggtatggcttcagtcagcaggccccagcaggctggccacggccactaaaggtgccgcaaaacaagactgggaggagtagcgtggagctttggtg

SEQ ID NO: 250222 - DNA, 84 bp, Homo sapiens
  chr2:10400306-10400390
  hypo
cccagggacacttgcggtcaagatttatggggatgacaaatgcgagccttcagggctgcagggcccagccgctctgggaggatg

SEQ ID NO: 250223 - DNA, 163 bp, Homo sapiens
  chr2:10465386-10465549
  hypo
ctcaggcgatcctcccgacatcgtaattacatttttgcagggttttcagttcacaggtgtgctctcccacatccccatttaagtttacttatttttcagccccagcctctgaggctatcattattttacagacgagaacaccgggactcagagggtgatttgt

SEQ ID NO: 250224 - DNA, 60 bp, Homo sapiens
  chr2:10487204-10487264
  hypo
cagaagtctctagagagccccgcaccgcccccgccccccgcaggtgctggagttcagcct

SEQ ID NO: 250225 - DNA, 527 bp, Homo sapiens
  chr2:10512200-10512727
  hypo
acacgttgcttacacgttgggtgcacagtgaatatgtatcagtccagcgcttttcaccatctggtctggttttagtgttgctttatttctggtcattcctcaatcggggctaaagatcagaaaaatcgcatctccaggtcctgagccatggcgaggaagctgggtggtgccctgtgctgtgtggctaaggtgggggacgagggttgtcggtgggggaagccccatgggggccccactggagtcataggagcgaatggagcacccactccatgccttctgtcaattacaaagcacctattatgtcccggatactgtgtccaacacagtggacacattgatgggtaaggcataatccccccccaggagctcccagttggattgaggaggcagacaggcgagcgtatggctgtgacacacccagcaactcccagttggatcggggaggcggacaggcgagcgtatggctgtgacacaggggggcaagtggcgtcaccaaggcagaacccagcagccggggcctgaagccc

SEQ ID NO: 250226 - DNA, 66 bp, Homo sapiens
  chr2:10517629-10517695
  hypo
tccctgtcctttcacgcactgtctgcccgcacacactcttccaccctctgtcggcagggcccctgc

SEQ ID NO: 250227 - DNA, 244 bp, Homo sapiens; identical to SEQ ID NO: 207813
  chr2:10517932-10518176
  hypo

SEQ ID NO: 250228 - DNA, 160 bp, Homo sapiens
  chr2:10519035-10519195
  hypo
tggtcagtattcatttacagcgaggcggacagactcatgctgtaattgagtcatgctatgtatttgtttcaggtcccgctttttctttccacttaagacaatatcattcatttcctgtatcattaaaaatatttgcggtcgggtgcggtcgctcctacct

SEQ ID NO: 250229 - DNA, 40 bp, Homo sapiens
  chr2:10519315-10519355
  hypo
tgggccagtgcgtgattccgaagactacatttgaagtcca

SEQ ID NO: 250230 - DNA, 577 bp, Homo sapiens
  chr2:10525735-10526312
  hypo
acgatggcagaatccggtgtctgcttggccgcgtggtgtcactaataggatttgccgagccttttggatgtttgtggcgcgacggctgctgtgggaacccagaggctgctcatttgcagggaatgaataatttatttctgttttcagatgacttattccttcatctgcagccgagcccccacatgttctgtaggctcctgattaagtgatttcagcaggagaatttggcttaatcccccactgccctggacgcctggttccaggctgctgatttgtcggcctcgtgtcggggggtgtccggagcctctcctctctgggggcttttcttcctgctctgcctgtttgggaagcctctggccactgagcatgtgctggccttgggttttacggctgtctggcaattagaatattaatgtcgataacacagcaggacttgcgtgtgacaagctgagccacataacgtcacagtcgctcttgaacatctcggactttcacatgggccagccacaccccagcctaggttgctccctcacctcctcagggcctccctgatgtcggtttagacatgtgccttcca

SEQ ID NO: 250231 - DNA, 42 bp, Homo sapiens
  chr2:10536068-10536110
  hypo
taccagaggctgcaggttcacggaggaggagtcaccaatcca

SEQ ID NO: 250232 - DNA, 137 bp, Homo sapiens
  chr2:10536465-10536602
  hypo
tgaagggagcagggcacagtcgtgggtggcaggcctgggtgtgcctgattccactgaaccctcgtaacagccctgggtgcagagtgtagagtgctgggtgaggacggaggctgtgcgtctgtgatggccccaggtga

SEQ ID NO: 250233 - DNA, 167 bp, Homo sapiens
  chr2:10544959-10545126
  hypo
tcaggaccaggttttaatgccgctgcttgggtgtgccgagcgagaagggctcgccaggcagtgcagagattccaccgagcccaggccgcagcccccacctcccgccgggctgtgctcagtgtcaggaatcggctcccaagatggccgcctttcttgtaaagctgtgc

SEQ ID NO: 250234 - DNA, 57 bp, Homo sapiens
  chr2:10554979-10555036
  hypo
tggtccattctgcacgtgcgctgctgctgttacagcggcagacgggaggctgaacta

SEQ ID NO: 250235 - DNA, 78 bp, Homo sapiens
  chr2:10566539-10566617
  hypo
gttccttaataagcgaagtgtggggtgatttctaaaaggatttaaatggccctcatcagccacgtcctgctgagcttg

SEQ ID NO: 250236 - DNA, 500 bp, Homo sapiens
  chr2:10566935-10567435
  hypo
agtcagttctgagcgagcggcccctggacagttgcagagaaacacaggcttgtcgtgccgtttaagctttgcttgcaagagtggatgccccgcaatcgttcctgctctcccgggccccgggcctggggcatgcgttgcacctgcccagcccggtggctgcgcctccctcctccacctgaccaacgcgacattcctcccctcacgcctggcccggtcccttccagggcaactcccagggatgtggtgacatgcagggttcaagtgttcttggttccaggcacctcccggctcacggggagctcagaggtccatgccgaggagaccaggcaggacctcccgaggctgcgccccggccggcccatgcgttttgtgatcccaagtgactctgtgggaagggtggggacgaggcgtcgggagggtatacagggagcccctcccgtgcatggctgcccccccgttcattttctccaccacagccgcttgcacgtatagatactgtg

SEQ ID NO: 250237 - DNA, 201 bp, Homo sapiens
  chr2:10577316-10577517
  hypo
agggtagggaaacaccgaatgaatgctggggtcctctgacctggcttgaatgctgcctcactatctgcgtgacttgagttcatctctgagtttatgtcttcacgcgggaaacctattttacaatcctcgtaaagtcagtaatacattccaatatcaaaagcgcagtgtggagccagtccccactctcggcccaggcctctg

SEQ ID NO: 250238 - DNA, 101 bp, Homo sapiens
  chr2:10580372-10580473
  hypo
gaggatggggcttccgtctcacctgtcctcctacctgtgtgtgggtggacccactcattgttctctgagaatcagagcgagctatacgggattcgtgaact

SEQ ID NO: 250239 - DNA, 61 bp, Homo sapiens
  chr2:10582244-10582305
  hypo
actccagagtctgacggaaagtatttgtccaacgctgggttgattacgccggtgatctaag

SEQ ID NO: 250240 - DNA, 152 bp, Homo sapiens
  chr2:10600737-10600889
  hypo
ccagtcgttggagtcagccacgatgaacggcgtgcgggctgatgcgggagccacacaagcccgtatgcacagaaaagaatgacatccacagccgagacagcagcaatgagggcacatgggaaggatagggcgccacctggcccttcagagtc

SEQ ID NO: 250241 - DNA, 100 bp, Homo sapiens; identical to SEQ ID NO: 207820
  chr2:10601535-10601635
  hypo

SEQ ID NO: 250242 - DNA, 79 bp, Homo sapiens; identical to SEQ ID NO: 207821
  chr2:10615284-10615363
  hypo

SEQ ID NO: 250243 - DNA, 84 bp, Homo sapiens; identical to SEQ ID NO: 207822
  chr2:10615573-10615657
  hypo

SEQ ID NO: 250244 - DNA, 166 bp, Homo sapiens
  chr2:10616028-10616194
  hypo
tcgccgatctggtgcgcagttaacagacctacacccagcttgtgccggtctaacaagccacgccagaggggaagctgcccggggcctcccagggcccctccctgaaggaattgtactcacgttcccatcccagccttctgggctttggcctcgccacaccgactga

SEQ ID NO: 250245 - DNA, 556 bp, Homo sapiens
  chr2:10634192-10634748
  hypo
agagtcacggagaccgacccttggcacaataagactgtggactgaggccagtgcctgtggactgaggctggtgctgtctaagagtcaccctcccttccgtacatgtgtaccttaccaccacgcaatggccctccgtgagtggccgtgccccccgctcagcaatgacctagcaaggaaactgaggctcacagaggtgacgtgtctgttctaagttcgtgaatgccaacttagaattggtggagctgggaacagaacccaggtcttcggacctgatgttggccacatgggtgggccccacagtcaggacaagaggggtgggggctctgcagaaggatggggctgtgggtggacagccagggccttttccagacgtgggccatggaagtccagcagctggatcaaaaccccatgagctgagcctgcccctatggatcacaggtcacagacatgtcttcggaagccagtcggggaggccagggctggggcgggccaggaccaatccacaccagaggcacaacagcagttcccaaggaagagcagtcgagggcaagggcca

SEQ ID NO: 250246 - DNA, 43 bp, Homo sapiens
  chr2:10642586-10642629
  hypo
tttcatgcctgtcctcggttcagcccctcgcagcctacagaag

SEQ ID NO: 250247 - DNA, 108 bp, Homo sapiens
  chr2:10645140-10645248
  hypo
tcccaggagtgctcacggggcacccctggagtctccaacagtcagctgagatgggactgggggtcacacagggaagggccgccaggacgggagcgctgagctcctcca

SEQ ID NO: 250248 - DNA, 50 bp, Homo sapiens
  chr2:10654938-10654988
  hypo
aaagctccattgtgaaataccgaaacatcgatgtggaagaaaggaagaca

SEQ ID NO: 250249 - DNA, 306 bp, Homo sapiens; identical to SEQ ID NO: 207825
  chr2:10666472-10666778
  hypo

SEQ ID NO: 250250 - DNA, 67 bp, Homo sapiens
  chr2:10672799-10672866
  hypo
ggtgccagttaggccaagaccgaggggccggggagggcggtgcagcgaggggaggggagtgagagcc

SEQ ID NO: 250251 - DNA, 136 bp, Homo sapiens
  chr2:10673122-10673258
  hypo
gccttcacaggggctggtctcggaccccccactgcagagctcctggctctgcgggaccatcagctcccagctggttctgctcacccctgggtcctgctgcccgtctcagtcacacgcccacccttccctttgaaat

SEQ ID NO: 250252 - DNA, 461 bp, Homo sapiens
  chr2:10686607-10687068
  hypo
ctaaataaataaataaatgttgaataattatctattggtatcctccaaacttactagacgccaccacagcctttgctgttgcagccggtttgatctattgccccccgaatatgccttacacgtacctatctctggtgcttcgcttattccattttccccttttggaatgctcttcctttgttcttggaacaaagttccaaacaaagtccttgtaacaaattcccgagttcttggcatgaactcgagccctgttcatgccatattgtgcagctcaaccccaacttctttcaggaaatattcttgaatgatgcctttaccccataccccaggcgcaggctttctctctcctggggcccgcagatcttaccgtctgcactgagcgaagcctccctgctactgcttcccagccatgcggcgagctctttgaaggaagccgtggcggtatatttctcttgtacctc

SEQ ID NO: 250253 - DNA, 102 bp, Homo sapiens
  chr2:10687534-10687636
  hypo
tgggtgtgtcagtgcggggggcggggtggggggcatagtttttgaaagcgattggcatttccatcaggggacccagtaaagaagatccgctctcttccctgc

SEQ ID NO: 250254 - DNA, 117 bp, Homo sapiens; identical to SEQ ID NO: 207826
  chr2:10732499-10732616
  hypo

SEQ ID NO: 250255 - DNA, 205 bp, Homo sapiens; identical to SEQ ID NO: 207827
  chr2:10742496-10742701
  hypo

SEQ ID NO: 250256 - DNA, 524 bp, Homo sapiens
  chr2:10897430-10897954
  hypo
gcccggccagaggagactttatttggctgtttaaattgacatatggaaatgttcctaccccacctgtgatcttggctttgtatgtctatatggcttaataactccaccttattatattgcaggcttgaaaggaaaaatgaaatgtttaaagagtaggttatgcattgtttgctgtgtctgtgcttggcgtgatgcccgcatgtcccgggaaggtggaatctcggtctggttgtattggtacagtgatcaagttaccacgatttctcaagtaacaaccttgtaacttggtcacaatatccatatgacacagataaccaccatctcatcccctcccctctttgtcctgtcatccctgcctctcctgggcagcactgcatgccgcctggaagctgggaacgctttgaccttgtggagttcaaggtgaactcctgtctctttctgcatgtggtctgcttcttgttttgatcctgacacgatgtcccgactgcctgctctttgagcccgtctgttttatggacactgga

SEQ ID NO: 250257 - DNA, 127 bp, Homo sapiens
  chr2:10916395-10916522
  hypo
tgtgtgtgtgtgcgcgcgcacgtgcatgtatgagtgtgtgtgtggacctgtgtgtgcacagcaagtgagacacacctcagagccagacgctgctgggctccggctgagcctgcggggagggtgtcgc

SEQ ID NO: 250258 - DNA, 691 bp, Homo sapiens
  chr2:10917385-10918076
  hypo
ggtgctgtcctggtcggcctgcgatgggggtcctggctgagcccaagcaaggggagggagctcagggctgacccctctgccagagatcggctctgtgcttggaatatggaacccaaagaccttaacactgcccttctctctgccttcaccactccaggagcccggtgggcacctaccacatctctagtctagccagcacgcgagtcccgagggtgggcctgaattcctgagcttgctctcgcgtgcctttcaggcgatgagaatgatttatttgtttgtgatgcatgtttgctgaaagattaataaatcatttctgtgcctttagcaaacttcctgtgttgctcttaaaaagggatcatccaccttcccggaccacaaggttaaggtaaccccgctaggtaaccctgataggcctgctgcggggcagaccgacagagagagagagagtgagggcgagggtgaggtaagcaacgccccgggaaccccggggtccctggctcacatctcctcgccagctcaggcgccttctgggaaaatgaatccttgcatttttctgttctctaatatggcttttgaggtcttaaatttgaggagccggaatcatgccttcctcctaatctgcagggcctctttggagctgcccccgccagcagtgaagggtgcttgtcggccagggcgcctctccccgggc

SEQ ID NO: 250259 - DNA, 58 bp, Homo sapiens
  chr2:10920052-10920110
  hypo
tgtggctgcgtcccgcgtcacggagcactgcgcaccgcctgccgctctgactcgcggc

SEQ ID NO: 250260 - DNA, 148 bp, Homo sapiens
  chr2:10925012-10925160
  hypo
agtaaaccaggactgctgcccgcacagcttccctcccgggcactcacctcgccatccctgccgtcccaaggctctctctcaacgatggtagggaaagccccgcctcctacaggtgccgtggagccacgcccaaaagagagctccctta

SEQ ID NO: 250261 - DNA, 95 bp, Homo sapiens; identical to SEQ ID NO: 207829
  chr2:10926448-10926543
  hypo

SEQ ID NO: 250262 - DNA, 32 bp, Homo sapiens
  chr2:11030196-11030228
  hypo
aacaaatggccccacgccggaggctgggcaaa

SEQ ID NO: 250263 - DNA, 114 bp, Homo sapiens; identical to SEQ ID NO: 207830
  chr2:11053788-11053902
  hypo

SEQ ID NO: 250264 - DNA, 206 bp, Homo sapiens
  chr2:11105561-11105767
  hypo
ctacaaaaatcacgcggccagccagatggtgacgaggctgaaatagaagctcatagactgtgggatctacaagcgggagaggctgaccgtgcccaggagctgggtaagggcatctgccaaggtattttggaggaggtgaagaaggcgagtaacaataataactcatgtttataccaaggctgttctaagcacgtgacacttttaag

SEQ ID NO: 250265 - DNA, 241 bp, Homo sapiens
  chr2:11238183-11238424
  hypo
gcctgaaattaaaacgtctccatttttctttaaccaaatggtagttctaattatagcattcagactggcgtgcatgtttatttgctcatctctcgctttattaagagttagtgcattgtaccttaaaaatgggtgacaaattattacaatgtgttctgggctgtcgatgattagaacaggtggttaaggaggcttggggtgttatccatttctataattatgtcatcgtgttacatttaat

SEQ ID NO: 250266 - DNA, 139 bp, Homo sapiens
  chr2:11311987-11312126
  hypo
ctggcctcttttgcttttttaacaaatcgactcgtgactttctcacattttatctgcaaacagaatctatgtactttcatcagcgcggccagtaagtttgcacagctccagtgtctgtggaagacgagagactcaggaa

SEQ ID NO: 250267 - DNA, 104 bp, Homo sapiens
  chr2:11487872-11487976
  hypo
aagtgctgggattacaggggtgagtcacagagccgggcctcaacctggcctttaaaaagacgctacccgtttacattctcagcgtgagtagaagaaactgccca

SEQ ID NO: 250268 - DNA, 69 bp, Homo sapiens
  chr2:11489277-11489346
  hypo
tcaccaataagacacgtaacaacttttcccatctcgcttcacgctgccaggcaacgcaggctggcattg

SEQ ID NO: 250269 - DNA, 40 bp, Homo sapiens
  chr2:11536462-11536502
  hypo
ctacttggctatttcgtgcccctttcgtgactaacgcttt

SEQ ID NO: 250270 - DNA, 79 bp, Homo sapiens
  chr2:11702174-11702253
  hypo
atgtccaggcattgcgctcagtccttatcaaccaattcgatacatattaaacctctagtgtacgcgcagctgtgacaga

SEQ ID NO: 250271 - DNA, 250 bp, Homo sapiens
  chr2:11774323-11774573
  hypo
gacatcatgcactacgccctgctgggcctgcggaagtggtccagcaagacccgggccagcgaggtgcaagagcccttctcccgctgccacgtgcacaacttcatcatcctgaacgtggacctgacccagaacgtgcagtacaaccagaaccggtgagctcctgcacctggggcagaggcggcggcagccctgggggcgcagagtcctgagtgagggcagcctggggctgcagaggcgtcctggctgtgag

SEQ ID NO: 250272 - DNA, 213 bp, Homo sapiens
  chr2:11774874-11775087
  hypo
tggaccacggcctgcgtgagcctctcaaagagggtgggctttggagccagactgactgcgcctccaagaaccggggttctgctgcgtattagctttgcagcgcaggcaggccactcacctccaagccctattcttcttagctgtaaaaagcagctcacgtttttaccctgggaggttttttgttgctttctttttcaccgatgcgtgaggtcg

SEQ ID NO: 250273 - DNA, 145 bp, Homo sapiens
  chr2:11929296-11929441
  hypo
gcttaggatgttgccgtcggtcagccagttcaaacacttgagattcttgaaggtctaattggactttgttgagtctaggcttgctgcttcctgggtttgtgtgtgtgtgtgtgtgtgcctgtgcctgtgtgtcagtgtgtgctca

SEQ ID NO: 250274 - DNA, 298 bp, Homo sapiens
  chr2:11965001-11965299
  hypo
acctgggagcctggcgcgtcatcattggcctgacagcagagagaattgagaagcatttctcccctgccccaccccggggctgacatttctaagcaagataggaagggagcactttctaggctaggagttgggtgcatttgtaccgtgaaaagcattcctcagttgtggcttaatgccagttacgacgctgcctttccggcctgctccagcaagtagctactggttcacgtgcagtttggggctgtgaaacctaggcagaaggcggctgtctgagggctgtccccgcctaggacagggt

SEQ ID NO: 250275 - DNA, 260 bp, Homo sapiens; identical to SEQ ID NO: 207831
  chr2:12005882-12006142
  hypo

SEQ ID NO: 250276 - DNA, 157 bp, Homo sapiens
  chr2:12078414-12078571
  hypo
tgcacaaaacacgccgagccccaaagggaaaaatcacattgttgttaaggcatggaggccaaatcctgccagcttgtacgcatctagggctgcggctgacgtcagaggctgcagggtgtgtgcgagcgcagggagggttcgccgtgctgaggcatgc

SEQ ID NO: 250277 - DNA, 212 bp, Homo sapiens
  chr2:12103262-12103474
  hypo
gacccaaggaaagaatgtttcgcacatacctagcaaccagagcgaactcataaaacgttcattccaaggcaacaccattcatctttgcgtatctccctgtgactgctgccataaaacttcactctagagtagacgtccctacagctttatagggatgaaacttccagaactcttcacttaaaatgcacgtcgtttaaagattctcttctttt

SEQ ID NO: 250278 - DNA, 145 bp, Homo sapiens
  chr2:12145187-12145332
  hypo
attgcaaatgattctgtccacgtaattttccgtccattgtcccagaatgctccatgtcttttgtatgttacaatctaggtttctcggtggtggtagacgtgatggtagtgctattagtggtaacgatattgacaataataaaaca

SEQ ID NO: 250279 - DNA, 271 bp, Homo sapiens
  chr2:12245941-12246212
  hypo
ttttctggcagtcacggaagtgtttctatatttattatcattacaactctacagggcaggttttgctaaccggttttacagtgggaaacctatagctttagagatttaggcaaggtacacgtagaaaatgtcagagctggtggggtggagggtggaagtctgcctggttctgcctcgagggcttgtaccggctacatcccggcttcctccctggaagagccagcaagactgggatagaaaaatgttgtctccggctcggcgcggtagctca

SEQ ID NO: 250280 - DNA, 41 bp, Homo sapiens
  chr2:12297695-12297736
  hypo
ttacaggcatgagccactgcgcctggggtttattcagagtt

SEQ ID NO: 250281 - DNA, 147 bp, Homo sapiens
  chr2:12458692-12458839
  hypo
ttaaaaacaaagaccgtgaaaaaccaaagctataaaagtatgtgaatcatcaacccagaaatcatgcctcaaggcacgcctgacagcatgttcgttcccggatgcttttccttcacaaattatggaggctgccgacatccttctggg

SEQ ID NO: 250282 - DNA, 158 bp, Homo sapiens
  chr2:12630982-12631140
  hypo
ggcagggctaaacacgactgtacatttgggaagcctggaggcagaatgaggcaatggtaaaggccctgaaagataagtagatttctaataaataaagaagtgtaaaatgcattctgagcagaagccgtagatgaacaaaagcttagaggcattgtgtt

SEQ ID NO: 250283 - DNA, 38 bp, Homo sapiens
  chr2:12631200-12631238
  hypo
caaaaacactcaaactcgcaggaacagagcagaatggt

SEQ ID NO: 250284 - DNA, 96 bp, Homo sapiens
  chr2:14711510-14711606
  hypo
gaggaaggacaaaacatcagcgccagatgaatctcaacatggtcagaattaagccatctacggccgggagcagtggctcacacctataatcccagc

SEQ ID NO: 250285 - DNA, 42 bp, Homo sapiens
  chr2:14901341-14901383
  hypo
gggctcttgtgagaatgtggcgggttaatgtgcactgtggaa

SEQ ID NO: 250286 - DNA, 38 bp, Homo sapiens
  chr2:14961050-14961088
  hypo
tttcttttcttttttttttccgagacggagtcttgctc

SEQ ID NO: 250287 - DNA, 37 bp, Homo sapiens; identical to SEQ ID NO: 207835
  chr2:14961328-14961365
  hypo

SEQ ID NO: 250288 - DNA, 179 bp, Homo sapiens
  chr2:15032512-15032691
  hypo
ggcacaatgggctcacagggcgacatagatcaagaccacgtaggacacctgagttctcttccctgtccgacaactaattttctgcatactttttaaatcgcttctcttccaaggaaatccatttcctcttctatgcaatgatgtgtttatattataccgactctatggctgctatttaa

SEQ ID NO: 250289 - DNA, 87 bp, Homo sapiens
  chr2:15084089-15084176
  hypo
atgaggatgattgctccattcgttcaaccaaataaaaaaaactactaatccctgccaggtgcggtggctcacgcctgtaatcccagc

SEQ ID NO: 250290 - DNA, 453 bp, Homo sapiens; identical to SEQ ID NO: 207836
  chr2:15307076-15307529
  hypo

SEQ ID NO: 250291 - DNA, 90 bp, Homo sapiens; identical to SEQ ID NO: 207837
  chr2:15474600-15474690
  hypo

SEQ ID NO: 250292 - DNA, 100 bp, Homo sapiens
  chr2:15783082-15783182
  hypo
aacgtctttctgcccgtcccccgcctcccgactctcacctccttggaggcttacggggctctgtataagtttcccacaaaaaatccgtgctgctgggtgg

SEQ ID NO: 250293 - DNA, 45 bp, Homo sapiens
  chr2:15830329-15830374
  hypo
gagtgaccagcctgggctggcgcagaggtgactcatgcctgtaat

SEQ ID NO: 250294 - DNA, 74 bp, Homo sapiens
  chr2:15950473-15950547
  hypo
cctcaaaacacatgcgtggggcctcggtggcgaggacgcatcagagacagagcaagacgcgaagtctgccccta

SEQ ID NO: 250295 - DNA, 312 bp, Homo sapiens
  chr2:15982989-15983301
  hypo
ttgtgaagccacagggcaggcgtgccaccacactgaccctgcagaggccggggacaaagcagtgcggggccgcactgctgctgaggccggccccagcaaacctgattatggggcctctgccacggtctgcccgcgtctttcagagagagcagtctttattcccccaggcaggtccctggacagacaggtctaaattgaatcaggccctggtccatggcacagagcgggctattcactggccctaccgtcccctagcaaaacaggcccccggccatatggttgtgcgggtaaattgggcggacgtgtggctgg

SEQ ID NO: 250296 - DNA, 42 bp, Homo sapiens
  chr2:16105582-16105624
  hypo
aggtgggtagaggctattcccgttttgggacaggctggtgct

SEQ ID NO: 250297 - DNA, 434 bp, Homo sapiens
  chr2:16124558-16124992
  hypo
ccccgtctccatggcgacgggagcagctgctctgttctgggccttggctgggctgtgcggggcggcctgcccgcctgtctgcctgcccgcccgcctgcccggccgtgggagctgccagcgccttgccctcccgctgcccacaggccctgccaggctgggcgcaagaaagcgtgtttactaacaccatccacacggctccctgggcatggtggctctgcccagaagatgtcaggccgagggcaccgggaggtgggcctggagccaggctgtctgcagcccggagagacagtcccggccggctgctgccctggcctgccagtctctgggcgagcgcaggcactgggggttaagaggcccccatgaggccctttctgaagtgaacgttcccttcctggaatgccttgccagagcctctggaacgttccagccccagc

SEQ ID NO: 250298 - DNA, 42 bp, Homo sapiens; identical to SEQ ID NO: 207841
  chr2:16274079-16274121
  hypo

SEQ ID NO: 250299 - DNA, 144 bp, Homo sapiens
  chr2:16826647-16826791
  hypo
gcttccttatataataaaaacgaagcggatatgcaccttatatagccgctgtggagtttaaatgagctcctgcaatgacacggctagtgcagtatctgatatgtaatagacattttaaaatgcggagttagaattgaatgcctg

SEQ ID NO: 250300 - DNA, 39 bp, Homo sapiens
  chr2:17090481-17090520
  hypo
aggctgggtgcagtggctcacgcctgtaatctcagcact

SEQ ID NO: 250301 - DNA, 98 bp, Homo sapiens
  chr2:17830610-17830708
  hypo
gaacctacctcgtcgccccgattccatcccctcccgacacctgactgcgcgtgttctcctttgcagttctttccttatggagacgcctccaagtttgc

SEQ ID NO: 250302 - DNA, 254 bp, Homo sapiens
  chr2:17998149-17998403
  hypo
ctgtccagcggaggcggaaagccagcgagagggagaagctcaggatgaggaccttggcagatgccctgcacaccctccggaattacctgccacctgtctacagccagagaggccagcctctcaccaagatccagacactcaagtacaccatcaagtacatcggggaactcacagacctccttaaccgcggcagagagcccagagcccagagcgcgtgagctccatccggggaaactgaccggttccagcctcct

SEQ ID NO: 250303 - DNA, 284 bp, Homo sapiens
  chr2:18112741-18113025
  hypo
tggagaagtttgacacactgcgatttggtcagctccggaagaaaatctggattagaatggagaatccagcgtactgcctgtccgctaagcttatcgctatctcctccttgagcgtggtgctggcctccatcgtggccatgtgcgttcacagcatgtcggagttccagaatgaggatggagaagtggatgatccggtgctggaaggagtggagatcgcgtgcattgcctggttcaccggggagcttgccgtccggctggctgccgctccttgtcaaaagaaattc

SEQ ID NO: 250304 - DNA, 63 bp, Homo sapiens
  chr2:20001578-20001641
  hypo
tgagctgccttagtttctcccgaggtcgttcacctaggggacgccaaaagcaaggatgtttca

SEQ ID NO: 250305 - DNA, 169 bp, Homo sapiens; identical to SEQ ID NO: 207844
  chr2:20111757-20111926
  hypo

SEQ ID NO: 250306 - DNA, 39 bp, Homo sapiens
  chr2:20253274-20253313
  hypo
taagatcaggggagccgggcgcggtggctcacgcctgta

SEQ ID NO: 250307 - DNA, 137 bp, Homo sapiens
  chr2:20456198-20456335
  hypo
tgtatgttgaaacaacgtagtgatgctgaacttgctgtatttaaactgtcttcactgtgtaaatcatccgctaatatttatcgggcggtaactaacatgactaattcagaattacacacttccgccttacttagtac

SEQ ID NO: 250308 - DNA, 81 bp, Homo sapiens
  chr2:20521041-20521122
  hypo
gtctcaaaaaaagaaaaaagaaaaagaaaaaacgcaaattgtttacctgggctgggaagcgggggggaggggagtctgtaa

SEQ ID NO: 250309 - DNA, 120 bp, Homo sapiens
  chr2:20544755-20544875
  hypo
aaaaaaaaaagaaaagaagattccgctttacctcttgtggaaagcttttcctgtccctgcagtctctacctacatgtgtccacagcacttttttcttttttttttttttgcggcggggcc

SEQ ID NO: 250310 - DNA, 276 bp, Homo sapiens; identical to SEQ ID NO: 207847
  chr2:20574694-20574970
  hypo

SEQ ID NO: 250311 - DNA, 163 bp, Homo sapiens; identical to SEQ ID NO: 207848
  chr2:20594843-20595006
  hypo

SEQ ID NO: 250312 - DNA, 120 bp, Homo sapiens
  chr2:20642226-20642346
  hypo
ccaccgctcccggccaacttttccatttttaaagctcattgcatagagatggaagattgacaattttcctagagacattaaactactcctaaattaggaaatattttttttttttttttt

SEQ ID NO: 250313 - DNA, 139 bp, Homo sapiens; identical to SEQ ID NO: 207852
  chr2:20666559-20666698
  hypo

SEQ ID NO: 250314 - DNA, 48 bp, Homo sapiens
  chr2:20705785-20705833
  hypo
ggataaattttcaccgattatcgcccagaacagcggtggatgaatctg

SEQ ID NO: 250315 - DNA, 533 bp, Homo sapiens
  chr2:20841042-20841575
  hypo
gtgccaggtacgcccgcctgctgcccctctgcctgtctcccagcctcaggctccagtccttaacacgcctggccgatagcagattcaataaaaacatcttagtggcccagaggaaagatgcaataacggtgccattctggacactgtcacaggtccagttaacaagatttgatacagggacccctgcccagcctgcacgtgatcagggccactgtgttcattcccagctttctgcatatcaggagggtgatctcaccggctggcaggtcatcttcctgcaacaccgtgaatcatctgttctcagcaccaacctcattctcccgtgaaccagtgtggccttcggcgggccagccaatgcaagcagtggagacagatatttccaaggcttgttctctgccctgcgtcaggcaggacctctctgcacgcaggcacccgagtcaagcaggccaggactcttgctgtcatcagaaggcagccttgagcaccatctgactcagagagggcagcactcagcttcccgtggggccagcggc

SEQ ID NO: 250316 - DNA, 64 bp, Homo sapiens
  chr2:20894621-20894685
  hypo
ccacatacaagccacgaggccatcaagtgactggcttgtctctttctcacgtgagactgcactg

SEQ ID NO: 250317 - DNA, 162 bp, Homo sapiens
  chr2:20965392-20965554
  hypo
cattgggctgcattcagtggcggatgggctgggctgagatgggctggaagacccgagaaggtttcactcaggcctggtgcctcatgatcctcctacgtagctagcttgggcttctctcagcctcgtggtctcagggcagtcggctttcttacacagcagctg

SEQ ID NO: 250318 - DNA, 101 bp, Homo sapiens
  chr2:21079879-21079980
  hypo
gggacccaatcctttccacccgggaacctgtctgcctcctgccatcaatacgccctccatggtgcccaggctgttcctgcggaggggtgcctacaggccca

SEQ ID NO: 250319 - DNA, 130 bp, Homo sapiens
  chr2:21346724-21346854
  hypo
gcgccaggcgggacgctttgcgcagctgcaggcctcccccgccgcattcggccttcaagcccgcacatgctccctggggcccctgcgggattacgagggggtgggaacagggcccgagtctcccgccatc

SEQ ID NO: 250320 - DNA, 445 bp, Homo sapiens
  chr2:23546894-23547339
  hypo
ggacccagatctgggacagtcgaggtggccaccagtcaccaggcgttctcaggattctctttcagtttgagaggccacccttatttggataaacatgcgtaccgaattcaagaggcactaataccacggtgcgatgaagtgaaaaggcaaacacgcggagtgccagatctcccaacacaaacatggtcccaagcctggcgcacctggattgggcttgggatttttaagccaacaaatggggtgggagacagggaaagagagggccgggaagaaaaaccacaggctcccagaatccaaaggaaagtggcatcctcacccgatgagcagggtctggcacagggctgagcacatgacagccagtaagtctctgctgaaggatgcctgaaatctgcgcggttctaccaccgaaactaatcccgactatgtctcccgcctcctccctaca

SEQ ID NO: 250321 - DNA, 72 bp, Homo sapiens
  chr2:23573445-23573517
  hypo
ctgtcagagcttccagcctccgggtaaccatggtaatcggcagcattaaccgcagcagtgacaggagcctca

SEQ ID NO: 250322 - DNA, 109 bp, Homo sapiens
  chr2:23650984-23651093
  hypo
gacagagcacctgccgcatggcctcatccacgacagctgccatccagagagaacagagtttggaccgtgtccgcagaaggccttggagtgttgacgtgggcaggtctag

SEQ ID NO: 250323 - DNA, 79 bp, Homo sapiens
  chr2:23679398-23679477
  hypo
ctctagtaaggccacgtgatgcgtgcgtctagcacccacgagtgaggagccggaaacattctcccgcgccagctctgcg

SEQ ID NO: 250324 - DNA, 434 bp, Homo sapiens
  chr2:23746911-23747345
  hypo
atgccttcctcttccgaaggccttccccatctagggttttttctccccatgacacctcagtgtcgtaggtagcggagatgcaagtgttcccatttctcggaaaaggaagccgatgctggagcgggggatgacttgctcagtgctgtgctagggagtggcagagccacccaggcccaagtgcccggctcctcatccacatctctttctattacaccaaacccagagcgggcaggcagggcagaagagactacagaagcacaggcgcctgctgggccggccttggctcggaggggctcaggaagacccaggaagtagcaggccaggaaatacctttaggtcctgccccgggctcccgggaggcgtcggcaggagaagcagggcagcagctgtgagtcacggtgatggatgttcatggctcacgggtgggcggctcg

SEQ ID NO: 250325 - DNA, 355 bp, Homo sapiens; identical to SEQ ID NO: 207855
  chr2:23785004-23785359
  hypo

SEQ ID NO: 250326 - DNA, 214 bp, Homo sapiens; identical to SEQ ID NO: 207856
  chr2:23793022-23793236
  hypo

SEQ ID NO: 250327 - DNA, 76 bp, Homo sapiens
  chr2:23795841-23795917
  hypo
gccaccgcgcccggcccaaaaacagtaatttctgtgggtgccgtgatgaggatgatgaagacgtaaccccgtggtg

SEQ ID NO: 250328 - DNA, 150 bp, Homo sapiens
  chr2:23798774-23798924
  hypo
agcaatggggagcacgtttgtggtcaattcctctagcacccgcaagagctgggctgaaagtgaggcctcagctatactgcgtcaccatcgcctcttccattagaaatatgctgaggggggccgcgcccagtggctcacgcctggagtccc

SEQ ID NO: 250329 - DNA, 206 bp, Homo sapiens
  chr2:23807140-23807346
  hypo
cataccggggcaggcggcggtgctgctcaaaggatatttattccttaaccgcccagggactgggggcagagctgcgtaccctgctcctggaaacaggcaccctcctcccagcttcgccctctggggattagaatggcagaaactctgggactagggaggatccaaatttggaaagtattggctctgcccagcggtgttcatgctcg

SEQ ID NO: 250330 - DNA, 175 bp, Homo sapiens
  chr2:23841357-23841532
  hypo
ggggtttctcctgaccgcctttgagttgggacattggtcttttgctgcctttggactggaactgaaacatccgctcttcttgggtctcaagcctgcaggcttttggactggaactataccagttcccgctcctgggtctccagcttgctaactgcagatcgcgggacttctcggc

SEQ ID NO: 250331 - DNA, 210 bp, Homo sapiens; identical to SEQ ID NO: 207857
  chr2:23842953-23843163
  hypo

SEQ ID NO: 250332 - DNA, 179 bp, Homo sapiens
  chr2:23850377-23850556
  hypo
gacccacactcaggcgctgacttgtttgggtgagtcttgaagtccccacaataaaactgtagtagctccttcggtgcaccttgcgtctgaggagccgcctccgaggccgtgtgtgctgccctgtttgtctctttgtctcgctgcccctcggtgtgactctgccgcgtcccctctcttgt

SEQ ID NO: 250333 - DNA, 35 bp, Homo sapiens
  chr2:23863678-23863713
  hypo
gggcgatgcaggcctcgtaccgtggtctatgtgac

SEQ ID NO: 250334 - DNA, 65 bp, Homo sapiens
  chr2:23865088-23865153
  hypo
tggacgcaggtgtctcgttcccctctgtgacctagcacccagtgcagggccggggatggtcagtg

SEQ ID NO: 250335 - DNA, 139 bp, Homo sapiens
  chr2:23893204-23893343
  hypo
gggacctcatgagaccaggccgggtgcctcctcacaagctggggcacgactggactcgccgaccggtgtgatgggcaggggggtgtgctgggcaccgtgcctgctacacaggggcaccgaagcagtgttccacccttgg

SEQ ID NO: 250336 - DNA, 149 bp, Homo sapiens
  chr2:23918665-23918814
  hypo
ccgaacccggccgcgcctctctgcaggtatgaaggggcacgccccgaacctcccaagaagcagtgtcttgggctcagtggttccagtgaggtgccaggcacagatgccgacagtcttagagtgtgtcccaagggcgcccatccatgtcc

SEQ ID NO: 250337 - DNA, 174 bp, Homo sapiens; identical to SEQ ID NO: 207859
  chr2:24060295-24060469
  hypo

SEQ ID NO: 250338 - DNA, 98 bp, Homo sapiens
  chr2:24160944-24161042
  hypo
tgttatgtggcgcacgactataaatgcaaaaatattcatgcttaaggatttgaagactttatatataaagtgagtcatcgcaccagtattgttaagat

SEQ ID NO: 250339 - DNA, 97 bp, Homo sapiens; identical to SEQ ID NO: 207860
  chr2:24240164-24240261
  hypo

SEQ ID NO: 250340 - DNA, 39 bp, Homo sapiens; identical to SEQ ID NO: 207861
  chr2:24279835-24279874
  hypo

SEQ ID NO: 250341 - DNA, 34 bp, Homo sapiens
  chr2:24307975-24308009
  hypo
tccaggcatggccaggcttttggcacatttatgt

SEQ ID NO: 250342 - DNA, 38 bp, Homo sapiens
  chr2:24318006-24318044
  hypo
acagttaaaagtttaacaaccggaacagctccagtctg

SEQ ID NO: 250343 - DNA, 214 bp, Homo sapiens; identical to SEQ ID NO: 207862
  chr2:24443622-24443836
  hypo

SEQ ID NO: 250344 - DNA, 44 bp, Homo sapiens
  chr2:24492774-24492818
  hypo
ctcgggcacagctccggtactactaatagcggcaatggcaagag

SEQ ID NO: 250345 - DNA, 328 bp, Homo sapiens
  chr2:24584025-24584353
  hypo
tagtcacactccgccgagcagtaggaagactctgtccccatagagcatagcacgacgaagctaaactttcctccccacccctcgccaagggacaggcgaagctcctactcagaatttgtctcttttctcccctcccggttcctggtctcctcacaaaagaccagacttcaactcaagccgccaccgtatcccaaaaccccaaaggtttgcccttgacaagaagcttcttcaaggggaaaggctttcttttgattggggtgagggaggagttagtgtttcctaatgaacgtaaccaaatgtcggcctggcacagtggctcacgcttgta

SEQ ID NO: 250346 - DNA, 40 bp, Homo sapiens
  chr2:24678878-24678918
  hypo
gattacaggcttgagctactgcgcccggccgacaaaacac

SEQ ID NO: 250347 - DNA, 36 bp, Homo sapiens; identical to SEQ ID NO: 207864
  chr2:24763333-24763369
  hypo

SEQ ID NO: 250348 - DNA, 43 bp, Homo sapiens
  chr2:24844611-24844654
  hypo
gtgctgggattacaggcatgcgccaccacgcccagcctttcag

SEQ ID NO: 250349 - DNA, 155 bp, Homo sapiens
  chr2:25034777-25034932
  hypo
ttaatgtgattactgatctatttggatctcaatctaccatagtattttattgtcttatttgtcacgtatagtcaacattcctttagtgttagacacatatttacccttttcagtgctcttcattttcacatttccatctgcgattattttctttc

SEQ ID NO: 250350 - DNA, 516 bp, Homo sapiens; identical to SEQ ID NO: 207865
  chr2:25044265-25044781
  hypo

SEQ ID NO: 250351 - DNA, 205 bp, Homo sapiens; identical to SEQ ID NO: 207866
  chr2:25047257-25047462
  hypo

SEQ ID NO: 250352 - DNA, 348 bp, Homo sapiens
  chr2:25057323-25057671
  hypo
actcgtggccctccccggcccctccctcaccaggggtcgatgagtatctcgaccagggccgtgcagagcaggacgacgcaggagcagctgaaggcagccccactctgcttctccttctccaccgagtagcgggtttccatctcggggtccatgaaccgcatggacaagaggaaggtgtttctcttctttactctgcagtgggaacaagccccatgaatcccaaatgccacatctgccttggcctagcaggggggccgtatttgggatgctcagtttcctgaatcccttgtcagggcccgggaggagtggtgggcctggacgcttccgggtggcgcttacacttgggcg

SEQ ID NO: 250353 - DNA, 275 bp, Homo sapiens; identical to SEQ ID NO: 207868
  chr2:25075399-25075674
  hypo

SEQ ID NO: 250354 - DNA, 38 bp, Homo sapiens
  chr2:25141802-25141840
  hypo
ggctgagtactcggccgagtattcgggctcggagaagc

SEQ ID NO: 250355 - DNA, 59 bp, Homo sapiens; identical to SEQ ID NO: 207870
  chr2:25369951-25370010
  hypo

SEQ ID NO: 250356 - DNA, 32 bp, Homo sapiens
  chr2:25374806-25374838
  hypo
aggagcgtgagcggcggcggcaggtggtggag

SEQ ID NO: 250357 - DNA, 120 bp, Homo sapiens; identical to SEQ ID NO: 198121
  chr2:25440006-25440126
  hypo

SEQ ID NO: 250358 - DNA, 188 bp, Homo sapiens
  chr2:25533430-25533618
  hypo
acagctctgcactccgcctccctgatcctgggctccgggattattctcctgtgggagggtcttggctactctcatttttctttccgttctatccgtaaaatatttcccaagcacccactctgtgctattccaggtccgggggattcacatggaagaaaagggccgtgaccctgcgctccaggctagca

SEQ ID NO: 250359 - DNA, 100 bp, Homo sapiens
  chr2:25535161-25535261
  hypo
gcagcctaggggcccgcaggtatccaggactatcagttcttttcccatggattcagaagggaggagcctgatcggtcgccccgggcgtcctgcccagtgg

SEQ ID NO: 250360 - DNA, 161 bp, Homo sapiens
  chr2:25536307-25536468
  hypo
ggagggtgggcccccgcggcctcgtgtctgccgtgccccaccccagaacttgtctttggtcccctagaagctactgaacaccttaaggaaacagaggcagctgagagagaaagtgattcacgtgaaggcccacggctagtaagaggcgggtccgagaagga

SEQ ID NO: 250361 - DNA, 180 bp, Homo sapiens; identical to SEQ ID NO: 207887
  chr2:25536757-25536937
  hypo

SEQ ID NO: 250362 - DNA, 84 bp, Homo sapiens
  chr2:25551561-25551645
  hypo
gcggtgcctagagcgaccccccacaatccccattctaggggtcgcttggcagagcccccaaggcactgcgtcagtggaaaggct

SEQ ID NO: 250363 - DNA, 70 bp, Homo sapiens
  chr2:25586741-25586811
  hypo
caagcctgagcacccgtgccaggcctggggagatcctcagccacctggcaccgggcgtggggcttgggcc

SEQ ID NO: 250364 - DNA, 119 bp, Homo sapiens
  chr2:25623182-25623301
  hypo
caagatggagcaccgcactgtgcaaatgcacctcgtctcaaaagcacagatgggctttatgttcagagaggcaggcccttctccatggagactgctgaacactccgctcaacgcgaacc

SEQ ID NO: 250365 - DNA, 89 bp, Homo sapiens; identical to SEQ ID NO: 207888
  chr2:25627711-25627800
  hypo

SEQ ID NO: 250366 - DNA, 129 bp, Homo sapiens
  chr2:25656662-25656791
  hypo
tgaggcaaggtcttccttggcggtcaaaagccacctagtatccaaggaaaatgagaatcagatacgcacgtgataatcctggactctggaagtgggctcagcctctgcgttcttacctgtttttgtttt

SEQ ID NO: 250367 - DNA, 209 bp, Homo sapiens
  chr2:25766960-25767169
  hypo
aagaaacaggcacccgcagcccagcgtgggggatgtggagtaccaccctcagggctcgcgggttgggtcatgaaggtgagtcaggggtggggacacggtgtccaactgagggacagattccaaagtgggcagcaggcgactcactgcaatggtttcatgtgtgctcctgtgccagggctgagacttgttttcctcggataaccatgaac

SEQ ID NO: 250368 - DNA, 44 bp, Homo sapiens
  chr2:25924790-25924834
  hypo
ggctccccagtggcccggcagaataatgacggcttctgtggcaa

SEQ ID NO: 250369 - DNA, 40 bp, Homo sapiens; identical to SEQ ID NO: 207889
  chr2:25980217-25980257
  hypo

SEQ ID NO: 250370 - DNA, 104 bp, Homo sapiens; identical to SEQ ID NO: 207890
  chr2:26027551-26027655
  hypo

SEQ ID NO: 250371 - DNA, 99 bp, Homo sapiens; identical to SEQ ID NO: 207891
  chr2:26153169-26153268
  hypo

SEQ ID NO: 250372 - DNA, 249 bp, Homo sapiens
  chr2:26204216-26204465
  hypo
ctccttgacattcttggtgacgaaggaggagaggtccttgatgtagacgccagtctcggggttctctttcagctctagcctcttgcccggctccttggagagcaggtctcgaatctcttcctggtagatctccaaataggaggcccggaccaggtactgttggttctgggagcgggagatgtgggtgaagatgtgctcaaaggcattcgggatgaccccgcgcagctcgggctccacccaggtcccctg

SEQ ID NO: 250373 - DNA, 115 bp, Homo sapiens
  chr2:26217601-26217716
  hypo
tcctgaagtggattaggtgccgcagttgctgctcgtgttgaatccagaaccgtagccagacataggactggaggacgagcgaaagatgctgaccgagtctggagatcctaaggag

SEQ ID NO: 250374 - DNA, 37 bp, Homo sapiens
  chr2:26320144-26320181
  hypo
ttctttgtttgtttttgagacggagtctcactctgtc

SEQ ID NO: 250375 - DNA, 163 bp, Homo sapiens
  chr2:26362293-26362456
  hypo
gggtttcaataagaccgggctaaaatggcagagggaaatgcagggttgaaggcaaaggtagtgtgtgaatgggggcgcggtgtatttctggtgagcctgctaggtgcttttttggcactgctctaggtactttgggttaggtcttcaacgtccttgtgaatta

SEQ ID NO: 250376 - DNA, 100 bp, Homo sapiens
  chr2:26372940-26373040
  hypo
atggagcatacggacaccgcccgtttccagagaaatcatggccgcatcagtgaaatccttagtgacagtgtggtgccagacattccgtccgctgtcacaa

SEQ ID NO: 250377 - DNA, 31 bp, Homo sapiens
  chr2:26405760-26405791
  hypo
tgaaggctcttgggacgcaggctagactccc

SEQ ID NO: 250378 - DNA, 171 bp, Homo sapiens; identical to SEQ ID NO: 207893
  chr2:26524653-26524824
  hypo

SEQ ID NO: 250379 - DNA, 200 bp, Homo sapiens
  chr2:26525985-26526185
  hypo
cttatagactttaccgagttgccttgagcaggaggttaccagtatatgctagtgtttgtttgcacctactcggggtgggttgaggccttccccaccggaactaaaaagacacaagaggtgacaaaggtgctactgaaagacatcataccaaggtttgggtcgcctctaaccctaggatcagacgacggtcctgcatttgt

SEQ ID NO: 250380 - DNA, 94 bp, Homo sapiens
  chr2:26527933-26528027
  hypo
gaaaagtactgtatcgcctgagtaaaaaaaaaaaaaaaagctttcacagaggcagtaggagaaacaacctgcctagggcaacagtattatgatg

SEQ ID NO: 250381 - DNA, 33 bp, Homo sapiens
  chr2:26528087-26528120
  hypo
accctttctctcggttctctactctaagccact

SEQ ID NO: 250382 - DNA, 59 bp, Homo sapiens
  chr2:26528393-26528452
  hypo
aagataataacggccgagctgtcatagaaatcacagctaaaatgcgcaagttagcccat

SEQ ID NO: 250383 - DNA, 175 bp, Homo sapiens; identical to SEQ ID NO: 207894
  chr2:26534837-26535012
  hypo

SEQ ID NO: 250384 - DNA, 193 bp, Homo sapiens
  chr2:26535371-26535564
  hypo
ttcccaggcataaacggtgtgtaatatcattgccctttgttacacttttggctgcagctcatgggtcaccaatggatgcccatacagagagccgatttaggtgagcccagcaaagccaagcatacttcagcgtctccatagaaacttcctgtctgtatcatagccacacgcctgcatgcgcacacacgcctcg

SEQ ID NO: 250385 - DNA, 112 bp, Homo sapiens; identical to SEQ ID NO: 207895
  chr2:26541946-26542058
  hypo

SEQ ID NO: 250386 - DNA, 43 bp, Homo sapiens
  chr2:26566584-26566627
  hypo
ataggcgtgagccacggcgcccggcccaaataccctctttttg

SEQ ID NO: 250387 - DNA, 63 bp, Homo sapiens
  chr2:26688524-26688587
  hypo
ccatgccccacatacgtggagtaggtctgggcgatgccgcaggtggcgcggtgcttgctgtag

SEQ ID NO: 250388 - DNA, 131 bp, Homo sapiens; identical to SEQ ID NO: 207896
  chr2:26706036-26706167
  hypo

SEQ ID NO: 250389 - DNA, 92 bp, Homo sapiens
  chr2:26788281-26788373
  hypo
caataacccagatgaggaatgagcagcttgcccaaagtcattcagcaagttgccgagcctcggctttgtgacttcaacgccccaactcaccc

SEQ ID NO: 250390 - DNA, 203 bp, Homo sapiens
  chr2:26800292-26800495
  hypo
ctgcccaggtgcagcgaggcatggactgcaggtgcctgtggtcagtcctgtgcactaacaacctgtcatctcttccttgattgaaccatagatggtccagcagcatcggaagtactatcaagacaagacgggcacagtgcctcgagtcccctactttgcgatgcccgtgagggagccggaacggtaccccctccccaccgtcc

SEQ ID NO: 250391 - DNA, 94 bp, Homo sapiens; identical to SEQ ID NO: 207897
  chr2:26832824-26832918
  hypo

SEQ ID NO: 250392 - DNA, 187 bp, Homo sapiens
  chr2:26965249-26965436
  hypo
tcatgccagtggcctcggtggccccagcagccctgccttcagggcagggagcaggagccgtgacgggcaggagtgtgctgaggctgggatgggccagtaccacctgtccacctggctccctcaccacttaacagcttaggagcctcggaaggcccacaacccacccctaggacgccacctcccatgg

SEQ ID NO: 250393 - DNA, 461 bp, Homo sapiens
  chr2:26986220-26986681
  hypo
ccatgcggaaggcacggatttttggagactggagaacccaagcgcaaatccctaccccactgctcaccagcaggttcttaagcaaatcactctgcttcgctgaatttactgtcctcagctataaaatggtgtcctcggcaactggagctagatgccttcgccactttgctgaaagatatgaactgtgcccaaggtgggcggtatcagataggagccccgaagtggaaacgtccagcgtgggaatctcctctctacagggtccccaaggaactcccggcaggcccacttcagggctcctttctgacaccgcccagctcaacctctcaaaacgattcacaaaatgctgtaatagccacgatgcaccctcactgcactgtcccatccgccccttttacaaataggaagacccaaagataaaaataagaaaccaaggccaggcgcggtggttcacgcctgtaatc

SEQ ID NO: 250394 - DNA, 120 bp, Homo sapiens; identical to SEQ ID NO: 207899
  chr2:27007230-27007350
  hypo

SEQ ID NO: 250395 - DNA, 120 bp, Homo sapiens
  chr2:27007590-27007710
  hypo
ttacaggcgtgagccaccacgctcggcaagatggagtttcgccatgttggccaggttggactcgaactcgaactcagtggttccgaacaacttggcctcccaaagcgctgggattacagg

SEQ ID NO: 250396 - DNA, 42 bp, Homo sapiens
  chr2:27224548-27224590
  hypo
aatgcatatatacacacatacgtacatacatgtatacataca

SEQ ID NO: 250397 - DNA, 247 bp, Homo sapiens
  chr2:27303537-27303784
  hypo
cagggaccagggtcactgaccgtacagggaggaataaagaggcctccttctgcctctgccaggtaccgccgcttcctccgccctcgctaccgtgtggcctacaagacagtgaccgacatggagtggaggtgctgtcagggttatgggggcgatgactgtgctgagagtcccgctccagcgctggggcctgcgtcttccacaccacggcccctggcccagcctgcccgccccaacctctctggctcca

SEQ ID NO: 250398 - DNA, 97 bp, Homo sapiens
  chr2:27354486-27354583
  hypo
ttctggtcattaaacgtggggtggtgcctgcctgccctgccccaatgactcacgccgtgagggcaacagatgcagctggcaacgactgtccacagcc

SEQ ID NO: 250399 - DNA, 155 bp, Homo sapiens
  chr2:27433170-27433325
  hypo
acaccctacattgatccaaacgctatggtctcgcatctctccagaaagagggcggccaaaagcaagagctagctgttgtttcactacaactataacatgccaaggcacaaacagcagattgtgggacccccccccctttttttttggagacggag

SEQ ID NO: 250400 - DNA, 141 bp, Homo sapiens
  chr2:27498159-27498300
  hypo
ggcctggcagcaacgctcctacgctgccttgggccgcaggcctgctaagccctccgctctcgcttccctgcgcgcgaaataagtcccagggccaatgtggcctccccacccagtgcttccgggggcgccaaaaaacgacct

SEQ ID NO: 250401 - DNA, 71 bp, Homo sapiens
  chr2:27538034-27538105
  hypo
ctcagaaaataaagggaaaacgtcaaatgtactgtcccaaacagcaggacgactctgagaaagggtctgaa

SEQ ID NO: 250402 - DNA, 300 bp, Homo sapiens
  chr2:27601407-27601707
  hypo
cggaagccacaggtcgggcagggaggagtggggggccctgcgtgggtacgctgatgccgcctcaggttgcccaggctgctgcaggcaaaggggcagtggggacagcggtagggcttctcgccagtgtgggtgcgggtatgtcgtgtcaggttgacgagctgggctgaggcgtaggggcagcggccacagcggaacggcttctctccgctgtgtgtctgcatgtgccgcttcaggtggctcgagtagtgggacacgaaggtgcagaggcggcatgagtacagtagccgtgggggcagcagg

SEQ ID NO: 250403 - DNA, 241 bp, Homo sapiens
  chr2:27668571-27668812
  hypo
actggtgaggccttccggttttccaaccctgtgcccttaccggtacatgctgcttagctgggagtggcacctcaaagggaatgtctgtatcctgaaaatcagagtggtcaaggccatctagagtcccttcctcgattgcctgcagtagagtgggcaaccatgaactaggcacagctcgcgactggcaaaaacctccaccctcggggcacagcttccctactcacatcggtcaggtccaaaa

SEQ ID NO: 250404 - DNA, 208 bp, Homo sapiens; identical to SEQ ID NO: 207904
  chr2:27703854-27704062
  hypo

SEQ ID NO: 250405 - DNA, 42 bp, Homo sapiens
  chr2:27704758-27704800
  hypo
tgctacacattaaccaacaccgtctgggcccacaaagagcat

SEQ ID NO: 250406 - DNA, 93 bp, Homo sapiens
  chr2:27711608-27711701
  hypo
agttggtgagtgctccgagacattgtataataaaggctaaagttagagatatcaggtcatttgtttaaagtactggtggccagtctgggcaac

SEQ ID NO: 250407 - DNA, 35 bp, Homo sapiens
  chr2:27764227-27764262
  hypo
gctcggcatcagagggagaccgtggaaggagaccg

SEQ ID NO: 250408 - DNA, 32 bp, Homo sapiens
  chr2:27993512-27993544
  hypo
ttttttttttttttttgagacggagtctcact

SEQ ID NO: 250409 - DNA, 284 bp, Homo sapiens; identical to SEQ ID NO: 207905
  chr2:28065675-28065959
  hypo

SEQ ID NO: 250410 - DNA, 34 bp, Homo sapiens
  chr2:28269009-28269043
  hypo
ctagccactgccttcgaggttctggcccttggcc

SEQ ID NO: 250411 - DNA, 50 bp, Homo sapiens
  chr2:28572403-28572453
  hypo
tgagacagtgagaagcgtgttgagcctccaggctgcgaggctgcacctag

SEQ ID NO: 250412 - DNA, 149 bp, Homo sapiens; identical to SEQ ID NO: 207906
  chr2:28586480-28586629
  hypo

SEQ ID NO: 250413 - DNA, 349 bp, Homo sapiens
  chr2:28676717-28677066
  hypo
tgtatgtgtgtgcgcgcgcgtgcatgtgcgtgtgcataggtatgattcagggagacataagggactttggcaaagtcaggaggatgtgggggctaagcaaacaccactttgaagacttctctttggcatggggtgtgacaagccaggtctggtgccttgttgaggaaagggagaaaactctgagttggtttttgtgttcctcaaaccagtttgcccacatccttggcatcatctgtgccctgtgaagggcccgcttggagccatgcatgtctgggcctgagggtggcggtgcctacgtgaggccctgcggtctcttcaggagctccccgagaggggcacttggccactg

SEQ ID NO: 250414 - DNA, 251 bp, Homo sapiens
  chr2:28819617-28819868
  hypo
cgagaactgagtgaaggagaagggtaagatttacggcatctgccttctctctaccacctgaattgcttgcagagcctctgacttaagtccttgaccactctggcatgcaatagtccacttcattccaagcattccttgaatgaagaacaactatgactcatggcctgtcccttagaagtctttgctggtgggctggaagctaaggccacgttcttaaaatccattggcctgggccaggcgcggtggctcac

SEQ ID NO: 250415 - DNA, 34 bp, Homo sapiens; identical to SEQ ID NO: 207907
  chr2:28919660-28919694
  hypo

SEQ ID NO: 250416 - DNA, 44 bp, Homo sapiens
  chr2:29062640-29062684
  hypo
tacaggcgtgagccaccgcgcccggccaattaactttttttaac

SEQ ID NO: 250417 - DNA, 102 bp, Homo sapiens; identical to SEQ ID NO: 207910
  chr2:29469962-29470064
  hypo

SEQ ID NO: 250418 - DNA, 82 bp, Homo sapiens
  chr2:30368628-30368710
  hypo
tcctggaaaactcacttattaaaagataactagtccttttgcctttgatgctcaggtaaacttcagacgaactaaatgaaaa

SEQ ID NO: 250419 - DNA, 210 bp, Homo sapiens
  chr2:30480379-30480589
  hypo
ggggaggtggagagcggggagctccggtggccccctgaggagttcctggtccaggaggatgagcaagataactgcgaagagacagcgaaagaaaataaagagcagtagagtccctgtggactcccatgggtcataccagccagcatctgttcctgaactgtgtttttcccatcatgacggaagaagagagtgagccgcaattgttctgaa

SEQ ID NO: 250420 - DNA, 399 bp, Homo sapiens
  chr2:30481975-30482374
  hypo
ggccaaccaaggcacgcagcatgtcccctcaggtctccagtcagtccaggttgaccctcagttctggacgtgtgtatatagctgtatttaatacctcaaggtcattgtggctctggggatgccggggcaggaggacgagggtgcgctgtggacacagcagtccgcggaattccgttctgggaagccaatggtcgccggcaccccttgcttcctccctctgttgtctgcctgtgtgacacacatcaatggcaataacttcttccaactcctcgcagaagtgggagaggccggcagcctgcaccgagaggggctttcctctctcttgctccccgcttcgttctgttttggctgcagagagtggttcatccatactctcattccctcgcctccccttgtgga

SEQ ID NO: 250421 - DNA, 194 bp, Homo sapiens; identical to SEQ ID NO: 207914
  chr2:30495297-30495491
  hypo

SEQ ID NO: 250422 - DNA, 266 bp, Homo sapiens; identical to SEQ ID NO: 207915
  chr2:30525798-30526064
  hypo

SEQ ID NO: 250423 - DNA, 36 bp, Homo sapiens
  chr2:30587093-30587129
  hypo
caggtgtgcagggaaaaccatcgactccagcaggag

SEQ ID NO: 250424 - DNA, 31 bp, Homo sapiens
  chr2:30634157-30634188
  hypo
aaaaggattgttgccaggtgcggtggctcac

SEQ ID NO: 250425 - DNA, 90 bp, Homo sapiens
  chr2:30794970-30795060
  hypo
aaatgccatggtatcgctttagaccataaagggaattcatattgtttctttgttccttttagtcactgcccacctcgccccctttccctc

SEQ ID NO: 250426 - DNA, 161 bp, Homo sapiens
  chr2:30863077-30863238
  hypo
gaaatccactttcacgtccaccggtatccaatagacaccctccccacatccaaggaggaccttcaactctggtgccacaaacggtgggaagagaaagaagagaggctgcgttccttctatcaaggggagaagaatttttattttaccggacagagtgtcat

SEQ ID NO: 250427 - DNA, 104 bp, Homo sapiens
  chr2:30863744-30863848
  hypo
catcaggcttttagcgacaaggaacacacacatttttcttaaaggcccaatcctaacagactccccgtaccagaggcagatctggaactcgtcaacaacagccc

SEQ ID NO: 250428 - DNA, 121 bp, Homo sapiens
  chr2:30982467-30982588
  hypo
aagccgcaggtggacgcagggctcagagctaggtgcgggctgatgtgcgctaaggaaacggcactagagaagctgagcaactttctcaataccgctgagacagcggcggaggcagaattcc

SEQ ID NO: 250429 - DNA, 265 bp, Homo sapiens; identical to SEQ ID NO: 207919
  chr2:31477235-31477500
  hypo

SEQ ID NO: 250430 - DNA, 46 bp, Homo sapiens
  chr2:31480289-31480335
  hypo
gctggctgtgcctgcgtgccagggagggagggagggaggcagggag

SEQ ID NO: 250431 - DNA, 111 bp, Homo sapiens
  chr2:31480365-31480476
  hypo
cagctgggtcatctggcctcacgacttgccaactgtttgactctctcctctctgaacctcagtttcctcccctggaagtgagaacgatactcctcgcgctgcctgcctcag

SEQ ID NO: 250432 - DNA, 95 bp, Homo sapiens; identical to SEQ ID NO: 207920
  chr2:31550128-31550223
  hypo

SEQ ID NO: 250433 - DNA, 95 bp, Homo sapiens; identical to SEQ ID NO: 207921
  chr2:31551361-31551456
  hypo

SEQ ID NO: 250434 - DNA, 90 bp, Homo sapiens
  chr2:31560534-31560624
  hypo
ttgcggatcttctccggggtggcagggctgtctagccggaagagttccttcacgttattacctgtgtgctgagctcgagctgcacggatg

SEQ ID NO: 250435 - DNA, 231 bp, Homo sapiens; identical to SEQ ID NO: 207922
  chr2:32142425-32142656
  hypo

SEQ ID NO: 250436 - DNA, 120 bp, Homo sapiens; identical to SEQ ID NO: 207923
  chr2:32244332-32244452
  hypo

SEQ ID NO: 250437 - DNA, 32 bp, Homo sapiens
  chr2:32263997-32264029
  hypo
tgggccatcgcgcccggcgaagggtttcttaa

SEQ ID NO: 250438 - DNA, 120 bp, Homo sapiens; identical to SEQ ID NO: 207924
  chr2:32291347-32291467
  hypo

SEQ ID NO: 250439 - DNA, 40 bp, Homo sapiens
  chr2:32315098-32315138
  hypo
ctggagttacaggcgtgagccaacgcgcccagccgagcat

SEQ ID NO: 250440 - DNA, 104 bp, Homo sapiens
  chr2:32361185-32361289
  hypo
tatgtgagaatgacttttcacggtgttcttaatagcgcaagttttgtttaggagagcacattccaacttacttgcttctataaatataccgtgtaatctagggc

SEQ ID NO: 250441 - DNA, 78 bp, Homo sapiens
  chr2:32367730-32367808
  hypo
ctgggattacaggcatgagtcaccgtgcccggccagaaatcgaaaatttctagaaacgtaaagcagatcagtgggttg

SEQ ID NO: 250442 - DNA, 120 bp, Homo sapiens
  chr2:32504350-32504470
  hypo
ttttattacacttcgtgcaccagttattttccagtgaccagacttactggctgctatgaaatcataaattatgtttacagaaatttcagtctgagaaagaacctagattttccttttttt

SEQ ID NO: 250443 - DNA, 34 bp, Homo sapiens
  chr2:32580381-32580415
  hypo
aggtgagtggcctgagtggccgggcgcgggggct

SEQ ID NO: 250444 - DNA, 36 bp, Homo sapiens
  chr2:32798532-32798568
  hypo
aattgcaggtgtgagtcaccgcgccctgccagtaaa

SEQ ID NO: 250445 - DNA, 44 bp, Homo sapiens
  chr2:32980697-32980741
  hypo
gagagggagagggagagggagccggagccattctacattctaat

SEQ ID NO: 250446 - DNA, 116 bp, Homo sapiens
  chr2:32983458-32983574
  hypo
cctgggagttgtcccggtaccgcagtgctcgtgctcagcgctccaaagccctccttcatcttcggaacaaggagtttcaagagtgtgtagagtgcttcgaacgctcggttaagatt

SEQ ID NO: 250447 - DNA, 45 bp, Homo sapiens
  chr2:33215245-33215290
  hypo
ttattgtactctatcgatattccatgcatacgcaattgacagagg

SEQ ID NO: 250448 - DNA, 240 bp, Homo sapiens; identical to SEQ ID NO: 207925
  chr2:33281381-33281621
  hypo

SEQ ID NO: 250449 - DNA, 37 bp, Homo sapiens
  chr2:33304098-33304135
  hypo
tattgttagtagagacggggtttcaccatgttggcca

SEQ ID NO: 250450 - DNA, 37 bp, Homo sapiens
  chr2:33317210-33317247
  hypo
aaaacacaccttgtgctgtgcgtgcacgtgcgcatgc

SEQ ID NO: 250451 - DNA, 58 bp, Homo sapiens
  chr2:33346710-33346768
  hypo
agctggctggagcgcgcatctgctttactttagaaggttacggcgtaatcctccccca

SEQ ID NO: 250452 - DNA, 34 bp, Homo sapiens
  chr2:33513604-33513638
  hypo
tgttctcatttccccgcaaaaagaaaagaagttg

SEQ ID NO: 250453 - DNA, 156 bp, Homo sapiens
  chr2:33534845-33535001
  hypo
tcactgcgtgcttccgtcacctgtactttactgtttattccatgctgtaaccttggtactgggttctaaattatctttatagcatcttttatgggcatattttattttgtctcataggtggtatttatctgtccttttctgactctatttttatcc

SEQ ID NO: 250454 - DNA, 38 bp, Homo sapiens
  chr2:33637935-33637973
  hypo
caggtgtgagccactgcgcccagcccaagtaactctta

SEQ ID NO: 250455 - DNA, 302 bp, Homo sapiens
  chr2:33952402-33952704
  hypo
ctcagcaggatagtgagggccgccaggacgaagcagagggcgtacaccgccacccaccactccagggccggccggttgtggtacacgtaggggctattgatgaacacgaagatgaggcaggccacgaaggtctccagcaccttcagcagccccagctcggaggccatgtagtcagtgatctcgccgggccgggcccgggtccaggttacttcggtggcgtaagccacacaggcgatgccagagaagacgatggcggcgatggcgtggtcgcgggaacggccgtgggacaggaactgcaagta

SEQ ID NO: 250456 - DNA, 75 bp, Homo sapiens
  chr2:34065553-34065628
  hypo
ctccttggatatgcagaccacgcagtctataatgcctttgtattgcttatctgcggtgacttgtttgctggcatg

SEQ ID NO: 250457 - DNA, 86 bp, Homo sapiens
  chr2:36071157-36071243
  hypo
caagagcaaaatcccgtgcacatcctgcagctgcatctagcggtggggggcggggggggggggcctgcaatgcctgaagccccaga

SEQ ID NO: 250458 - DNA, 181 bp, Homo sapiens
  chr2:36668406-36668587
  hypo
agccagattgctccaaggcccgctgtgaagtccagttctctccacgttgtcctgaagattctgttctgatcgagggttatgctcctcctggggagtgctgtcccttacccagccgctgcgtgtgcaaccccgcaggctgtctgcgcaaagtctgccagccgggaaacctgaacatactagt

SEQ ID NO: 250459 - DNA, 201 bp, Homo sapiens
  chr2:36805565-36805766
  hypo
tctgaagaagctgagcacagcggtattctggaataaaatcccactgggctctgattagaagtgttaacactcctgcccatgtacaacctgtcgcacctgccaccagccccaaaggctgggactaccacagaacctgtttccagtgttcgacgcctcctgcaaaacatcacttactgtgccgggcatatgacttctctcatt

SEQ ID NO: 250460 - DNA, 60 bp, Homo sapiens
  chr2:36824207-36824267
  hypo
ccccaccagaccatgcgatcgttaccatcagtaagcagggcccttcgttttcgtctctgt

SEQ ID NO: 250461 - DNA, 99 bp, Homo sapiens
  chr2:37027667-37027766
  hypo
aggtctcacgcccacgaagtcagcgctgcctgtggctgagtgtcagtggtttgtgagatgtgatctcacacctcatcttgggtgcgatgcacacacacc

SEQ ID NO: 250462 - DNA, 307 bp, Homo sapiens
  chr2:37035290-37035597
  hypo
acaaaggaggagcccggagaagcataaatgtgaagctgacaccagagatttaatttctccctatgaatttgcttagcagacagctttccactaacgcaggcagggactcagctgagggagtaggactgagtccagcgataacccgggggcttcgcctcagtgagtggccgctgggtgaaccgagatggaagaacacggtaggagggctagtgcagaaaacaagggcctgcttgcttcttcacctgccccgggggatcaagcctaatggtgacactggaggatttgaccctgacgtggcgtgggtccc

SEQ ID NO: 250463 - DNA, 46 bp, Homo sapiens
  chr2:37076291-37076337
  hypo
gctaaacttgtattcgctcaggcctgcctagcgaattagaaccacc

SEQ ID NO: 250464 - DNA, 195 bp, Homo sapiens; identical to SEQ ID NO: 207926
  chr2:37076576-37076771
  hypo

SEQ ID NO: 250465 - DNA, 38 bp, Homo sapiens; identical to SEQ ID NO: 207927
  chr2:37149992-37150030
  hypo

SEQ ID NO: 250466 - DNA, 150 bp, Homo sapiens
  chr2:37195422-37195572
  hypo
gtgagacgacatatccgacaattcctttaagtcaattcatagcagacacaaaatgtaattaaatgtatagataatctggactaccacacatatacaaaaactattttaattcgtagttcaactttattactcacaatactttttttgctt

SEQ ID NO: 250467 - DNA, 120 bp, Homo sapiens
  chr2:37227182-37227302
  hypo
ccaaaaaacaaaaaacctcccagtatatttatatatatattttttttgagacagagtttcaaaaaactctgttttttgccgagcctggagtgcagtggtgtgatcttggctcaccgcaac

SEQ ID NO: 250468 - DNA, 87 bp, Homo sapiens; identical to SEQ ID NO: 207928
  chr2:37241581-37241668
  hypo

SEQ ID NO: 250469 - DNA, 166 bp, Homo sapiens
  chr2:37287720-37287886
  hypo
taccacatagagctccagcacgaccttccaaagttacctgccaggtaaaagaatcgcctcgggccttctcagcttccaattcctttaaggaacgtgggaaaacatttcgccacaataacaacatcttgggcagatggtaacgaacgacagatggtcctagccaaga

SEQ ID NO: 250470 - DNA, 160 bp, Homo sapiens; identical to SEQ ID NO: 207930
  chr2:38157989-38158149
  hypo

SEQ ID NO: 250471 - DNA, 177 bp, Homo sapiens
  chr2:38201226-38201403
  hypo
tccctaaggcatttaacacacgtgtagaggaattaaatttagatgtccttcttcagaaggtagatcatttacgtatgagtgagtctggcaagtcggagagttttgaactacttcgtgaccacaaagaaaaggtaagagacataacaatagcacttcgtatagttccattttttaatt

SEQ ID NO: 250472 - DNA, 40 bp, Homo sapiens
  chr2:38241063-38241103
  hypo
aggcagccgggcgtcgtggctcacgcctgtaatcccagca

SEQ ID NO: 250473 - DNA, 221 bp, Homo sapiens
  chr2:38489624-38489845
  hypo
tttcctgctggactgagacccgcagaccacctgcatgcccacacatacccttctgactgcaatggagcatcaaagactgagagcgaggaccgggtggccagctgaggcggaaactccgccagagctgacttattcccaggcttatctcagcaggggcctgcagaagtggggacacggaattgaggccactgtgagttttcggtgtaagcttagtcccattt

SEQ ID NO: 250474 - DNA, 156 bp, Homo sapiens
  chr2:38546334-38546490
  hypo
ttttcttatagagacgtggtctcctccaaactcgaatcttctcaaatcagctcacactactactctctaggcttctaaataagtggggttatactcactttcccccttttctgaaagatatcctggctgggcatgacagctcatgcctgtaatccc

SEQ ID NO: 250475 - DNA, 31 bp, Homo sapiens; identical to SEQ ID NO: 207933
  chr2:38551439-38551470
  hypo

SEQ ID NO: 250476 - DNA, 84 bp, Homo sapiens; identical to SEQ ID NO: 207934
  chr2:38585486-38585570
  hypo

SEQ ID NO: 250477 - DNA, 44 bp, Homo sapiens
  chr2:38594452-38594496
  hypo
taacaatttaaggccgggcgcggtggctcatgcctataatctca

SEQ ID NO: 250478 - DNA, 82 bp, Homo sapiens
  chr2:38610902-38610984
  hypo
aaaaacaaaacaaaaaaaggagtgaaagtaaacaccattacgcagaaaacatgcttgtagcttgaagcgaacatggccgtgt

SEQ ID NO: 250479 - DNA, 31 bp, Homo sapiens; identical to SEQ ID NO: 207935
  chr2:38649876-38649907
  hypo

SEQ ID NO: 250480 - DNA, 149 bp, Homo sapiens
  chr2:38742475-38742624
  hypo
cgaaagatgccccacgacgtatgtcatcaggaaaatgcaaattaaatcaacaatgagataccacctacacaccctttagaacagccaaaatccggaacactgatgtaaggtacctggaagtgcttcggtcaaggaatagtctgaggcgg

SEQ ID NO: 250481 - DNA, 207 bp, Homo sapiens
  chr2:38742654-38742861
  hypo
ggcacgcaggcgcacacctccacttgttatataaactgtttgtgtaagttcatacttgacttggagccacagttgtctgtaaaaggtataactgccctgttaacactgcgcaccagacacatggctctggggctcggctcgcctgaaatggcttgtcatggtaggcgcgcaggcgcccagagaaagagcgagcgagtcagagctgtc

SEQ ID NO: 250482 - DNA, 315 bp, Homo sapiens
  chr2:38762339-38762654
  hypo
agtccaagagaggccggtccaggccttggccagggaagcatccatggacttgggcgttcgttgcagaatgttcagacaggtctggatgaggggtgaggccctgccttggaggggctgccctccctctgtggcacggaagccctgctgcctgtgacaggaggcgactgcacctcacccgcggcctgtatgctgcaggacccagcgaagagcttccttagcttgcagctgtgcagacactaggaaagggagcacctaccagggagatttgccttcttggtccggtagcaaatgcagtcccgccggcccacctggtac

SEQ ID NO: 250483 - DNA, 36 bp, Homo sapiens
  chr2:38953644-38953680
  hypo
ggcatgagccaccccgcctggccaagtctctcacat

SEQ ID NO: 250484 - DNA, 120 bp, Homo sapiens; identical to SEQ ID NO: 207936
  chr2:39016315-39016435
  hypo

SEQ ID NO: 250485 - DNA, 244 bp, Homo sapiens; identical to SEQ ID NO: 207937
  chr2:39186667-39186911
  hypo

SEQ ID NO: 250486 - DNA, 148 bp, Homo sapiens
  chr2:39188204-39188352
  hypo
ttcttctgtctgtgaggtgtcgtttctatgttgagaatatggaacacggtgcgccagcctactccacttcttcccggcagcattcttgcttgtagctagggaggaggcaagttgccctagctcaaggtagactcgctgcgcaatttgc

SEQ ID NO: 250487 - DNA, 162 bp, Homo sapiens
  chr2:39406776-39406938
  hypo
ccctggactaaaaacatcagcgtcgcaggaacttcctagaaatgcgaagtcttgggtcctataccccgcctgccaaagggaatcgaggcactggaggtggggcccggcagtttgtgtttaagaagctctctgggtgattccgatgcccatatgctcaggttt

SEQ ID NO: 250488 - DNA, 264 bp, Homo sapiens
  chr2:39944194-39944458
  hypo
cgtatgatttgaaccggctcccaaagctaatttatagcctgcctgctgatgtggaacatggttacagctggtccatcttttgcgcctggtgcagtttaggctttattgtggcagctggaggtctctgcatcgcttatccgtttattagccggaccaagattgcacagctaaagtctggcagagactccacggtatgactgtcctcactgggcctgtccacagtgcgagcgactcctgaggggaacagcgcggagttcaggagtc

SEQ ID NO: 250489 - DNA, 102 bp, Homo sapiens
  chr2:40560220-40560322
  hypo
ttcagcagaatggtaaattacgaaaaaaaatctcttaacgaaaatacttgttgcactcagttaaaactgtcttttaggccgggtgcggtggctcacgcctat

SEQ ID NO: 250490 - DNA, 165 bp, Homo sapiens; identical to SEQ ID NO: 207939
  chr2:41223819-41223984
  hypo

SEQ ID NO: 250491 - DNA, 174 bp, Homo sapiens
  chr2:42155747-42155921
  hypo
ctgttctgagttgaacagaacgggaaactgcacttttgactctgaatgtatttcaatggagcagcctctgctgaaagccgggctcagacactgaacagccgcttcagggagatgcaatggttgcaacttgtgaaccgtgctttcctttccaccgccttttctctacatttgtct

SEQ ID NO: 250492 - DNA, 161 bp, Homo sapiens
  chr2:42157839-42158000
  hypo
gggtggggcctgagattctacgtgtctaacaattctcacaagtcccaggtgatacgatgctgctggtcttcatacaacgctttgattagtaaggtcctagatcaatgggtctcaagacgggatagacagtggaattacccggggagccttaacaactacct

SEQ ID NO: 250493 - DNA, 79 bp, Homo sapiens
  chr2:42282095-42282174
  hypo
cctcctgcctcacagtgccccgccttcactgcgtcctctgctggacagcatcgtcaacgccacaggtgagctctccagg

SEQ ID NO: 250494 - DNA, 141 bp, Homo sapiens
  chr2:42282412-42282553
  hypo
ctgcactctgcaggagagctcgcctggggggtggacgagaccctggcccagctggagaaggtgctgcacctgtaccggagcgggcagtatctgcagaactccacggcaagcagcagtaccggtgagtggccccaagctgat

SEQ ID NO: 250495 - DNA, 208 bp, Homo sapiens
  chr2:42395973-42396181
  hypo
tccttgcttctgatctgtcccgggccctgcggctgtggcagtggtggtatcgagctagtcaagaagcttcgcccctatttgtcccccaccctattgggggagagggagaacctctccctcttggttgcttctttagtgtccttgtaggacccacgtggtggtcatctcccgtcacgggggtccagtcttggctctgcgggcttcccag

SEQ ID NO: 250496 - DNA, 35 bp, Homo sapiens; identical to SEQ ID NO: 207942
  chr2:42403393-42403428
  hypo

SEQ ID NO: 250497 - DNA, 94 bp, Homo sapiens
  chr2:42530714-42530808
  hypo
gggtggagataagagggtagcgtttagtcttaaagtgtgaacatgaaccgattttaaagaagtaagttaggccgggcaaggtggctcacacctg

SEQ ID NO: 250498 - DNA, 43 bp, Homo sapiens; identical to SEQ ID NO: 207944
  chr2:43002056-43002099
  hypo

SEQ ID NO: 250499 - DNA, 135 bp, Homo sapiens
  chr2:43051041-43051176
  hypo
tggctgaatagtaacgctcgtactacatgccaatgagaaaccacagcctgagagtgttggagccgtggctcgcagacattgatgtttataagaatcatctggggagcttgttacaaagcacgttcctgggctacg

SEQ ID NO: 250500 - DNA, 72 bp, Homo sapiens; identical to SEQ ID NO: 207945
  chr2:43103590-43103662
  hypo

SEQ ID NO: 250501 - DNA, 35 bp, Homo sapiens; identical to SEQ ID NO: 207946
  chr2:43123919-43123954
  hypo

SEQ ID NO: 250502 - DNA, 118 bp, Homo sapiens
  chr2:43147317-43147435
  hypo
tgaccaaaggttcttcggctgtgggctggttctgcaaatgaaaccttaggggtgatggtcggtgtataacgctaagaccagagctgcaatggctctgattctccgccatagagtgcca

SEQ ID NO: 250503 - DNA, 75 bp, Homo sapiens; identical to SEQ ID NO: 207947
  chr2:43148273-43148348
  hypo

SEQ ID NO: 250504 - DNA, 55 bp, Homo sapiens
  chr2:43159425-43159480
  hypo
aaagagcagccctgccgaatctaccctgtgctggaggtgccgagtggagcccaat

SEQ ID NO: 250505 - DNA, 101 bp, Homo sapiens; identical to SEQ ID NO: 207948
  chr2:43173213-43173314
  hypo

SEQ ID NO: 250506 - DNA, 200 bp, Homo sapiens
  chr2:43185203-43185403
  hypo
caggggtcctggatacggtcagcactgggggtgccactggtgccatccagcttagggacatatggattccttctctcagactcctctgcctgccccctctgctctcctttccagcgttcacaaccctgcctctccccgcggaatgcctgactccacaccacatgcattaaagctgccatctgtaccgccctcatggtgtg

SEQ ID NO: 250507 - DNA, 269 bp, Homo sapiens
  chr2:43227353-43227622
  hypo
ctttttttcccaagaaagctcggcagccagttctgccgtttttggccaggctcttggggaaggcggcctgtttgggcacatgggctcccacgtgcgcagaagcatcacctgccctccatgtgatgcgcacactcacagacccacatgcttacgtacttgcagactcgcccaggcacacgtgtatcgccacatgcagacacgcaagcatacacttgctgcactcagacctcctggtgtgaacacacggtgtgcaccgtcggagatagcca

SEQ ID NO: 250508 - DNA, 343 bp, Homo sapiens; identical to SEQ ID NO: 207949
  chr2:43248787-43249130
  hypo

SEQ ID NO: 250509 - DNA, 146 bp, Homo sapiens
  chr2:43266043-43266189
  hypo
tgatgtggccacatcgcacctctggcgggaagtggactctctccgaccccccttgggggctctggtggcctctgcgggacctcgggttgtctgagcacacgcaccctcgccctctctgggacctgatgcctcgatttaggctcaga

SEQ ID NO: 250510 - DNA, 141 bp, Homo sapiens
  chr2:43294291-43294432
  hypo
ggcgtgagccaccacgccggccgacctccacccggttttgcgttttttcttagccgttcccaccgtctgtcaatctccttctcttacctttcacccatgtgccttccctgctagaatgcagcacaacgatcttcattttgt

SEQ ID NO: 250511 - DNA, 76 bp, Homo sapiens
  chr2:43296669-43296745
  hypo
agtgccatatgggccgagatggtcaggcctgagcttttcaagagaaatacgaattccaggctgggcacggtgaatc

SEQ ID NO: 250512 - DNA, 173 bp, Homo sapiens; identical to SEQ ID NO: 207950
  chr2:43299388-43299561
  hypo

SEQ ID NO: 250513 - DNA, 37 bp, Homo sapiens
  chr2:43365142-43365179
  hypo
cagtaagcatttataaagcacgattaagaaatagaag

SEQ ID NO: 250514 - DNA, 189 bp, Homo sapiens; identical to SEQ ID NO: 207951
  chr2:43373136-43373325
  hypo

SEQ ID NO: 250515 - DNA, 34 bp, Homo sapiens; identical to SEQ ID NO: 207952
  chr2:43388282-43388316
  hypo

SEQ ID NO: 250516 - DNA, 189 bp, Homo sapiens
  chr2:43408168-43408357
  hypo
ctgtgcctgacattacgctgggtgccgcaggtacaatggtgaacgacacagacccaatccctgccctgggagagtgaatcatctagcaacggagacaaatattcaatacacacccaacgcatagttagtgagtattgcagagagtgaagggtgcgatgggatcagatttcccagcgggcccaagagagg

SEQ ID NO: 250517 - DNA, 49 bp, Homo sapiens
  chr2:43411559-43411608
  hypo
cctcattaggctcgcgccccctcccgctgacctccgaatgggctgctac

SEQ ID NO: 250518 - DNA, 98 bp, Homo sapiens
  chr2:43413631-43413729
  hypo
ggcccaagagtcctcgcttctaacagagtcccaggtgacgcccatctgacactcggagtctcatgggaccgagaagaccttagcgcaggttgaagagg

SEQ ID NO: 250519 - DNA, 145 bp, Homo sapiens
  chr2:43420537-43420682
  hypo
gggtgattcatgtgtaccctcgcgacaggctgtgttcagatagtctgcttatgtgcttgaattcaaggacacaaacatccctaggtgcaagcttgcacgcacagtcctccctacacctccacacgcaactcctaatcatccctca

SEQ ID NO: 250520 - DNA, 122 bp, Homo sapiens
  chr2:43496628-43496750
  hypo
cacatcatgggagccgctgccagtgacgcactcgctgagatgcaggtgaacgtcagggggcccaggctctctggaacagcaactgatggcacacgcaacttggaatgcggcaaccggagctc

SEQ ID NO: 250521 - DNA, 37 bp, Homo sapiens
  chr2:43523958-43523995
  hypo
gctcttaaaattgtaattaacggccgcccgggaggca

SEQ ID NO: 250522 - DNA, 35 bp, Homo sapiens; identical to SEQ ID NO: 207954
  chr2:43820774-43820809
  hypo

SEQ ID NO: 250523 - DNA, 35 bp, Homo sapiens; identical to SEQ ID NO: 207955
  chr2:43821049-43821084
  hypo

SEQ ID NO: 250524 - DNA, 157 bp, Homo sapiens
  chr2:44047673-44047830
  hypo
tgggattattgcctacgtgaaaatccctcacttcttttgtcctcgatcaggttagccctccccagccctactccattccattcttgtcttttattctaccaaccccttccactgatttgaccttcgttttcttttttgagacggagttgcactctgt

SEQ ID NO: 250525 - DNA, 116 bp, Homo sapiens
  chr2:44104773-44104889
  hypo
agaacttataaaatgcctctcgggaacctcaccatcgcggtctcaggagataaagtaagcggggaaggcctcgggttctaaattattggacgtccggctttccatcctcctcatga

SEQ ID NO: 250526 - DNA, 33 bp, Homo sapiens; identical to SEQ ID NO: 207956
  chr2:44113283-44113316
  hypo

SEQ ID NO: 250527 - DNA, 179 bp, Homo sapiens
  chr2:44126057-44126236
  hypo
tttgtctttaatcatttcagcgaaactcgctgccccatacctacccccgcaccacccgccgctccccgctacctcaattctaaagacatttctagtttgatctggcatctttaaaaccagtaacctaaaatctaccatccagtccttgtcctgcaaccgtgattcacactgaatgtaaa

SEQ ID NO: 250528 - DNA, 34 bp, Homo sapiens
  chr2:44224214-44224248
  hypo
aaaacaaaaaaaccacgtcgctgccttcacaggg

SEQ ID NO: 250529 - DNA, 63 bp, Homo sapiens
  chr2:44315198-44315261
  hypo
tacccagctgcggatgaggaaaggtgaggcacacagcagctgaatgaccgagctcactctctc

SEQ ID NO: 250530 - DNA, 40 bp, Homo sapiens
  chr2:44402110-44402150
  hypo
tgactgggcctggtggctcacgcctataatcctagcactt

SEQ ID NO: 250531 - DNA, 42 bp, Homo sapiens
  chr2:44436625-44436667
  hypo
tttaaaatttcctggtcaggcgcagtggctcacacctgtaat

SEQ ID NO: 250532 - DNA, 32 bp, Homo sapiens; identical to SEQ ID NO: 207959
  chr2:44439162-44439194
  hypo

SEQ ID NO: 250533 - DNA, 35 bp, Homo sapiens
  chr2:44468999-44469034
  hypo
ttttttttttttttttgagacggagtctcgcactc

SEQ ID NO: 250534 - DNA, 35 bp, Homo sapiens
  chr2:44469274-44469309
  hypo
gcgtgagccaccacgcctggccagaaaataatctt

SEQ ID NO: 250535 - DNA, 207 bp, Homo sapiens
  chr2:44497613-44497820
  hypo
gaattggacaaaacacgcagcaaagaaagaatgaagcaacaaaagaacgaaagcagctctctcggctttcggctcggaggaggccaaggtgcaactttcttcggtcgtctcgaatccgggttcatccgacaccagccgcctccaccatgccgccgaagttccaccccaatgagatcaaagtcgtatacttcacgtgcactggagttg

SEQ ID NO: 250536 - DNA, 149 bp, Homo sapiens
  chr2:44502842-44502991
  hypo
cccgacttcaagggcgtccagccctatgcggggatgcccaaggaggtgctgttccagttctctggccaggcccgctaccgcatacctcgggagatcctcttctggctcacagtggcttctgtgctggtgctcatcgcggccaccatagc

SEQ ID NO: 250537 - DNA, 33 bp, Homo sapiens; identical to SEQ ID NO: 207960
  chr2:44505288-44505321
  hypo

SEQ ID NO: 250538 - DNA, 35 bp, Homo sapiens
  chr2:44528016-44528051
  hypo
ccatgtttgagtgtgcgtctcgcttggcttgagcc

SEQ ID NO: 250539 - DNA, 120 bp, Homo sapiens
  chr2:44534051-44534171
  hypo
ttatgcaaccatcaccaatgtctcattccagagcattttcatcacccccaaaataaaccacatctccactagcaataactgcgcatggcccctccctctctgtcctcagtctctggcaac

SEQ ID NO: 250540 - DNA, 700 bp, Homo sapiens
  chr2:44553759-44554459
  hypo
cgctgtgccagcccaaaaacatttttcttagagtagcctatggcttcacacctcccccattctataaacagtagagacagagcgtactcacctccaaagtcaccgctctcaccagctctggattagaattacacaatgctcctgcaagcacccctccagcactgaaagcagtcagggttgttagacttggctgagaaaagccttggccatgaagcgtcttaatgcaagcctctaaatcagcaaggccattgagttttttagttaggcggccatcagcgtgccactggaggcctaactcaccaccacctctgaaattgaagggcaaaaaagttttagtggaaaaaaaaagttaatactgtaggctggggtcagcgaactacacctggaggcctgttttttgtgtggccctggagctaagactggtttttgctttttaaaggttgagtgaaaacaaggaatgtgcaacagaaactgtacgcggcctgcaaagcttaaaatgtgactatgtagctctttagagaaaaaggtttgccaactcctgatatagacaatccagaattgattcaacgaatatattttgagtgcctgcccatttatcagggattaagtacagaccttaaaagtagaaacaaacgaaaatcccctaccgtggagaagacagtaattttgtggggtaagaaaacaacgacttacccagcaa

SEQ ID NO: 250541 - DNA, 42 bp, Homo sapiens
  chr2:44729124-44729166
  hypo
tcaaataggccaggcgcagtgcctcacacatgtaatgtcagc

SEQ ID NO: 250542 - DNA, 304 bp, Homo sapiens
  chr2:44933645-44933949
  hypo
ttttatggttgcctcgatgagcagaaacattttacctcagtgtagtcaatattgcttgttgtgacattccaggcctcgcacagtctttctttgccatagcgaaagcattttttttttttttttcagattatagtcccatttgctaagatacaggaatagcccggcgaatcacagttggagcaccatgatatagctgctaatgttttgcctgcattattacaccaacaaacatgatccagagcgctcagtaattagattcttttgaattagattggccattcaggaacgtcgttccccattctct

SEQ ID NO: 250543 - DNA, 96 bp, Homo sapiens
  chr2:44999266-44999362
  hypo
caaagacgaagaaacgtatcaagtgcatagggaatatttttacaaaaacggaaatctgtaaggggtataatcgcctgcctgcgccctttgcagcat

SEQ ID NO: 250544 - DNA, 205 bp, Homo sapiens; identical to SEQ ID NO: 207962
  chr2:45927198-45927403
  hypo

SEQ ID NO: 250545 - DNA, 41 bp, Homo sapiens; identical to SEQ ID NO: 207963
  chr2:45940266-45940307
  hypo

SEQ ID NO: 250546 - DNA, 50 bp, Homo sapiens
  chr2:46399258-46399308
  hypo
ctgtggctctctgccgtcctccagagactctgcagcgttcattccattag

SEQ ID NO: 250547 - DNA, 145 bp, Homo sapiens
  chr2:46399620-46399765
  hypo
tgggcgggcctgggcgtgcctgggcggccctgggagggtttgaggagcaggaataagcgccatccctcagaactgcccagaaatgcctccttcactaacaagaatggagacataatgtgtttggagctaacgctttgagactatt

SEQ ID NO: 250548 - DNA, 39 bp, Homo sapiens
  chr2:46635255-46635294
  hypo
tctggagttgatagcgagctcctccgcctttttgtaatg

SEQ ID NO: 250549 - DNA, 124 bp, Homo sapiens; identical to SEQ ID NO: 207966
  chr2:46707664-46707788
  hypo

SEQ ID NO: 250550 - DNA, 81 bp, Homo sapiens; identical to SEQ ID NO: 207967
  chr2:46834766-46834847
  hypo

SEQ ID NO: 250551 - DNA, 223 bp, Homo sapiens
  chr2:47095093-47095316
  hypo
cttggcagaggcgtcggccttcctaatgggctgaatctccctctgcctctgaattatgttcaactcgacaaatactgactgggccgatcagcatgcctggctctgtgctgagtgtcactgaactcgaggaacttccctccaggaattctgagtctagtagaatagacaggcaatgaaaccttactgagagaagcgcagggctgggcatgatggctcatgcctg

SEQ ID NO: 250552 - DNA, 160 bp, Homo sapiens
  chr2:47102026-47102186
  hypo
agcctgaattcccctcggtttatgaggtaaagaatagctggtctccttcacatgctttcccgaccctatcctggataaactgaggcaggaaggcatctgctttctactccagtgatgttgcggccgggatgccttctggggaactcgaatgctgcaggca

SEQ ID NO: 250553 - DNA, 158 bp, Homo sapiens
  chr2:47193930-47194088
  hypo
tttttttttttttttcgaagataaattcctagaaagtagaattactgaatcatagagtatacattttttggagactttgatacagaagccaaattgcctgtgttttttgttttttttttttccgttaaaaaattgtgttggccgggcgcggtggctca

SEQ ID NO: 250554 - DNA, 134 bp, Homo sapiens
  chr2:47200521-47200655
  hypo
agccttccagccaccgcatggtgcagggaaacccttgctaccctcatttatcccccgtcagggagggcctcagtgccgagtgcggcggaggatggatccctcccactgccgcaggttgccggttgaggtgaact

SEQ ID NO: 250555 - DNA, 307 bp, Homo sapiens
  chr2:47232013-47232320
  hypo
ttgcccccagcctgcgtgttgcccccagggtatagaggtgggcagaggggtgggactatctgcacataccaaagaacacaagagtcccacatccttgatggggagcttctggcttggtgatgaggagctcccctcttggaattagacagaatttcccgctcatacagcacctttccctctcctaccgccacccccagcagccatctggcaactctgtgagctactgaaatcctcggcgctggacgccaagagcagagttcttgagtgtggggaagctctccctggggagggacggaggagagtttcc

SEQ ID NO: 250556 - DNA, 118 bp, Homo sapiens
  chr2:47234699-47234817
  hypo
tccatttctggccccgcagccgtctctgaggagggccctcctggcttgccagtgcctcctccacgcatcaagggcgtgccagccagctcggggcctcggcagccgaggcaggccaggc

SEQ ID NO: 250557 - DNA, 127 bp, Homo sapiens
  chr2:47238529-47238656
  hypo
gtgcccctgatggccgcgaaggtctgcatcgggtcccttcgctgggtgagtgagctgtgagggcaggtcccagaggcctcctgtggggagggtggcagcagctggctgtgcacgtcttgacgtgtat

SEQ ID NO: 250558 - DNA, 101 bp, Homo sapiens; identical to SEQ ID NO: 207969
  chr2:47247696-47247797
  hypo

SEQ ID NO: 250559 - DNA, 39 bp, Homo sapiens
  chr2:47249809-47249848
  hypo
tgggagcggcagtcacggtgacatcgggtataaatgagc

SEQ ID NO: 250560 - DNA, 80 bp, Homo sapiens
  chr2:47370888-47370968
  hypo
agtgctgggattacaggtgtgagccaccgtgtctggccaccctttgctcatttttaaccggaatatttattacaattgga

SEQ ID NO: 250561 - DNA, 204 bp, Homo sapiens
  chr2:47419053-47419257
  hypo
ggctctatttaagccgagcacttcacgtcattccactctgccttgttttcagttgagggaagggagggatgatgattcctcttgggggaatgtgggaggaaaggtaaacagtgcacgtgaacttccaagagctgcctagaaccaagaaaggcacattctctccttcccattcatggggcaaatatttaccgagccaggactctg

SEQ ID NO: 250562 - DNA, 172 bp, Homo sapiens; identical to SEQ ID NO: 207970
  chr2:47475844-47476016
  hypo

SEQ ID NO: 250563 - DNA, 78 bp, Homo sapiens
  chr2:47574177-47574255
  hypo
cccatgcattgttccagtgacgcttagttcaccggcatgaggctgtatctggaccgcggctcccctagccccatcaga

SEQ ID NO: 250564 - DNA, 83 bp, Homo sapiens
  chr2:47595493-47595576
  hypo
cccgaaatcatctcggttctcagtatttggctctatgggaacaccttttcttttctctctttttttttttttttgagacggag

SEQ ID NO: 250565 - DNA, 180 bp, Homo sapiens
  chr2:47598300-47598480
  hypo
aatggtgactggtatgttgcaccgttattcaaatgttagacatgtagtttgatttcagtttctcttaactgtggaataaacaacttggctgccgtctctctctctctcttttttttggaaacagtgtctccgtctgtcgttcagcctggagtgcagtggcacatttacatgtcactgcgt

SEQ ID NO: 250566 - DNA, 87 bp, Homo sapiens
  chr2:47598540-47598627
  hypo
aggcatgagccaccggtccggcatctcttggtttatttgtaagatggtgcctagaagtggagtggcgtttgccaaaggtctctggaa

SEQ ID NO: 250567 - DNA, 38 bp, Homo sapiens; identical to SEQ ID NO: 207977
  chr2:47802077-47802115
  hypo

SEQ ID NO: 250568 - DNA, 143 bp, Homo sapiens
  chr2:47845123-47845266
  hypo
gctctcttcccgagcgggtgggagagttggggctaggcttcggtgcttgtccttctctatctcagggggtgccaaattgcctgaggcccaagccgtgccagggaaaatttgctgacaggcctgtgtcccggtgtcccttctgg

SEQ ID NO: 250569 - DNA, 45 bp, Homo sapiens; identical to SEQ ID NO: 207978
  chr2:47918383-47918428
  hypo

SEQ ID NO: 250570 - DNA, 100 bp, Homo sapiens; identical to SEQ ID NO: 207979
  chr2:48539633-48539733
  hypo

SEQ ID NO: 250571 - DNA, 86 bp, Homo sapiens
  chr2:48606934-48607020
  hypo
aaaaaaaaaaaaaaaaaaaaaaaaaaaaaaaaaagtcatcaagagctttatgccaataagttcaacaacttcggtgaattaaaatg

SEQ ID NO: 250572 - DNA, 107 bp, Homo sapiens
  chr2:48742859-48742966
  hypo
aggcccatttcaaccgtgtccaggcctccagattagctgaggagttcctgaaacccacttctccttacctctccgcctgtggcaccatctctcgagtctactctcta

SEQ ID NO: 250573 - DNA, 91 bp, Homo sapiens; identical to SEQ ID NO: 207980
  chr2:49621663-49621754
  hypo

SEQ ID NO: 250574 - DNA, 37 bp, Homo sapiens
  chr2:53992665-53992702
  hypo
ccaactgtagagcacgtgtccgcgtaagcctctgtaa

SEQ ID NO: 250575 - DNA, 36 bp, Homo sapiens; identical to SEQ ID NO: 207981
  chr2:54019055-54019091
  hypo

SEQ ID NO: 250576 - DNA, 88 bp, Homo sapiens
  chr2:54027326-54027414
  hypo
ttttatttatattttttccccatagaaaaccaagttcgcagtaccattacagaatatcagtcatttctgctaccgcaatgccaatatc

SEQ ID NO: 250577 - DNA, 154 bp, Homo sapiens; identical to SEQ ID NO: 207982
  chr2:54097367-54097521
  hypo

SEQ ID NO: 250578 - DNA, 159 bp, Homo sapiens
  chr2:54124939-54125098
  hypo
aatttaaagacttcaggtcacgtacatattctcaaacccaagactgtagctaaaacaaggtatgtacctttcgaactacaattgcatcatggttgagattctcaacaaaaaaccgtatggcacgaagaggcaacactcggtcatctctcagcagtagag

SEQ ID NO: 250579 - DNA, 114 bp, Homo sapiens
  chr2:54308420-54308534
  hypo
atttgtaataataacggcagtattatcaagtacagtcctgcagtacatatgacatttccatccacaatgcacctctaataggatggcccgcctagaaaacggtagccccataag

SEQ ID NO: 250580 - DNA, 292 bp, Homo sapiens
  chr2:54312128-54312420
  hypo
gtggggaatgtttccggatggaatattctatgtcttcaacttactttcaaaaaaacaatacagcaagtcctcaaataagtctctttgttcaacgtcgttttgttcagtgtgagaaaaatgatgagaaaaaaaatcattcctggaaatatattcctggtcagggccactgtctgtgtagagttgcacgttctcctcacgtctgtgggatttttctccaggtgatccagtttcctcccacgttccaaggctgtgcacatttagttcactggcgggtccacgtggtggcactgtg

SEQ ID NO: 250581 - DNA, 120 bp, Homo sapiens
  chr2:54343976-54344096
  hypo
tctaagctaattccgactggctattttaaagagcaggcgtacgagctcaagtggcggggtgaataatttggcaggaagggtggttacagaacaggtgactcaggatgattcaggtcagag

SEQ ID NO: 250582 - DNA, 137 bp, Homo sapiens
  chr2:54880809-54880946
  hypo
atatccagaagcgcgagaacgaggtcctggaagcctggaagtccctcctggacgcctgtgagagccgcagggtgcggctggtggacacaggggacaagttccgcttcttcagcatggtgcgcgacctcatgctctgg

SEQ ID NO: 250583 - DNA, 79 bp, Homo sapiens
  chr2:54939737-54939816
  hypo
ttactcttctcatgcggaaatgccgagttcccatttagtatggaatcttaattcccatgtcaaccgatatttgccgagg

SEQ ID NO: 250584 - DNA, 31 bp, Homo sapiens
  chr2:55098810-55098841
  hypo
cgcgcatgcgcgcacgcgtgtgtgtgtattt

SEQ ID NO: 250585 - DNA, 360 bp, Homo sapiens
  chr2:55173805-55174165
  hypo
tgtcaagtaagtattcacaccgctctggagacaaacacaggtgtttggtgaacatccagtactaagtgttcacgcagaatccacaaccgcgaagggtcaatacttaaaatccgctgaatttgccacaatgcaggtttcttccccttgctcctctcatcttcagttttgaagcaatacagctgtaaacatatgcttgcgaaatgagaaagaaacattgagattgctttacctttcggtttttttctgaaaatcaaggtgaaaaaaaaaagcatcggattgcgtctgtgtatatatatacaatctcctgtatatataaatacacggtgtttgtgcttgtacgcatactctatattcactgta

SEQ ID NO: 250586 - DNA, 207 bp, Homo sapiens
  chr2:55175832-55176039
  hypo
ttcaggctgggtcccgtggcaggcggggagtgagagaggagggcaggactgaacagatccaagtggaggggcctttgaggcgggaggagagaggaggccggcactggcctagacaggccacaccgggaaggcagccttgcagcccttgttcaatgctgtgcttcctctggccgctctctcttccagaccacccgttagccgagcagc

SEQ ID NO: 250587 - DNA, 240 bp, Homo sapiens
  chr2:55289046-55289286
  hypo
aaaaacccgagaccctagcaaggcaaacacacaaaaacggctggacgttgagagaagcacattggcggaggaacacacaagcggttggatttcgagaggacatcaagagcacgtcaagagcacgtcaagagcacacggacaggcactggcacgccggcaggtcattgaccggcagaacagagtttggccagggctgtcagagaagagtcgggccgccaagcagcccgacttccagcggaa

SEQ ID NO: 250588 - DNA, 232 bp, Homo sapiens
  chr2:55366223-55366455
  hypo
ggctaataacccaacggtcacatccactaattcaggcctcctggtgcccaatagagccaacttcccaaaatgctgccttgtatagggggaccccgtttgatagccaggcccacgatgcaatgacacactgccataaagtacaataaagagtacccgcctctactcttcatggcagaggacaaagttcatccattgtattatcatgaagcatcattacgttgggcagtcattt

SEQ ID NO: 250589 - DNA, 102 bp, Homo sapiens
  chr2:55391617-55391719
  hypo
tctctacctggcatctgagccgagctccttctaagcgcgtgtttacgatggctccgactcatgccttaaaaaaaaaaaatcgctacagaaaataccaagact

SEQ ID NO: 250590 - DNA, 112 bp, Homo sapiens
  chr2:55451552-55451664
  hypo
acaaaggatcccttcacctccgacaatgtcagattcctggtccttagctggcgctgcagtttgtgcagcaggctgtgtggccagtgtactcggagtgatcctggagtctgag

SEQ ID NO: 250591 - DNA, 100 bp, Homo sapiens
  chr2:55458366-55458466
  hypo
cagagcgaaattccgtctcacgaaaaaaaaaaaaaaaagttccaggaagaataaacgactggattcttcagaaatgccaaaacacgggagggcataggtc

SEQ ID NO: 250592 - DNA, 84 bp, Homo sapiens; identical to SEQ ID NO: 207986
  chr2:55499046-55499130
  hypo

SEQ ID NO: 250593 - DNA, 40 bp, Homo sapiens
  chr2:55669240-55669280
  hypo
tagggtggagccaagatggccgaataggaacagctccggt

SEQ ID NO: 250594 - DNA, 99 bp, Homo sapiens
  chr2:55687100-55687199
  hypo
cccccacgatttcacgtatgacccaaccaatcagcactccccaactcactgcccctcccctcccaccaaattgtcttgaaaaactttgatccccaaatg

SEQ ID NO: 250595 - DNA, 38 bp, Homo sapiens
  chr2:55687319-55687357
  hypo
tggagtaaggtgaacccactgggcggttacaaattagg

SEQ ID NO: 250596 - DNA, 42 bp, Homo sapiens
  chr2:55825329-55825371
  hypo
tgggcgacagaacgagactccgactcaaaaaaataaataaaa

SEQ ID NO: 250597 - DNA, 87 bp, Homo sapiens
  chr2:55874486-55874573
  hypo
tatctgtcagcaaacgataatcttctatttcacccttctcaggatcggttttggtgaccaatcctattgctacgcctgcaacagcag

SEQ ID NO: 250598 - DNA, 77 bp, Homo sapiens
  chr2:57645780-57645857
  hypo
atattattcaagctaatcttcgatgtttttcgccatttgactcttcattagaaattattctggaggagggaggagcc

SEQ ID NO: 250599 - DNA, 34 bp, Homo sapiens
  chr2:58614660-58614694
  hypo
gaccggagctgttcctattcggccatcttggctc

SEQ ID NO: 250600 - DNA, 34 bp, Homo sapiens
  chr2:58788931-58788965
  hypo
ccggctggaatgcgtctgatttttgtaccattta

SEQ ID NO: 250601 - DNA, 38 bp, Homo sapiens
  chr2:59382731-59382769
  hypo
tgacgtcgtgatccgcccagcctcgatttctcaaatcg

SEQ ID NO: 250602 - DNA, 131 bp, Homo sapiens
  chr2:60598576-60598707
  hypo
ggacccagcggctccgttgactccccacacccaagacccacagccacaggacacgggcttctctggtccacttagccctcgtcagcgccaacagttctaatgattccagggtccttcgatggccctcccgc

SEQ ID NO: 250603 - DNA, 45 bp, Homo sapiens
  chr2:60642569-60642614
  hypo
ttaaaaattatttctcaggccgggcacggtggctcacgcctgtaa

SEQ ID NO: 250604 - DNA, 81 bp, Homo sapiens
  chr2:60688977-60689058
  hypo
tcgccaggaagggcggcttgctacctggctggaatggttgcagtaacctttgcatagggctgggccggcctggggacagcg

SEQ ID NO: 250605 - DNA, 205 bp, Homo sapiens
  chr2:60704080-60704285
  hypo
gcctttgtagttagaagggacgataaaagacactgccctgaacatatttctgtcacccgaattgtccagcttcacacaaacgtatcacaaacaccccgatgcctccctgccccactcgagaaatgaagaaaaggatgggaaatcatcatttggacacctggaaagccttgcaaaccacacttgcgtttctcccaggttaagtatt

SEQ ID NO: 250606 - DNA, 146 bp, Homo sapiens
  chr2:60705871-60706017
  hypo
ggctgaatgaaggagcgctctggtgctgcgaggccaggcctcctcccatgacggcaagtccttctttcagaaaacaggcctctgcccggggcatgctgcagctgcttctctgcagtgcctcagcaccttcccgcctcccaggcaca

SEQ ID NO: 250607 - DNA, 450 bp, Homo sapiens
  chr2:60706376-60706826
  hypo
ctacccacctagcaggtccacgtggggactcagcctatggacacctggcctctgcgggcacagcggccacacaccacggtgggacccggagaccattttttgttttgagtctctctaagactgcttgggaaatgaggtctctcaggtctagcatttccacgcagtcccaaccatgaggctgaccagaggccaccaacgtcaagctctctcaggtctactaggaacaggaaagaataactctcccttaacaagcccctcaggctgaaatccttttgcttccagggcctcaaccttctactgctgggtagaaagccccctctgtcaccggcccacagatctcagctgccatcgcactcaaaccctgtcaggcggtggagagtgtggacggcaggctgacgcggtttcaaagaggccgaccaggcaagaaccgtcctgtactcctgccccagc

SEQ ID NO: 250608 - DNA, 63 bp, Homo sapiens
  chr2:60733548-60733611
  hypo
aggacagagctggctcaggacgccacatgggtcaacccgagcgcaccagtcctcagaccctcc

SEQ ID NO: 250609 - DNA, 58 bp, Homo sapiens
  chr2:60779104-60779162
  hypo
tcaaaatccacttccactttttttgaaaatcttccaaaaaatagtaagaggagggagt

SEQ ID NO: 250610 - DNA, 124 bp, Homo sapiens
  chr2:60812484-60812608
  hypo
gcaggtgacctaagagggagcggtgtgcaaattgatttggaggcgatcaatggctcggggcgcggccccggctcgctgccgtgtcactgatcctctccaaatcgattcacacaccattcctcct

SEQ ID NO: 250611 - DNA, 35 bp, Homo sapiens
  chr2:60986216-60986251
  hypo
gaattggctgagcgcgggggctcacgcctgtgatc

SEQ ID NO: 250612 - DNA, 261 bp, Homo sapiens
  chr2:61035610-61035871
  hypo
ttaagcgggaatctcggttcctacctccccagacctgctgcaggaactccgggccgctctgggctttgccctgacaagcaggaggggtggcttacccgattggtcagcttggggagggaactaagcatgtgcggccacaccctgtggctcctcccttttacgtttttcccgccctgcgcagtggctctgctgtgtctgcgggtggccttgactgtgaagagcccgtgcttggagcacactcaaagccgctgtcttcaatga

SEQ ID NO: 250613 - DNA, 169 bp, Homo sapiens
  chr2:61074833-61075002
  hypo
tccctagcacttctcaccaccgaacacactcgcacacacgtgtgcacacacgcttgctgttattattaatcttgtttattgcttgttttcctcaatagaacgtacatggcatgagcgctgcagggtttttgtgatttcagttcactccgttttccccagcacctggagc

SEQ ID NO: 250614 - DNA, 85 bp, Homo sapiens
  chr2:61088705-61088790
  hypo
tggcttctggtgggtttcatcgataggagggagttataaggggcgaagagcgagtagacaggacgatatttacctccccccacag

SEQ ID NO: 250615 - DNA, 104 bp, Homo sapiens; identical to SEQ ID NO: 207994
  chr2:61135144-61135248
  hypo

SEQ ID NO: 250616 - DNA, 53 bp, Homo sapiens; identical to SEQ ID NO: 207995
  chr2:61175238-61175291
  hypo

SEQ ID NO: 250617 - DNA, 119 bp, Homo sapiens
  chr2:61175980-61176099
  hypo
aatagaggttaacgctgtaaaaggtcaactaattccaagttttaaaaattgggcgtaatcagaaattcagattcataagaactgaatcctcttcattttcttgtcggaacaactcttcc

SEQ ID NO: 250618 - DNA, 40 bp, Homo sapiens
  chr2:61186779-61186819
  hypo
acccagagtgctgggattgcaggtgcgcaccactgcactc

SEQ ID NO: 250619 - DNA, 34 bp, Homo sapiens
  chr2:61189413-61189447
  hypo
aaacttgattcggccgggcacggtggctcacgcc

SEQ ID NO: 250620 - DNA, 126 bp, Homo sapiens; identical to SEQ ID NO: 207997
  chr2:61304102-61304228
  hypo

SEQ ID NO: 250621 - DNA, 39 bp, Homo sapiens
  chr2:61394939-61394978
  hypo
gcaggttggccgggcgcggtgactcacgcctgtaatcct

SEQ ID NO: 250622 - DNA, 139 bp, Homo sapiens; identical to SEQ ID NO: 207998
  chr2:61448896-61449035
  hypo

SEQ ID NO: 250623 - DNA, 40 bp, Homo sapiens; identical to SEQ ID NO: 207999
  chr2:61471724-61471764
  hypo

SEQ ID NO: 250624 - DNA, 120 bp, Homo sapiens; identical to SEQ ID NO: 208000
  chr2:61505031-61505151
  hypo

SEQ ID NO: 250625 - DNA, 35 bp, Homo sapiens; identical to SEQ ID NO: 208001
  chr2:61505211-61505246
  hypo

SEQ ID NO: 250626 - DNA, 32 bp, Homo sapiens; identical to SEQ ID NO: 208002
  chr2:61556157-61556189
  hypo

SEQ ID NO: 250627 - DNA, 43 bp, Homo sapiens
  chr2:61660471-61660514
  hypo
tacaagtggcgaatcggccaggtgcggtggctcatgcctgtaa

SEQ ID NO: 250628 - DNA, 120 bp, Homo sapiens
  chr2:61759938-61760058
  hypo
aggcctggtgacagagcaagactccatctgaaaaaaaaaaaagatttctgacccaactgcaaaactttttactcattcaaaaacatgtttgggccagcacgcggtggctcatgcctgtaa

SEQ ID NO: 250629 - DNA, 163 bp, Homo sapiens
  chr2:61816741-61816904
  hypo
gcgagaaccctggccgaatttttgcaggtggctccagtacagctgcgggtgacccatcttgctctcaggaatgcaacgacgtaaaaggaaagccatgaaacatgtcttttgcaaatattctctcccagtctgtggcttatcttgttctctccatttttttttc

SEQ ID NO: 250630 - DNA, 32 bp, Homo sapiens
  chr2:61885815-61885847
  hypo
ccaccgcgcccggccttcactcttaacagaag

SEQ ID NO: 250631 - DNA, 42 bp, Homo sapiens
  chr2:61923843-61923885
  hypo
ctggagagtagtggccgtatcatttagttccctgctgcctca

SEQ ID NO: 250632 - DNA, 92 bp, Homo sapiens; identical to SEQ ID NO: 208005
  chr2:62116629-62116721
  hypo

SEQ ID NO: 250633 - DNA, 38 bp, Homo sapiens; identical to SEQ ID NO: 208006
  chr2:62146652-62146690
  hypo

SEQ ID NO: 250634 - DNA, 250 bp, Homo sapiens
  chr2:62406299-62406549
  hypo
ttaattaactttgtcggagaaagttgccaagcactcttcagctgttttggaatgttgtattccaagttgtagaggttatgactttctctttctggaacccaaaagcgacttgtggaagcaaaatgagaacagcttttggcctccgacaccacaatgcatcagccagacctggatgttgccactaaactgaggaaaaactgtctctggtgtctccttatggccagaatggcatgttcgactttagacttga

SEQ ID NO: 250635 - DNA, 38 bp, Homo sapiens; identical to SEQ ID NO: 208007
  chr2:62497414-62497452
  hypo

SEQ ID NO: 250636 - DNA, 37 bp, Homo sapiens; identical to SEQ ID NO: 208008
  chr2:62497692-62497729
  hypo

SEQ ID NO: 250637 - DNA, 33 bp, Homo sapiens
  chr2:62585418-62585451
  hypo
atgagccaccgcgcctggcaatctcttctattt

SEQ ID NO: 250638 - DNA, 267 bp, Homo sapiens
  chr2:62635425-62635692
  hypo
ctgtgttgtaaggatgttcacgcagccctctcagaggtcccagaggtgaggaactgacgcctcctgccaacagccatgtgaggacccatcttggacgtgaatcctcccgcctcatatcaagccctcacgtgacagcagctctgcttaatatcttgaccgcaacctcatgagagaccctgaaccagaacaactcaccttagtcgcgtccaaattcctgactctaagttaccattagagatgacacacgttttgctgttgaggctgctg

SEQ ID NO: 250639 - DNA, 71 bp, Homo sapiens
  chr2:62685374-62685445
  hypo
ctgatgggcataggtgtgtccgtgaggcaagcctgctcttgatggagcacgacaggaaatgcagcctggcc

SEQ ID NO: 250640 - DNA, 169 bp, Homo sapiens; identical to SEQ ID NO: 208009
  chr2:63118747-63118916
  hypo

SEQ ID NO: 250641 - DNA, 237 bp, Homo sapiens; identical to SEQ ID NO: 208010
  chr2:63123375-63123612
  hypo

SEQ ID NO: 250642 - DNA, 217 bp, Homo sapiens; identical to SEQ ID NO: 208011
  chr2:63192034-63192251
  hypo

SEQ ID NO: 250643 - DNA, 149 bp, Homo sapiens; identical to SEQ ID NO: 208012
  chr2:63272200-63272349
  hypo

SEQ ID NO: 250644 - DNA, 52 bp, Homo sapiens
  chr2:63855250-63855302
  hypo
gaaagctgaggcagccttgtcgccgaggcccgcaaaggggtcagggaaaatc

SEQ ID NO: 250645 - DNA, 190 bp, Homo sapiens
  chr2:64348216-64348406
  hypo
ccacttaggttacagcgaaataaatctgcgcaggtaggctgcttatatccaatgttgatacctgttcagtccaggaaacatacctgcaaaaatgatcggggcatattctagggtttgctgtttgatgatcctgccttgtcatgtgattccgggctgatgagattgctcaagaagccggacatgacaaatt

SEQ ID NO: 250646 - DNA, 31 bp, Homo sapiens
  chr2:64372516-64372547
  hypo
agagctaaaggcaacgcgtcctgagcgcttt

SEQ ID NO: 250647 - DNA, 120 bp, Homo sapiens
  chr2:64375241-64375361
  hypo
acagaaatgagccaccgcgcccggccaaatatcagtagacttctaatcagaaactgtgcaagtcagaagaccatgaaaaggcatttccaaagtgctgaaaaaaaaacctgcctggcatgg

SEQ ID NO: 250648 - DNA, 133 bp, Homo sapiens; identical to SEQ ID NO: 208013
  chr2:64538768-64538901
  hypo

SEQ ID NO: 250649 - DNA, 108 bp, Homo sapiens
  chr2:64732412-64732520
  hypo
cctcaggggcctctcgggatcttcaggtgcaaagctactgcacggtccttctgagctgaccctgccccgctctaccatacctcttccaatggccgcctcacatcctat

SEQ ID NO: 250650 - DNA, 146 bp, Homo sapiens
  chr2:64835504-64835650
  hypo
ctgaggacagggaggcgaagtgagctgttaaaagtcaccatctaaggagctgtgctggggatagaacacgggtggctacgccgggcatggtggtgcgcacctgcagtcctggctgctggagaagctgaggcggaaggatcgcttaa

SEQ ID NO: 250651 - DNA, 99 bp, Homo sapiens
  chr2:64865161-64865260
  hypo
gaaacctgtcttttggtgttcggaccaggatcgtggttcgaatgaagccaggcccatgcttgctccctcaccgtccccgcctccagctacagcactctc

SEQ ID NO: 250652 - DNA, 36 bp, Homo sapiens
  chr2:65062638-65062674
  hypo
ccgcagggtggggccggcttttcttagggcacatgg

SEQ ID NO: 250653 - DNA, 133 bp, Homo sapiens
  chr2:65251107-65251240
  hypo
cttgctccattcatcaggcacgagcccctaagtcagggcaggcatgctcagggggcagtgctaccgccggagctgctgtcgctgatccttttgcggccacctgcttgcaactgggaagcgtcaagctgctcag

SEQ ID NO: 250654 - DNA, 35 bp, Homo sapiens
  chr2:65289380-65289415
  hypo
gtcctggccaggtgcggtgactcccgcctgtaagc

SEQ ID NO: 250655 - DNA, 38 bp, Homo sapiens
  chr2:65456602-65456640
  hypo
attgaggccaggcgcggtggctcatgcctgtaatccca

SEQ ID NO: 250656 - DNA, 65 bp, Homo sapiens
  chr2:65740149-65740214
  hypo
aaggcctggtgttgccggatcttccaggaaagtttcagagaagctggaaacgcataactttatgt

SEQ ID NO: 250657 - DNA, 38 bp, Homo sapiens; identical to SEQ ID NO: 208015
  chr2:65829225-65829263
  hypo

SEQ ID NO: 250658 - DNA, 37 bp, Homo sapiens; identical to SEQ ID NO: 208016
  chr2:65829503-65829540
  hypo

SEQ ID NO: 250659 - DNA, 80 bp, Homo sapiens
  chr2:65868440-65868520
  hypo
ccatctaaaaaaaaaaaaaaaaaaagaatgtttgaaaccaaactggtttgtcaaatgcataacagcgcccttgatttcac

SEQ ID NO: 250660 - DNA, 92 bp, Homo sapiens; identical to SEQ ID NO: 208017
  chr2:66604303-66604395
  hypo

SEQ ID NO: 250661 - DNA, 38 bp, Homo sapiens
  chr2:67625732-67625770
  hypo
gctgggattacagccaccgcgcccggccaccttacatg

SEQ ID NO: 250662 - DNA, 146 bp, Homo sapiens
  chr2:67626111-67626257
  hypo
agtttgcgaagtgccgcgtggatttttatgtgaaacaagcatttctgttacggttcaggtaattatctctgggaaaaaaaattatcttggactataaaagttagtctcagctatttgaccttggggtcttacgaagtaaggtaatg

SEQ ID NO: 250663 - DNA, 34 bp, Homo sapiens
  chr2:67721499-67721533
  hypo
aacatgtgggaccagccaggcgcggtggctcacg

SEQ ID NO: 250664 - DNA, 38 bp, Homo sapiens; identical to SEQ ID NO: 208019
  chr2:68287484-68287522
  hypo

SEQ ID NO: 250665 - DNA, 37 bp, Homo sapiens
  chr2:68287762-68287799
  hypo
agactccaaaagaaaagaggggcgagatggggtgggg

SEQ ID NO: 250666 - DNA, 79 bp, Homo sapiens; identical to SEQ ID NO: 208020
  chr2:68433262-68433341
  hypo

SEQ ID NO: 250667 - DNA, 191 bp, Homo sapiens
  chr2:68486675-68486866
  hypo
gcattagtaacctgcgtttgcatgtcctttacttctgttgtttccacgagaagaaaatactctgaacattgcgctattgtttttgagcaagcctgttctctcttttgcctgactctggacactgcataattgtttaatggcgtaaatggaatagcttaattctaaaagatccttggcgaaacagtactgga

SEQ ID NO: 250668 - DNA, 520 bp, Homo sapiens
  chr2:68672363-68672883
  hypo
attctaagtccccagcgaaaacccacaccaaaatcatcaccagcgtgcacatctgttcccttgttgagatttaatcactgaagagcaggtggaagccgtcctgaacgaattaccccatgtacctagaagcctcttcccaaatcaagcagtgatcacctcactcataaacagagcacgcacccaaaggttttgcttgatgtattttgagactagtttcacgtgttgctgctaaacgtttccagggagttgcaaaagttaatccttatggatcggtgattgaaatacagtgacatccctgctgctctgcagtgtgcgcaaaggtcaaatcaaaataacaaacacgcacgacgtcttcgatcaccttcctgtaaaaccgggtttctagccggacccatgtcctcacagttcctgaatcaagttcaccgtctgtgcaagcgccacctgacagagctccctgcgacactgaaacgcgtttgggcacttcccacgtgggaaccactcgccacgggcacctcctgag

SEQ ID NO: 250669 - DNA, 37 bp, Homo sapiens
  chr2:69116719-69116756
  hypo
gagcctgtggcggccgctgcctcgtgcgacaagtggc

SEQ ID NO: 250670 - DNA, 64 bp, Homo sapiens
  chr2:69612624-69612688
  hypo
gagattataggcgggagccaccacgcccagcgctgatttatttatttatttatttttttttcag

SEQ ID NO: 250671 - DNA, 45 bp, Homo sapiens
  chr2:69778023-69778068
  hypo
aggcgtgagccacagtgcccagccgtcattcatttttaaagtgtg

SEQ ID NO: 250672 - DNA, 33 bp, Homo sapiens
  chr2:69813143-69813176
  hypo
tgctccctgccctccgcacgtcactgccccaag

SEQ ID NO: 250673 - DNA, 142 bp, Homo sapiens
  chr2:69928487-69928629
  hypo
ccattctctccactgccctccgtgtccctcccgctagcaaacaccattctattttctatctgtatgattttgactactctggctaccttgtaaaagcggaatcatttgtctttttgtgactggcttatttcacttagcgtaa

SEQ ID NO: 250674 - DNA, 120 bp, Homo sapiens; identical to SEQ ID NO: 208024
  chr2:69997975-69998095
  hypo

SEQ ID NO: 250675 - DNA, 45 bp, Homo sapiens
  chr2:70005612-70005657
  hypo
gaaagtaaagttgggctgggcgcggtggttcacgcctgtaatccc

SEQ ID NO: 250676 - DNA, 171 bp, Homo sapiens
  chr2:70055299-70055470
  hypo
tgggaaacacctgcacgttctttgtgctggcaaattctgtgtatgcaagctgatccctctgcagccattattctccgcctcccacctccaccccaagctgcctcggctagcctctctcggttcagatttctcatgcatgaatcagacattagtccacggggaccctcaaac

SEQ ID NO: 250677 - DNA, 221 bp, Homo sapiens; identical to SEQ ID NO: 208025
  chr2:70165950-70166171
  hypo

SEQ ID NO: 250678 - DNA, 86 bp, Homo sapiens
  chr2:70203999-70204085
  hypo
cacacactcatacaccgaggagacacaaactgggcaaaaatgggacaggcaaggtgactcatgcctgtaattccagcactttggga

SEQ ID NO: 250679 - DNA, 260 bp, Homo sapiens; identical to SEQ ID NO: 208027
  chr2:70224805-70225065
  hypo

SEQ ID NO: 250680 - DNA, 60 bp, Homo sapiens; identical to SEQ ID NO: 208028
  chr2:70329617-70329677
  hypo

SEQ ID NO: 250681 - DNA, 84 bp, Homo sapiens
  chr2:70367822-70367906
  hypo
accgtgcccagcgacaagataattttaaaaggagagggaacgtctgcttttgttgcctttctcgtcttttgtggttccacatac

SEQ ID NO: 250682 - DNA, 224 bp, Homo sapiens
  chr2:70393988-70394212
  hypo
gattcccttttgctcgctatccccaggttcttgctatttgcattcatgtctaagcaaactaatgacatgctctctcacccgatggtcagcaccatgaatgctgagggactacaagttaggacactgcttacccagcaagcatctgtctttctctctgaatatgacctcaaggcaggtaaaatacttgaaagtacttaaccaacctcttaaagaaccttgcggcc

SEQ ID NO: 250683 - DNA, 84 bp, Homo sapiens
  chr2:70418577-70418661
  hypo
ccttacaaaaaatgaaaattaaaaaaaaaatcgcccgagattttctacattattagcagatgtcagctgcgaatttggagtttg

SEQ ID NO: 250684 - DNA, 101 bp, Homo sapiens; identical to SEQ ID NO: 208032
  chr2:70427484-70427585
  hypo

SEQ ID NO: 250685 - DNA, 94 bp, Homo sapiens
  chr2:70430854-70430948
  hypo
ttctgccacaaccccgatgggttacctccgcttgtcaataccacttgccaggagggcatacggagataactgagactattaagaagctagagga

SEQ ID NO: 250686 - DNA, 40 bp, Homo sapiens
  chr2:70521965-70522005
  hypo
ggcgtgagcccccgctcccggctgggcctctatatttttt

SEQ ID NO: 250687 - DNA, 39 bp, Homo sapiens
  chr2:70557159-70557198
  hypo
ctgtaaagattcaaaagtgccggctgggcgcggtggctc

SEQ ID NO: 250688 - DNA, 212 bp, Homo sapiens
  chr2:71355399-71355611
  hypo
gtgcttttgtttttcggcgaagttttatgttccttaaaagaggggccataacatagaattaccatgtaatccagcaattccacttatgagtatacacacccccaaagaagcgggaattcagaagtatttgtacacccacgttcatagctgtattacaatagccaaaaggtggggataacccaaatgtctatcaagagacgaatggataaaca

SEQ ID NO: 250689 - DNA, 87 bp, Homo sapiens
  chr2:71564761-71564848
  hypo
ctgagctcaagcattccacctgtctcggcctcccaaagtagtaagattacgtgcatgagccaatgcgcagcctataaaattattcag

SEQ ID NO: 250690 - DNA, 293 bp, Homo sapiens
  chr2:71753210-71753503
  hypo
gcggtagtaagtgtcggagcgcagtctgccttactgcagaatgcagcatttatgtggcgaagctggaactcttagaaaaggaaagtaaaaccctgtgctcaggagcgcatgaaggaatcgtatttggttttctttgtagctggagagaaaagacccctctgaagacaaggaggacattgaaagcaacctgctccggcccacaggcgtagccctgcgaggagcccacttctgcctgaaggtcttccgggccgaggacttgccgcagagtgcgtggggcgcgcccttgggtggga

SEQ ID NO: 250691 - DNA, 174 bp, Homo sapiens; identical to SEQ ID NO: 208034
  chr2:71763615-71763789
  hypo

SEQ ID NO: 250692 - DNA, 32 bp, Homo sapiens
  chr2:71792491-71792523
  hypo
attcaggcgtgagccaccgcgccagccctcct

SEQ ID NO: 250693 - DNA, 49 bp, Homo sapiens
  chr2:71839446-71839495
  hypo
agaaatgttgagtcccgggccaactcccctcgcccgctccccagccagt

SEQ ID NO: 250694 - DNA, 438 bp, Homo sapiens
  chr2:71899491-71899929
  hypo
ccctgggcctgccacggagccagccctctgccgtggggttcagggcctctggcaggcaggccctccagggaccccattaaccagacgagactgtcgtaaagtacaaggtctcctttcatccggcggctttgaaccaccactggttgccccggccaggctccccacctggagcccagcacaccctgcacgtcaggcacccaccctgcaaataaacagctagtaaaagcgcccaggccaggagcataatgagcgcctgggacctgggggggttcattccccaggctggagccccagcccagctgctcccaccaggggccgtttgaacctctggctcattaccgagcccataaaccaagctggccagaggaatggaggctgctggcgggccatgcaggcgggcctgcggagctggccataaaagctcgccagaggagggag

SEQ ID NO: 250695 - DNA, 153 bp, Homo sapiens
  chr2:72310170-72310323
  hypo
accactctcagaagcgcgggctgaggcttgcacacagtcagattcccgcgcagcacgtgcacaggtgtgcccaggggcgagcggtgtttgaagtgcttgggacaggatggtcggaggaaggcgtgcgctgagcttgaacggttggcaggatat

SEQ ID NO: 250696 - DNA, 33 bp, Homo sapiens
  chr2:72316766-72316799
  hypo
accccagggagaagcggcttcctgggcatgcgc

SEQ ID NO: 250697 - DNA, 53 bp, Homo sapiens
  chr2:72358940-72358993
  hypo
gacgctgaagagtgcgcccaagggggcacggctcttcccgtcccccaacccca

SEQ ID NO: 250698 - DNA, 374 bp, Homo sapiens; identical to SEQ ID NO: 208035
  chr2:72359326-72359700
  hypo

SEQ ID NO: 250699 - DNA, 155 bp, Homo sapiens; identical to SEQ ID NO: 208036
  chr2:72359982-72360137
  hypo

SEQ ID NO: 250700 - DNA, 240 bp, Homo sapiens
  chr2:72366138-72366378
  hypo
ctgtgaaccccatggccctgcgtgctgcgcttgctcagccagatagcctcccccttctctgctggcaggtgtggacagatggacatatggatgggcagtaggagcgggtagagccggagtggggacccactgcccaggccagtgactcagactgggaggaatggaagcggctgcccaggaggggtgggggcctgggcaggccacccggccaagccaccggagcctcggcctgcagagtgg

SEQ ID NO: 250701 - DNA, 180 bp, Homo sapiens
  chr2:72430074-72430254
  hypo
agaccattctgcctaagagccggccagttcacgacgttcatcgtttcttacttttgtgcctttgggcaaattactaacctctctctaaaatgaaaataatatttgccttggtagagtattcagcatagtgcctggcacaaacgttcagcaaatactggcgatgatgatgataatgacaat

SEQ ID NO: 250702 - DNA, 31 bp, Homo sapiens
  chr2:72459902-72459933
  hypo
tattataaagaaacccgggccaggcgcagtg

SEQ ID NO: 250703 - DNA, 159 bp, Homo sapiens
  chr2:73042122-73042281
  hypo
aaaataaaataaaataaaatggctttgtttactgatacctctttatgactaaaataataaagaggcaggtttgaaactttcgtttcttaaaaacaatggtttatttaccaatcacaactaattccactgtacatactcgtcatgcatttaagcaacata

SEQ ID NO: 250704 - DNA, 266 bp, Homo sapiens
  chr2:73217260-73217526
  hypo
tggtccgccagccccggggcagcgcagcattccgtggagccagagtacttcctggcatgcccaccctgggctctcgggaacacagcctccatcttaagtctcaggctgatcctcagagtccaatccttgtcctcccagctcgctcgagggaaggctgggaggcagccaggggcatcacggcgtggacacacttcagtggtacagtgggcagggctggggagctgccggctcatactgggccctgctgcccccgccacatgaataga

SEQ ID NO: 250705 - DNA, 282 bp, Homo sapiens; identical to SEQ ID NO: 208042
  chr2:73302643-73302925
  hypo

SEQ ID NO: 250706 - DNA, 293 bp, Homo sapiens
  chr2:73308598-73308891
  hypo
ggcttcaggggcggcggtggtggcggcagcggcagcagtggcagcagcgggggaggcggctgcaaaaaggttagtgcttagcatgggagcagcagtgggagcaggagtgggaggggccggagcccagggggagcaggggaggtggtgaggaagagcagctgggtcagattctacctgaggagacacgtccaggctgtggagggagacaaaaccgtgagcctcctggttaatgccaagactggaaaggcccctgagtcccacgccccaccccctgcttcgggaccaggggccat

SEQ ID NO: 250707 - DNA, 277 bp, Homo sapiens
  chr2:73440138-73440415
  hypo
cccacgcatcaccacgcccggcaaatttttctattttttggagagacaaggtctcactacgttgcccagtctgttcttgagcccgggagctggaggctgccgtgagccgagatcgccccatgccagtatgggcgacaaagcgagaccctgtctcaaacaaaactcacaaaatcaggggacaaggaaacaaaacaaggcttgatagtcaggcctagctgtggggacaaatgccataggtctgtggtttgcagcttcttggggtcctgagagaacaggc

SEQ ID NO: 250708 - DNA, 137 bp, Homo sapiens
  chr2:73493622-73493759
  hypo
cgcccccacctccacggcccaggctggcgctgggcgtgctgccacagctgctgctgatgacctgcagctgccgctcggcacggtcagcccgctcaaggagctcctcaatgaactgctgcagccgcagcttggcgctg

SEQ ID NO: 250709 - DNA, 189 bp, Homo sapiens
  chr2:74120176-74120365
  hypo
cggtaagtactgtacggcttttgccacctcttcctttccggggctgcctggcctcctgggtgcgggaggtgcctccagattggcctggcttctgtgacgctggcccagatcacacaccagagcccttggtgggcagcggcacctgcaagcatactgcagcctgctgagaaaaggcgtatctggccatgg

SEQ ID NO: 250710 - DNA, 33 bp, Homo sapiens
  chr2:74126220-74126253
  hypo
gccaccgcgcccggccacaagaactttcacagt

SEQ ID NO: 250711 - DNA, 506 bp, Homo sapiens
  chr2:74152825-74153331
  hypo
gggtaggactttagccgctccagtagccattaacgccccaccctggttatccttaaaaaattcgattaaaaaaaaagttcttaatatataaacatgacctcagccatcctatatatacatcaacataagaaaaaggtcccgtgctttttatgggaacagcttcaagacaggtatcccagcccccggcccctccccagcccccttgcaatcagatccttgtcttctaaaacctgccacacctaagagcgctgcctgaaggccggtttggcctgttgactcctggttttgactgttggtgatttaagcgattggaactggaagcaccatttgacaacattttgtaaatcattacttctgaggttgttatgacgacggggtgtggcagtccggcttcacctgtggcagcagcttaggtccctgccctcctgcagagcacacttcaccgacagcaggactcaggttttatacaagtctctactcgccattgcttacgtccaagaacccag

SEQ ID NO: 250712 - DNA, 92 bp, Homo sapiens; identical to SEQ ID NO: 208049
  chr2:74155569-74155661
  hypo

SEQ ID NO: 250713 - DNA, 41 bp, Homo sapiens; identical to SEQ ID NO: 208050
  chr2:74193107-74193148
  hypo

SEQ ID NO: 250714 - DNA, 245 bp, Homo sapiens
  chr2:74213648-74213893
  hypo
gtgagtcccaactccgagggggtggagatggtcgaaagaaacggaaacggtgtggtacttgtgagccctgccggcggctggaaaactgtggcgcttgcactagctgtaccaaccgccgcacgcaccagatctgcaaactgcgaaaatgtgaggtgctgaagaaaaaagtagggcttctcaaggaggtaagccggcccttgctgggctaccctgttccttcctcgagggcacggtgatcacggggg

SEQ ID NO: 250715 - DNA, 259 bp, Homo sapiens; identical to SEQ ID NO: 208051
  chr2:74327559-74327818
  hypo

SEQ ID NO: 250716 - DNA, 45 bp, Homo sapiens
  chr2:74350341-74350386
  hypo
aaggtgctaacatgtcaaatcgcttgaattcaggcggcaaagatg

SEQ ID NO: 250717 - DNA, 120 bp, Homo sapiens; identical to SEQ ID NO: 208052
  chr2:74350566-74350686
  hypo

SEQ ID NO: 250718 - DNA, 192 bp, Homo sapiens
  chr2:74454119-74454311
  hypo
gaggatccagagcaccgccaggcagaggatctgcaccagggtgaagaggtggatccggcgcagcggcacgtgccgcaggaaggcatggtccggctggtgcttggctggcatcaggaagagcttgcagcgttcccagaactagggggacagcgggggctcagccaggcagccagaccccgagggcccgctggg

SEQ ID NO: 250719 - DNA, 211 bp, Homo sapiens; identical to SEQ ID NO: 208057
  chr2:74663402-74663613
  hypo

SEQ ID NO: 250720 - DNA, 38 bp, Homo sapiens; identical to SEQ ID NO: 208058
  chr2:74672959-74672997
  hypo

SEQ ID NO: 250721 - DNA, 86 bp, Homo sapiens
  chr2:74679101-74679187
  hypo
gagactccgtctcaaaaaaaaaaaaaaaaaaaatttcagaatctgccccacccgccaaccatgtcgggcattccatgttaacctga

SEQ ID NO: 250722 - DNA, 106 bp, Homo sapiens; identical to SEQ ID NO: 208059
  chr2:74753267-74753373
  hypo

SEQ ID NO: 250723 - DNA, 231 bp, Homo sapiens; identical to SEQ ID NO: 208060
  chr2:74761647-74761878
  hypo

SEQ ID NO: 250724 - DNA, 39 bp, Homo sapiens
  chr2:74762274-74762313
  hypo
attacaggcgtgagccactgcacccggcgaaactggctc

SEQ ID NO: 250725 - DNA, 41 bp, Homo sapiens
  chr2:74874698-74874739
  hypo
cttcatgggttcactttaaacgaaatgaaaacattctcgtg

SEQ ID NO: 250726 - DNA, 134 bp, Homo sapiens
  chr2:75078340-75078474
  hypo
tacccaagtgatctataaaacggaggtgcagaagttttacgaagacaatggagaacaggtcaggaaagccggaagtgcctgacaggtgagaaatgcttgaggaatgcttagccgctgtaaccatcaccccatta

SEQ ID NO: 250727 - DNA, 105 bp, Homo sapiens
  chr2:75105986-75106091
  hypo
ggcgaggagcggctgcgctctactattggggtcgacggttccgtctacaagaaacacccccagtgagtcagtgtgcagggcctggagatgcggagttcctggagt

SEQ ID NO: 250728 - DNA, 222 bp, Homo sapiens
  chr2:75145462-75145684
  hypo
agaaggaccaattgatgaagcgatgttcttgcgtgggcgcgaggatgggatcgagtgcacagcggaaggtggcacttaggaacacgcagcactcgtccatgccagcaggaggcaaggcagaatggtgagtacaggcacacgtgtactgatgtggtgctgggagtgtgggtagaataggcggttgttctggatgatggatacggtttttctcagctcttaaaa

SEQ ID NO: 250729 - DNA, 74 bp, Homo sapiens
  chr2:75785491-75785565
  hypo
aactgagatttgaacgcaagaagcctgacgccaaagcctgaaaccatcactgtgagcatcgacggcactaagct

SEQ ID NO: 250730 - DNA, 151 bp, Homo sapiens
  chr2:75825236-75825387
  hypo
agtcctaggagcgcgcagtgggtggggctggacagcgagttccacttccatgccgcctgcgtgggcctcgcgcctacagatggccaacctgctgtaccacagccagcaccacatcaagatttggttccagaaccggcgcatgaagtacaag

SEQ ID NO: 250731 - DNA, 138 bp, Homo sapiens
  chr2:76642426-76642564
  hypo
gggaagaaagcctccgatgagtatgcctacgacttcctaaaattactgccgtgctcacttcctaagggtaaggagggcacggcgcattgcacccgagaggcggaggttgcagtgagccgagaacgcgcactccagcct

SEQ ID NO: 250732 - DNA, 37 bp, Homo sapiens
  chr2:78904026-78904063
  hypo
ttgatctcctgacctcgtgatctgctgcacttgtttt

SEQ ID NO: 250733 - DNA, 38 bp, Homo sapiens
  chr2:79824567-79824605
  hypo
agcctgggcgacagagcgggtctcaaaaaaaaaaaaaa

SEQ ID NO: 250734 - DNA, 89 bp, Homo sapiens; identical to SEQ ID NO: 208063
  chr2:79933147-79933236
  hypo

SEQ ID NO: 250735 - DNA, 201 bp, Homo sapiens
  chr2:81421335-81421536
  hypo
cggagacgctgtggcgtctctctgggggtctctccccgcccgggtggacgtggcgctccctcctcggcccctggggctcagcgcagccatgcagccctcgcctgcaacctgcagtcatcccgcaccgcggcaacaacataaagtcgtcgttgacgtcgaccatgggcacgtagaaggagggcacgtcgttcacgcacaggg

SEQ ID NO: 250736 - DNA, 499 bp, Homo sapiens
  chr2:81422010-81422509
  hypo
aggagataggagcccgtgtaggtgacgtattcggcgtaccactgggtcgcctgtggcgtgatgcagcacagaatcttgcgcttctcctcgatcttcttcctgatgtgcaggaattcgaagtaggggttggccctgtcgctgtggtaggggtagatggcgtccagcttgatggcgtccacgatggtggccagcgtctgctggatcacctcccgcgtctgctgcgtggacgtgttcagctgctgggtggagtgctggaagtggcgtttgcgcggatgctgggctgggcgtagtcctcctccgagccgcgggcctgaggcacactccttggagtgaggtgtgccctacttgctctcgttcacgagcatctgccggttcctggtgatgcagtgagggatctaccccactctgggggctttcggggcttcggccgtgggttttggttctgattctgtggcttctgggtcgatgccgcagggagggccttcggctggggcggcag

SEQ ID NO: 250737 - DNA, 37 bp, Homo sapiens; identical to SEQ ID NO: 208064
  chr2:85227244-85227281
  hypo

SEQ ID NO: 250738 - DNA, 37 bp, Homo sapiens; identical to SEQ ID NO: 208065
  chr2:85227521-85227558
  hypo

SEQ ID NO: 250739 - DNA, 140 bp, Homo sapiens
  chr2:85280281-85280421
  hypo
ctaaaatgtctgaaacggagcgccagtccatggaaagcgagcgtgcagaccgcagcctgtttgtccaagagctccttctgtccactttagtgcgtgaagagagctcatcctcagatgaggatgatcggggggagatggca

SEQ ID NO: 250740 - DNA, 54 bp, Homo sapiens; identical to SEQ ID NO: 208067
  chr2:85290474-85290528
  hypo

SEQ ID NO: 250741 - DNA, 120 bp, Homo sapiens; identical to SEQ ID NO: 208068
  chr2:85356674-85356794
  hypo

SEQ ID NO: 250742 - DNA, 31 bp, Homo sapiens; identical to SEQ ID NO: 208069
  chr2:85498072-85498103
  hypo

SEQ ID NO: 250743 - DNA, 149 bp, Homo sapiens
  chr2:85515479-85515628
  hypo
tcacaaaccagaggcggagtggaaggaggacctagagacatcccagtttactccatgcggctctccaggctagacgtgtgagcagaacttgaaggtttttcggagggagtcacagaggtttggacaccggcttttttgttaaaatactt

SEQ ID NO: 250744 - DNA, 94 bp, Homo sapiens
  chr2:85521476-85521570
  hypo
aagctctctggatgatttcaactctgggtgaatcacactttgcagagtttgattcagtgggtcgcggtaggtcgagcctgagaatttgcattct

SEQ ID NO: 250745 - DNA, 155 bp, Homo sapiens
  chr2:85596563-85596718
  hypo
caggcagtgacttgccccctcgtagatgagagcatttagggatcacctcgtggggcagatccgccccatacccaccacagaggctgacctagcaagactgaatagcctcgtccaaaaagagagtcctcttcgccgacaatgccagcctcttgaaa

SEQ ID NO: 250746 - DNA, 35 bp, Homo sapiens
  chr2:85686732-85686767
  hypo
aaacaaaaaacaaaaaaaaacgaagaagaagaaga

SEQ ID NO: 250747 - DNA, 34 bp, Homo sapiens; identical to SEQ ID NO: 208070
  chr2:85729115-85729149
  hypo

SEQ ID NO: 250748 - DNA, 292 bp, Homo sapiens
  chr2:85730475-85730767
  hypo
cttgcttctggctctgtccacgcccttcgtagcacccacggagcagaggggcctggtcacagggagaggctgagatgcccagagaaatggatctggccacctgagctgaggcttctctgaaggtgagtcttcaccgaccccgccctagtagtggtgaatcgcgtgtcctgccctgttctctgctgcccctgagcagtgtctgaaccaggggcgccttttaacgccacagattctgcctcagggcgtggaacaccttcttctagaggggcgcgtgagaactctggtaggcagg

SEQ ID NO: 250749 - DNA, 142 bp, Homo sapiens; identical to SEQ ID NO: 208071
  chr2:85776338-85776480
  hypo

SEQ ID NO: 250750 - DNA, 44 bp, Homo sapiens
  chr2:85789679-85789723
  hypo
gaaagagaaagaaaagaaaaggcgggaagaaaagaaagaaagaa

SEQ ID NO: 250751 - DNA, 94 bp, Homo sapiens; identical to SEQ ID NO: 208072
  chr2:85819558-85819652
  hypo

SEQ ID NO: 250752 - DNA, 42 bp, Homo sapiens
  chr2:85833323-85833365
  hypo
atcgtatctagtcaaatgagcggattctaaagcagcctgctg

SEQ ID NO: 250753 - DNA, 211 bp, Homo sapiens
  chr2:85836004-85836215
  hypo
ttccctgggcagaattcttccgagtgcagtgaatccagcctggagagaacgccttcaacatggtcagtgttggctctggcgctttgcaatctcctcctggatacgcaacttgagggcttctcgcatgggtggatccagaggcgtgtgtgccgacaccttctcactcacctttcctgggtcatcaccctacgtggaggaagagtcagaaggc

SEQ ID NO: 250754 - DNA, 88 bp, Homo sapiens
  chr2:85836532-85836620
  hypo
ctgcagctgtttccaccaggcgtacctgatagacgataactgatgtgacctctccactgtctgcctcgtattctaagcagaagagctg

SEQ ID NO: 250755 - DNA, 90 bp, Homo sapiens; identical to SEQ ID NO: 208074
  chr2:85870244-85870334
  hypo

SEQ ID NO: 250756 - DNA, 227 bp, Homo sapiens; identical to SEQ ID NO: 208075
  chr2:85871981-85872208
  hypo

SEQ ID NO: 250757 - DNA, 157 bp, Homo sapiens; identical to SEQ ID NO: 208076
  chr2:85878688-85878845
  hypo

SEQ ID NO: 250758 - DNA, 44 bp, Homo sapiens; identical to SEQ ID NO: 208077
  chr2:85885944-85885988
  hypo

SEQ ID NO: 250759 - DNA, 494 bp, Homo sapiens
  chr2:85890510-85891004
  hypo
tgcctgtggtatggcctgctcgctgctgttcccggcctgggtggtcacggacatgcagaggtggcactcagagtctcgcggcagccattctcctgtcggcgaccctggagatgtgagcattagggggaaagcaggcaaggccaccctacagaggtgtttggtttctgtcctccttggtgcattgcagtgggaccacagagggagagggtcatgcagtggcagggtagggggaggaggagagcaggcattgggctaaggagtgggcagtgggctcacttgggccagcgctgtcatccatggagcaccggaggacgaggcggcagaccagctggggcagcatgcggcccagcagcgtgtcgagcaggatgacggagtagcgctcagccaggcactggcagatgccgcccgccaccagaggtaccacgcggcacacctgggccactgccacagctagcgcaccctggggcgggggcggagagaggccagcatgggac

SEQ ID NO: 250760 - DNA, 32 bp, Homo sapiens; identical to SEQ ID NO: 208080
  chr2:86344875-86344907
  hypo

SEQ ID NO: 250761 - DNA, 92 bp, Homo sapiens; identical to SEQ ID NO: 208081
  chr2:86345207-86345299
  hypo

SEQ ID NO: 250762 - DNA, 43 bp, Homo sapiens
  chr2:86346748-86346791
  hypo
gattacaggcgtgagccaccgcgcccagctttcctagactctt

SEQ ID NO: 250763 - DNA, 39 bp, Homo sapiens
  chr2:86423730-86423769
  hypo
tgattctgtaatcaaaataaaacacgttaaatattaagc

SEQ ID NO: 250764 - DNA, 60 bp, Homo sapiens; identical to SEQ ID NO: 208082
  chr2:86425628-86425688
  hypo

SEQ ID NO: 250765 - DNA, 150 bp, Homo sapiens
  chr2:86425718-86425868
  hypo
tgccaattcaaagagcttttatgaatgtttcaatatacttgtctagcgtatgtgcctgtttttggactcaaagtggccaccataggtgggagatcaagttggcaacaatagtgttccaaggtaatacaccctatatcttgctctgtaccc

SEQ ID NO: 250766 - DNA, 149 bp, Homo sapiens
  chr2:86783934-86784083
  hypo
gtcccctagcccgctttttcactggatacctgtgtctgagtgtattctttcatccgtcgtttggccaggatctgcgggtcggacccggaacaccatccctactcctgtccatgaaacaagtacctgacgagctctttacacttcctgag

SEQ ID NO: 250767 - DNA, 89 bp, Homo sapiens
  chr2:86809396-86809485
  hypo
caaatgctaccacaatttagcggaagacgtgatattctttccattaagttttgttaggtctatttagatatccacaagaaggccaggcg

SEQ ID NO: 250768 - DNA, 141 bp, Homo sapiens
  chr2:86914545-86914686
  hypo
caagatgtagcatgcgaaaatgaaaagttttctctctcaataccattagtcaacgtattgatgatacatgccataaacggaaacaaatggttctctatgtaggttgatgaatcaacagattttaccaataaatgtcatatt

SEQ ID NO: 250769 - DNA, 76 bp, Homo sapiens; identical to SEQ ID NO: 208087
  chr2:87569214-87569290
  hypo

SEQ ID NO: 250770 - DNA, 120 bp, Homo sapiens
  chr2:88341849-88341969
  hypo
attacaggcgtgagccactgcacccggcctagaccactattcctaaatgaggtttctctttgtttcttttctttgactgcccacccccaccccacctctctctttctttctttaaaaaac

SEQ ID NO: 250771 - DNA, 67 bp, Homo sapiens
  chr2:88387492-88387559
  hypo
gagcagaaggacctgcgggtggacgtggacacattcttgcagtactggccgccgcagagccagcagt

SEQ ID NO: 250772 - DNA, 97 bp, Homo sapiens
  chr2:88469321-88469418
  hypo
ctgcagcgaagactccgaggctgaacgtcaataaagcgtttactaaagcgccttaaaaaatgggccgcggggctgggcgcggtggctcacgcctgta

SEQ ID NO: 250773 - DNA, 196 bp, Homo sapiens
  chr2:88559425-88559621
  hypo
tagctatttagcattcgagactctttgcagggagtccaaggaacttcgcacttggcaccatccccacctaccagaagctggcaaattcaccgggagaagattcctcccaagttcatctttccacctgcaatcaaccgtggatgaactggtgctttgtttgaatagctaagtagagtgttttcggcatggaaaactg

SEQ ID NO: 250774 - DNA, 100 bp, Homo sapiens
  chr2:88591078-88591178
  hypo
gccactgcactccagcatgggcgacagagcaagactcagtaaataaataaaacaaaaaaagcatgcacgcacaaagcaacaaaaacgtttcaaagaacat

SEQ ID NO: 250775 - DNA, 126 bp, Homo sapiens
  chr2:88895917-88896043
  hypo
aaactctggtgtcacgagacaaacaacttaataaataagtaaattatatggtatgttaggtgataaatgccgttaaaaaaatggaacaagataaagggagaatggtaaatacgcatggggtggaga

SEQ ID NO: 250776 - DNA, 69 bp, Homo sapiens
  chr2:88990234-88990303
  hypo
aatctaggtgataaccggcagttaacagtggcccataccagtgacttgcgctcacggaagagttctgaa

SEQ ID NO: 250777 - DNA, 39 bp, Homo sapiens; identical to SEQ ID NO: 208088
  chr2:89601945-89601984
  hypo

SEQ ID NO: 250778 - DNA, 85 bp, Homo sapiens
  chr2:92065784-92065869
  hypo
gagagcgacccacccgccccctcgcagctccgaaaaagcttcaagaaggaacaggatcccgaggcctggacgctggaccctacac

SEQ ID NO: 250779 - DNA, 34 bp, Homo sapiens
  chr2:95715631-95715665
  hypo
aagactccgcttagtcgtccggccagggctgcat

SEQ ID NO: 250780 - DNA, 133 bp, Homo sapiens; identical to SEQ ID NO: 208089
  chr2:95722588-95722721
  hypo

SEQ ID NO: 250781 - DNA, 540 bp, Homo sapiens
  chr2:95723256-95723796
  hypo
tctaaaaagcatctcgtacccccactcccgcaggttgtaggactatttttgcaaagcagcccaaatggaggattgaaggctgccttacgctgaccttaaagagacagcaaagggtttgcgctgccagccgtgggctggagcgagcctgccttcggggcccacacaagggcctgttgttctgggtatcaactggggccggtgtggggttacaaagaggcctttcaaagagacaaagcgcctctggacaggctgagtgtccctgcacacgtgggcatccgcccagggcatttaaaataacgcgatttgaaaaaacagatttgaagtgatttttcctactccgcgttattcagtggcctttgttctgtctgcatcatacccggcgacagcagcttctaagagctggggcgctggagcagacacgggggttcctagctgtggctgctctcttccttcacaggtaacgagatcatcacactgccaggctctctagagggtaccagagaggttggattcacacggggtgctcggctgccaggactt

SEQ ID NO: 250782 - DNA, 252 bp, Homo sapiens
  chr2:95941663-95941915
  hypo
tgctgcctgcccaggtggtgcggtacgaggcgggctacgtggtatgcgctgtgatcgcgggcctctacctgctgctggtgcccactgccgggctttgcttctgctgctgccgctgccaccggcgctgcgggggacgagtgaagacagagcacaaggcgctggcctgtgagcgcgcggccctcatggtcttcctgctgctgaccaccctcttgctgctgtaaggcgctgcccagggcccgggtagggcgggct

SEQ ID NO: 250783 - DNA, 153 bp, Homo sapiens
  chr2:95945593-95945746
  hypo
tggatcgtgggctgcgtgctgtgctccgtggtcctattcgtggtgctctgcaacctgctgggcctcaatctgggcatctggggcctgtctgccagggacgaccccagccacccagaagccaagggcgaggctggagcccgcttcctcatggcg

SEQ ID NO: 250784 - DNA, 246 bp, Homo sapiens
  chr2:95960727-95960973
  hypo
tgcagtgggaggttcgcaaggcccgaacagccggtgggtccagcagagcagggcagttgtcccaggcccgcggtgtcacggctggtgaactccgaggacagcgcatctgagtgtgggatgtcagcgagtgtgccaagcaggggcgagcagctcttgggggtgctgctgtgatgagtgggttcctctgctcctgactcctccggccaggccgtcaggaagaccagcccatcacggcagtgcagtcac

SEQ ID NO: 250785 - DNA, 245 bp, Homo sapiens
  chr2:95985468-95985713
  hypo
atcgtctggagctccgggcgcctgtgtcatgccttttacctgcctcacaggctcttgggctcatggtgctccctctctctccctccgctgcgccgtctgtctcagtccatgttccttgccttccttagggagagtgagacataagcctcgtattggattaggaggccaggagggctgctcccaaggtggccgttgagccccatctcagaacaagggagggagggcaagagcggcaggtttgcctc

SEQ ID NO: 250786 - DNA, 160 bp, Homo sapiens
  chr2:95992199-95992359
  hypo
ctctgggagggcagcggctcccaaattcttagcgcccaacatggcctacaggacctgtgtaactggaccggcctgccggccctgttctcaaatgggaagccctacaggacaccccctgctgcactgcggctgtgcttgtgaatggcggtgggaacgccca

SEQ ID NO: 250787 - DNA, 42 bp, Homo sapiens
  chr2:96677724-96677766
  hypo
gtagagcacttaatagttggcattcagcggcagcagttactg

SEQ ID NO: 250788 - DNA, 241 bp, Homo sapiens
  chr2:96754442-96754683
  hypo
tcaaaaaacattcagcgcagctttttctgtaatggtgaaaaaccagaagccacctgagtttccgataacaagagaagagttacataaatgaggaggtgcagctgtgccattctaagcagggcctgcagacactggtgaggcgggaagtgctgctgctgggaggtttgctgaaggcaggacacgaaacccagtggccgagacagcctggagctggcaggacggtggcagtggtgggactgtg

SEQ ID NO: 250789 - DNA, 313 bp, Homo sapiens
  chr2:96814766-96815079
  hypo
tgcataggggcccgcgatacgccccaaccctggccctgcctctcacccgggtgccaccctgagcttcaggtcccctggcgtgcacccccaagcaggacattcggatgctcagacaccttgaggctgcatccagaccagcactgaggagtccccagccatgcgcggaggacgttctgcctttttcaagtcaatcagtccttctgagtacatcaagaagaaagtctccacgtggggctggcgtggctgtaacttctaatacctgcctttcctcattttaaccaagaggctttgcgcccctttctgcatttatcac

SEQ ID NO: 250790 - DNA, 223 bp, Homo sapiens; identical to SEQ ID NO: 208092
  chr2:96821757-96821980
  hypo

SEQ ID NO: 250791 - DNA, 121 bp, Homo sapiens; identical to SEQ ID NO: 208093
  chr2:96829031-96829152
  hypo

SEQ ID NO: 250792 - DNA, 37 bp, Homo sapiens
  chr2:96839116-96839153
  hypo
taaagagtgctgagattacaggcgtgagccaacgtgc

SEQ ID NO: 250793 - DNA, 33 bp, Homo sapiens
  chr2:96993131-96993164
  hypo
gacccagccctgggccgccgctgtggctgtgtg

SEQ ID NO: 250794 - DNA, 189 bp, Homo sapiens
  chr2:97068616-97068805
  hypo
ctgtgagatgatgaacggtgagagaatgcatttctgttgtttaagtccacaggctgtggtccttgttacagcagcccaagcaaatgaacacaatttgtatagaaatacataggcggcctactccaggcatgagccaccgctcccggccctatatatttctatacagagtgtgtccgtttgtttgggctg

SEQ ID NO: 250795 - DNA, 101 bp, Homo sapiens
  chr2:97222251-97222352
  hypo
ggctccccccgcccccagccaggggtcaatcacctaacagcacgcactgccgactcagctccaactgccttctctccctggggtcccgcttcaggatgcat

SEQ ID NO: 250796 - DNA, 104 bp, Homo sapiens
  chr2:97274644-97274748
  hypo
caggtcgactgccccgctcagggacttcaaaggccaagtctctgcgggccacatcgcggggcttcttcttcttctcagcatcctgatcccgaggttcagagccc

SEQ ID NO: 250797 - DNA, 148 bp, Homo sapiens; identical to SEQ ID NO: 208099
  chr2:97305376-97305524
  hypo

SEQ ID NO: 250798 - DNA, 143 bp, Homo sapiens
  chr2:97335818-97335961
  hypo
tcaccccttttctccgttttcctctcgcttgccctagtgtattcccgactctgttagggatggtttagcttatcgaggccgagtcttcctggagttaatcacccaaatcaagtcctatcaagactccacgataaaggatctct

SEQ ID NO: 250799 - DNA, 77 bp, Homo sapiens; identical to SEQ ID NO: 208100
  chr2:97361031-97361108
  hypo

SEQ ID NO: 250800 - DNA, 154 bp, Homo sapiens
  chr2:97364039-97364193
  hypo
cctccacaggaactcggggagcgctccccttcccctccccaccctggcctatgctggcctcccaaggctgcaaagccacagagaacaagcccgaacctgaagggatagatggggtggaatgagtccacagcggcacagacggggaactcaccta

SEQ ID NO: 250801 - DNA, 36 bp, Homo sapiens; identical to SEQ ID NO: 208101
  chr2:97370003-97370039
  hypo

SEQ ID NO: 250802 - DNA, 737 bp, Homo sapiens
  chr2:97427363-97428100
  hypo
gaccccatggagctgcgcatcgtgcagaactgtggcaccgagaaggagaggcgctatgcccgcaagattgagcccatccggcgcaagggcaactaccttctctgctcgttgctcctagggaacgtgctggtcaacacctccctcacaatccttctagacaacctcatcgggtccggcctcatggcggtggcctcctccaccattggcattgtcatctttggggagatcctacctcaggccctgtgctcccgacatgggctggctgtgggtgccaacaccatccttctcaccaaattctttatgctactcaccttccccctcagttttcccattagcaagctcctggacttttttctgggccaggagattcgcactgtttacaaccgggagaagctgatggagatgttgaaggtgacggagccctataatgacctcgtgaaagaggagctcaatatgatccagggtgccctggaactacggaccaaaactgtagaggatatcatgacccagctccaggactgcttcatgatccgcagcgatgccatcctggacttcaacaccatgtcggagataatggaaagcggctatactcgcatcccggtgttcgaagacgagcagtccaatattgtagatattctctacgtcaaagacttggcctttgtggaccccgatgactgcacccccctcaagactatcactcgcttctataaccacccggtgcactttgtcttccatga

SEQ ID NO: 250803 - DNA, 35 bp, Homo sapiens
  chr2:97431125-97431160
  hypo
gtgctgggattaccggtgtgagccaccctgcccag

SEQ ID NO: 250804 - DNA, 136 bp, Homo sapiens
  chr2:97432863-97432999
  hypo
gcagaggtaggggccgagtgtccctaggagtaaggcaggggtacagccttgcagcacttctgtctcccagctcacggcagttagtgccagatatctgtggaaccccatgctgcgtgcaagacgtgatgctaggtga

SEQ ID NO: 250805 - DNA, 88 bp, Homo sapiens
  chr2:97434629-97434717
  hypo
catgcaggggaaaatgcccacgtgaggctgaggagcaaggccaggacaacgctaaaaggtttaagagtcagccaagaggccgggtgcg

SEQ ID NO: 250806 - DNA, 335 bp, Homo sapiens
  chr2:97435335-97435670
  hypo
aggacagtgcagggggtgtcagtgtgtaaaagccaggctgaggcgactccttgatggagacgaagagaaccaagggggcacgctattcgggagcctccttggagggtcagatggggtgaagaccatgcacagactgtgggatgggaccttaggctgtggggtgcccagcgagagcagcctcggacaagtggtgcccgaaggcagctttgcaccggttctccgtcagccctgcctggtaatagcctcaatatggtgatttgatctcaagaagctgcctgggggcaggtgtatctgagagtgacaggagctggttaatactccgggtgcaggcagag

SEQ ID NO: 250807 - DNA, 129 bp, Homo sapiens
  chr2:97436177-97436306
  hypo
ggaagacatttcagcggaatttgctagggcgggtagacatggcgttttccactctggtacgtgttgccctgggagagcttggacaagacccgaaggctgagaggtgagcctcaccgtccttcgcagcag

SEQ ID NO: 250808 - DNA, 88 bp, Homo sapiens; identical to SEQ ID NO: 208103
  chr2:97437494-97437582
  hypo

SEQ ID NO: 250809 - DNA, 196 bp, Homo sapiens
  chr2:97437988-97438184
  hypo
ttacacaccccatgcgcgcacacacactcatacccccacataggcacaggcaggctctactcccacccgtgcgcacacacactcatacccctcacataggcacaggcaggtgctcacacacacgtgcgcacacacactcatgccccccacgtaggcacaggcaggcgctcacacacacatgcgcacacacactcat

SEQ ID NO: 250810 - DNA, 230 bp, Homo sapiens
  chr2:97454844-97455074
  hypo
gaggggttggggtagcatggcgaggagcgagggcactactcaggcctcgccaggctgcagcctggtcagtgggagatagacgccggtcagccgatggcacagagctgtgaagggaagaaatgggtcgggatccagggccctaaaagacaacatggctaacacccagggctaacgtttgagcccagggcagaaggataaagaggtgacacggaggctggggagcaggagga

SEQ ID NO: 250811 - DNA, 176 bp, Homo sapiens; identical to SEQ ID NO: 208104
  chr2:97463244-97463420
  hypo

SEQ ID NO: 250812 - DNA, 97 bp, Homo sapiens; identical to SEQ ID NO: 208105
  chr2:97479660-97479757
  hypo

SEQ ID NO: 250813 - DNA, 112 bp, Homo sapiens; identical to SEQ ID NO: 208107
  chr2:97485585-97485697
  hypo

SEQ ID NO: 250814 - DNA, 36 bp, Homo sapiens; identical to SEQ ID NO: 208108
  chr2:97485727-97485763
  hypo

SEQ ID NO: 250815 - DNA, 96 bp, Homo sapiens; identical to SEQ ID NO: 208109
  chr2:97489047-97489143
  hypo

SEQ ID NO: 250816 - DNA, 33 bp, Homo sapiens; identical to SEQ ID NO: 208110
  chr2:97511924-97511957
  hypo

SEQ ID NO: 250817 - DNA, 176 bp, Homo sapiens
  chr2:97530639-97530815
  hypo
tgccggtcagccccgctgggccagcagggctcccagggcccaccgctgtgagactcggtaccttgcagacacgggccacacgagccaccacctgctcggcatagcagtcggactccactgcccgctccctgaagaagaagtagaccttgtcgtcgtcccccgtgaagctgcccaca

SEQ ID NO: 250818 - DNA, 435 bp, Homo sapiens; identical to SEQ ID NO: 208112
  chr2:97544650-97545085
  hypo

SEQ ID NO: 250819 - DNA, 206 bp, Homo sapiens; identical to SEQ ID NO: 208113
  chr2:97545394-97545600
  hypo

SEQ ID NO: 250820 - DNA, 83 bp, Homo sapiens
  chr2:97550184-97550267
  hypo
ccctttgcaggctgggcccccggggcacggtctaggtatccacacaggttgggcacaacagcgatgaatcatgagtaatctga

SEQ ID NO: 250821 - DNA, 99 bp, Homo sapiens
  chr2:97552035-97552134
  hypo
caatgtgactggcttagagacgggcacctgacccaaaccaagccaatgagacgccattctggttacgattcgagggccgaagctctttcttgtccagga

SEQ ID NO: 250822 - DNA, 145 bp, Homo sapiens
  chr2:97552402-97552547
  hypo
agggaagaagggacagaaaacgtgatgcgcagagagcacttgagaaggccatggtcggcctgggagctgttcctgcagactgaggatggcgtgtaagggaccttccccactgtgcttggccgtcttcggtgcacagctgggagcc

SEQ ID NO: 250823 - DNA, 158 bp, Homo sapiens; identical to SEQ ID NO: 208114
  chr2:97558027-97558185
  hypo

SEQ ID NO: 250824 - DNA, 86 bp, Homo sapiens
  chr2:97568145-97568231
  hypo
aattttttaaaaagacaggctctcagctcactgctctgtcctcagcgcctagcacatggctggcatgcaagcggtaattcttgatg

SEQ ID NO: 250825 - DNA, 228 bp, Homo sapiens
  chr2:97572471-97572699
  hypo
cacgcacaggccttcgcctccctgtcagacagggccagctttccagctgtttgggagccccagcagcagctgggccgggaacacagtgggaggtcaatggcccctctgagctgctccacagtgaactcaaagccagtcagaagtctgcatctgggcttcattaatccaaaacttgaggcctgcgcgggagctcgtttactcgtttactcacagcgggcgaggagggcc

SEQ ID NO: 250826 - DNA, 314 bp, Homo sapiens
  chr2:97576052-97576366
  hypo
agacgccgtcccaccggggagacggcctcctctgcacagtgaggttggtcatgcagcctcccacactctcttaggctttaacccccttcgacgaccaatatttgattccaaatgaaaaactgttctccttgacaaagacggcaaaagcaaaatacgaattgtgtagtgttgttccgtctgcatcagggctaacgttttactgtcagccccaaaccgcactccttgcttcaaaagtaactacacagaaactccttttatggccttcggcatttcccaacaacactcccgctggtccacgccgtttgtccggctac

SEQ ID NO: 250827 - DNA, 32 bp, Homo sapiens
  chr2:97578424-97578456
  hypo
gatcatggcctgaccgccgcccaccttcacgc

SEQ ID NO: 250828 - DNA, 454 bp, Homo sapiens
  chr2:97586996-97587450
  hypo
gagctgcaggagaacggcaccccatgggctacaggaggacaccgccttccccttgctctcgccacccagcccgcacaggggagtaagtgggcagtcacggagatcagggacattccgatgacctccaggcagtgccatccccacccagggcactctaggggccaccttggtccctagtgatgaagctgtatgaggaccaggctctgggcgtctagtaccttccctggccactcccggatgttctccaggagcaagaggagaagctgctggaggtcaactttgggcagcaggcggagccccacgtccaggctggtgcggcacagcagctcaatcagtcccatgaggttctcatcagtgtaggcccccggctgggcctgggcacacagcgccagaaactggagagagaaaagagggcaggggtggccagggcatgggggaacgggagagtacttcg

SEQ ID NO: 250829 - DNA, 331 bp, Homo sapiens
  chr2:97588990-97589321
  hypo
tgagccaccatgcctggccccaattctttcttgtacaagaactctctcttggggcctagatcaggacccgtgtccgataacacagtttctgtagcatccggcccacagccagcacagtgcctgccatggtgctgagctcgccggagattctccgtgatgctcctggaatttagctgctgaatgggtctgaactgtaagccgagagtgccctgcatgaggcaggcggcttgactcaccttgtagatgtggcccaggctgatgtccaaggcaatctcttggggagcgtcctgctcctcattctcattcaggccagcctcgcctggaagcaccc

SEQ ID NO: 250830 - DNA, 736 bp, Homo sapiens
  chr2:97651751-97652487
  hypo
accccaccaaggccggccgcgcagtggcctgtggagaggagggcccggctcacgtcggaacccgaaccacgcggggtcgcaggaacctgaaaagcgccagagtagcccggcggccgcaccggggctgacctgcaaggcctggaccagccaggagtcccagggaagtcgagtgctctctgagcgctaaccacgcgcccctgcggttcctcggcctcagtttccttacctgtaaaatggagccgctgatcctgcctcctgagttgtggagcgaggcccgcacctggaagccttggccacatagggcgggaagggcagggctccggggtgagggagggtggcgggaattcgcacggcctcagaggacggggccagctagccgggaaaggaagcaggagcaggctccccaggcggcgcagtgggaggaccccaagagttgcgtccctagatccagggccgccaacgtggaacctaaagatccagttctggggattgagttccgactccaaaccaagcggccagctcacagccgccgccgccgccagctggggagctcgccggccaagtgcgcaccctcttcctgttagccctccacgtgcgcgccctcttcctgctcgccctccacgtgcgcatccacgtgcgcgggaattggctggcggaagctcctgcccccaggcagtcctgggtcacgcgcacttgtagtagcttgcatttaccaagacagtgagacagtggcctg

SEQ ID NO: 250831 - DNA, 161 bp, Homo sapiens
  chr2:97655847-97656008
  hypo
agagtaaagtggtctcgctgtagtgtgtgcttttacagtagtagctaagcctgttcccttaagggttcatgtgaccaaagcgttagagagccccttcctaggtgtctgtaaccccctttgattaatttgcattgatgaccttgaggtattaaaatttttga

SEQ ID NO: 250832 - DNA, 80 bp, Homo sapiens
  chr2:98025637-98025717
  hypo
agtagctgagttcaggtcatcagacatgcaaatcgactccagggaaacctgtgcttattgggccccgcttctggagaaac

SEQ ID NO: 250833 - DNA, 146 bp, Homo sapiens
  chr2:98330282-98330428
  hypo
gcggagagtgtgagcggcagggcctccctctcaggctgggggcttgggctgcagggaaatccaaaccggctttgtaagccccgattcctcacccagaaccggctctccattggcattgggaccagagaccccgcaagtggcctgtt

SEQ ID NO: 250834 - DNA, 343 bp, Homo sapiens
  chr2:98349361-98349704
  hypo
gagcagggcacatacgccctgtccctcatctatgggaagacggtgtaccactacctcatcagccaagacaaggcgggcaagtactgcattcccgagggcaccaagtttgacacgctctggcaggtaggctgcccgtgcaacttgttctgggagatgccgtgctcagatggggtgccgggctctggggaggagaggagcctctctgctagctgcctgctccctgcagctggtggagtatctgaagctgaaggcggacgggctcatctactgcctgaaggaggcctgccccaacagcagtgccagcaacgcctcaggtgacggcagcaggcgggcgggcggtggg

SEQ ID NO: 250835 - DNA, 447 bp, Homo sapiens
  chr2:98350739-98351186
  hypo
ataccaatgcacacgcccctagagtccaccctcatgtggcttcatggggcacccacagctgtggccaggagtgtatgccagtgtgtgcgtgtggatgtgcaggaacacgcatgggcacccacctgcttgtgcatgctccagggacggcacccttgtctggggcaggtgcttgtgggggctgaggctgccttgctccccacacccctgcccctgacctgggagtgtaccgctgtgtgtgcccagcacgcataacgtccccagacaaaccgcggccgatgcccatggacacgagcgtgtatgagagcccctacagcgacccagaggagctcaaggacaagaagctcttcctgaagcgcgataacctcctcatagctgacattgaacttggctgcggcaactttggctcagtgcgccagggcgtgtaccgcatgcgcaagtatggccgcc

SEQ ID NO: 250836 - DNA, 321 bp, Homo sapiens
  chr2:98377007-98377328
  hypo
cttgagaagccttccgtctttctagcggttagtggtggtctaccgtacctgtctgagccatcgctgtcaacaggagcgtgtgaaatgccaaggctgctggagaaacctgttttgtttgaagaaactttagcaaagccattcccacctgtaacaatggacgttcaatcaatggaaggcacattaggacagaggtcattccaccaggcctggcgcctggcgtggcaggtctctgaagcaaaggcactgacctgggctcttgtcgtagccagccgtgactgcagcaaaagtggggttgccgttcttgcccgggagcgaggctgc

SEQ ID NO: 250837 - DNA, 593 bp, Homo sapiens; identical to SEQ ID NO: 208120
  chr2:98408814-98409407
  hypo

SEQ ID NO: 250838 - DNA, 32 bp, Homo sapiens
  chr2:98613858-98613890
  hypo
aaagcaattttagggcagggcgcagtggctca

SEQ ID NO: 250839 - DNA, 32 bp, Homo sapiens
  chr2:98614130-98614162
  hypo
agcaaaactccgtctcaaaaaattaatcataa

SEQ ID NO: 250840 - DNA, 47 bp, Homo sapiens
  chr2:98674829-98674876
  hypo
atgtgaaggattgccggcagcaactcgaagctcggaagagtcaaggg

SEQ ID NO: 250841 - DNA, 164 bp, Homo sapiens
  chr2:98871119-98871283
  hypo
actagctcaagtcctcatggcgacactaggagtggagcggtactactatccccactttaccgaaaagttgggcactggcccaaagcctcacggcaagaaggagaagaagccgactgagctttgggccctggagttgtggctccggagtctaccctcttcagagg

SEQ ID NO: 250842 - DNA, 69 bp, Homo sapiens
  chr2:99004117-99004186
  hypo
gcaaagtccgaaggcgtgtctgaactcggccacatttgcgaacctgcgaccacacgtatttgccactac

SEQ ID NO: 250843 - DNA, 191 bp, Homo sapiens
  chr2:99097186-99097377
  hypo
aggcagaatgtgcccgtctccagtcccttgcattgctggcagcctcagaccggagagcactgaatcttccactagcctgtcttcttgccagctgcagccccagggcgcgtgtgtccgtctccgcagccaaactccccctgtgctggcctgtggagggtgagtggggggcagggtgccgcacactctggacc

SEQ ID NO: 250844 - DNA, 283 bp, Homo sapiens
  chr2:99136319-99136602
  hypo
cccccggtaggtcacgttctttctaaatgagagcatgatttctctccatcaccgtccccatggtttcttacaagtgctccttttctcagggctactgccactttagtggactagggctcggtgccagcacttcccgggtaatcaggcgtggtctgaccgaggatcaagaagcacatcatcaccaatgacatcatgacagcaagagagcacagccctcgccatggtgccagggcccgtgcaatgcagcgggcttccaccatcgacgtggcggccgacatgctgg

SEQ ID NO: 250845 - DNA, 90 bp, Homo sapiens; identical to SEQ ID NO: 208121
  chr2:99386853-99386943
  hypo

SEQ ID NO: 250846 - DNA, 77 bp, Homo sapiens; identical to SEQ ID NO: 208122
  chr2:99386973-99387050
  hypo

SEQ ID NO: 250847 - DNA, 206 bp, Homo sapiens
  chr2:99444496-99444702
  hypo
atttatacttcagcacggaagaactgatagcaaatggcaaacatgtcacctgggacaaagggatgctggcagtcatgtgaaagaatgaaggcaatacccgcagatccctgcccccgaacttggccagctccaccactgagtgaggtcgaagtgggctcccctgcagacacaagttgggatgaaactcggagcgcctgtgagcacat

SEQ ID NO: 250848 - DNA, 38 bp, Homo sapiens
  chr2:99487423-99487461
  hypo
gaatgcccagggaccgcgagattcgcgaagagcagggg

SEQ ID NO: 250849 - DNA, 189 bp, Homo sapiens
  chr2:99517365-99517554
  hypo
cagtgaaggagaaggtcacccggctccaccttctataatggtgccaggaggcaggtgaaggaagtcaagctccagaggaaggagcgctgagcccttcccctcacttaggacagaaagcgattctgcaagcaatggggttggcgcacagggtcaagcatgtaaaagcacgtggctctgccagccctgagt

SEQ ID NO: 250850 - DNA, 47 bp, Homo sapiens
  chr2:99537760-99537807
  hypo
gccacaagtggtgccgatactgggccaatctgcgtcccaggtgagcg

SEQ ID NO: 250851 - DNA, 86 bp, Homo sapiens
  chr2:99543362-99543448
  hypo
agactcaccagacagcccctcgcaacccacccaccctctcagctagggcgggtctccagggattcgtttctaagtacttggcttgt

SEQ ID NO: 250852 - DNA, 87 bp, Homo sapiens
  chr2:99795933-99796020
  hypo
cactcagcactgaaacgtgatatctatgcttattgctgttgtcactgtcatcattatcatcaaataatgccccaggcaaggtagagt

SEQ ID NO: 250853 - DNA, 327 bp, Homo sapiens
  chr2:99796320-99796647
  hypo
ccggccggtagagtttgtagttctgaccaaagcaccaaaccataaagggctcccctctgctgccccaaagcttctgtaacactttaattataagaagcttaaactagaaagaacagagggagcttagtccagaccgggagtgtcgggggttggggagcaggagctgatcttatcaatttaatacataaatattgagtgtctactgtgagccagggttgtgctgggtgttaaggaatatttgggtatttctcaacattgaataatacgaaaagtctcacttgtctcctccacaaccctgcgcatttctcacaccgaacctcatccgtt

SEQ ID NO: 250854 - DNA, 77 bp, Homo sapiens
  chr2:99798646-99798723
  hypo
ttttacagaagacagcgtaattgtttcagggtccaggagttacgtgcctaattattaacagtaacttttactttatt

SEQ ID NO: 250855 - DNA, 137 bp, Homo sapiens
  chr2:99799023-99799160
  hypo
ataaataagataaaataaacgtattctttgagtcaaacgtggtgacacacacctagctccaattactgggaaaattgaggattgcttgaggctgagttcaataccagaaacatagcgagactctgtctctaaaaact

SEQ ID NO: 250856 - DNA, 35 bp, Homo sapiens
  chr2:99951496-99951531
  hypo
aagaaatggagtattttgtacgagaaattttatac

SEQ ID NO: 250857 - DNA, 52 bp, Homo sapiens
  chr2:100064553-100064605
  hypo
agccttttccaccacgctgcttctccgtgaatttatgcggctaaatacacta

SEQ ID NO: 250858 - DNA, 32 bp, Homo sapiens
  chr2:100107725-100107757
  hypo
caaattgcgtaattgctttcttttcttttctt

SEQ ID NO: 250859 - DNA, 120 bp, Homo sapiens
  chr2:100141754-100141874
  hypo
tttctttaaaagctgagaccgatgatgtgggagcaatcacacacctcctatgcatatataaaaaccagtaagatccttaaaaataggtttggtttccaatcattgttaaggttttcaggc

SEQ ID NO: 250860 - DNA, 82 bp, Homo sapiens
  chr2:100294013-100294095
  hypo
cgcagacaaggagtcgaagggttatgagcccccagctgcactcgctcacgctttcatgcagggagagcgggccttgcaggag

SEQ ID NO: 250861 - DNA, 96 bp, Homo sapiens
  chr2:100618385-100618481
  hypo
cgttctaagcggacggaagctgcccatcgagcagacaggaggaagcgcagagcgtaaccatccgtgctgttgctatgccacgctgtcctgagggac

SEQ ID NO: 250862 - DNA, 103 bp, Homo sapiens
  chr2:100910680-100910783
  hypo
cagttcttaccccgcgtgctcagcagataaacacatgccaaaccgcttggtgccagtttccatgcatcttcttatcataagccgatagcggggctcaaaaacg

SEQ ID NO: 250863 - DNA, 120 bp, Homo sapiens
  chr2:101006128-101006248
  hypo
acaaaacaaacataacaaaaaaacaaacggttgaagctgagagctacttggagttcagtgatcactttgacacacacatgtatttttgagaatgagtttcactcttgttgcccaggctga

SEQ ID NO: 250864 - DNA, 244 bp, Homo sapiens
  chr2:101009823-101010067
  hypo
ggttctgttatacacggtaatgcccggagggatagtcgggtatgacaccaggtggtcaatgccagcctcttttaagatgtatggggcatcgtcctccagggtctcgtggtgtccaatcacactgtacattatctcacagggagcacagagctctacatacgtcacccagtgaatgatgtggtccccaaactgaaggtctagccatctgtggttcggatcgccgaggtagcgcacgaaatcttca

SEQ ID NO: 250865 - DNA, 125 bp, Homo sapiens
  chr2:101013988-101014113
  hypo
cctggtggctctgcgagtgtggggccctggggatgtcggacagagtgggtgactataaccatcagcacagggaacctgaagagacaaaggaggggggcctgggggtgggcgagccacctaaagtg

SEQ ID NO: 250866 - DNA, 37 bp, Homo sapiens
  chr2:101021653-101021690
  hypo
ccttgctctgctgacggaaccccgagtcccgggcgtg

SEQ ID NO: 250867 - DNA, 43 bp, Homo sapiens; identical to SEQ ID NO: 208125
  chr2:101022688-101022731
  hypo

SEQ ID NO: 250868 - DNA, 40 bp, Homo sapiens
  chr2:101035289-101035329
  hypo
atgtggtactaggccgggcgtggtggctcacgcctgtaat

SEQ ID NO: 250869 - DNA, 197 bp, Homo sapiens; identical to SEQ ID NO: 208127
  chr2:101362900-101363097
  hypo

SEQ ID NO: 250870 - DNA, 214 bp, Homo sapiens
  chr2:101520349-101520563
  hypo
gtggagggaacccaggcctgcgtgtggtaggagaggaagctggatctgtgggcctgagaagcatcaagccagtggcctgggagagtagaggctccggtgttgaggaagaacattcctggattgttacgtaatctttcacatctgtgcaccttcgctgtctcaaggagagtaaacgccctaagggaggaactgcggattacactcctttggggct

SEQ ID NO: 250871 - DNA, 290 bp, Homo sapiens
  chr2:101552507-101552797
  hypo
actgatgtcatccaagaggacgaggtccatttaagaaacgtacttgaatctgtttttcagtctaaatcctaccagctgtcggtgtaaaataataaatgagtctagtgttaattttcctggtgaaaagaactctttcccctttcggcatggtataaaggtgcccttcatgcactgctcgtggcctcttccgggttcccgctgccatgcacttcagccacaccctcctaatgtgaaagaatgaattgtccacacagattctcagacatcacgtgaccatctagttgagtgca

SEQ ID NO: 250872 - DNA, 40 bp, Homo sapiens
  chr2:101574054-101574094
  hypo
cttagtggaaagaaactggccgggtgattttcaaaggcat

SEQ ID NO: 250873 - DNA, 40 bp, Homo sapiens
  chr2:101574394-101574434
  hypo
aaaaaggtctttgctttacggggtcctaatatgcaggctt

SEQ ID NO: 250874 - DNA, 151 bp, Homo sapiens; identical to SEQ ID NO: 208129
  chr2:101612186-101612337
  hypo

SEQ ID NO: 250875 - DNA, 93 bp, Homo sapiens
  chr2:101638838-101638931
  hypo
cgcaggtccagggcgagactagctgaaacaggtgtgcaaactgccgggcatctatgcggtactgctcagcatagggccggctggggtcgtggc

SEQ ID NO: 250876 - DNA, 175 bp, Homo sapiens; identical to SEQ ID NO: 208130
  chr2:101696583-101696758
  hypo

SEQ ID NO: 250877 - DNA, 38 bp, Homo sapiens; identical to SEQ ID NO: 208132
  chr2:101772516-101772554
  hypo

SEQ ID NO: 250878 - DNA, 105 bp, Homo sapiens; identical to SEQ ID NO: 208133
  chr2:101875536-101875641
  hypo

SEQ ID NO: 250879 - DNA, 248 bp, Homo sapiens
  chr2:101882441-101882689
  hypo
caacgtttgtagttcgctttgctcgcaagaccatcctgaaaacacagtccactgtggaacatattaagtagacgggggaaaaaaagcataggacatttaaagaggaagtgcttacttcatagaaaaagtcctttgaggatacctgtttgaattacaaagtgtgggtgtgacttgaactgtaaagttctgcagactgatgactcgcagcaggtcagctgtccggattcccgctccggcttcccactccg

SEQ ID NO: 250880 - DNA, 67 bp, Homo sapiens; identical to SEQ ID NO: 208134
  chr2:101889654-101889721
  hypo

SEQ ID NO: 250881 - DNA, 186 bp, Homo sapiens; identical to SEQ ID NO: 208136
  chr2:101970928-101971114
  hypo

SEQ ID NO: 250882 - DNA, 34 bp, Homo sapiens
  chr2:102226228-102226262
  hypo
ggggctgcttctgcggcttcgtgttcattacctg

SEQ ID NO: 250883 - DNA, 163 bp, Homo sapiens
  chr2:102232955-102233118
  hypo
ggctgctagtgagccagctgcgagagtgtgtcacatgggtcacagtgtgctggtgcccaggactactcctaatgtgcgtgaatgctcacggagctgcttggaacagcgccggctgcgcggcatcgtctgttacccttctgccggcagatgcaagcctcgggcg

SEQ ID NO: 250884 - DNA, 82 bp, Homo sapiens
  chr2:102320123-102320205
  hypo
gctaaaattgctttcgattgctcagtggtaaagtgccatatagattgtctggcttttaaaaatcattaggggccgggcacgg

SEQ ID NO: 250885 - DNA, 79 bp, Homo sapiens; identical to SEQ ID NO: 208139
  chr2:102356564-102356643
  hypo

SEQ ID NO: 250886 - DNA, 259 bp, Homo sapiens
  chr2:102486133-102486392
  hypo
acctcacaaagtaacggactactcctcatccagtgaggagtcggggacgacggatgaggaggacgacgatgtggagcaggaaggggctgacgagtccacctcaggaccagaggacaccagagcagcgtcagtccccggtctcttttagagcggatgagagtattctctcagagcctgctttccactgggacctagttgttcctagactattccgtgaccccatgagcacttactatgtagttctcgtggattcagcagc

SEQ ID NO: 250887 - DNA, 219 bp, Homo sapiens
  chr2:102486857-102487076
  hypo
gcactctaatcgtccgccaggtacccgtgtcttctctgttgtcagaggctgagcttctcctgtggtcattaacccacttgctcattcactcactcatgctgtttctccatcatcatctgttttcatgttaacaagtcccagagggtcaagtgtcgagtgtcgggggctagggaggcaggtgtgtactgcatgcccagaaggtagcgagtagtctccacc

SEQ ID NO: 250888 - DNA, 176 bp, Homo sapiens; identical to SEQ ID NO: 208140
  chr2:102636186-102636362
  hypo

SEQ ID NO: 250889 - DNA, 32 bp, Homo sapiens; identical to SEQ ID NO: 208141
  chr2:102640214-102640246
  hypo

SEQ ID NO: 250890 - DNA, 68 bp, Homo sapiens
  chr2:102681929-102681997
  hypo
tctcagtgctgttgcgtctgccttctgaagcgtgttaaatgtgcatttccctccgtgtccactgcctt

SEQ ID NO: 250891 - DNA, 160 bp, Homo sapiens; identical to SEQ ID NO: 208142
  chr2:102683382-102683542
  hypo

SEQ ID NO: 250892 - DNA, 39 bp, Homo sapiens
  chr2:102804745-102804784
  hypo
tctaagaaatttggtatggccgggcgcagtggctcatgc

SEQ ID NO: 250893 - DNA, 64 bp, Homo sapiens
  chr2:102866731-102866795
  hypo
catcgggttcgatgcgctctctgctcccttgtgcctctctccctggccccgggcttctgccttc

SEQ ID NO: 250894 - DNA, 51 bp, Homo sapiens; identical to SEQ ID NO: 208143
  chr2:102867171-102867222
  hypo

SEQ ID NO: 250895 - DNA, 42 bp, Homo sapiens; identical to SEQ ID NO: 208144
  chr2:103130075-103130117
  hypo

SEQ ID NO: 250896 - DNA, 107 bp, Homo sapiens
  chr2:103548794-103548901
  hypo
aaaagacaatgcatcgccaacaagtcacagacaattcttttcctgtaaaggttggggtgctcgatgtacattcagagccacgcacgcgagtgcgaagaagtcgacta

SEQ ID NO: 250897 - DNA, 41 bp, Homo sapiens
  chr2:104111995-104112036
  hypo
acagcaataacaacaaagccgggataaagctgtatgcattg

SEQ ID NO: 250898 - DNA, 248 bp, Homo sapiens; identical to SEQ ID NO: 208148
  chr2:105528549-105528797
  hypo

SEQ ID NO: 250899 - DNA, 120 bp, Homo sapiens
  chr2:105695482-105695602
  hypo
attaacatttcatgcgggggcggaaattagggagaaaatgcctataaaggattccttcatgggatgaatcatgaaaaaacaagtcatgctgccgtagaggaaaagcgacagatttgacta

SEQ ID NO: 250900 - DNA, 241 bp, Homo sapiens; identical to SEQ ID NO: 208149
  chr2:105697575-105697816
  hypo

SEQ ID NO: 250901 - DNA, 441 bp, Homo sapiens
  chr2:105719492-105719933
  hypo
ctggaccaagtgcgatagctgattggctgcaggagagctgggggcgggtattcggtatgagatccacaggctgctgggaatgcaaagagccaggaagacaggaagaaaagttgatgggaggaggaggagacaccagaggggtcggctcgggtttcaggtgttcggggccacctcatatgagatgcttgaaataattggactgtgactcaggcgacgggtcagcctgctgacagatttgggaggctgctgcgtggaaggggaatttgaaacgtgggctggatcagcacggaggattgggcagggagaaggccaaggctcaagtggagaaacagccatcaagtttaaagtaggaaggagggaagagccagcaaagggggtggtgagcggtgataggaagacagcaagccaggcacagcggtcagggacgtcagtgatgaccaa

SEQ ID NO: 250902 - DNA, 55 bp, Homo sapiens
  chr2:105859043-105859098
  hypo
ggcgggcctgcggcgcctgcagcggcagcaacaggtcagcgtggacttgagcttc

SEQ ID NO: 250903 - DNA, 163 bp, Homo sapiens
  chr2:105885967-105886130
  hypo
agatggccagcagcgtgtgaaagagttgctggcggtggggtgggtctcggccctcggagcaccacaggcagtagtcctcggccgctgcaaagtcctgcagctcgtgcaccaggatatgcagcgccttctcatgctcgcccagcttcccgtgcaggatggcgct

SEQ ID NO: 250904 - DNA, 650 bp, Homo sapiens
  chr2:105887868-105888518
  hypo
ctgatcagtcagggacggtggctgtgagtgaacagagattgcacagcggatcgccacagaaagtcctaatgtaggtgcaggtacaagccagaactagtgtttgctggtttcatgaaataccaacccacacctgtgttctggctctactgctcgtgggctgtgtgacctgtggcaagcggggtaacctctctgggcttcagtgcactcttctgtaaaaatggaggaaaaacaggcctcacttcacagggttgttgtggaaactgtgtcataaggcagcctcagcgtttcaacctatgctgggcatatctagtcaatcctcattatttgtggattctgtatttacaaagtcatctactcgctgaaatttatttgtaacctcccaatcaacactcgcagcagcttcaaggtcatttacgacaagcacagagcctgatgcagagctgaggccaaagaaggagcgccctccttccttgcttcagctgtcgtactagctacacgtttccttttcacgggctatttattgccatgcttttttgcattttggtgcttcttgttggtgatttcagtgtagtgctgaagtgctgcctagcgctcctaagctctggaaggttgtgatgtgctttatggagacaacacgtgtgttagatatg

SEQ ID NO: 250905 - DNA, 244 bp, Homo sapiens
  chr2:105910432-105910676
  hypo
aggagatatttatgcgaggtatcaaaactattttttcgagtagagaagtaccctccagtaattgcagggtaaagggccctgtgggaagcgccagcctgacttagccagcctgatgcccagaggcatggctgatctgccatgtcttgtctgtgaaatgaggacaattgtaccagtcattaccgaattcttttgagggttaaaacaacaaatgtttttaaatgccttgaagcgttcctgacatact

SEQ ID NO: 250906 - DNA, 54 bp, Homo sapiens
  chr2:105937339-105937393
  hypo
attaactacagtggtgggatcgaatttaacaacgtaataatccctaaaggaaaa

SEQ ID NO: 250907 - DNA, 227 bp, Homo sapiens
  chr2:105987660-105987887
  hypo
aaaacaggtttacttgttgccgtgaaggtgttttttagatgtgactaacatctaagtcagcaagcttcgagtgcagcacgttacccacgtatcagggccgggcttcatctaatcggtagtgggccttaggggcaaagactaaggtttccctaagggcaactaattcttctcaagactgcaatagacacaccctgcctgagtttccagcctgccgccctacggaattc

SEQ ID NO: 250908 - DNA, 69 bp, Homo sapiens
  chr2:106011679-106011748
  hypo
aggacaaccatagctgcacacgctagaatggcgggtggcctcgggtccgtcaatcacaccagtgtgggg

SEQ ID NO: 250909 - DNA, 394 bp, Homo sapiens
  chr2:106016089-106016483
  hypo
tcttggattcccctccagggcgggaaaaccaaagtgagctgggagcgtgcctcccacattccaagcccgggccctctgcgtgacgctgacgctgggtagggacagatggcactgttcagcattgtcgcagggagagcacaggttgagcccatccctgggagagggtgcgtcgtgatggaaacatttgctcctgagcaggtaaccggtccacttgcagaaaccggtggacgatgagtaggtggaccacaaaggcgtcctcggcactttgggggcaggtgtattatttttaacattcggggcagctcataggaatacatcctccagagaaggcgggaagaactccgtgattgctttcttttaattgatactctccgtctggtaggcctcatgggtc

SEQ ID NO: 250910 - DNA, 189 bp, Homo sapiens
  chr2:106060610-106060799
  hypo
tagggttttaggagggagtgcgtggaccgataccattttttgtaagctgaaaagagtgtagaccaaggaaagtgttgtttttctggactggaaagtcctcagatgcagaaccagtgtgtgttggggtgcagaggatgagtggtttgtgaaccgcgttgcctaccaagcgcctgtctgcagaatctggaa

SEQ ID NO: 250911 - DNA, 91 bp, Homo sapiens; identical to SEQ ID NO: 208154
  chr2:106064705-106064796
  hypo

SEQ ID NO: 250912 - DNA, 36 bp, Homo sapiens; identical to SEQ ID NO: 208155
  chr2:106081974-106082010
  hypo

SEQ ID NO: 250913 - DNA, 241 bp, Homo sapiens
  chr2:106227199-106227440
  hypo
tttgcttcaaacaccgcagaacacagagcaaaccccatgacgccgtccttcaactaaacagcccaaagcagcaaactagaggtttccatttttagtttgcaaggggaacaactgagctttcatgagttggaatttgctaacgtaaattgagcctttgtaagagggctgaaattgaccctggagacggaaagcacaggaaatatttgctgtggtcggtgggagaggacgctccgcagacaaa

SEQ ID NO: 250914 - DNA, 200 bp, Homo sapiens
  chr2:106399856-106400056
  hypo
gcaccgtgaaggcccgcgtggaacatggtttttatttagagtaaaaacagctcgatgcagcgttgcctgtctgagccagacttagctcttcatcttcacctgcttgtgggaagcttcgtacaccaccaaggcacaggttaatgtgcagtatttgccaccgtgggtgcagttactaggaaggcagccgttcgcggagaata

SEQ ID NO: 250915 - DNA, 97 bp, Homo sapiens
  chr2:106473751-106473848
  hypo
cagactgagccagccgcccgtcctggagccggcactgggcccgcgcccgtccccgacagatggccatccagccctgctggagcgcagcgtcggttcg

SEQ ID NO: 250916 - DNA, 380 bp, Homo sapiens
  chr2:106498148-106498528
  hypo
catgtggtccagacgctgtaccccttcagctcagtcaccgaggaggagctcaacttcgagaagggggagaccatggaggtgattgagaagccggagaacgaccccgagtggtggaaatgcaaaaatgcccggggccaggtgggcctcgtccccaaaaactacgtggtggtcctcagtgacgggcctgccctgcaccctgcgcacgccccacagataagctacaccgggccctcgtccagcgggcgcttcgcgggcagagagtggtactacgggaacgtgacgcggcaccaggccgagtgcgccctcaacgagcggggcgtggagggcgacttcctcattagggacagcgagtcctcggtaagtgcgctgcgcccacagct

SEQ ID NO: 250917 - DNA, 167 bp, Homo sapiens
  chr2:106499100-106499267
  hypo
gatatgaggccactcgactggggcagcagacccagttcagcggtgggcaggctgggggcggtgagtttcaggcatggggtcaagcctgcatcccagaaggcaggcttttcgtgtgtgaaggaaatactcgaccagttttgcaaacgtctttccgaatacaccttcta

SEQ ID NO: 250918 - DNA, 240 bp, Homo sapiens
  chr2:106713428-106713668
  hypo
gagggactgttctgcgtggaagtccagggagtgctcctgcaactgctgtggccaagctgactgtgtgcaggcgcccagcaagagctcggtggggggcaggttattctgtctcaacaggcctgagttaccgcccactacaagagggttgctccaaggcagaccacccacaccaggtaacaagtgcagacgtgcccaccgagcatgaccccggtgtgagaccacaaacgtggtgtggggcca

SEQ ID NO: 250919 - DNA, 61 bp, Homo sapiens
  chr2:106722162-106722223
  hypo
tgctgaatgacctgcggagcgccacggatcacgccactcactgaggcggagacggcaacag

SEQ ID NO: 250920 - DNA, 331 bp, Homo sapiens
  chr2:106730106-106730437
  hypo
gtgggcttttacagtgtatacgtatctaatgtttgatccactgcagaacaaacgtgcactttctgggcacctgagggcagggagcctggggcgtgaggacctgggctctgcttctcactgcgcccatgtgtccgccgttcccgctccaccgctcactgcccaggcctgccactgactcggtcgcagcaagactgggaaagaagcagtactcacctgaccgcctcagtgttctaagactgaagcacaggcccagtggctgtatttggtgccagttatcactaccagctgaaacagttcttttttcaatttcggccaacaccttaggctggca

SEQ ID NO: 250921 - DNA, 168 bp, Homo sapiens
  chr2:106734893-106735061
  hypo
gagtcagactcatgagggggcgaactcaaatgcacactaagcactgaccgcagcctacgggagaggcccccacatttatcaagccactgagtccaaatgcacacagaggcggcaatttaattcctccctggcaagttctaactattcgggaaaggctctgccctttga

SEQ ID NO: 250922 - DNA, 51 bp, Homo sapiens
  chr2:106742074-106742125
  hypo
cctccatacacctccgatgtggaggccaggagcagacgggcaccgactcgt

SEQ ID NO: 250923 - DNA, 152 bp, Homo sapiens; identical to SEQ ID NO: 208159
  chr2:106778555-106778707
  hypo

SEQ ID NO: 250924 - DNA, 299 bp, Homo sapiens
  chr2:106927123-106927422
  hypo
tgaaggggaaggagcgactccatttgggaagaagagtctcaaaagcgccctggtgatgcctctgggaggcaggggcggtcctggcagggtggttgatgtggtctgcgcagcctgcatccccggcctccctttccctgacttcccggtgggtgcgaccaacgtgaggcgcgggtcctgggtgggcgcagagagtgcccgggagtttgtttcccttcctccctgctccctgcttggctcgcgcggtcctgctgctcttcctagctcagggcagctggcctctcccacgcaaggcaccggag

SEQ ID NO: 250925 - DNA, 520 bp, Homo sapiens
  chr2:106959095-106959615
  hypo
gttagtggccatatgccatgcgcttcacgtgctccaggcagagacgagctcaagagcctctggtctctgctgcgggtggcgaggggcggctggaacagcatacttcagtcgttccgtgtcagcctccacccctggtagcaccagagcctcccaggcgtccccgcagtccgagccagccttagcacccagcgctttcttgctgtcgcctggttgttcccgcggcggccgagctcagcacctctcacactccctgcctctcgaggactctgcttgttcctcatcacagcacggttgctctcgcacccaaggcggtgtccccccagcgcctcaccacgatcgcggcagagatctcctgcagggcgtccgggccttgggaaggcatcgccatctcccgcagcgccctcccggactagcgcagcaggctggcatcgcttcctgaggtttggccccaagttttacggcttaatgaggcacataaatagataaattgtcttcatcacgtcagcgattgctttcactt

SEQ ID NO: 250926 - DNA, 203 bp, Homo sapiens
  chr2:106959839-106960042
  hypo
gccgtggtccccacggaagcggtgagaacgcacctggccggctcagccacacggcacggtggcctaggccctgctgcgggctctggatccagcggtcacggtttcactgagagggcgcctcccaggggctgctccggcccagggcagggcattgcaggggtgatgggacagccctgcttttgagaggcgcggcactctgccaa

SEQ ID NO: 250927 - DNA, 32 bp, Homo sapiens
  chr2:107134450-107134482
  hypo
ggagccaccgcgcccagcctgtttatagctct

SEQ ID NO: 250928 - DNA, 78 bp, Homo sapiens
  chr2:107204235-107204313
  hypo
tttcttacctttggagtccacggacccttaaaaggtatgtgggtcgtggccgggcgcggtggctcacagccgtaatcc

SEQ ID NO: 250929 - DNA, 1003 bp, Homo sapiens
  chr2:107459358-107460361
  hypo
aatattaggaacacctggtgcggagaccccagcttgccccgtcagagatccagaggcgcgctcagaaagaaccggcccccagggacacactggctcaagacagggcgacctggtccccccgctgagacctacctatttcctcgcccaaggaagagttgaggattgcgcctgcagacatgacgacagcgcagctgcgcaggccgcgggggtgcagctggctcaggggcacggcgggcaccaggcgccgccagcccagcgcagaaaagggcgcctcggtgccgtccagcgtccgcacgcgcgcgcggctccgcagctggcacagcagctgtgccctgctcagcccggcctcccgcttcccgcggaagcgcaccccgtgcttgttggcggtcaggtaatccttcatcgccttctgcaggcgcgggttcagcattttggaagagacgttccccttccagagccggtacaggaaggccctggacatggaggagtacagcctgtcgccgtcgtcgccctcctccaacacgtggctccttctctgcctccggtgcctcttcttcacccgcctcctctggacctgtgcagccggaaaagccccctcccgtgggcctggctccccgggggaagggaatcccaatgtcccctgagtgtggctgtgccaccctggctgaccagcagcaaaaaagtagtcgtcatcctccgggtagaaagcactttgagattttctccccacctgggatgaaaaaaactctttatgttcaaacccatcttgggactgggcccatttctgcaggtctccaggccccgcatgaaaggaaccggctgggtgggcgcggggcagcgcctggcgtgcgtccaggcccccaggcggggagggctcatgtgcggcgcccatgatggcccgctgcttcccctgcaccggcaggagcctcctggtctccaggaaggagagggagctgggtacaggctcagcggggttgctgtcggtgaagtagatgaaaatcag

SEQ ID NO: 250930 - DNA, 56 bp, Homo sapiens
  chr2:107595241-107595297
  hypo
tgctgggactttgccccatccgcgacttggctctcgctcctaagtgcagatcataa

SEQ ID NO: 250931 - DNA, 156 bp, Homo sapiens
  chr2:107919281-107919437
  hypo
aatatataaatataaatatatataatatataaatatatgtgtgtgtatgtataaatgtgtgcatgcgtatgtataaatatatgtacacatgtatacgtttctataacatggcaagtgaatttgtttttaatatatatactacgacaaatggaagga

SEQ ID NO: 250932 - DNA, 180 bp, Homo sapiens
  chr2:108085838-108086018
  hypo
agggcgcgggcagccagtaccgtgccatgtgcctgcactcctcagcccttcggcggttgatgggacttgggaccgggctcagcggagcaggaggaggcgctggtcggggaggttcccgcgggcgtgcaggagcccacggaggcggaagctcaggcatggcgtgctgcaggtccccagccc

SEQ ID NO: 250933 - DNA, 75 bp, Homo sapiens
  chr2:108086318-108086393
  hypo
agggagccagagctgctaggacgttgtcacctctcaccatgattgtgccactgcgctccagcctgtgaagacttt

SEQ ID NO: 250934 - DNA, 806 bp, Homo sapiens
  chr2:108160841-108161647
  hypo
agacctggtgcactgagaggcggacgtgaaaccgagtggagatggaaggagacgcggtgcactgagaagcggatgtgaaactgagtggagatggaaggagacctggtgcactgagaggcggatgtgaaactgaggggagatggaaggagacctggcgcactgagaggcggatgtgaaactcaagagagatagaaggagacgtggcgcactgagagccggatgtgaaactgagggaagatggaaggagacctgacgcactgagagccggatgtgaaactgaggggagatggaaggagacgcggcgcactgagagccggatgtgaaactcaggggagatggaaggagacctggtgcactgagaggcggatgtgaaactgaggggagatggaaggagactgggcacactgagagacggatgtgaaactcaggagagatggaaggagacgtggtgcactgagagccggatgtgaaactgagggaagatggaaggggacctggcgcactgagaggcggatgtgaaactcaggagagatggaaggagacgtggcgcactgagagccggatgtgaaactgagtggagatggaaggagactgggcacactgagagacggatgtgaaactcaggagagatggaaggacacatggcgcactgagagccggatgtgaaagtgagtggagatggaggcggggcgcactgagaggcggctgtgaaactcaggagagatggaaggagacgtggcacactgagagccggatgtgaaagtgagtggagatggagacggagcgcactgagaggtggatgtgat

SEQ ID NO: 250935 - DNA, 120 bp, Homo sapiens
  chr2:108552484-108552604
  hypo
tggtgacagagcgagactccgtccaaaaaaaaaaaagttgggggggagcttacgcttttcattaaatgtatacttaaaattttaaaaatagaaaacgatgggccaggtgcggtggctcat

SEQ ID NO: 250936 - DNA, 87 bp, Homo sapiens; identical to SEQ ID NO: 208166
  chr2:108918020-108918107
  hypo

SEQ ID NO: 250937 - DNA, 39 bp, Homo sapiens; identical to SEQ ID NO: 208167
  chr2:109225030-109225069
  hypo

SEQ ID NO: 250938 - DNA, 86 bp, Homo sapiens
  chr2:109259999-109260085
  hypo
agcacaaaactgggcggcctttagggcagacaccgagctagccagttttttttttcataccccagtggtagcgtttgagttttttt

SEQ ID NO: 250939 - DNA, 83 bp, Homo sapiens
  chr2:109328951-109329034
  hypo
acatgataacttggcgaatgtgaaccctggaaacagtgcccgggggctttccaaaggcacttcgcatacgcggagcctgtcag

SEQ ID NO: 250940 - DNA, 102 bp, Homo sapiens
  chr2:109329294-109329396
  hypo
tgaggctttgggtacggcttgttcttacaataccggtaacaacggacggggcggcggcccatggcgataccaggatcttcagcggcgcgcttaagagaaaga

SEQ ID NO: 250941 - DNA, 160 bp, Homo sapiens
  chr2:109335080-109335240
  hypo
cgtgaaccacagcgcccggcggaatgcgtggattttggcataagacggtggttctggaaccaatcccccgccgagatgactgtttaaaaaattgtaattgtccaaaacttaatatttgtggtctttttcattatgcagttctaaatctcccttttttttt

SEQ ID NO: 250942 - DNA, 37 bp, Homo sapiens; identical to SEQ ID NO: 208168
  chr2:109536234-109536271
  hypo

SEQ ID NO: 250943 - DNA, 37 bp, Homo sapiens; identical to SEQ ID NO: 208169
  chr2:109556840-109556877
  hypo

SEQ ID NO: 250944 - DNA, 474 bp, Homo sapiens
  chr2:109558967-109559441
  hypo
atgaaccacggcgacggcaggggccagcgtccccgtctccctcccgttctagaagacataaatggtgccttcattttgtgagtctgcgctgagtgaggccgtgaggcgggcggttccgccacctgctttccacgccagaggcctttcaagacggcgggagccctgcggttccagcgcgttcctgttcccgcctctccttttaccacgaagccagcttcgctcccaggcaccaccctggccatctggactctcacgaaggttcgtgccctgagaacttcaggaggaggcgcgctaagaaaactcaacagcagcaacaaaaacattttcaggctcccagtcttttaagtttgagcgggtaggatttttgtttgtttgtttgttttgaacgattcaatagatggattttctccctgctcctaatcctgggattagaccatgccttcccggccccttcgctgacgtgcaggtaacccg

SEQ ID NO: 250945 - DNA, 181 bp, Homo sapiens
  chr2:109588359-109588540
  hypo
gcttcctgctgtgccgtggctgctgctcagtcacataggggcaacagaggagcagccgtggggagctcccgtggcccggagctgaggcctcctgccgcagccacttgcgaggcctctggatgtgggtcctccagcctggcctggcccgcagatgttgcagcccagccgactgcagcctcag

SEQ ID NO: 250946 - DNA, 114 bp, Homo sapiens
  chr2:109604152-109604266
  hypo
aggggtacagtggagacccccggccaatcgccaccaggatcgccaaactttcccagccgtgaagggtacacgtggactgtcatcggaacgaacgcttatttccaagccttgacc

SEQ ID NO: 250947 - DNA, 197 bp, Homo sapiens
  chr2:109723678-109723875
  hypo
ccttttttttttttttcagctgccaaagacttccagagtttaaaagaacgctggagaccatccacggaagagtatgacccacacgctcagggataagtacaggtccagatgtagtttgaaactgaggagagttgacagaggggatggaaagagagcaaagtagagccagccagtatgctggccgagtaccccctggg

SEQ ID NO: 250948 - DNA, 34 bp, Homo sapiens
  chr2:109737056-109737090
  hypo
tccatgtggtgagccgagatcgcgccattgcact

SEQ ID NO: 250949 - DNA, 185 bp, Homo sapiens
  chr2:109741776-109741961
  hypo
ctgactatcaccatgtggagcgtcttccaaatctaaaaagaagttcaaattttgggccgccaaaaacctgacatacagccgtccagtcctgtttcctctgagctttttctcctttggacagacgccctgtgttccttcaactgaaactcatggatgaggcctccggatcccttaccacatcgtca

SEQ ID NO: 250950 - DNA, 959 bp, Homo sapiens
  chr2:110007111-110008070
  hypo
tctggttctgctggcgagacccatggactctgggatgaggaaggaggcattgacagccgcagggcagctggaggttctttggcagatcttggttttgagggctggcttgtggggcctcacaggggcggtcgcttcccgggctacccactatgagatgagcctggcccagggtgtgcagattcatgtgccacatcatagggcactggcagagggcggcccctgaattctctagagggtcccggcatgaatgctgctgtgggctgtgtgacagctggggtaggcgggcaggttccacaaactgatctgcagcttggccaactgcccccaagcagctagcacccagaggcggacaaggtggacgggtgccacctgcctctcatgggaccagcctgcacctgacagggacagggttttgtccagtccataagagggggctgaaatgaaaaccattcgctccgactccctcctcagatttttaaatgtcaactcttccaaaagccttgcctgtactcaggctttacgtgcaaaattaggcagccatttgtgcagtgcaggtctgcacctgcgttttaaacttcagttatccgaatagtcacctcagcttgccagcccattgggcagcccgacagcagcctgacctgtatgcttcagccattacaggacggggaccagggctagaatgcaaacaccaagaggacaggatgggaaaggcacatctgccatgtgctggagggatgcaggtcacccacaggctcggggaggggtgcgggtcacccatgggctcgggccttcactctggcagggccggcggcctcacacaggtctccagcacactcctgcagtgctctagtgttgctcagcctctgtcaaactaacttcaaggggggaatctcctccagggtagaagcctctcccatagcaggtgtgtggccacggcttgtggccgggcagggagcatc

SEQ ID NO: 250951 - DNA, 40 bp, Homo sapiens; identical to SEQ ID NO: 208173
  chr2:110008967-110009007
  hypo

SEQ ID NO: 250952 - DNA, 40 bp, Homo sapiens; identical to SEQ ID NO: 208174
  chr2:110009247-110009287
  hypo

SEQ ID NO: 250953 - DNA, 231 bp, Homo sapiens
  chr2:110011287-110011518
  hypo
tggaggcctgtgcgcgagacgagtctgcaccaacttgcagagtgaggagctgggaaagtgtggctgctcctaatgggtgcacgggagccgccgtcccgcacaggcactggcaggcgagggcatcctgtgaccgtgggcccacaaggatgtgtgtggccggtgagggtccttctgattgggatggcaccggtgccaaattcaggcccagctttatgacgtgactaattggag

SEQ ID NO: 250954 - DNA, 351 bp, Homo sapiens
  chr2:110015123-110015474
  hypo
ccctctgactccggcgctgtggccagcgtggccccaagtcccactttaagcagctcaggggcggtcagtgcctttcagcggcgtgtggatggcaagaagaacaccaagaaacgccactccttcaccgcgctcagtgtgacgcacagatcctcccaggctgccagccacaggcattccatggaaattagtgctccagtgttgatcagctccagcgatccccgagccgcggccaggattggagaccttgctcatctgtcgtgcgctgctcccacccaggtaacatcccgcgggccagggcaggcatccctgggttctctggggttctatcctcagctccgtgttcagtgtccc

SEQ ID NO: 250955 - DNA, 262 bp, Homo sapiens; identical to SEQ ID NO: 208177
  chr2:110016729-110016991
  hypo

SEQ ID NO: 250956 - DNA, 142 bp, Homo sapiens; identical to SEQ ID NO: 208178
  chr2:110017051-110017193
  hypo

SEQ ID NO: 250957 - DNA, 72 bp, Homo sapiens
  chr2:110021041-110021113
  hypo
cccagaggctgccacgggcacacagggcctgggcaggtggggtgtggcccaggctggcggccaagcagagct

SEQ ID NO: 250958 - DNA, 466 bp, Homo sapiens; identical to SEQ ID NO: 208179
  chr2:110021654-110022120
  hypo

SEQ ID NO: 250959 - DNA, 90 bp, Homo sapiens
  chr2:110022453-110022543
  hypo
gcccggctgcacatcgatggctggggagaggacacagctgcggggctctggctgaaggtgtccagggcgtgcagccggctgagcctcaga

SEQ ID NO: 250960 - DNA, 113 bp, Homo sapiens
  chr2:110025459-110025572
  hypo
gaagccccgggtaggcgagaaaggggtcctataacttccttaacagacctcccctttccttgttgacgttttgagattttcattcaccaaactggagtcgggttgtggatgtt

SEQ ID NO: 250961 - DNA, 157 bp, Homo sapiens
  chr2:110026466-110026623
  hypo
gtacagcctgccaacgcccagaccctcttttttcccttttagtaatcccagcagggaactaatacggcctggttcccagccactgcttaggggccccattaaaatgcagcggaggaggctctagtgtctggttacaacctggcggtttagaatcggg

SEQ ID NO: 250962 - DNA, 165 bp, Homo sapiens; identical to SEQ ID NO: 208180
  chr2:110028490-110028655
  hypo

SEQ ID NO: 250963 - DNA, 224 bp, Homo sapiens
  chr2:110040036-110040260
  hypo
caagacaataagactcggtaaaataagtccctgccaggcttggaacgaaggcctggatcagcgaaatcaccgggtactgcccccaagaggtgtctcagaggccagccgcccagcctcctttgacagtgcccagccttgtggtcagcctggccccatggtcaccccttccaggcatggcggcaccgtcctcaggatattacagacagatgcgaccaagaatatga

SEQ ID NO: 250964 - DNA, 158 bp, Homo sapiens
  chr2:110048957-110049115
  hypo
tacctggcgctctacgcctacaagccccagaagagtgacgagctggagctgcacaagggagagatgtaccgggtcctcgagaagtgtcaggatggctggttcaagggggcgtctctgaggaccggggtctctggggtgttccccggaaactacgtgac

SEQ ID NO: 250965 - DNA, 49 bp, Homo sapiens; identical to SEQ ID NO: 208181
  chr2:110256842-110256891
  hypo

SEQ ID NO: 250966 - DNA, 194 bp, Homo sapiens; identical to SEQ ID NO: 208182
  chr2:110259063-110259257
  hypo

SEQ ID NO: 250967 - DNA, 126 bp, Homo sapiens
  chr2:110260107-110260233
  hypo
atcccgcacctcagcgctggccagtactctgggggctggcggggtggatccattgagggggtcggagggagcttggaagcagccggtttctttaaactcttaccaaaaccccgcgctctgtctaga

SEQ ID NO: 250968 - DNA, 93 bp, Homo sapiens
  chr2:110274998-110275091
  hypo
agctgccgaaccaccgcagcaaggaaggccgggtgagtgaacagagtccaaacaccgcaggttcggacctgtgaaccccgcctggctgctgct

SEQ ID NO: 250969 - DNA, 37 bp, Homo sapiens; identical to SEQ ID NO: 208183
  chr2:110352252-110352289
  hypo

SEQ ID NO: 250970 - DNA, 161 bp, Homo sapiens
  chr2:110483973-110484134
  hypo
agatcctatctcaataaaaaccccccaaaaaacaaaaaacaaacgaacaaacaaacaaaacaaaactggaggtgatgatgccccctccaggatccctttgtgaagggtgaagattatacaggcagggtccgtgtcgcagaggagaccgtttccaaggaggc

SEQ ID NO: 250971 - DNA, 196 bp, Homo sapiens
  chr2:110853614-110853810
  hypo
gaagccggcaaaaaacgtggtgtgggggcaaagagcttctcaaatatacgcatacctgagcactaccctccgggcggcactccaagtcctgctactcctagaagcctttggggacttcaagaaagccccagggtctggggtcctgccccagagagtctgcttgaacaggtaagggaggctgcgttgttccccaggt

SEQ ID NO: 250972 - DNA, 145 bp, Homo sapiens
  chr2:110855514-110855659
  hypo
gaccccagtcaagatgggtgcggctcttgtcatcagcacacaggtgagccggggtctcctggtcccaccacgggccaggcaggaatgggctctgcaaaggacacatgcgggcgttgcccacggcgggaacctggatgtcctgaag

SEQ ID NO: 250973 - DNA, 175 bp, Homo sapiens
  chr2:110861845-110862020
  hypo
ctgttcatcgagccttccaacgactgtgtcaacaagtccttgtattgaatcccctctgtgtgaagcacctatcatggtttctgtttcctactggaccgtgacaggcacagcgcctttacagatttccttggctgttctccaccgccctcattacgcatcaggctccataggcagg

SEQ ID NO: 250974 - DNA, 96 bp, Homo sapiens
  chr2:111438060-111438156
  hypo
atcctaatcctccttgagctcgctaggttttatttcttctgcctcttcagggtttgtgtctattgctttttgcgcaggtgccgggagaggacttgt

SEQ ID NO: 250975 - DNA, 91 bp, Homo sapiens
  chr2:111438464-111438555
  hypo
gtgtttcaagagccacttgacgatacagaataaagagctgttcacgctagaaggaggttgggtggatgtttctgcttccttggcctcttga

SEQ ID NO: 250976 - DNA, 86 bp, Homo sapiens
  chr2:111881445-111881531
  hypo
ggtaatcctgaaggcaatcacggaggtgaaggggacagctgcccccacggcagccctcagggcccgctggccccacctgccagccc

SEQ ID NO: 250977 - DNA, 111 bp, Homo sapiens
  chr2:111890892-111891003
  hypo
ggtggagtcttaccccctttcgcttttctaatgtacgcatttattcagcgctagaaatttcctttccaccactgcttagctgcatcccacgtgttttggtatgttgtgttt

SEQ ID NO: 250978 - DNA, 310 bp, Homo sapiens
  chr2:111911293-111911603
  hypo
gtgttagtcttttattgccacgagccttgcaaagcctgacaggatattttcccgtttttccagttagagaaatagaggaagttgtcgtgtagttgtcatgtattcagtccacttaagggcagtggggaagcgtttgagacggagctgtggaggctgaatccttgaaggaggaggtgagagaggcacaggtgagcgcaaagtcccagtgcatgtcccctcttctctcccgatgcagtgtcattcccaggtgaacctgccgggctgaacggcctggcccctctattcagtcggagttttactactccagtgg

SEQ ID NO: 250979 - DNA, 162 bp, Homo sapiens
  chr2:111929172-111929334
  hypo
gtgttcttggccacagtaaccggccccccagccaccagcaccccggggtcccgtctctgagctgcctgctggactatgcaacaggcgcccaccctccagcatgttctccttgtgctaaattagccagggctggtttctgtcgctggcagccaaagcagtgac

SEQ ID NO: 250980 - DNA, 45 bp, Homo sapiens; identical to SEQ ID NO: 208186
  chr2:111935999-111936044
  hypo

SEQ ID NO: 250981 - DNA, 147 bp, Homo sapiens
  chr2:112745416-112745563
  hypo
catttttatacgtgcggtttttatggagttcgttgctttgggtttattgctctaatgctagtttactcttcgttttcaaaggtatagatcttggaagtctcatagcagagattattatagccttgagacagcatgatatatagaact

SEQ ID NO: 250982 - DNA, 82 bp, Homo sapiens
  chr2:112779013-112779095
  hypo
gactgtctgtgttgcggacttcggcctctctaagaagatttacagtggcgattattaccgccaaggccgcattgctaagatg

SEQ ID NO: 250983 - DNA, 106 bp, Homo sapiens
  chr2:112785956-112786062
  hypo
ccgatcccttagaccgccccaccttttcagtattgaggctgcagctagaaaaactcttagaaagtttgcctgacgttcggaaccaagcagacgttatttacgtcaa

SEQ ID NO: 250984 - DNA, 94 bp, Homo sapiens; identical to SEQ ID NO: 208188
  chr2:112786372-112786466
  hypo

SEQ ID NO: 250985 - DNA, 142 bp, Homo sapiens
  chr2:112810885-112811027
  hypo
aaacaaaacaaaacaaaaaatcattgcctctccagtgttcttaactaaaggtgccatctgcctaacttaatttaggaatgcctgtatgttttggtactgtttaaatattcccagctttgccactctccgtctcacaccaaca

SEQ ID NO: 250986 - DNA, 47 bp, Homo sapiens; identical to SEQ ID NO: 208189
  chr2:112945140-112945187
  hypo

SEQ ID NO: 250987 - DNA, 508 bp, Homo sapiens
  chr2:113103033-113103541
  hypo
accaccgcccgttttcgaatccatttggcacctccttcgcctaagaatttgcttttccaggcgtcccctttctgttccgtctctgtactgcactaacttcacctatacacaggtctgtatcctcctgttaaaaccactgaccaggactgccgcttctgggtgcgatacagtaacaggcattggattcctcctcttccctcaaacaactagaaagctggaggaaataaacgacgttactgttaggcattggataataggccatgaaagatacggatctattaaaaaaagaaaactaatcaggtaagctctgcaatcgccccagctttttccctgtagttccattcttgaccacagagcagggcatcccgggcagagcgcagctgcgcagcaatcttgctaaatggagcagaggtggagatgagaggagcaagggcagctgcgtgggagcactgccgaggagagcgctggcaggcacagaactccagacgtctatgtaagggtcctctgc

SEQ ID NO: 250988 - DNA, 35 bp, Homo sapiens; identical to SEQ ID NO: 208192
  chr2:113168035-113168070
  hypo

SEQ ID NO: 250989 - DNA, 188 bp, Homo sapiens; identical to SEQ ID NO: 208193
  chr2:113286635-113286823
  hypo

SEQ ID NO: 250990 - DNA, 44 bp, Homo sapiens
  chr2:113349169-113349213
  hypo
caaggagctcggcgccaggaagcgactgccctcatcaaaccttc

SEQ ID NO: 250991 - DNA, 33 bp, Homo sapiens; identical to SEQ ID NO: 208194
  chr2:113494876-113494909
  hypo

SEQ ID NO: 250992 - DNA, 32 bp, Homo sapiens
  chr2:113498451-113498483
  hypo
gctattcggggtgtcgccgtgacttgttccct

SEQ ID NO: 250993 - DNA, 104 bp, Homo sapiens
  chr2:113611570-113611674
  hypo
agaaatattgctgtcgtttttattccttgtggacatccagtcactcgtaaacaatgtgctgaagtggttgacaaatgtctcaagtggtacgcagtcattacttt

SEQ ID NO: 250994 - DNA, 169 bp, Homo sapiens
  chr2:113707198-113707367
  hypo
aacacacattccaaagtgcacgttaggttctttgcatggtcccagtctgagtgagtgtgggtgtgtaagttctccctgcggtaggatggtgtcctgtccagggctggtttctgacttgtgcgtgaacgttaataggttctggtcacccgagatcctgaactggaacaag

SEQ ID NO: 250995 - DNA, 31 bp, Homo sapiens; identical to SEQ ID NO: 208195
  chr2:113804066-113804097
  hypo

SEQ ID NO: 250996 - DNA, 86 bp, Homo sapiens
  chr2:113908444-113908530
  hypo
gtgagtcactgcacccgcccttgatgtttggttcttatgaaggtatttttttttttacatagatcgttgttaaatttggtgttcct

SEQ ID NO: 250997 - DNA, 342 bp, Homo sapiens
  chr2:113967316-113967658
  hypo
ccgccctgcaagcccgtcccaggctgggcagccgcgtgtggtgctaggaaatgccactggcatttgaggcgtttgaggtgctgtccccacacgtgccttggccctgtgggggcctccagccaggcggggacctgggagagggagggagaggataagccgcttcgaaactccagatgcagcagttaaaaagaggacagaggcaatgatccttcaaattgccacatctgtataatctgccttttattttctgcttcatgaagttttatttcctattatttattcacctccccgccctcccctcccccgcctccactcctccttagcaggcgacatgctcagatg

SEQ ID NO: 250998 - DNA, 188 bp, Homo sapiens; identical to SEQ ID NO: 208196
  chr2:113973331-113973519
  hypo

SEQ ID NO: 250999 - DNA, 111 bp, Homo sapiens
  chr2:114060817-114060928
  hypo
ctgggcaagacagtgaggaccgcacggctggtgagtgatacatggagagctttgccgcctgcctgacaggcagaagataaacagctccccgttaaatctcacttaatgctg

SEQ ID NO: 251000 - DNA, 67 bp, Homo sapiens
  chr2:114467013-114467080
  hypo
gagtgagggaaggacggaccatgggagtcagcatttttcaagcatccaggcacgctgggcctggtat

SEQ ID NO: 251001 - DNA, 87 bp, Homo sapiens
  chr2:114515440-114515527
  hypo
attttttaattgatcgaatcagtttcaaactatcagcatcaaacacctctaataagtcattcagaaacctattgtgcagagtaaaaa

SEQ ID NO: 251002 - DNA, 31 bp, Homo sapiens
  chr2:114736319-114736350
  hypo
gtaaacagatacaactttcccgggatgggga

SEQ ID NO: 251003 - DNA, 691 bp, Homo sapiens
  chr2:114736470-114737161
  hypo
ggtgaaggccgcagtaacgctgttccctgcattggatgaagtgctccccaccaaactctctcaccggagagggtgggatctgcgggctccctgggtggcttgatttcgacaccctgtgggctgccttccactctggtactttcctctgcctgctgatgcttgaaattccttgaaccggccacacacacctgctttctggaatcagaacactggaaaggcttcctgggacgggagaagagtgatttacattcctgccgaggtgtaaagctgcggatggcaggttctctcctgagaaccggcttcaactaggaggaggaggttggaagcaggaccccgagctgacctgttgaccaggagaggagtaagcagaagggaggcaggagcgggcggaggagagaaggccggggagccgggatgggggtcaccgcccccggggagccgggatgggggtcaccgcccccggggagcccggatgggggtcaccgcccccgcccccgtgatgccgagctgaaaaagacagtctccaggtaggataatccgtcacactagatgcatatagcttcatgcaagaagagcgactgttgcgctgtcttctaccccctttggccgcgatcccgtgacaatgccggcatccgggcaccaactggcttttgcgaaccgctctccgctccccgcccggattccgaagccc

SEQ ID NO: 251004 - DNA, 43 bp, Homo sapiens
  chr2:115183213-115183256
  hypo
aacagtcaggaaaggagaagcgtattgaaagtgcaaattgagg

SEQ ID NO: 251005 - DNA, 37 bp, Homo sapiens
  chr2:118628528-118628565
  hypo
tacaggtatgagccactgtgcgcggcttcctcctcca

SEQ ID NO: 251006 - DNA, 79 bp, Homo sapiens
  chr2:118736286-118736365
  hypo
aattgagccaggcgcgctggctcacgcctgcaaagtgctgtaatcccagcactttgggaggctgaggcgggcctatcac

SEQ ID NO: 251007 - DNA, 145 bp, Homo sapiens
  chr2:118743611-118743756
  hypo
ggcgtttgtatttccgacggggcttgtacacttcctaagtggatgagacagccaagttactgagtgtgagaaggctctcctcctgaattggctgctggatgcctccagccatggggtatattctctttttttttttttttttttt

SEQ ID NO: 251008 - DNA, 85 bp, Homo sapiens
  chr2:118743816-118743901
  hypo
tgccaacagctctgcctctaccgtggggtatattttaaaattatacacttgcacacatatatatcctaaacgaaatacgtggcat

SEQ ID NO: 251009 - DNA, 43 bp, Homo sapiens
  chr2:118875673-118875716
  hypo
ctcttatgtaaaaagaaggccgggcgcgttggctcacgcctgt

SEQ ID NO: 251010 - DNA, 67 bp, Homo sapiens
  chr2:119028306-119028373
  hypo
aatgtcccgattctcgctcctccgcctggagcctgaactgtccctcggtaagcgccaactgaacagc

SEQ ID NO: 251011 - DNA, 185 bp, Homo sapiens
  chr2:120003178-120003363
  hypo
gcggggactttgcccgctccctggccacacgcctggtgggctctggcttcaaagtggtggtggggagccgcaaccccaaacgcacagccaggctgtttccctcagcggcccaagtgactttccaagaggaggcagtgagctccccggaggtcatctttgtggctgtgttccgggagcactactct

SEQ ID NO: 251012 - DNA, 574 bp, Homo sapiens
  chr2:120005202-120005776
  hypo
cccactcctgtggcctgtgacgccgtctgactgccccacttttctcccgcaggtgcccatctgcggtgaccagccagaagccaagcgtgctgtctcggagatggcgctcgccatgggcttcatgcccgtggacatgggatccctggcgtcagcctgggaggtggaggccatgcccctgcgcctcctcccggcctggaaggtgcccaccctgctggccctggggctcttcgtctgcttctatgcctacaacttcgtccgggacgttctgcagccctatgtgcaggaaagccagaacaagttcttcaagctgcccgtgtccgtggtcaacaccacactgccgtgcgtggcctacgtgctgctgtcactcgtgtacttgcccggcgtgctggcggctgccctgcagctgcggcgcggcaccaagtaccagcgcttccccgactggctggaccactggctacagcaccgcaagcagatcgggctgctcagcttcttctgcgccgccctgcacgccctctacagcttctgcttgccgctgcgccgcgcccaccgctacgacctggtcaacctggcagtc

SEQ ID NO: 251013 - DNA, 150 bp, Homo sapiens; identical to SEQ ID NO: 208199
  chr2:120011808-120011958
  hypo

SEQ ID NO: 251014 - DNA, 250 bp, Homo sapiens; identical to SEQ ID NO: 208200
  chr2:120020672-120020922
  hypo

SEQ ID NO: 251015 - DNA, 82 bp, Homo sapiens; identical to SEQ ID NO: 208201
  chr2:120069741-120069823
  hypo

SEQ ID NO: 251016 - DNA, 35 bp, Homo sapiens
  chr2:120230476-120230511
  hypo
taggtgtaagccgccacacccggccaaaagcaaac

SEQ ID NO: 251017 - DNA, 184 bp, Homo sapiens; identical to SEQ ID NO: 208202
  chr2:120247827-120248011
  hypo

SEQ ID NO: 251018 - DNA, 162 bp, Homo sapiens
  chr2:120282306-120282468
  hypo
ctttctcatccctaacaacacgtctgataatacccactctcggactgaaagttgtcacacagtcgaggcccattgcatctattccccccgatagctaccttgcactttatttccgattttttcattattgaagtcattagcgctaattccatgaagtttcac

SEQ ID NO: 251019 - DNA, 239 bp, Homo sapiens
  chr2:120317342-120317581
  hypo
gtaagaaaggtaagcgtcattggtttacctgttctcccacggtgtggttgtctgcgtctcaggcctgtgtggggtggggggtgtgtggtgtgttgtcacccccggtgctgctctctgtgcagtccggggcttgtcccaacaagatgccacctgtcttccaggaacaccacctggtccctggcttgtccctcacggtcaccgttacattttctccagatgagtggcgatactattatgac

SEQ ID NO: 251020 - DNA, 41 bp, Homo sapiens
  chr2:120441330-120441371
  hypo
tgtgtatgtgtgtgcgtgtgtgtgcgcgtgcattgctccgc

SEQ ID NO: 251021 - DNA, 161 bp, Homo sapiens; identical to SEQ ID NO: 208203
  chr2:120754214-120754375
  hypo

SEQ ID NO: 251022 - DNA, 51 bp, Homo sapiens
  chr2:120973504-120973555
  hypo
aggaatcatgtctttctaactggctgatgatatggccgagcagatgctaac

SEQ ID NO: 251023 - DNA, 678 bp, Homo sapiens
  chr2:120973771-120974449
  hypo
cccaaccccagtctcggccctgctccactccagcactgtagttgtagcagttttcctactcatccgtttctactctttaatagaaaataacctattcatccaaacctttacattatgtctaggggctattaccaccctacttacagcaatctgcccttcagcgccaggggaatgcccgacagctaccttctcccccgtgaccgccgggctccgtatcctgggcgagccgcccggctccggatagcaggaaactggggagggctccggcctcgcctcgtcagccccggagccttcaccaatcccgggcccggaaagaccacgcccactgctggccccgcctagcacctgcgcaggtgcagtctccacctcaagccagctgggccttatgatagtcaaaattggtattaatcagccacacctagcattccttcacatctgcatccacgccttttaaaaagctatattatttatatgttcaggctccattatccataacctcaatgatgaacaagatatccgtaaaataggaggactattcaagactttacccttcacttcctcttcccttattattggcagccttgcacctacagatatgcctttcctcacaggcttttactctaaagaccttatcatcgaaaccgcaaatacatcatacaccaacgcctgagccctttc

SEQ ID NO: 251024 - DNA, 543 bp, Homo sapiens
  chr2:120979868-120980411
  hypo
ctcaaaagtgagcagaggcacgacaatcgttatccaactgatagccatggtcacgtgtgttctccgctgctcggcaaccacatccagggaccgcaggaacaggagggaccagacgatgtaatagaggacgaccaggcaaaggaacgacatgaggatccacaggggcacaaacaccaccagccacggccagtgaataatcctgtccagctttagggcgatgaagatgaactgcaggatgttgaccgagcacaggatctccagctccagcgacctatcgtgtcgaaagccccagacgcaggcagccacggacacgggggacacgaagaagagaggcatgaagaccagcagccagaagtgggtgcccctctccaccctgtcgcagaccaggacttcgaacatgagcagcagcaggtggatgcccacagcgatcagcatggctttgaactccacacaggcctctccctcggtgcggtagcgagggttgcgggcccaaacgcccgcgcccacggaggcgcctgcgacgactagaagcttccacagcca

SEQ ID NO: 251025 - DNA, 101 bp, Homo sapiens; identical to SEQ ID NO: 208207
  chr2:120982088-120982189
  hypo

SEQ ID NO: 251026 - DNA, 172 bp, Homo sapiens
  chr2:120987006-120987178
  hypo
tgacactctgttctgagtagcgtgacaaaatcttgctccatctagcctgggacgtgacccctctctttgtccagcatcttcacaccgggcgtgctccctgggcgatcacatcagctgccgccagatcactgtccctctgttcaggtcacccgtgtttgacttaataatggct

SEQ ID NO: 251027 - DNA, 75 bp, Homo sapiens
  chr2:120995063-120995138
  hypo
catgcgtgtgcacacgcacacatgggcatgaatgtgggtacgaggcatgtgtgctccacacgctgacttcactgg

SEQ ID NO: 251028 - DNA, 46 bp, Homo sapiens
  chr2:120996940-120996986
  hypo
cctctggatgcccccgctcctcctggcgccccgtgagggtctgtgt

SEQ ID NO: 251029 - DNA, 253 bp, Homo sapiens
  chr2:121036317-121036570
  hypo
caagtcagccctgacgcttcagttcatgtatgacgaggtaagccctgctaggcacagaccaccttcctttggcattggccgtagcagtgtccctgctcccgctgtttctgtgccggtcctcccgtacacaggggttcacggagcaagtctgtgttgaggtggcttctgaatagcttcctaggaaggtctaatcagcataagatctggattgctgattctaggtaaataatttcaactccggcggggatgtgag

SEQ ID NO: 251030 - DNA, 284 bp, Homo sapiens; identical to SEQ ID NO: 208208
  chr2:121058175-121058459
  hypo

SEQ ID NO: 251031 - DNA, 264 bp, Homo sapiens; identical to SEQ ID NO: 208209
  chr2:121108590-121108854
  hypo

SEQ ID NO: 251032 - DNA, 523 bp, Homo sapiens
  chr2:121116365-121116888
  hypo
tttcaaaagcctataatttgcgccagcgtttgcgcttcatggtgaagctcagcctcatccgtgccgcaggcaaaggcaatgccaatccaaacgggtggcaagctgggcccgggcaccagggaagatcagccttcccgcttcctccctgcacctcaaggaaggcagcccttcccgccggcatcttccaccttcaggagagtgtggtttgtcacccgagggtgtctcatagaagctcagcttaattaatcaatcgccgactgatgcattggttaacgcggggccccactcccccgtgaatgatgggcgcattaatgaatgccaattatttcagcattaataattaatctccaaccatgccggagaaggagtggaaagtacacaagcctcgagtcagctccacgagccagcctgccaccccgtgctgctcaccgccttgcccagagtatctgagcggggcctctttgctactgcggggcgaaaaagcaccttggactgggcgtccggggcctggactctggttagg

SEQ ID NO: 251033 - DNA, 123 bp, Homo sapiens
  chr2:121157066-121157189
  hypo
tccctcggggcacccggaagctggcccttcgtcccagcctgggctggggctgactctcagagctgcgggtcctcacgtggaagatggacatgagactcgtgttctgaccgaaagagttgctgt

SEQ ID NO: 251034 - DNA, 241 bp, Homo sapiens
  chr2:121190385-121190626
  hypo
tggcactttggccgcgagatctggaaggaatggagggaggctgggtctgcatgtggggcagtggcggctgtgaagctagaagtctcagggtcgccgccaaatgcggcaggccccaaatgagcacgctgggctcataaagctggcggctggcagggtggtgtccccttcacagccacaactcttcaagagcactcgtggctctggcctgcctggcctggccacacagcgcttgcaccacagc

SEQ ID NO: 251035 - DNA, 134 bp, Homo sapiens; identical to SEQ ID NO: 208210
  chr2:121243025-121243159
  hypo

SEQ ID NO: 251036 - DNA, 136 bp, Homo sapiens
  chr2:121266977-121267113
  hypo
gggcagggcttgggatcctgcgtaagtgtggaggctggagtgcatgccttggggatgccggagcctagctgtgctcggtgagagggaggctgcagggaaggaggatcgggatgccggtggagctgcttgatcctct

SEQ ID NO: 251037 - DNA, 39 bp, Homo sapiens; identical to SEQ ID NO: 208211
  chr2:121327691-121327730
  hypo

SEQ ID NO: 251038 - DNA, 172 bp, Homo sapiens
  chr2:121381302-121381474
  hypo
gaggcctccaatcaccggcatggacccaggtcccaggacatagtgttttctctcctgtgccatctgtacagtagccatgtccagaaggcagggtggggtgggagggaccgtacgtctcagaagagaccacaccctcccatcttacttcaggtcctccgcgctatggagtcaa

SEQ ID NO: 251039 - DNA, 33 bp, Homo sapiens
  chr2:121436963-121436996
  hypo
gcctttcctggtcttcgtcgccaaaaatctgct

SEQ ID NO: 251040 - DNA, 70 bp, Homo sapiens
  chr2:121444217-121444287
  hypo
accgtccagcctgccgcagcccattctttgatgatcatttcacctgctgtgcgcacggctcctcaagctt

SEQ ID NO: 251041 - DNA, 96 bp, Homo sapiens; identical to SEQ ID NO: 208212
  chr2:121542641-121542737
  hypo

SEQ ID NO: 251042 - DNA, 231 bp, Homo sapiens
  chr2:121549384-121549615
  hypo
ctgtgactttaatgcggtgtgcacgtgtgtgtgtggcctgcgtgcaggtgtatgcatgtgtgtggctgtgtatatggtttgtcggcgtatgttctgtgtgctgtgtgagtgtgtgagcctgcgtgtgtgtgtgcatccatgtgtgcctatgcgtgtgggtcctgggcacgcatgccgcacgactgagatcacagcagaggtgagaacaccgtggctctgtggtggctgtga

SEQ ID NO: 251043 - DNA, 100 bp, Homo sapiens
  chr2:121549851-121549951
  hypo
aagcaagtgaagttcgtggactcctacaataatgctataaatgcatagaagaaaagacacaggactgtgaaagaaagtgatgatgcgatgtctaaaacgt

SEQ ID NO: 251044 - DNA, 211 bp, Homo sapiens
  chr2:121550760-121550971
  hypo
ccgggccctgggtcccgggtgcccgctcccacccccttagcagaattttggagagtgtggctgtgtttccttcgtggttgtttggacagcggcagagctgtgtgttttgaaggtaaagtgaggaattgactcttctccttccctgtggtaggtgctgtgactcccagtccctctttttctggagctctgtggagcccgtgggagccatccc

SEQ ID NO: 251045 - DNA, 139 bp, Homo sapiens; identical to SEQ ID NO: 208213
  chr2:121609723-121609862
  hypo

SEQ ID NO: 251046 - DNA, 52 bp, Homo sapiens
  chr2:121614060-121614112
  hypo
accatcatgggcctcgttttaaagtggacctgcccaccgccccgatctccac

SEQ ID NO: 251047 - DNA, 80 bp, Homo sapiens
  chr2:121628105-121628185
  hypo
gagtatggcctcagcggaggtgtgactgccagtgacacctgccggaatgtgaacttcacggatagcgctggctcacacct

SEQ ID NO: 251048 - DNA, 201 bp, Homo sapiens
  chr2:121692170-121692371
  hypo
tgttagggcaatagagtgaacgccagctggtgggcatgggggcctcacctccctttcatctgcatgcttggtcacgcaaaatgcatattacccagggcctccggagacagcattaagagtgtctgaagccccacttggtccccgagactgcatgttaatggggatgtttagccgggtgtcggtgtgccttcacttaagaga

SEQ ID NO: 251049 - DNA, 75 bp, Homo sapiens
  chr2:121708535-121708610
  hypo
agcaagtccagtcgcgggtgcgaggtccattctccagcgtggaactggccggcgggtgcacgcaccagcgtggag

SEQ ID NO: 251050 - DNA, 117 bp, Homo sapiens
  chr2:121711198-121711315
  hypo
ggaacagagcaccctcctggagatgctcaggaagcagagacgctgtattccactgattgcagtgtagcccatgaagagctgggtgggctgggcacagtggctcatgcctgtaattgg

SEQ ID NO: 251051 - DNA, 130 bp, Homo sapiens; identical to SEQ ID NO: 208214
  chr2:121726279-121726409
  hypo

SEQ ID NO: 251052 - DNA, 366 bp, Homo sapiens; identical to SEQ ID NO: 208215
  chr2:121742086-121742452
  hypo

SEQ ID NO: 251053 - DNA, 1125 bp, Homo sapiens; identical to SEQ ID NO: 208216
  chr2:121745649-121746774
  hypo

SEQ ID NO: 251054 - DNA, 42 bp, Homo sapiens; identical to SEQ ID NO: 208217
  chr2:121924778-121924820
  hypo

SEQ ID NO: 251055 - DNA, 197 bp, Homo sapiens
  chr2:121932346-121932543
  hypo
tacacaagatggatgagcagcggtgagctcccctgactcacccactataagcccaccaccccaaaaatggtctcctgtcccttggcacaagtattccttccttcagcacgtgagacagacatgccctaacccccacccgacccgctttctgggaagccgacacaggggcttggccccggccacggtgcctgaggcct

SEQ ID NO: 251056 - DNA, 94 bp, Homo sapiens
  chr2:121962011-121962105
  hypo
taaggcacgagggttagagcttttgggttggtgagcaccaactccagggggacagaagctcctgcccttgggacgattccgggccttgctctat

SEQ ID NO: 251057 - DNA, 332 bp, Homo sapiens
  chr2:121970083-121970415
  hypo
gggcggggaacccccgcagtgcagtgcaggtggctttccggccctcctgaagattccgatgcactgggacaccacccagccactacaagccatgaataaaagcctcctgcctctcaccgctttaatatgtgccggggccattccaagctcttgaagtaaattcagctcatttactcgttataatcgtcctgcgaggcaggcacgagtattagtcctcgtggactaattttacggatgaggcaagcaaaacagaaaagttaggcgaccttgggcaaggtcacacagccggaggctgaatgagaagctaggcagttctccgctacatcaggggc

SEQ ID NO: 251058 - DNA, 208 bp, Homo sapiens; identical to SEQ ID NO: 208218
  chr2:121975957-121976165
  hypo

SEQ ID NO: 251059 - DNA, 161 bp, Homo sapiens
  chr2:122010688-122010849
  hypo
ccacagctccccaccggccatgacactggccgagcacagccatgcccactgggtcagactccgtctcagccattaggaaggtctctggtcacatgccagtgaacacttcttgaccatgccaaaccccagtgctgctcatggtgacgcgctggacgcctttc

SEQ ID NO: 251060 - DNA, 253 bp, Homo sapiens
  chr2:122011448-122011701
  hypo
ctgcatgcctacccccgtgccaacacagtgggcccaaggtgacctcccacccaactcacacagcagcacaacagcaccatcccaaaagccacgcagaaggccaccacccacagtcacatacaggctgacgagcgaggtcacacaggctgaactgacctagggcacaagggcatttctctgcctggccgacatcactgctgggcgtgggtggaagccaggacagcgggctatgagaaggcgcgggtcgtgtctg

SEQ ID NO: 251061 - DNA, 37 bp, Homo sapiens
  chr2:122013320-122013357
  hypo
atttttttttttttttgagacggaatctcgctctgtc

SEQ ID NO: 251062 - DNA, 36 bp, Homo sapiens
  chr2:122013597-122013633
  hypo
tgagccaccgtgcccggcccccctgaacttcttgat

SEQ ID NO: 251063 - DNA, 85 bp, Homo sapiens
  chr2:122094225-122094310
  hypo
ttatgcgagatgcccggaatagtcaaattcagagagagggaaagtagaatgctggttgccaggggccttgcgggaggcaggaatg

SEQ ID NO: 251064 - DNA, 289 bp, Homo sapiens
  chr2:122094602-122094891
  hypo
agtgaccagcagagaagaaccgcaggcatgcaggggagcccggctgctctcagcggctctccagctcatctcgggattcgaggctgaggctttctcctgcttctacctttccggggagccactgttctcactgatcagttgaggaaatggagccgatgagggaggcccctgctcacatggcctccaggagcgtgggtgggattctagcccatgcgtctcacctcccaccttgtcaccgcacacacggcacagcaaccagctcccaggcgactccatcagatgtgatatt

SEQ ID NO: 251065 - DNA, 106 bp, Homo sapiens
  chr2:122096092-122096198
  hypo
tgcagggaggcggcggcaaggcaaggcagctgcagctgtcagggtctagggggcgacggtgggctcggcgccctcccagtgaggtggtggcggcatgcgagtctcc

SEQ ID NO: 251066 - DNA, 88 bp, Homo sapiens; identical to SEQ ID NO: 208219
  chr2:122102164-122102252
  hypo

SEQ ID NO: 251067 - DNA, 209 bp, Homo sapiens
  chr2:122104564-122104773
  hypo
gctggcagagcccaggtgtgcgtatcagcccaggtaacactatacataccttgctccctgtgagctgtgcaaggtgaggtttcaggtcttctccgattacggaataaattgccactaagcaaaacacgctggccttacgcacactactttcggtgttgtcataaccctagagagccagaagggaacacgaaaaggaaaccagatcaaag

SEQ ID NO: 251068 - DNA, 103 bp, Homo sapiens
  chr2:122118646-122118749
  hypo
agagtcggtaagtgcgtgccaagacaccatggacggcttggcatttcatttaaatgcccgagtctaagtatgtactgccccatgaaaacaactgatatcatct

SEQ ID NO: 251069 - DNA, 358 bp, Homo sapiens
  chr2:122187627-122187985
  hypo
agcataaaatatgtttcttacgctgggactgtgaaaccactttagcgcgactgcggccccggttatcaggtgtagaggcgacgttggtggcactcccagagctttgccgtcttgtgcggatccgacctggaggacacagcaaaaacagtgtttcacaacatttccagtaagtgccacctcctcaagaaaagaagccatgccccaaaagaggggcactgaccagccaactacatggggagcaacagcttctgtgagcagatcctccacacgaggtctgccacgtctccctgtgtgtgcatgcgcacatgcgcatatgatccacgcacaactgttctacgaacacaggatgaactcctga

SEQ ID NO: 251070 - DNA, 46 bp, Homo sapiens
  chr2:122260203-122260249
  hypo
tgacatcagaatggcggtgggtgccagatcacgcaaggcccagtgg

SEQ ID NO: 251071 - DNA, 31 bp, Homo sapiens
  chr2:122274305-122274336
  hypo
ttaaaaatatcatcataagccgggcgtggtg

SEQ ID NO: 251072 - DNA, 261 bp, Homo sapiens; identical to SEQ ID NO: 208220
  chr2:122305114-122305375
  hypo

SEQ ID NO: 251073 - DNA, 237 bp, Homo sapiens; identical to SEQ ID NO: 208221
  chr2:122312635-122312872
  hypo

SEQ ID NO: 251074 - DNA, 31 bp, Homo sapiens; identical to SEQ ID NO: 208222
  chr2:122497730-122497761
  hypo

SEQ ID NO: 251075 - DNA, 90 bp, Homo sapiens
  chr2:122498001-122498091
  hypo
cgacagagcaagattctgtctcaaaacaaaacaaaacaaagatgaggtcctgttgggtttgcgttagctgtaaaccgtgactagtgtcct

SEQ ID NO: 251076 - DNA, 155 bp, Homo sapiens
  chr2:122511908-122512063
  hypo
gtgcctaactctaggtaaaacggagaggtgacgaaagtttgtatgagaacaaataggattctttaggacagacgaatgggttttgggagaacaaacacgagataagaaagggttttttattttttttgagacggagtctgttgcccaggctatag

SEQ ID NO: 251077 - DNA, 98 bp, Homo sapiens
  chr2:122783865-122783963
  hypo
ccttaggctggaagtcggtacaggggcccagagcacacatggggagggatatgcttctcgccggggtaggttatttgcacagacgcagagcaccagag

SEQ ID NO: 251078 - DNA, 320 bp, Homo sapiens
  chr2:122976046-122976366
  hypo
aagcctgaggatgacggacacgtggagcagacctggagtgaaccccaggtgtggccaacccagcagacccacagaccagagtgagaaataatactgtcacgcggcagagattttgtgttgttttgctgcaaaaactgactggtacctggggagatgtgatgatgatgatggagtgtagcaatagcatcacatatggagggggtcagaggggtgtgatgaatggcatctttccccgggcacagcggcagctgctttggtccctgcatagcacgtctcgctctggtggggagctggatttgctccagcgctccctgctctgc

SEQ ID NO: 251079 - DNA, 103 bp, Homo sapiens
  chr2:124441079-124441182
  hypo
accttgtgtagggaaacctacggccgtcatgctttacttcgtttagactcctattctgttcccctgtggctactctctcatcataagtgagaggtgacagcgt

SEQ ID NO: 251080 - DNA, 101 bp, Homo sapiens
  chr2:125119894-125119995
  hypo
ccatcttggctcctcccagaatctcaacatcttaaatatcattaacaagatagtcctgaaagcgataaagaggatatatcgactaagtattgttgactttc

SEQ ID NO: 251081 - DNA, 66 bp, Homo sapiens
  chr2:127423250-127423316
  hypo
cactacagcagactcggcacaggtgcctggggctgtgcacgccctggcaagcgcccactctgccct

SEQ ID NO: 251082 - DNA, 279 bp, Homo sapiens
  chr2:127428873-127429152
  hypo
tcactgggcaggtgccggagggagagccagagcaggtgcaagcatgcgaggcaggcttccctgagcccgacagccagggacaaccagctaacacccaagttcagaaaacagtgctttatcacaggcacgagcacaggggagcaacctctccacgcacggggccaggtgtcagctgtgcacttgcatgcttccttattggaacctctccctaccgggaggccatcattagatttggagatggagcctcgggggtcaatgtgtgtccgtattcttccagtc

SEQ ID NO: 251083 - DNA, 284 bp, Homo sapiens
  chr2:127435252-127435536
  hypo
tatgtgttgcctgccgtaatccttcgctagggatgagcacacgagggtccgggaggggtgcttggagttgggacccagagcaccaggacttactgtcaaatctctctggcaccaaaacgcatgctccctatgccacctatcaggatgcacccttaaagcacttttaagatgctttttggaaagagccatttgttggtgtgcatttgtcttcaccactgccccaaacatagctgtccaatattcaggtgaaaatgtcccccatcggccgggtgcagcggctcacg

SEQ ID NO: 251084 - DNA, 314 bp, Homo sapiens
  chr2:127438526-127438840
  hypo
cgggcaggtcagggcggcgggaagggaccttaacagaccttctagtcggcgactttgaagattcttcaagacaatagccagttctgaagattcatccccgtttcttcactgtaaaaataacacgttttttgtagatgacttggaaaatacagacagccatatgttagaagtaaacaaaaccactcctaacccgtctacttcttaaaagccggtacttaacatttgaagcgtatttcttttcatcgctttgttttaaggtttttgtggaatatttttcatcatttctatttagagggtcccgttttcttcactta

SEQ ID NO: 251085 - DNA, 314 bp, Homo sapiens
  chr2:127734331-127734645
  hypo
tgctcgacgggaggcgagaagagacctcacagccagaagagggggagctgcccctgctggccctgccctgcccgactcacgcagcgaggtgccgcatcagactgaaatgtaattagagtgtaatgcaagccaggacgcgcggagactcttaattgaaaattccatttccagccccatcacggctcacagcgccgatgctatcagagatagacgcggccagcacccgcagctcagccccacacaccccacccagccagcaccaccccgccactgccccccacttcgtgctgcagggcctgcgccaggccacgtca

SEQ ID NO: 251086 - DNA, 292 bp, Homo sapiens
  chr2:127801058-127801350
  hypo
aagcctccaaacagcgcagccgaggaggggctcagccgtctaccctgtctccagcggaggagcttctgagaccaggagcgggggccgtcgggtgagcattcccctggaacacgaaggagcaaacctgcccggctgcattccgccctcccgctgccctaggcccgctataggctggataaagtgaaccaagcaagggtcccagaaacgtcacacgtgaactcgcccattcacactcacccattcccatgcacactggccattcactcagccattcacacgtgcacacattcgc

SEQ ID NO: 251087 - DNA, 39 bp, Homo sapiens
  chr2:127855675-127855714
  hypo
cttagggtgtaaatgcgaagccatcgctgcctctaccca

SEQ ID NO: 251088 - DNA, 270 bp, Homo sapiens
  chr2:127895379-127895649
  hypo
ccattccttgaggccgcctcccatagagccactccgcacgcgtgggggtgtgggcacggcctaccctgctggccacaggacagagtgctgggcacatctcctcagccgcgctcgcagacagctgtcttccaagttcagggtgggacgcaggtcactggtcaccaccactcgcccagcagacaggctgagcctagttatgcagcagcaccagccagtgaggaggaacacctttgagaacatcctgtcatgaaccctcgcccaaacggactt

SEQ ID NO: 251089 - DNA, 173 bp, Homo sapiens
  chr2:127895962-127896135
  hypo
gaggcctggagggtcgactggccacagccacctttcccactgcccaacagcagggtcccacgactgcggctgcatgccctcttcactttcctccgggggcctcccagacccccactctgtgtgccagcacttagtcctgcctaaaacagcaactcttccggggcgagggagac

SEQ ID NO: 251090 - DNA, 215 bp, Homo sapiens
  chr2:127933496-127933711
  hypo
cgtgagctgtgatccgatcaaccacgcctacataatgaaacccagtaagaactccagacgtcacagctccggtgagtttccctgggcgacagcactctgtgcaccgtcacacacaatgtgcgggaagacagtcgtgtctgggaatgacggaagcttcgtgtttgggacactcccaggcctcactcatgcatctttcccttcggctggttctgact

SEQ ID NO: 251091 - DNA, 192 bp, Homo sapiens; identical to SEQ ID NO: 208227
  chr2:128127766-128127958
  hypo

SEQ ID NO: 251092 - DNA, 242 bp, Homo sapiens
  chr2:128128833-128129075
  hypo
caagccaaccagaacgaggtggccgtgcaagatgtaacagctgctatgctccaggggaggcgtccccatgccgatgtacaacaactaattttgatccccaggcctatgcacaagtgtctttgtgcgctctcggggcttgggacagaatttccaaaagcagagatcaacagggatcttttataaatgttcgacaagggcctcaggagccatttgttgaatttatcaatcgtttaacccaggca

SEQ ID NO: 251093 - DNA, 646 bp, Homo sapiens
  chr2:128158417-128159063
  hypo
gcccctctgctgctgggaaccgggcgcactcccgccagtcgcaggagctggctccacccgccccttctgatccagtgtcccgcagtcctgcccgcttcaccgccctcgcctagcccccgcgggtggtaaaagtccagcccggcggagcgcccctgcctccttccacgcccctggcctgccctgcgcagctacgcccagcccgcgtccatcccggaccatcctgttgaaggcagtcccctggcacgcagggctgggagctcttagctgaggatggaaccgactgcaccaggagccgctgggaggaaggccgaggggcgcagaggagaggcaaggaaaaaacagcagcccaagaatcgggcctccctgttacagcaggagtcgcatctatttatatatgttatgtcttattgctcagcaaccagctctcggccggggcgtgggccgggaagaggggtctcctggtgcagcgggttggcgtgactcatcaccgccgcgcactctggcctctgggcctaggttaacagactcccgggtttcaggctgggcccaggcggccaggccctccctgctgaggaatctgggttggggcagtgccagctccctgcttctcacctggccacagaaggggtagcgggaggagcgtggg

SEQ ID NO: 251094 - DNA, 45 bp, Homo sapiens
  chr2:128214276-128214321
  hypo
aaagcaccgatatgcgcatcttttttttttttttttttttttttt

SEQ ID NO: 251095 - DNA, 78 bp, Homo sapiens; identical to SEQ ID NO: 208229
  chr2:128273731-128273809
  hypo

SEQ ID NO: 251096 - DNA, 77 bp, Homo sapiens; identical to SEQ ID NO: 208230
  chr2:128273869-128273946
  hypo

SEQ ID NO: 251097 - DNA, 31 bp, Homo sapiens
  chr2:128292847-128292878
  hypo
catgcccgacgatcactttggaaattctaag

SEQ ID NO: 251098 - DNA, 63 bp, Homo sapiens
  chr2:128293882-128293945
  hypo
gaggaccatggaagcgaaggtgcccacgggaagaagcagagccggattcgactccaaagccca

SEQ ID NO: 251099 - DNA, 83 bp, Homo sapiens
  chr2:128306301-128306384
  hypo
actatgcattcagcactataaatttcccttcagtacttgtttcattggattccacaaatttcgatgtgatattttcattttca

SEQ ID NO: 251100 - DNA, 187 bp, Homo sapiens
  chr2:128398930-128399117
  hypo
ctcataggcagaggcggccctgcctgtccacgtggggcctcctgcaggcaccccctgcaagcctgggatcactgagcagcaccttgcattcccccagggatctgcatgtgaggatgagggctgggggctggggcctgcatcagggcaggaccgcatggcctcccacccaagccgccacccaaggcac

SEQ ID NO: 251101 - DNA, 365 bp, Homo sapiens
  chr2:128402978-128403343
  hypo
tgttcactcagtctcagaggcggccgccggcagcattcaaaggcaccccagcccggagccaccccagggaggagccccaggccagcggtcagattcatgggcttccgtgcagaaggggagctgcaccggcgagcacccggcctctgagctgagccgcatcctcacggacaggacagcgccccattatgaggctcctgcagctgttcctcgctccagataaaggccatgatttattctgtgtgcccaaatggggcctcattatacagggcaggacacaaggaccctacagcaagtgtcctcaaagagtcgcctctcactccgtgagcaagactcctcggcctcccaccctccgttcacaggccccc

SEQ ID NO: 251102 - DNA, 128 bp, Homo sapiens
  chr2:128415009-128415137
  hypo
gcactgggcacacacgaagcagtgctcatggtacagctccccattgctgttgacaatgcgctcggcgggggagaagcgggcctggcagcgctggcacacggcgttggccaaggcgtccgacatattgc

SEQ ID NO: 251103 - DNA, 69 bp, Homo sapiens
  chr2:128434220-128434289
  hypo
tgatccgactgtctcgagttattacttcttgttgcgagcgtgtctcagctgattcggcttaactgtaat

SEQ ID NO: 251104 - DNA, 32 bp, Homo sapiens; identical to SEQ ID NO: 208233
  chr2:128472923-128472955
  hypo

SEQ ID NO: 251105 - DNA, 218 bp, Homo sapiens; identical to SEQ ID NO: 208234
  chr2:128583666-128583884
  hypo

SEQ ID NO: 251106 - DNA, 84 bp, Homo sapiens; identical to SEQ ID NO: 208235
  chr2:128600135-128600219
  hypo

SEQ ID NO: 251107 - DNA, 180 bp, Homo sapiens
  chr2:128616461-128616641
  hypo
aaaaaaagcaaataaaaaatgatgctgttttcgacactggagaaaacaaaaggttgtacaataaggtaaataatcatagcttattagtcaacaatatcttagctcattagtcaacaatgtttagatggtcatattgtaaactctgttgatttaataaaaaatgaattgtgccgggcacgg

SEQ ID NO: 251108 - DNA, 33 bp, Homo sapiens
  chr2:128666472-128666505
  hypo
agactctgtctcggaaaaaaaaaaaaagaagaa

SEQ ID NO: 251109 - DNA, 41 bp, Homo sapiens; identical to SEQ ID NO: 208236
  chr2:128679951-128679992
  hypo

SEQ ID NO: 251110 - DNA, 40 bp, Homo sapiens; identical to SEQ ID NO: 208237
  chr2:128680172-128680212
  hypo

SEQ ID NO: 251111 - DNA, 67 bp, Homo sapiens
  chr2:128826373-128826440
  hypo
gggaggaaaagccccggggagaatgaccctgcagtgtggccacacagacaaacggcctcttcttcct

SEQ ID NO: 251112 - DNA, 35 bp, Homo sapiens
  chr2:128826705-128826740
  hypo
ccatgtggagccaacgtgatcgcaaaggtcctcat

SEQ ID NO: 251113 - DNA, 200 bp, Homo sapiens
  chr2:129021514-129021714
  hypo
ccacaccccaaataaacctccgcatgaagtgtccaggaaggactcgggagttcctcttggcgtctggcctctgctcctcccttccgcactctacctaggcatgagcaggtgttgacgtggagtctgagactggggttttaagaaggcagctacgttctgactcctgccctacttgtgccgtgaccctcccagaaacacct

SEQ ID NO: 251114 - DNA, 56 bp, Homo sapiens; identical to SEQ ID NO: 208238
  chr2:129027719-129027775
  hypo

SEQ ID NO: 251115 - DNA, 31 bp, Homo sapiens
  chr2:129103148-129103179
  hypo
gacttccagattccgcggctgagcggcgagt

SEQ ID NO: 251116 - DNA, 170 bp, Homo sapiens; identical to SEQ ID NO: 208239
  chr2:129250623-129250793
  hypo

SEQ ID NO: 251117 - DNA, 68 bp, Homo sapiens
  chr2:129284176-129284244
  hypo
cctcactgctccgacgtgcagcctccagcctgactccgtgacttgtttggacgcgtggcgcttggatt

SEQ ID NO: 251118 - DNA, 71 bp, Homo sapiens
  chr2:129448155-129448226
  hypo
acctgtccctgtgccggtcgggcagcgcatgcgcctatggcctcgggcagcgcatgcgcctatggcctctc

SEQ ID NO: 251119 - DNA, 152 bp, Homo sapiens
  chr2:129539249-129539401
  hypo
ccctggatgccttccgattcctccgttcagccagcacgagtgaagaagagcggagacactgaggcagagacaagctgtccttggggttctccactggggggagaccaggcatggaggggacccatacgtctccattcccagtcaagcgctcc

SEQ ID NO: 251120 - DNA, 158 bp, Homo sapiens; identical to SEQ ID NO: 208240
  chr2:129542648-129542806
  hypo

SEQ ID NO: 251121 - DNA, 42 bp, Homo sapiens
  chr2:130174992-130175034
  hypo
tttctttactttttgttgtccgtcttttatttctgttttcct

SEQ ID NO: 251122 - DNA, 94 bp, Homo sapiens; identical to SEQ ID NO: 208241
  chr2:130356761-130356855
  hypo

SEQ ID NO: 251123 - DNA, 195 bp, Homo sapiens
  chr2:130512122-130512317
  hypo
caggtgagtacattccttggcgctttaagtgatcacgtgccttccgaatgccaggtgcggcgcccgctctgcgctgctcgctgcaactgctcccaccctttcccagggcgggtgctccactgcgccattcccctcaatccagggatttaacttcagcgaggctgggagcgctccgaggctggcctgtccagtcca

SEQ ID NO: 251124 - DNA, 76 bp, Homo sapiens
  chr2:130626912-130626988
  hypo
atcctcccgctggccgggtcttctccgcgaattgggatctgcctcctgggaggatgatacccgtggctgctgctct

SEQ ID NO: 251125 - DNA, 93 bp, Homo sapiens
  chr2:130669924-130670017
  hypo
gcgcactgacaggccgcactgtcccagcctctacgtttgtggtcaaagagcagcaccttcctgaggcctgaggcctagcgggcacgtgaggtt

SEQ ID NO: 251126 - DNA, 36 bp, Homo sapiens; identical to SEQ ID NO: 208242
  chr2:130670341-130670377
  hypo

SEQ ID NO: 251127 - DNA, 135 bp, Homo sapiens
  chr2:130886699-130886834
  hypo
caaacacagcaaggcgagccccaggggctcaggctccagcctccagcatgccgctcccttctactcgtcttcctgcctggcaggagaagctcccgctactggttgccctcctaccactgtcgacaccaccaactg

SEQ ID NO: 251128 - DNA, 39 bp, Homo sapiens
  chr2:130919036-130919075
  hypo
gcagtcccagcagccgcgggccagcgcagcacccccctc

SEQ ID NO: 251129 - DNA, 138 bp, Homo sapiens; identical to SEQ ID NO: 208243
  chr2:130943151-130943289
  hypo

SEQ ID NO: 251130 - DNA, 135 bp, Homo sapiens
  chr2:130948042-130948177
  hypo
gagaaacaaaggcagcgctgccctcgggggagcattggccctggcggaacgcagcagccgcgaaggatccagccagaggatgccacgccagcccagcgctaccaggctgcccaaggggggcgggcctgggaagag

SEQ ID NO: 251131 - DNA, 128 bp, Homo sapiens
  chr2:131116461-131116589
  hypo
cctggaaggctgacggcgtgtgctccaccgtggccggcagtcggccagagaacgtgaggaagaaccgctacaaagacgtgctgccttgtaagtcggggcttccgtagggagtcggtgcagccttgcac

SEQ ID NO: 251132 - DNA, 150 bp, Homo sapiens
  chr2:131486975-131487125
  hypo
ccactacctgctcccggctaacatcctgctctcagacctggcctacattctcctccacatgctcatctcctccagcagcctgggtggctgggagctgggccgcatggcctgtggcattctcactgatgctgtcttcgccgcctgcaccag

SEQ ID NO: 251133 - DNA, 88 bp, Homo sapiens; identical to SEQ ID NO: 208244
  chr2:131502560-131502648
  hypo

SEQ ID NO: 251134 - DNA, 291 bp, Homo sapiens
  chr2:131583609-131583900
  hypo
tctcggtctctcctcgggggccctgccccacgggtcaggctccacttctgttgctgccgcaccctggaagcccccaggaccgctccacactcgccatcaccctggctttgtgtcacaacctgcgtggcgcaggtgcaggatgcaccagcatggatgacatgtcactctccctggaggaacccgcttggcaggggtagctgataacttagggccagcgcagacacagaactgtgcgaaatgacgctgatgtcgcagtgatgcgagccgcatgttcctcgcctcacctgctca

SEQ ID NO: 251135 - DNA, 207 bp, Homo sapiens
  chr2:131639163-131639370
  hypo
actaagagactacagctgtgcgtgagctgtttctgaggccatcctccgcagacgtacaaggttttgctatagtgaatgcttcgggagatgtaaggagggagcgctcactgtggctcagaagtgctggaggaccatcctggagggcggcccttgcgtgggcgagatggcgatccagagcagatggtgatgccacgtgcagccagtgag

SEQ ID NO: 251136 - DNA, 48 bp, Homo sapiens
  chr2:131674646-131674694
  hypo
cttcaggtatctttccggaaaagtcctggctggcgtcccccggcagcc

SEQ ID NO: 251137 - DNA, 232 bp, Homo sapiens
  chr2:131813291-131813523
  hypo
tgagttcacccaagccggtccaggcgcagggagaggacacaggcagggaggagctaagctgcgtgtcagccccacgcaactcgccagacctgctgccactgccgcccccactctcctccactaagatctgacttcattcttactttgtgtacgtgtgtgcatgcacgtgtgtgtggtggcagggtgttggggaggaggaaaaaataccaaaagagaacgttctacagatgga

SEQ ID NO: 251138 - DNA, 240 bp, Homo sapiens
  chr2:131818832-131819072
  hypo
cctagccaagctggcaaaacctcgcctccaaaatttaaaaaaaaaaaaaaagtaaaaataagcaaggtgaaaagtatacagtactttcagatgctgacacacaactgagagcgtgtacgctagccagaaaatctccatggaaacaacagtcatgcatgaggtaaaagaacaagcaaggaagttagctgaaagggcccacggatcaccacacccaaacgcacccctagaagatgaattata

SEQ ID NO: 251139 - DNA, 394 bp, Homo sapiens; identical to SEQ ID NO: 208248
  chr2:131878434-131878828
  hypo

SEQ ID NO: 251140 - DNA, 219 bp, Homo sapiens
  chr2:131883252-131883471
  hypo
cattccaacttgggcgaaatagtaagactgtctctaaaaaaaaaaaaacaaccgtactattttttttttccaggtactattttgaagcgctggaagaagaactggtttgatctgtggtcggatggtcacctgatctattatgatgaccagactcggcagaatatcgaggataaggtccacatgccaatggactgcatcaacatccgcacggggcaggaa

SEQ ID NO: 251141 - DNA, 100 bp, Homo sapiens
  chr2:131962504-131962604
  hypo
cactgaatagcatacggattattctccacaacagactatgcgttaggccaaaaaacaagtcacaacacatttttaaaaactgaaatcatggccaggcgcg

SEQ ID NO: 251142 - DNA, 36 bp, Homo sapiens
  chr2:131966830-131966866
  hypo
ccttcagcagcaggcgtataccgcggttatatacag

SEQ ID NO: 251143 - DNA, 175 bp, Homo sapiens
  chr2:131967161-131967336
  hypo
tctggctggagcctcggacactggctcactgcagttggtggtgtccacagagcggtaggagggcaactagtagcgggagcttctcctgccaggcaggaagacgagtagaagggagcagcaccgacgcatgctggaggctggagcctgagcccctggggctcgccttgctgtgttt

SEQ ID NO: 251144 - DNA, 202 bp, Homo sapiens
  chr2:132269041-132269243
  hypo
ccctggcctggctgcggaggcgggtgctgcgctggcccgcggctgctgggactgcaattgtttggattttcactgaccgtgctttgtttttgtttttttctcctcactcctgggctcgttctcattgctttctttctctctccgcttccccctcccgtgtctggtcctatctctccccttccccacccggccctcttgtcct

SEQ ID NO: 251145 - DNA, 297 bp, Homo sapiens
  chr2:132270120-132270417
  hypo
ggaatctgtgagagccgggggagacgggctgtgctcacagccagtgatctgtcccgttcacctgggaaggagcacacatgattgaacaggaatttgagcacaagatgagaaaatgtgttggccccttagcgctggtgggctggatggcggccacagcacacgggggcacctcattccgcaggagccactgcagaggagaggaggaacctgagggcttgtgccagggagggaggacagtgtccagaaagcatctggcaaaccccatggtgggaaggtgaccagcgagacccaggtggg

SEQ ID NO: 251146 - DNA, 124 bp, Homo sapiens
  chr2:132274362-132274486
  hypo
tgggctccaggccaccggaggatttggcccccagccactgagccctcagcacatacctcccccacaggtcctggagatgtggctgagctacctgcagccgtggcggtacgcgcctgacaagcag

SEQ ID NO: 251147 - DNA, 318 bp, Homo sapiens; identical to SEQ ID NO: 208250
  chr2:132301069-132301387
  hypo

SEQ ID NO: 251148 - DNA, 159 bp, Homo sapiens; identical to SEQ ID NO: 208251
  chr2:132348675-132348834
  hypo

SEQ ID NO: 251149 - DNA, 84 bp, Homo sapiens
  chr2:132403830-132403914
  hypo
accgcgcccggccaagaatttctttccgtctcctgtgtcattgctttggcagtggaaacgcacgtggcctctaaagagtgggtc

SEQ ID NO: 251150 - DNA, 533 bp, Homo sapiens
  chr2:132415330-132415863
  hypo
gttcctgccttgctgcagtccggggagcagcgggcaggggtcctctcttgtcagagtctctggcgcgaggtgggggtggggtgggggttttcctatgcgatagcccacggggcggtgaggccaggtcctcgcgtgcctttgtccagggcgcaggggggcgagggtcttcggtggtggagtccgcggagcggcaggacaggggtcctccagtgccatattccagagcacggcggagtgggggacctgtcctgcagtggtccagggcatgcgggagtggtgggcctcctgtgccatagtccaacgcgcggcggggcgggggtcacctcgtcctgcagtcaccatgcacgagaccccggtcctgctgtgcctcagtccagtgcgcggtgggacggctgttctgctatgctgtagtgcaggacgcggtggggcagcagtaacccagagagcgccgtggcagggggtcctccagtgctggaatccagtgcatggcgggtcaggggtcttaccgtgccgaagtcagtggcaagggtcct

SEQ ID NO: 251151 - DNA, 87 bp, Homo sapiens; identical to SEQ ID NO: 208253
  chr2:132586579-132586666
  hypo

SEQ ID NO: 251152 - DNA, 504 bp, Homo sapiens
  chr2:133174960-133175464
  hypo
gaggcctgcagctacgctacgctgctgcacgtgctgacactcagctttgagcgctacatcgccatctgtcaccccttcaggtacaaggctgtgtcgggaccttgccaggtgaagctgctgattggcttcgtctgggtcacctccgccctggtggcactgcccttgctgtttgccatgggtactgagtaccccctggtgaacgtgcccagccaccggggtctcacttgcaaccgctccagcacccgccaccacgagcagcccgagacctccaatatgtccatctgtaccaacctctccagccgctggaccgtgttccagtccagcatcttcggcgccttcgtggtctacctcgtggtcctgctctccgtagccttcatgtgctggaacatgatgcaggtgctcatgaaaagccagaagggctcgctggccgggggcacgcggcctccgcagctgaggaagtccgagagcgaagagagcaggaccgccaggaggcagaccatcatc

SEQ ID NO: 251153 - DNA, 171 bp, Homo sapiens
  chr2:134897881-134898052
  hypo
aaggagagatgggacgatgtggagcagctgtgctgctgtgggcgccacaagtctgcttagaatgggggacaaggcactggctggcaagtcaggagatctggggactgacgctttccctgccactttgtgagcctctgtgtcttccacaaaagtgggcgagttgggtcagat

SEQ ID NO: 251154 - DNA, 133 bp, Homo sapiens
  chr2:134948636-134948769
  hypo
actgtgtccctccccgccagtccctggcaccgtctgttctttttctgtattatgtgcctggcacatagtacgcacccagtacctgttgtgattgtgatttttattagtaatagttggtcgtacctaattggca

SEQ ID NO: 251155 - DNA, 82 bp, Homo sapiens
  chr2:135293578-135293660
  hypo
ccaccgcgcccagccttgtttgtatgttttacattgtgtgtgtatatatatttagacggagggcgcacgcgtatatacgtgc

SEQ ID NO: 251156 - DNA, 96 bp, Homo sapiens; identical to SEQ ID NO: 208259
  chr2:135707351-135707447
  hypo

SEQ ID NO: 251157 - DNA, 180 bp, Homo sapiens
  chr2:135718101-135718281
  hypo
aaaatatttaagcataagctgttctttaataaggctgctcgccagcttccctctccttaccagcaatttccctgcaccttccacttgaaagaaaatgaaagctaattgcaataactttgataaagtagaattaggatagaaaagtcgcttcttttaaaatagattttcaggccgggtacg

SEQ ID NO: 251158 - DNA, 217 bp, Homo sapiens
  chr2:135926165-135926382
  hypo
gaggaaagaaggcagaactccgtgtcagacttcccaccccctgctggccgggaattcattttgcgcaccactgtgccgcgccctgctccctactccaaagctctgcctcagcggatgtacagtgttctcaccaaagaggactttagacttgcaggtgccttttcatcagatacttccttcttctgattcttctagcattactcgttggtggcttcag

SEQ ID NO: 251159 - DNA, 133 bp, Homo sapiens
  chr2:136555620-136555753
  hypo
ccaagctcctgtcacggatccgcgtcttcatcacctcattgtaatctccattcttgaaaataggatgtgcaaaccagcctcccatgaactgcgggtagggtgggggagacagcccaggcgttacaggtgggca

SEQ ID NO: 251160 - DNA, 194 bp, Homo sapiens
  chr2:136602113-136602307
  hypo
catagtgtgtgagtcgatgaataactttctctatgattctttttttatttataagttcttcttcagagtctatctctgattcgatttccttcaagtaccagttaacaagctcgctcctctttaatgctgactcgtcctcttctgcaacaaaaaaacacattcaaattatcctagcaactcgtactgtcagtcct

SEQ ID NO: 251161 - DNA, 164 bp, Homo sapiens
  chr2:136721521-136721685
  hypo
attacaggcgtgagccactgcgcctggccttaatgactattattagtaacaccactaccactgactacttatttgatgattaattatcattcctttttcacagctggatgactatatacaaaaagtatgcagggcgctgggaacacgaacgtaagtatttgtta

SEQ ID NO: 251162 - DNA, 221 bp, Homo sapiens; identical to SEQ ID NO: 208261
  chr2:136785592-136785813
  hypo

SEQ ID NO: 251163 - DNA, 42 bp, Homo sapiens
  chr2:136845086-136845128
  hypo
ggccgcaagagagaagctgcaaactctcgtggtgttacagct

SEQ ID NO: 251164 - DNA, 33 bp, Homo sapiens
  chr2:136911820-136911853
  hypo
ggcaacagagcgagactccgtctaaaaaaaaaa

SEQ ID NO: 251165 - DNA, 32 bp, Homo sapiens
  chr2:137088316-137088348
  hypo
acaatcagtactctcgcttttttttttttttt

SEQ ID NO: 251166 - DNA, 42 bp, Homo sapiens; identical to SEQ ID NO: 208264
  chr2:137195177-137195219
  hypo

SEQ ID NO: 251167 - DNA, 198 bp, Homo sapiens
  chr2:138689491-138689689
  hypo
agtcactgtcagaatcggtatctggtgaggctcagttttctggttcacagacagtgactgtcttctcgctgtgtcttctcttacaatggctttcccttgcagtggatctctcttgcatctctttaataaaagcactaatctgattcaccgattcatgaatcacgaatcacttttgaaagatcccgtctcctaatacca

SEQ ID NO: 251168 - DNA, 78 bp, Homo sapiens; identical to SEQ ID NO: 208266
  chr2:139436926-139437004
  hypo

SEQ ID NO: 251169 - DNA, 74 bp, Homo sapiens
  chr2:144227051-144227125
  hypo
caatgccccacacgcgagctccagtgggccagttctttgtattgacacatacgcaagttcggacatgacaccca

SEQ ID NO: 251170 - DNA, 330 bp, Homo sapiens; identical to SEQ ID NO: 208267
  chr2:144478010-144478340
  hypo

SEQ ID NO: 251171 - DNA, 200 bp, Homo sapiens
  chr2:147344900-147345100
  hypo
ggacaagcgacctcgctctgtggccagtgagttgtttctgattcggatgatttttgtccctcggcgcgtgcccttgctccccgcccccggctgcgagacccccggcccggcactcgctctcctcctgtcacgaaagggtcgcggcctgtagccctgtgggcagccgtgccgcgatgaaccccagcgcccccagctaccac

SEQ ID NO: 251172 - DNA, 83 bp, Homo sapiens
  chr2:148776775-148776858
  hypo
gcaatgatgcataaacggggtccactgcccaaacttacagaaagcaaaacgtggaaaattagtaactttaactgatagtgtac

SEQ ID NO: 251173 - DNA, 193 bp, Homo sapiens
  chr2:148965103-148965296
  hypo
cataacagatcattcgagggtgggagatggtggaagaatgaggaaacactggaagcatttgtgcaaaagtcaggaacattgcaaagatacccactggcgtgactattatttaacattgtactaaagggagccagctgagagagatactagaagttaggaaaaaaaaaaaaaaagatgacgttaaacccctggg

SEQ ID NO: 251174 - DNA, 41 bp, Homo sapiens
  chr2:149016010-149016051
  hypo
ccagcacctgcacccaccgtacattggtgggggaccagtgg

SEQ ID NO: 251175 - DNA, 49 bp, Homo sapiens
  chr2:149016081-149016130
  hypo
tccagtgtccccccaaactgggcatcccggcaagttccctaatgaaaca

SEQ ID NO: 251176 - DNA, 37 bp, Homo sapiens; identical to SEQ ID NO: 208271
  chr2:149045675-149045712
  hypo

SEQ ID NO: 251177 - DNA, 136 bp, Homo sapiens
  chr2:149215521-149215657
  hypo
aatgccataattacgggtctgtctctagtaattagaaagttggatatgccgaagagcaagtagattagtttaattggagtaagtggactaagttggaagaaggaaacaacttgaatttgacgtatgattttgatag

SEQ ID NO: 251178 - DNA, 194 bp, Homo sapiens; identical to SEQ ID NO: 208272
  chr2:149227323-149227517
  hypo

SEQ ID NO: 251179 - DNA, 32 bp, Homo sapiens; identical to SEQ ID NO: 208273
  chr2:149436588-149436620
  hypo

SEQ ID NO: 251180 - DNA, 100 bp, Homo sapiens
  chr2:149514580-149514680
  hypo
ttgaatacagggaatagggccgtcttagaagaatagaaaaaatgtcaatatgaacttgtggtttttaatattgatatagttagggctgggcgtggtggct

SEQ ID NO: 251181 - DNA, 40 bp, Homo sapiens
  chr2:149514920-149514960
  hypo
ggtgacagtgcgagactccgtctcaaaacaaaatatatat

SEQ ID NO: 251182 - DNA, 198 bp, Homo sapiens; identical to SEQ ID NO: 208274
  chr2:149525279-149525477
  hypo

SEQ ID NO: 251183 - DNA, 143 bp, Homo sapiens; identical to SEQ ID NO: 208276
  chr2:150131807-150131950
  hypo

SEQ ID NO: 251184 - DNA, 79 bp, Homo sapiens
  chr2:150394600-150394679
  hypo
aaagaaaaaagaaaaaaaaaaaaaaccaacatggttttgcactaccaaaagatttgacgagtcaaatgtgtgtgtttac

SEQ ID NO: 251185 - DNA, 33 bp, Homo sapiens
  chr2:150422349-150422382
  hypo
gtgagccatggcgcctggccaagggttcttact

SEQ ID NO: 251186 - DNA, 278 bp, Homo sapiens
  chr2:152153950-152154228
  hypo
ccagagattgtcattctggtcgacgggttttatgtgccacctggctattacgaagcgcagaaccctcttactgtttccagcctggaggccgagtccatagacggaaagtgaggtatttctaggtgtccctgtgtttcatgaaggggcggtatatgcaaagcagcccccaaatgccaaaggagttgagctaccaaagaacaaggcagacaaatccagttcgtcagtaaggagtgttttaatggaaagttaagatggaaatgtggcggcaaggcagatct

SEQ ID NO: 251187 - DNA, 33 bp, Homo sapiens
  chr2:152265327-152265360
  hypo
cttaaaaaaaaaaaaaggcgggggaggagcagc

SEQ ID NO: 251188 - DNA, 206 bp, Homo sapiens; identical to SEQ ID NO: 208279
  chr2:152295716-152295922
  hypo

SEQ ID NO: 251189 - DNA, 206 bp, Homo sapiens; identical to SEQ ID NO: 208280
  chr2:152642697-152642903
  hypo

SEQ ID NO: 251190 - DNA, 147 bp, Homo sapiens
  chr2:152681226-152681373
  hypo
agtccttcttacacgaagttgtgtgcaaatgtgcgtgcgtgcatgtgtgtgtagaactaactctggcactagataatcttgttaaaatccaggtgtgtgtgcgtaggagaaataactccggcactacgtaatcgtggttaaaatcca

SEQ ID NO: 251191 - DNA, 94 bp, Homo sapiens; identical to SEQ ID NO: 208282
  chr2:153079539-153079633
  hypo

SEQ ID NO: 251192 - DNA, 77 bp, Homo sapiens
  chr2:153258694-153258771
  hypo
cgtgagccactacgcccggccgtgtttgatcttttaaaagcccataaatgctaagcgttgttctcatctgtaaatag

SEQ ID NO: 251193 - DNA, 98 bp, Homo sapiens
  chr2:153438094-153438192
  hypo
agacaatatgacgccgcgggccctgccccagcgtatccaaacatcaccgccgcgggccctgccccagtgtatccaaacatcaccgcctagatagtagc

SEQ ID NO: 251194 - DNA, 39 bp, Homo sapiens
  chr2:153448030-153448069
  hypo
ggtttcaggccaggcgcaacggctcatgccggtaatccc

SEQ ID NO: 251195 - DNA, 34 bp, Homo sapiens
  chr2:157340915-157340949
  hypo
cgggattacaggcgtgagcccagtcccaatcttt

SEQ ID NO: 251196 - DNA, 100 bp, Homo sapiens
  chr2:158607940-158608040
  hypo
ctaaccgaatgcaaagtttccttgcccgaactcaggggagggcaggaatccggtgtccagactcgacaggtgggaaggcgtgcaagccctgcttgctttc

SEQ ID NO: 251197 - DNA, 90 bp, Homo sapiens
  chr2:158674928-158675018
  hypo
agtccttcaagccgcgtgccctcgttcagagcttctctcactctggtcactggggtactcggagagtagaagaggcgttcctgggattat

SEQ ID NO: 251198 - DNA, 33 bp, Homo sapiens
  chr2:158914982-158915015
  hypo
ggacgtgtgaggacacaacgagaaggtggtctc

SEQ ID NO: 251199 - DNA, 157 bp, Homo sapiens; identical to SEQ ID NO: 208291
  chr2:159490660-159490817
  hypo

SEQ ID NO: 251200 - DNA, 153 bp, Homo sapiens; identical to SEQ ID NO: 208292
  chr2:159528148-159528301
  hypo

SEQ ID NO: 251201 - DNA, 119 bp, Homo sapiens
  chr2:159638827-159638946
  hypo
cttttccaagcccgcgtgctcccaatccaggcaaacacaaatctttcacatgactgcagtttcttttatacccacagggaagggcgacggaaaggagggccatccgcggaaacctttca

SEQ ID NO: 251202 - DNA, 288 bp, Homo sapiens
  chr2:159946996-159947284
  hypo
aaacagcctcgctcggcagggatcgggggtccctctgtgtggagggtgttggaaactgaatcaggtgtagcatcagtaggcctggcagagccacggaattcaagctgcagtgtgttccacaggactggtagacctggacaagtctgtgctggcaaggaaatgtagaatcccaaattccatgcagattgacggtgaatcctgccaggttgccttccaccacagctagctcgtgacttcacccttcattgggccaggcagaatgaccggagccagcgccactgtgctgca

SEQ ID NO: 251203 - DNA, 39 bp, Homo sapiens
  chr2:159964843-159964882
  hypo
cattttttgctgcccgtttcccgccgcctgcagttaatg

SEQ ID NO: 251204 - DNA, 154 bp, Homo sapiens
  chr2:159994717-159994871
  hypo
aggaccagacatttcggtttcgcctgaaattaagaagcagggtatgttttcatttttgttaagtgtctcgggagcaggtgtagttcacgtctgtgggtgcatggtcttgcctgaagatagccatgatgttggtggatgccgcagcagggtgagc

SEQ ID NO: 251205 - DNA, 86 bp, Homo sapiens
  chr2:160061390-160061476
  hypo
ctatttagctgcgtcgtaggcctccctttgtgtagcgcattgaagcaattccacttggcatgtgtgctcaccgtagtttactgttc

SEQ ID NO: 251206 - DNA, 244 bp, Homo sapiens
  chr2:160086244-160086488
  hypo
caacgactccgagaacgaagaggacaccccaacccctggcttaagtgaccactttcactctgaggagactgaagaggaagaaacttctccccaggaagaatctgtttccccaactcccaggtcccagccatcctcatctgtcccttcctcatacatccgaaaccttcaagaagggttacagtccaaaggaaggccggtatcgccacagagcagggcaggaatcggcaagtccctgagagagcct

SEQ ID NO: 251207 - DNA, 42 bp, Homo sapiens; identical to SEQ ID NO: 208296
  chr2:160632631-160632673
  hypo

SEQ ID NO: 251208 - DNA, 79 bp, Homo sapiens
  chr2:161052031-161052110
  hypo
gtcatccatggaggcggagaggtccatgaggtaatacaaatccaccgggtagtcctcagtctggcggacatgcacctgc

SEQ ID NO: 251209 - DNA, 115 bp, Homo sapiens; identical to SEQ ID NO: 208298
  chr2:161113756-161113871
  hypo

SEQ ID NO: 251210 - DNA, 91 bp, Homo sapiens; identical to SEQ ID NO: 208299
  chr2:161127528-161127619
  hypo

SEQ ID NO: 251211 - DNA, 152 bp, Homo sapiens; identical to SEQ ID NO: 208300
  chr2:161128081-161128233
  hypo

SEQ ID NO: 251212 - DNA, 38 bp, Homo sapiens
  chr2:161141483-161141521
  hypo
tggatttattttaacgacatacccgttctgtatagcag

SEQ ID NO: 251213 - DNA, 63 bp, Homo sapiens
  chr2:161150182-161150245
  hypo
ggtggtggtggtggcgagggggagaggtgtttgtgcagggagtcagggcgccagagctgttct

SEQ ID NO: 251214 - DNA, 160 bp, Homo sapiens
  chr2:161253363-161253523
  hypo
gcgcccagccgtagggaatgtctacctgcgcatgcacgtggcactctctgaccgaggtccggggactttcccctaggcggaaggatcttatcagaatctccatgccccaccctataccaaaagctcattgtctttcttgatttcacgtttccttagcctt

SEQ ID NO: 251215 - DNA, 165 bp, Homo sapiens
  chr2:161506269-161506434
  hypo
cttatggtacgtctcgtcaagccacagcctcgcagggagctagcgcccatgctggtgcctagaggtgcctgtcctgctgcagctggtatgcctggctgtgcacagtggccggatcccacgctctctcacacacccctcacttctccacacctggctcgcccttgg

SEQ ID NO: 251216 - DNA, 161 bp, Homo sapiens; identical to SEQ ID NO: 208303
  chr2:161989985-161990146
  hypo

SEQ ID NO: 251217 - DNA, 208 bp, Homo sapiens
  chr2:162096297-162096505
  hypo
gcagcgccctggccgcccctccgacaaagagcccatcggaacccgagtctgctgaaaaaagcctttcatacctgttgatgcaggcggggacctgagatttcatacaacctcctgttactttttgaccgtaaaagctgattgttgcacttaaaaggcacttttattcctaccattaaaatatttttactgttacgggtttacataaact

SEQ ID NO: 251218 - DNA, 59 bp, Homo sapiens
  chr2:162838347-162838406
  hypo
gggcgccatagacacgcgctcacaccagctctcagagctggcagcgtgccacagatggc

SEQ ID NO: 251219 - DNA, 38 bp, Homo sapiens
  chr2:163298803-163298841
  hypo
gggattacaggcgtgagccactgcgcccggccgtgaca

SEQ ID NO: 251220 - DNA, 138 bp, Homo sapiens
  chr2:164966392-164966530
  hypo
aattggtatgtttccgagatgggctgtaaggcagtggcgatgacatggtctatgagcaaatgctgttatgccagctctaagatttgaatattctcatttggaacggacttgtttgaggcttgtcgattagtaacacag

SEQ ID NO: 251221 - DNA, 214 bp, Homo sapiens; identical to SEQ ID NO: 208307
  chr2:165637158-165637372
  hypo

SEQ ID NO: 251222 - DNA, 164 bp, Homo sapiens
  chr2:166726864-166727028
  hypo
gagaacagccttctcgaacttgctttttgctgtttataagttattcccttcaggaaggctgtgctacacttcgatgagcagcggtctgaatgcggtggtttccttgcacctttgccaaccttgcttctaaaaaaatctgtcagcatgaacgctgttgtatgatc

SEQ ID NO: 251223 - DNA, 88 bp, Homo sapiens; identical to SEQ ID NO: 208311
  chr2:166790775-166790863
  hypo

SEQ ID NO: 251224 - DNA, 86 bp, Homo sapiens; identical to SEQ ID NO: 208312
  chr2:166894501-166894587
  hypo

SEQ ID NO: 251225 - DNA, 106 bp, Homo sapiens
  chr2:168921849-168921955
  hypo
ggactgtatttgttcggggatggtgctggcactcactgcaatctgttacgagagccaccgttacagcattcaagaaagccaaagggagacacggtgagtgtggtta

SEQ ID NO: 251226 - DNA, 203 bp, Homo sapiens; identical to SEQ ID NO: 208315
  chr2:169073153-169073356
  hypo

SEQ ID NO: 251227 - DNA, 96 bp, Homo sapiens; identical to SEQ ID NO: 208318
  chr2:169337555-169337651
  hypo

SEQ ID NO: 251228 - DNA, 41 bp, Homo sapiens; identical to SEQ ID NO: 208319
  chr2:169436467-169436508
  hypo

SEQ ID NO: 251229 - DNA, 197 bp, Homo sapiens
  chr2:169533301-169533498
  hypo
atctggatgtttactcgagggtagaggtttaatgaagttaatgacttttatgcttcatcaaggatagtcatcagtgaaactttttccttctaatcgcgactgtctgctggtgaagaagacagtgtccatgagtagagtttggtgccactgtcttgtttcctgctaagcctccggcagttttacgcaccattgctttg

SEQ ID NO: 251230 - DNA, 32 bp, Homo sapiens
  chr2:169561125-169561157
  hypo
tttgttttttgagacgagtctcgctttgtcgc

SEQ ID NO: 251231 - DNA, 31 bp, Homo sapiens
  chr2:169561397-169561428
  hypo
gcacccggccgcacctttgttcttgatcccc

SEQ ID NO: 251232 - DNA, 72 bp, Homo sapiens
  chr2:170031752-170031824
  hypo
ttgcataaagtctgcgggctggtgcagttgccgtcactgcactggaactgtcccagtcggcagaagcgctgc

SEQ ID NO: 251233 - DNA, 240 bp, Homo sapiens
  chr2:170282879-170283119
  hypo
ccagtgaaaaaggacgaacctgaagttgccagtgtgaagcccgtgagtgtgcagtgaaccgcagagaaagcttcttggtgagttgagtttgtggagtggcccagagccaggcgggagcgtcagtaccgcgcactgttaacagcggcccgacaaacccagcaaatgcagaattggccaggggatccccgaaagaaccaatccttccccagccctctcaccgaaagccacagcaggaaaaac

SEQ ID NO: 251234 - DNA, 40 bp, Homo sapiens
  chr2:170283327-170283367
  hypo
cttggcggtatttccgggtcagtctcgtgtctggccccgg

SEQ ID NO: 251235 - DNA, 49 bp, Homo sapiens
  chr2:170337117-170337166
  hypo
aattcgtaaaattacggactgtagtaacatattgcgcactttctatgac

SEQ ID NO: 251236 - DNA, 38 bp, Homo sapiens
  chr2:170337462-170337500
  hypo
caggcgtgagccactgcgcccggcgacattttctgtct

SEQ ID NO: 251237 - DNA, 77 bp, Homo sapiens; identical to SEQ ID NO: 208323
  chr2:170373534-170373611
  hypo

SEQ ID NO: 251238 - DNA, 157 bp, Homo sapiens
  chr2:170551729-170551886
  hypo
ctatcagatgttccacgtaataatgctggtaagtatggaataattaagaaaatatttgaagacagaaattagtttgtgcacatacagcgctggtaggtttttggaactataccttaaaaagtgtcaagaactgggggccaggcgcggtggctcacgc

SEQ ID NO: 251239 - DNA, 37 bp, Homo sapiens; identical to SEQ ID NO: 208325
  chr2:170552126-170552163
  hypo

SEQ ID NO: 251240 - DNA, 101 bp, Homo sapiens; identical to SEQ ID NO: 208326
  chr2:170569212-170569313
  hypo

SEQ ID NO: 251241 - DNA, 144 bp, Homo sapiens; identical to SEQ ID NO: 208327
  chr2:170569586-170569730
  hypo

SEQ ID NO: 251242 - DNA, 165 bp, Homo sapiens; identical to SEQ ID NO: 208328
  chr2:170584903-170585068
  hypo

SEQ ID NO: 251243 - DNA, 180 bp, Homo sapiens; identical to SEQ ID NO: 208329
  chr2:170620609-170620789
  hypo

SEQ ID NO: 251244 - DNA, 240 bp, Homo sapiens
  chr2:170682145-170682385
  hypo
gggagacagagcgagactccgtctcaaaaaaaaaaagacagtggaaatgaaaataaaagaataggtagtggtgtcaaatactggaaagaggtcgggcttcataaagtaggagcagaaattaagttgtagcagattgtggagcgaatggaaatttaggaagaagaaagagtaaatgtgaacaattaaacgtggccccggaagcggtggctcacccctgtgatcccaacattttgggaggcc

SEQ ID NO: 251245 - DNA, 82 bp, Homo sapiens
  chr2:171542904-171542986
  hypo
cgaggcggggcggggcggggcggggcggggcgaggcaatagaaaaactaggagaaaatgtatatgaacgtatccatgcttct

SEQ ID NO: 251246 - DNA, 37 bp, Homo sapiens
  chr2:171624031-171624068
  hypo
gtgagccaccgcgtccggccctcaacaaatatttttg

SEQ ID NO: 251247 - DNA, 224 bp, Homo sapiens; identical to SEQ ID NO: 208333
  chr2:171730911-171731135
  hypo

SEQ ID NO: 251248 - DNA, 136 bp, Homo sapiens
  chr2:171815736-171815872
  hypo
gctgggattacaggcatgagccatcgtgcccggccccagatgcgcttctgattttaggcgatagttgacatgtctcttcaagccccagtttctcttcgacattttaaatctttcctcattacgttgtagttatact

SEQ ID NO: 251249 - DNA, 733 bp, Homo sapiens
  chr2:171822480-171823213
  hypo
tactgcaaaggcagacgctgcctcctcactcactgtggatgtgacgccccccactgccaaggcccccaccaccgttgaggacagagtcggcgactccaccccagtcagcgagaagcctgtttctgcggctgtggatgccaatgcttctgagtcaccttaactttgaaccattctttggaattggcgtggtatatttaaccacgggagcgtgtctggaaacgcaaactatcattaatttcatactagtttgtaccgtatctgtaggcatcctgtaaataattccaaggggaaaactaaacgaggacgtgggttgtatcctgccaggttgagtggggctcacacgctagggtgagatgtcagaaagcgcttgtattttaaacaaccaaaaagaattgtaagggtggcttgctgccaggcttgcactgccgttcctgggggtgtgcatcttcgggaaaggtggtggcggggcgtccactaggtttcctgtcccctgctgctccttccgtaagaaaatgaaatattctatgcctaatactcacacgcaacatttcttgtactttgtaagtcgtttgcgagaatgcagaccacctcactaaactgtaaacggtaaagagatttttacttttggtctccgtgagtcgcatctctactaaggtttacacaggaattccacctgaagacttgtgttaaagttctacagcgcgcactgttaactgaacgtctttttcttcag

SEQ ID NO: 251250 - DNA, 157 bp, Homo sapiens
  chr2:171860123-171860280
  hypo
agagattaattgctcggagattagcatcacagtgttttaaacagatactcaaaacagttgagctccttacaatagcaacaaggtgtagctacaaaattattacagtacacagtatgtggtacagttaattttatgaagttattatttaattcggcat

SEQ ID NO: 251251 - DNA, 70 bp, Homo sapiens
  chr2:171860310-171860380
  hypo
caaatagcaccaggtacagtctgtgtttgtatacgttttgataaattttaacttcttgtaatagatttgt

SEQ ID NO: 251252 - DNA, 41 bp, Homo sapiens
  chr2:172302764-172302805
  hypo
tctaggagagtggccaggtgcggtggctcacgcctgtaatc

SEQ ID NO: 251253 - DNA, 57 bp, Homo sapiens
  chr2:172367066-172367123
  hypo
taaagtccagtttacgtgacaccatacaaagtcactgtgtaacgcgtgtcacaaatt

SEQ ID NO: 251254 - DNA, 97 bp, Homo sapiens
  chr2:172411069-172411166
  hypo
tgttttcgtaaatacgcttggccttctgatcctggtgttcggggccctcattttttggatagtcaccagaccgcaatggaaacgtcctaaggagcca

SEQ ID NO: 251255 - DNA, 152 bp, Homo sapiens
  chr2:172424323-172424475
  hypo
cagccaaccggacacgtgaatgagtgagttttgagtttattctagcccccaatctttgaaccaccccagctgacactgagttgagcagagataaaccgtcccctctaagttctttccaaattttttttttttgtttttggagacgaagtctt

SEQ ID NO: 251256 - DNA, 32 bp, Homo sapiens
  chr2:172424535-172424567
  hypo
ctgggttcaatcttcaccgggaagccatttca

SEQ ID NO: 251257 - DNA, 93 bp, Homo sapiens
  chr2:173422680-173422773
  hypo
cctcccaagcctagaactaccggcaagcaccaccacgcccggctattttttattttctgtatatgtgaggtctcattgtgttgcccaggctgg

SEQ ID NO: 251258 - DNA, 32 bp, Homo sapiens
  chr2:173422953-173422985
  hypo
gtaaataccactgcattcggaccagcttaaag

SEQ ID NO: 251259 - DNA, 100 bp, Homo sapiens; identical to SEQ ID NO: 208338
  chr2:173423968-173424068
  hypo

SEQ ID NO: 251260 - DNA, 47 bp, Homo sapiens
  chr2:173894916-173894963
  hypo
tccttttttgccatcgtcatgggactaagtaacgttgctgtgagccg

SEQ ID NO: 251261 - DNA, 59 bp, Homo sapiens
  chr2:173909415-173909474
  hypo
cagtttaagcgtggcgacaggggggttcaatttgttcccctacacggatccggagcgcc

SEQ ID NO: 251262 - DNA, 44 bp, Homo sapiens
  chr2:173927296-173927340
  hypo
aaaaatcacctccaataggccggtgcgttggctcacgcctgtaa

SEQ ID NO: 251263 - DNA, 120 bp, Homo sapiens
  chr2:174049586-174049706
  hypo
aacatcaagccactgcactccagccagagtgagactcagtctagaaaaaaaaaaaaaattaggtagcaaactggtaccagagttaaaaataaggaaggagaggccaggcacggtggctca

SEQ ID NO: 251264 - DNA, 141 bp, Homo sapiens
  chr2:174204828-174204969
  hypo
gcagtccctatgtcatcaggcgtccaatctttggtgactggaagtaggggagcagtatcacatggtgtcaaacgcagtgcttaagctgccagggatgggtattcagatgctgtcccgctcgggacaaaggtaaagaatgta

SEQ ID NO: 251265 - DNA, 74 bp, Homo sapiens
  chr2:174278557-174278631
  hypo
tgacgcggctggggcgcgttgacctggagcttttgtctgggatttctcacccctgtctccgccatgagggctcc

SEQ ID NO: 251266 - DNA, 159 bp, Homo sapiens
  chr2:174522467-174522626
  hypo
ctgggtgacagagctagactccgtctcaaaaaaaaaataatcaatggatcatcatggtcgctgggagcttcgaagtttacaaaatgctcatcccatgccaccctggctcatttgctcatagctacaactcatgagggagtgggtcggtaggctggagat

SEQ ID NO: 251267 - DNA, 276 bp, Homo sapiens
  chr2:174890601-174890877
  hypo
ccaaagagcactgactgggccgtcaaggaagatgaatgtctccccaaaagtgctcctcggggacaagtttccacgcagatgcaaccgggaacgccggccaggctccggaaggcgaggccccagagcgcagcggcctccaagcgcgggctcagcctgtcgcctccgcagccagggcccaggaggccgctcttccggggtcaccaacacggctcgttctgagcctagaggcccagggcacagtgtgagccggaatacggtgtaggggacacagctcag

SEQ ID NO: 251268 - DNA, 72 bp, Homo sapiens
  chr2:175113858-175113930
  hypo
tcctcgccttatagttaaagcgtcgcacacaggtactggatcacagaatgcgtttaattgagccaatttccc

SEQ ID NO: 251269 - DNA, 35 bp, Homo sapiens; identical to SEQ ID NO: 208342
  chr2:175383905-175383940
  hypo

SEQ ID NO: 251270 - DNA, 35 bp, Homo sapiens; identical to SEQ ID NO: 208343
  chr2:175384180-175384215
  hypo

SEQ ID NO: 251271 - DNA, 102 bp, Homo sapiens
  chr2:175431785-175431887
  hypo
agaaatactcactccggctttcgtttcttgccagtttgctgggataacttttggtcgtttgtacatatggctctggaggtggcaaatcggaaatcggatgga

SEQ ID NO: 251272 - DNA, 286 bp, Homo sapiens; identical to SEQ ID NO: 208344
  chr2:175927666-175927952
  hypo

SEQ ID NO: 251273 - DNA, 32 bp, Homo sapiens; identical to SEQ ID NO: 208345
  chr2:176569574-176569606
  hypo

SEQ ID NO: 251274 - DNA, 90 bp, Homo sapiens; identical to SEQ ID NO: 208347
  chr2:177178833-177178923
  hypo

SEQ ID NO: 251275 - DNA, 90 bp, Homo sapiens
  chr2:177498056-177498146
  hypo
gaattttgatatatagcctacgttatgaaagcttacctctttatggcttcaaccaggtgagtgtatggctccgggcttttcttttctttt

SEQ ID NO: 251276 - DNA, 32 bp, Homo sapiens
  chr2:178089624-178089656
  hypo
cagtttgggcgacagagcgagactccgtctca

SEQ ID NO: 251277 - DNA, 136 bp, Homo sapiens
  chr2:178090224-178090360
  hypo
aaagcacttgtcatcgtacattaaggaattgcgtaaaatgtttagctgtatctgtaggctccaggtaacttaattttttaattgtattactatgatgttcagtaaatgctgagtgaacttacattctttaaaatac

SEQ ID NO: 251278 - DNA, 78 bp, Homo sapiens
  chr2:178131780-178131858
  hypo
ctgtctttgggaagacggccttccctacatgcttgagatgtgtcaattgtgataccttgctccagattgctcataaaa

SEQ ID NO: 251279 - DNA, 207 bp, Homo sapiens
  chr2:178385809-178386016
  hypo
ttcacctgttttggcggacaactctaaagcaagccaatgtgtattccttccatggagtagaggctgggaagaaactgagattatatcttaaactaatcatttgggtcgtcttgactttcagtttctagatgttaaatctgatttcacttaacttaaagcccctgtggggattttgtttgttttttagggtgacgcagacttacgatg

SEQ ID NO: 251280 - DNA, 93 bp, Homo sapiens
  chr2:178586888-178586981
  hypo
ggcagccccagcctcgaaaccacatacatttacgtataagcctatgtccgtgagcaagaggttatactttccctgtaacgtcggacatgatta

SEQ ID NO: 251281 - DNA, 59 bp, Homo sapiens
  chr2:178936539-178936598
  hypo
ccaattccagaaagaactgacgctcattatgctttttcagatggcacttgtagtcgatg

SEQ ID NO: 251282 - DNA, 293 bp, Homo sapiens
  chr2:178936628-178936921
  hypo
ctcgattccagcagcgcactgagaatatgggctgtggtggggggcagggagcttgccttccggagaagtgccctccgtcgtacactactcaggggttcctgagcccgggaggtcacctgttcatcgtaggtcctgttcacgtggatggccttggagcgggcaaaactcttccttagctctttctgagaagctctccgctgcaggttcccatcgcccctgctgccaccggcccagctgggactcaagggaaccccaccacagtccccgccaccgggaaggggctggctgtgggc

SEQ ID NO: 251283 - DNA, 187 bp, Homo sapiens
  chr2:178972992-178973179
  hypo
cctggccagagtccacgcctcaacttcgaggctggcgatccagaaagagcacctcacgccctgggctgcaagcgcagccggacgcgcgcgaccagtgatcgccagccaatggcaagccgggacccggtcccactgctgattggcccccagatcccgtgggatctcacctctcgcagaggcttaaagc

SEQ ID NO: 251284 - DNA, 40 bp, Homo sapiens; identical to SEQ ID NO: 208353
  chr2:179303355-179303395
  hypo

SEQ ID NO: 251285 - DNA, 39 bp, Homo sapiens
  chr2:179303695-179303734
  hypo
cactgtgcctggccaaacgctggtaggttttgagtgaga

SEQ ID NO: 251286 - DNA, 31 bp, Homo sapiens
  chr2:180019921-180019952
  hypo
tgtgagccatcgcatccggcccacaactctt

SEQ ID NO: 251287 - DNA, 80 bp, Homo sapiens; identical to SEQ ID NO: 208355
  chr2:180027694-180027774
  hypo

SEQ ID NO: 251288 - DNA, 69 bp, Homo sapiens
  chr2:180128504-180128573
  hypo
atgagtctacctaaaatagaaaaataaacacaaccacagaccctggccaaccctctctctcctcccctt

SEQ ID NO: 251289 - DNA, 364 bp, Homo sapiens
  chr2:180886585-180886949
  hypo
attacaaaccacttcgcggggtcggtgtataataccccccgccgcgatgtggggagtgatatcaccctctctcaccctggatattacgaacaacctcgcggggggtggtggtccataatatccgggtggggggagaggctgatatcactccccacatcgcgagggaggggatgtacaccgcccgccgccacgcgaggtggttcgtaatatccagtgggggagagggtgatatcacacccacatcgcggggggtgggagggcatgtacacaggatattatgttggttgaggttactgactctgaggcaaggcggccagaatatgtaccttggctctgccacttactgccccgtttgatcttgatc

SEQ ID NO: 251290 - DNA, 163 bp, Homo sapiens
  chr2:182413425-182413588
  hypo
taacaacagcaaaatctctccgttggttaggggacatccatcgatatttttctgccagagccaaagttcttccaccaaagccaaacatggctgagaacccaaagcgaagaagcttgccagcggtgctgaaggtgcagacgtcgaccagctgtacatgcccttg

SEQ ID NO: 251291 - DNA, 35 bp, Homo sapiens
  chr2:183811123-183811158
  hypo
gtttacaaaaaaaaaaggagcgacacacaccaggg

SEQ ID NO: 251292 - DNA, 33 bp, Homo sapiens
  chr2:183991028-183991061
  hypo
ttagaggcttgcgccttctactgtgtctgtatg

SEQ ID NO: 251293 - DNA, 92 bp, Homo sapiens
  chr2:185490893-185490985
  hypo
ccggatttcttaatatataatacttctaggacagggcaattttccaatttttctttgtaatctctagccccggttgttttgtttaattagta

SEQ ID NO: 251294 - DNA, 43 bp, Homo sapiens
  chr2:186081368-186081411
  hypo
aaatatagctttattctggccgggcgcggtggctcatgcctgt

SEQ ID NO: 251295 - DNA, 32 bp, Homo sapiens
  chr2:188404596-188404628
  hypo
atcacaaccaccacccattacgtcatcttctt

SEQ ID NO: 251296 - DNA, 82 bp, Homo sapiens
  chr2:190369341-190369423
  hypo
tatctatgaatgttacttaacgacattttaatactaaaatctggctgtacaggttttagggattatttaaataatcggaaaa

SEQ ID NO: 251297 - DNA, 115 bp, Homo sapiens
  chr2:190686869-190686984
  hypo
ttgccgactgtggcgcgggcagtggaggaggaggcggggctggcgctgaagtcggatccggatccgttgctgtgcaccctggtcggggagagtccgatgcgcctgggtaggagca

SEQ ID NO: 251298 - DNA, 97 bp, Homo sapiens; identical to SEQ ID NO: 208363
  chr2:190703660-190703757
  hypo

SEQ ID NO: 251299 - DNA, 120 bp, Homo sapiens
  chr2:191145274-191145394
  hypo
agtgggcccaagcatgtgcatttagatgcaaaattgcagagtttaactggtatataaccttcctctaaaaatgttcaacttagcaagggggaaaatgcctcaaatgagcatgcgcacaac

SEQ ID NO: 251300 - DNA, 125 bp, Homo sapiens
  chr2:191301773-191301898
  hypo
tgtctgtgggcatcgggatcgactacacccacatcgaagtgctcatcgatggaaaggggtgtaagccccccgagtacaggaattaccagatcgtcttcatcgtcttcggcgttctcatgaccatg

SEQ ID NO: 251301 - DNA, 120 bp, Homo sapiens; identical to SEQ ID NO: 208367
  chr2:191794489-191794609
  hypo

SEQ ID NO: 251302 - DNA, 216 bp, Homo sapiens
  chr2:191796739-191796955
  hypo
ttttaatatttgttcgtcctaaattgaagtttaacttcttgcatactgtgtagatggatatgtaaatggaaaaggattatcatattagtgagagaccgtatgaagcctcaaaagttttataagtcactgtagatgaaatatttttttccaccgtgtttaatgcaatattcctaataatcttacggtcctatttgtttgttacgagtttatttggct

SEQ ID NO: 251303 - DNA, 111 bp, Homo sapiens
  chr2:191829751-191829862
  hypo
ttatgactatgtgccgattcctgctcgggctgtttgctgttggctggtaataatatatttgatttaaatgctgttgactgtgctattaactgctgccgtcagtaaactcca

SEQ ID NO: 251304 - DNA, 84 bp, Homo sapiens; identical to SEQ ID NO: 208371
  chr2:192342592-192342676
  hypo

SEQ ID NO: 251305 - DNA, 145 bp, Homo sapiens; identical to SEQ ID NO: 208372
  chr2:192746555-192746700
  hypo

SEQ ID NO: 251306 - DNA, 42 bp, Homo sapiens
  chr2:196362209-196362251
  hypo
tagaacctgttgtagctgggcgcggtggcccacgcctgtaat

SEQ ID NO: 251307 - DNA, 44 bp, Homo sapiens; identical to SEQ ID NO: 208374
  chr2:196402553-196402597
  hypo

SEQ ID NO: 251308 - DNA, 99 bp, Homo sapiens
  chr2:196411141-196411240
  hypo
ctggagtactgttgcggcattttggctcactacagcactataataaaaaattaaacagtgcagtggctcacacctgtaatcctgggtccggaattggcg

SEQ ID NO: 251309 - DNA, 99 bp, Homo sapiens
  chr2:196411540-196411639
  hypo
taaaagcagcctgaacccaaacggcaagcagtagcaagatttattgcaagaagcgaaacaacaaaccttccacaacgtggaagacgaccacagggagta

SEQ ID NO: 251310 - DNA, 105 bp, Homo sapiens
  chr2:196462782-196462887
  hypo
ggtgtaactgatcatcctaccgccatctcccaagtagctgggacaacaggcttccgccaccacgcggagtttcactatgttgcccaggcttgtctcgaactcctg

SEQ ID NO: 251311 - DNA, 40 bp, Homo sapiens
  chr2:196477243-196477283
  hypo
ctctgtctggtgacagagcgagactccaactcaaaaataa

SEQ ID NO: 251312 - DNA, 31 bp, Homo sapiens
  chr2:197003966-197003997
  hypo
cgtgagccaccgcgcccggccgtaaaatcat

SEQ ID NO: 251313 - DNA, 89 bp, Homo sapiens
  chr2:197038938-197039027
  hypo
ctgggagcgatgatcgttcccagtcactgcttaccacatgtggccagggaaggtgatcctctccggtaatggcacgacactcaccatat

SEQ ID NO: 251314 - DNA, 38 bp, Homo sapiens; identical to SEQ ID NO: 208376
  chr2:197095851-197095889
  hypo

SEQ ID NO: 251315 - DNA, 149 bp, Homo sapiens
  chr2:197379963-197380112
  hypo
atcccatgctcacttgcccacacacttctcgctgctctgcacccggcttggcaggtgtgagacccaggctgttagtacaagccaagtgcaggctgctgggccaagtgggcagaataagcccagcaggcgcaaacaaaactcaggcagaa

SEQ ID NO: 251316 - DNA, 104 bp, Homo sapiens; identical to SEQ ID NO: 208387
  chr2:198276038-198276142
  hypo

SEQ ID NO: 251317 - DNA, 37 bp, Homo sapiens
  chr2:198317068-198317105
  hypo
tacaggcgtgagccaccgcgcccggcccattttctcc

SEQ ID NO: 251318 - DNA, 43 bp, Homo sapiens
  chr2:198356153-198356196
  hypo
gattacaggcatgagtcaccacgcccagccaagtcttttctta

SEQ ID NO: 251319 - DNA, 120 bp, Homo sapiens
  chr2:198456557-198456677
  hypo
tgagtgtgggcccaccgagcccacgcccatctggaactcgccctggcttgcaagcactgtgcgcagaactggttcctgccccgtgcctctccctccacgcctctccctccacccctccct

SEQ ID NO: 251320 - DNA, 57 bp, Homo sapiens
  chr2:200938957-200939014
  hypo
catcagaacccagaacgctgttttattcctgtcccctttctccgtctttctacctac

SEQ ID NO: 251321 - DNA, 143 bp, Homo sapiens; identical to SEQ ID NO: 208393
  chr2:201218934-201219077
  hypo

SEQ ID NO: 251322 - DNA, 317 bp, Homo sapiens
  chr2:201273680-201273997
  hypo
aaagcagttgctaaatgaaccgctaactagccatcttgactgtcacccaacagcggccgcctggtgggaccactttgtttatggcatgagagtcctttagcggggcagtcaagtgcagcttcaaacggtggcttaggtgttagcctgggctgtggcaatgaagtaaaaggctgtgtgaagctgcgccagaaacagcctctgcaaaacagccgctgcgggcgtgaattttatgagttctccgtatgcaaactactattagtcacgcattgattgatccattccttccaggagcatccgtcctcagaagcttggtttcc

SEQ ID NO: 251323 - DNA, 350 bp, Homo sapiens
  chr2:201281660-201282010
  hypo
ggggctttcttgaacactggcgtactgctctttgagaacaaagggaaggggattttactgtgtcccattcaaactggtttgctttcttgtcgagtcacaaagggcctgggatttctgggagctcgtgagatgcgtctgtgcatacacactagcaaaagtgtgccgctcctttcaaagtaactgttccactcattcctgctatgacacagcaaggccttgtgtttcggatttcccaggatatagtacgccagtctacccttcccagtgggggaagatcacaggcctgcaaaacaggttctgaacaaacaataacacagtattactttcataaaacccgaagattactgaaa

SEQ ID NO: 251324 - DNA, 323 bp, Homo sapiens; identical to SEQ ID NO: 208394
  chr2:201354840-201355163
  hypo

SEQ ID NO: 251325 - DNA, 339 bp, Homo sapiens
  chr2:201652446-201652785
  hypo
gaccaatggctagtttctaacggccttcaccttcttcctacgccgcaaaccctaatacagtctccatccacggactcccctcctttacagcactgcgtctctcacatccccacgtctcattttccctccctgcttcttttgcatttctagatgcccagactcagtgagaactggcagcattaaaagcgccacctgtttagttcagtatctggagcccttcctccctgctgaaggaggagaggcacgtgaacattttgcatgctgccagacgcctggtttacccactcctctcgggcagttcactcccaaacactagccgttcaagatgaagcctgctca

SEQ ID NO: 251326 - DNA, 82 bp, Homo sapiens; identical to SEQ ID NO: 208396
  chr2:201712542-201712624
  hypo

SEQ ID NO: 251327 - DNA, 120 bp, Homo sapiens
  chr2:201809208-201809328
  hypo
ttgtgagcacacagagataggcagacattccaacacctcttggatgactcaacatgtctaataagcaccaggcacaatgcctagtacaagtacctgtcgcccaggagtacactggcgtga

SEQ ID NO: 251328 - DNA, 182 bp, Homo sapiens
  chr2:202003519-202003701
  hypo
acctcccatcagagccatcacgatggccaggtcggcctctgtcacagtgtccatgggggaggagatcagcggcgtcttcagagtgaccattgggtcagggctgaggtcaggtccacctcatcagctatgaagtctatgaatcctgggagaatcaagaagtcgttgtaggtgagtccctggtc

SEQ ID NO: 251329 - DNA, 257 bp, Homo sapiens
  chr2:202004689-202004946
  hypo
agcgcagtgaacccgtcctcgaccacgtagccggtgctgctgctgataggtagtccctcatgctgccgcgagaccccgcgacccgacataaacgctgcagctgctgcgacgcggaggcgcgccgctgccacgctgcagccaggcgccgggtgggctgggtgggctgggggcgggggctgcggcagcggcggggcgggccagggcgccctatactccattcttcatgatgtttggtcgaagagtcatctgaaattttg

SEQ ID NO: 251330 - DNA, 35 bp, Homo sapiens
  chr2:202119808-202119843
  hypo
actttttatttttgttgagacggagtgtccctctg

SEQ ID NO: 251331 - DNA, 97 bp, Homo sapiens
  chr2:202261466-202261563
  hypo
aaggcaggtagtatatactgcgtggagatactggacaaacggatgattcatatcctgggaagtatggagtaggatggcacaacatttcatcacgcta

SEQ ID NO: 251332 - DNA, 41 bp, Homo sapiens
  chr2:202270408-202270449
  hypo
aagttctcagcaatttaggccgggcgcagtggctcacgcct

SEQ ID NO: 251333 - DNA, 104 bp, Homo sapiens
  chr2:202888728-202888832
  hypo
tcagggaacactcagggtatcgcgtgcccagccttctcagcacaagtgggcacaggctgtgagctgctgggcctggctgctgcgctgccatcagaacctgggaa

SEQ ID NO: 251334 - DNA, 43 bp, Homo sapiens
  chr2:202893412-202893455
  hypo
tttttcctggagagtcgattgttaaacatttaccagcatacca

SEQ ID NO: 251335 - DNA, 80 bp, Homo sapiens
  chr2:203129282-203129362
  hypo
ccgaaacagctcctcgtttctctcaaagtgaacatataattcatagagggttaacaaaataatatcgtgaagtttttccc

SEQ ID NO: 251336 - DNA, 45 bp, Homo sapiens
  chr2:203163327-203163372
  hypo
cctgggcaacaagagcaaaactccgtctcaaaaaaagttcattca

SEQ ID NO: 251337 - DNA, 36 bp, Homo sapiens
  chr2:203242156-203242192
  hypo
atttcttttctttgccctcctgattcttggctggcc

SEQ ID NO: 251338 - DNA, 34 bp, Homo sapiens; identical to SEQ ID NO: 208400
  chr2:203250365-203250399
  hypo

SEQ ID NO: 251339 - DNA, 162 bp, Homo sapiens; identical to SEQ ID NO: 208401
  chr2:203431925-203432087
  hypo

SEQ ID NO: 251340 - DNA, 79 bp, Homo sapiens
  chr2:203467678-203467757
  hypo
aaggacaagatccatatttacggacagaaagccaacaaagaatacacagtagaaatggggccacggtggctcacgcctg

SEQ ID NO: 251341 - DNA, 286 bp, Homo sapiens
  chr2:203484334-203484620
  hypo
ggggaatgccatatcgggtgcaccagttatcagagggactagccagttcccgaaacccccaattatgattggtatcaccataaagaagatgaaaacgaacgcgtgggcagtaacaataacattgtacatctgatcatctcctagtagagtttctggttggtctagtcctgcttgaattaggaagcttaaggcggtgcctattatctccgctcttgcgccgaatagcaggtatagtgttccggtgactttgtggttagttgaaaacaatcaacgattgatgaacata

SEQ ID NO: 251342 - DNA, 33 bp, Homo sapiens; identical to SEQ ID NO: 208403
  chr2:203498545-203498578
  hypo

SEQ ID NO: 251343 - DNA, 97 bp, Homo sapiens
  chr2:203621984-203622081
  hypo
gaagtagcagcacgcgcagcattgacacacagacgcctggtggggcagacaggggaagcaacaacagcagccgttcccagtccgtgtccccaacatc

SEQ ID NO: 251344 - DNA, 34 bp, Homo sapiens
  chr2:203880465-203880499
  hypo
cgtgagccaccgcgcctggccccaacaactttga

SEQ ID NO: 251345 - DNA, 45 bp, Homo sapiens; identical to SEQ ID NO: 208404
  chr2:204055398-204055443
  hypo

SEQ ID NO: 251346 - DNA, 32 bp, Homo sapiens
  chr2:204190592-204190624
  hypo
tttgatttctctttctttttcgagacagagcc

SEQ ID NO: 251347 - DNA, 31 bp, Homo sapiens
  chr2:204206113-204206144
  hypo
gcattagaaaatgtcggagggcagtgaaata

SEQ ID NO: 251348 - DNA, 39 bp, Homo sapiens
  chr2:204475585-204475624
  hypo
attatctttacttatcatagcgacattaaaaggtagata

SEQ ID NO: 251349 - DNA, 69 bp, Homo sapiens
  chr2:204803398-204803467
  hypo
aattaaagtagcatcggtgtcaattctgtggaaggtgagatccagccttaggtaggattgttttaagtt

SEQ ID NO: 251350 - DNA, 126 bp, Homo sapiens
  chr2:204803497-204803623
  hypo
ctggaacaatattcatcgtagattctaaatgaatacaaccaatgttcactctcattataaagaaagccatgagatgtggcatgctgtttggcatgtggcaaacctgaggcacgagtggctaaatgg

SEQ ID NO: 251351 - DNA, 34 bp, Homo sapiens; identical to SEQ ID NO: 208406
  chr2:205984487-205984521
  hypo

SEQ ID NO: 251352 - DNA, 44 bp, Homo sapiens; identical to SEQ ID NO: 208407
  chr2:206166494-206166538
  hypo

SEQ ID NO: 251353 - DNA, 149 bp, Homo sapiens
  chr2:206586382-206586531
  hypo
aggatgcctccatgcgtcccaagaaagcagacgcaagagctcaggagagaaacaaggccatccacaccacaaaggagccagaagccttccaaatgtcaatgcactgctgcatttttccaaacttgttgccggagcggcctttaacatcc

SEQ ID NO: 251354 - DNA, 114 bp, Homo sapiens; identical to SEQ ID NO: 208408
  chr2:206605278-206605392
  hypo

SEQ ID NO: 251355 - DNA, 176 bp, Homo sapiens
  chr2:206608212-206608388
  hypo
ctcctacagcctaaacggcaaggactgggaatacattcaggaccccaggacccagcagccaaaggtaggctgttcttggaggcctctgtaacgttaccctcaacagggaggctaagtgtggtacagggagttgagactgatgatgtcccatctaaacagtcgtcatccaactcctg

SEQ ID NO: 251356 - DNA, 88 bp, Homo sapiens
  chr2:206609770-206609858
  hypo
ctcctgtccttcccccggatgagtgtctccaagtgtactctaggctggtcctccaaagcagccccctgctccccgcatcatcagtttt

SEQ ID NO: 251357 - DNA, 315 bp, Homo sapiens
  chr2:206611452-206611767
  hypo
tttcctgtctgtgccgtacctgtcacgggctcagccggcaggatggcatgagggattaataagggcatgtcggagaagtgcttttggctcccagggagaaaaatgctgcctgtatgctggctacagcagcgcagaggagccctgttgaggcacacgggctgggaattgggcccaaattagcctcctcacttttgaattgaaggcagccccagcgaacacatcttcataggaagacacttaactccccattacctggggatgaggccaaagttccctgcagcctgctaaacgtgtgtcacccgtcctctcacaggt

SEQ ID NO: 251358 - DNA, 56 bp, Homo sapiens
  chr2:206614128-206614184
  hypo
cttggagtcagcgtcgcctgtagccccctccattattgtctcgtggccttttgtgc

SEQ ID NO: 251359 - DNA, 103 bp, Homo sapiens
  chr2:206670208-206670311
  hypo
atcaaaaagggggacgcagtggcagccaaagccaagcgaagcagatttgacctgcgcactgcatgaaatcccttctgccagcctgcaccggttaggaccgtca

SEQ ID NO: 251360 - DNA, 153 bp, Homo sapiens; identical to SEQ ID NO: 208409
  chr2:206826960-206827113
  hypo

SEQ ID NO: 251361 - DNA, 146 bp, Homo sapiens
  chr2:206830587-206830733
  hypo
ttgctctccagagagaaccccggggccttgcaagtctcggcagatttccctgaccttgcgtgccaaggcagaaggtgagatggcaaacagatgcgcgcttccactgagagcgtgcatgtgtgtgcgtgtatgtgagtgcgtgcatg

SEQ ID NO: 251362 - DNA, 148 bp, Homo sapiens; identical to SEQ ID NO: 208412
  chr2:206890498-206890646
  hypo

SEQ ID NO: 251363 - DNA, 139 bp, Homo sapiens
  chr2:206896304-206896443
  hypo
cctgcctgcctcctgtgctgcgcagcacttgcgggtgccccagatggcactttacccctaggactggcttaaaatagtggagtgatcatcatggccgatgagaggcaggactggattgcagctccaactcggacagaca

SEQ ID NO: 251364 - DNA, 41 bp, Homo sapiens; identical to SEQ ID NO: 208413
  chr2:206971201-206971242
  hypo

SEQ ID NO: 251365 - DNA, 41 bp, Homo sapiens; identical to SEQ ID NO: 208414
  chr2:206971482-206971523
  hypo

SEQ ID NO: 251366 - DNA, 43 bp, Homo sapiens; identical to SEQ ID NO: 208415
  chr2:207021944-207021987
  hypo

SEQ ID NO: 251367 - DNA, 80 bp, Homo sapiens
  chr2:207068388-207068468
  hypo
aacctgcagtcttgtaagtacgccattttcccgagttctccgatctgatctagcgaactaatgaatgtgaggggcggtcg

SEQ ID NO: 251368 - DNA, 37 bp, Homo sapiens
  chr2:207068777-207068814
  hypo
ataaatgtgcaatatcaggccgggcgcagtggctcac

SEQ ID NO: 251369 - DNA, 178 bp, Homo sapiens
  chr2:208003599-208003777
  hypo
tgtgtctgtgtctgcgattgccacgaaatttggtcatttatttggcttgatcttcaataacttgagttcttccttgcgtgtgcttttttggaaaagaaaatgaaaatggcgcctacactatcaggatttgctaacaactatgtgaatgagaggatcctttttgcgaaggtaggggatg

SEQ ID NO: 251370 - DNA, 298 bp, Homo sapiens
  chr2:208286407-208286705
  hypo
cctctggtccccttcggccactcttcagagacaccaatccccggccccccacagcattttcaacaatccacttccgactacctttttatgactttacaacacagtttttcctcaaattttatggcatttcattaaagccgccagaaggtgatactaccccttttctaggagtgaaataaattcaagttttatcgcttctggaaatgcccgagcagctgtcaggacatttgatagattttctcaattacaggacttgtggagcattttatacttacatctgcaccgaagcccgatagag

SEQ ID NO: 251371 - DNA, 42 bp, Homo sapiens
  chr2:208317603-208317645
  hypo
tgagtgagttactggctgggcgtggtggctcacgcctgtaat

SEQ ID NO: 251372 - DNA, 40 bp, Homo sapiens
  chr2:208339132-208339172
  hypo
gttctgtagatggccgggcgcggtggctcacgcctataat

SEQ ID NO: 251373 - DNA, 47 bp, Homo sapiens; identical to SEQ ID NO: 208418
  chr2:208410314-208410361
  hypo

SEQ ID NO: 251374 - DNA, 240 bp, Homo sapiens
  chr2:208574936-208575176
  hypo
cccattttgcaggttttatagaagaaattgggacgcagaagttaagttacttccgcaagcttacatgactgctcagggtgagggtccctgatcatgatgatcagaaaataaaggtagaaatcaagcttagggaggaagtgacattgtgtgtatatatatatatttgtttatttatttttatttttatgttttatttttttgaaacggagcctaggtcgcccaggctggagtgcaatggcg

SEQ ID NO: 251375 - DNA, 41 bp, Homo sapiens
  chr2:208577542-208577583
  hypo
gttgtttttttgagacggaatctcgttttgtcgcccgccca

SEQ ID NO: 251376 - DNA, 155 bp, Homo sapiens; identical to SEQ ID NO: 208419
  chr2:208580710-208580865
  hypo

SEQ ID NO: 251377 - DNA, 137 bp, Homo sapiens; identical to SEQ ID NO: 208420
  chr2:208622063-208622200
  hypo

SEQ ID NO: 251378 - DNA, 146 bp, Homo sapiens; identical to SEQ ID NO: 208421
  chr2:208688671-208688817
  hypo

SEQ ID NO: 251379 - DNA, 68 bp, Homo sapiens; identical to SEQ ID NO: 208422
  chr2:208692452-208692520
  hypo

SEQ ID NO: 251380 - DNA, 336 bp, Homo sapiens
  chr2:208696086-208696422
  hypo
gagcaccacgctgccggctgaggcctggccatcccagcgagagcatggagccatcgcatagggaaacgtagggcttccaatcagaacacctgtgtcaaaccacaaatcctttgtagctgagtgacagtgggcaagttactacttaagttcttggtgctttggttttctcatttgtaaaatgctgctcacggtgaaccccttcctattcactgggttgctgtgagactaaaatgagaaatatacttttaagtggaaggactacgcaaaggctgcgacgccgcccctcacaggtgactctagtacccgtctccttgacacaggcgctatcctggacat

SEQ ID NO: 251381 - DNA, 95 bp, Homo sapiens
  chr2:208865897-208865992
  hypo
gggtaatatctgatcgtgatcgagcatgccctggcttgaaagttgaggtctcatccagtaagtcatttacagaacgaggccggtccctccgacgc

SEQ ID NO: 251382 - DNA, 110 bp, Homo sapiens
  chr2:208993012-208993122
  hypo
tcagcaggtattgccgcccccggtagttgggcagctcgtagaggacccagcagccctccagcacgtggagggaacggatctcgctgaggtggaagcggtcctggatgctg

SEQ ID NO: 251383 - DNA, 150 bp, Homo sapiens; identical to SEQ ID NO: 208423
  chr2:208994585-208994735
  hypo

SEQ ID NO: 251384 - DNA, 43 bp, Homo sapiens
  chr2:209094646-209094689
  hypo
aaaaggatgcaggctgggggcggtggctcacgcctgtaatccc

SEQ ID NO: 251385 - DNA, 248 bp, Homo sapiens
  chr2:209224958-209225206
  hypo
acaggtaagaagagcgccccacttgttctcccgccttctgcgtgagcagcccctacggggtctcctactggtccctaggaactttcgccacacccggagcggcggcctccccgagcccctcggggccccttccctggcagctgggatgagggcagcgtgctcctcgcaggttacttggtcctgaggtcctccctcaggcgctgggcatgcctggggcgcagaaccgcagctctgggccagacccggct

SEQ ID NO: 251386 - DNA, 651 bp, Homo sapiens
  chr2:209225236-209225887
  hypo
gctcccggggccctgccgccctctcgctcgctcggggctctggagtctggcgggccgcaagccgcgctgccggctctacctggctttgtccatccagccacccaccaagcgccagggtaaaacagcacccggaagcagtcgtcgcctgctgccaccaggctgccttctgtggtgaaggtgggggccagggttgcaaggccctcctcttgttggcatcagccaggcacgcagtgctgtcgtggctgacccaggccgtgaggcacccgctgactgagaagccaacctgagcacccagccgcacctaccgctggcctcagacatcagcaccccaaagggtatgttggagtcccatggtggaggtgccggccgctcctccacgcacttgatgtataccgaggatcccatgcttgacgtcgcagggggcattagccaggagcacgttgctgggatgccagtccaggctgaggatggtggagccaatgggcttcttgatgtacttgcacacccaccagttattctcccgctggaaataacagatggcgatgacacacagctgccgcccacagcaaacttgtcctgtgggcccagcacacacagcaggcagtgggtgcgggcttaccctcctggcccgtcagcgtccacacagaggcc

SEQ ID NO: 251387 - DNA, 300 bp, Homo sapiens
  chr2:210673260-210673560
  hypo
aaaaaaagtaaggcgggcccaggctgctactgcgcgagcccagccaggcccggcccacttgctcagagcgtggccttagggggaggcacgcctccaattggcgcgaaagtgataaagaggcgtggccggaaaggtcccaccctgctcccctggagtacttaagggagttggcggagcggctgcactcattgctccaaggctcggcctagtgagtgggtcgcctgcgctacttctgcgctactcagcgacctcgttgcctctgccaccatgccgcgctctttcctcgtcaggaagctccct

SEQ ID NO: 251388 - DNA, 110 bp, Homo sapiens
  chr2:211036650-211036760
  hypo
ctgaccctcagaggggccctgaagtaggtgacaaatttgccttggatccaactgggtggttttatgattaaaaaaaaaaaaacagacaaagcagttttaagtctctacaa

SEQ ID NO: 251389 - DNA, 41 bp, Homo sapiens; identical to SEQ ID NO: 208430
  chr2:211055940-211055981
  hypo

SEQ ID NO: 251390 - DNA, 44 bp, Homo sapiens
  chr2:214000555-214000599
  hypo
caagctcaggagtacgagagcgcctgaccaacatggtgaaaccc

SEQ ID NO: 251391 - DNA, 34 bp, Homo sapiens
  chr2:214458777-214458811
  hypo
cgtgagccaccgcgcccggccatccctgccacat

SEQ ID NO: 251392 - DNA, 44 bp, Homo sapiens
  chr2:215581840-215581884
  hypo
tcctcctaggtatataactcctaggtatacgattcccagtgaca

SEQ ID NO: 251393 - DNA, 76 bp, Homo sapiens
  chr2:216179504-216179580
  hypo
gcacccgaggccaagattttgtaggggtggaaaggtgtgatcctttgctctccatcgtaaacgtcacggccaatat

SEQ ID NO: 251394 - DNA, 58 bp, Homo sapiens
  chr2:216195106-216195164
  hypo
acagaaaaaatacacggtgattatagggaatttccatataccccgcttccccgcagtt

SEQ ID NO: 251395 - DNA, 37 bp, Homo sapiens; identical to SEQ ID NO: 208431
  chr2:216196377-216196414
  hypo

SEQ ID NO: 251396 - DNA, 193 bp, Homo sapiens
  chr2:216274337-216274530
  hypo
tcccgacacggtgtcggaagctgagacccaggagaccacaaagctactggctgtgatttcggtcacagattcagaagtggccacaagaggagaaaagggagtcgtctctcctgtcacggtgttgcctagagagtcacagaaaggggaaagtcagccttcagtcatctagaaaatttaccgtcctcgtcgccaa

SEQ ID NO: 251397 - DNA, 82 bp, Homo sapiens
  chr2:216824991-216825073
  hypo
caataggtatctataatgtctcctttatcaccagagtataggctacctgaccacaagaaccgggattcgcccaggtcctaac

SEQ ID NO: 251398 - DNA, 45 bp, Homo sapiens; identical to SEQ ID NO: 208432
  chr2:216852232-216852277
  hypo

SEQ ID NO: 251399 - DNA, 183 bp, Homo sapiens; identical to SEQ ID NO: 208433
  chr2:216885426-216885609
  hypo

SEQ ID NO: 251400 - DNA, 56 bp, Homo sapiens; identical to SEQ ID NO: 208435
  chr2:217472021-217472077
  hypo

SEQ ID NO: 251401 - DNA, 116 bp, Homo sapiens
  chr2:217475514-217475630
  hypo
aagcccggccagaccgatgtacaaccaaccacccatgggaaagatctcctggaagtccgtggtcaccatctgggcctggatcccgaagtgcctgtctgcagcgatggccacacggt

SEQ ID NO: 251402 - DNA, 520 bp, Homo sapiens
  chr2:217528434-217528954
  hypo
atcacgttggagctcgctagcgatgcagaatttccagctctccagggacctactgcatgggaatctgcattttatcaaggtttcctggcgcatatttgaagttgcgaagctccacccggcagcgcatgggtagctgcaaggggtggctgctcagtggacgccgggttgagggacagaaggaaagttgctggctgcgggctcctccatgctcttctcctctctccccagtgcaagatgtctctgaacgggcagcgtggggagtgctggtgtgtgaaccccaacaccgggaagctgatccagggagcccccaccatccggggggaccccgagtgtcatctcttctacaatgagcagcaggaggctcgcggggtgcacacccagcggatgcagtagaccgcagccagccggtgcctggcgcccctgccccccgcccctctccaaacaccggcagaaaacggagagtgcttgggtggtgggtgctggaggattttccagttctgacacacgtatttatatttgg

SEQ ID NO: 251403 - DNA, 221 bp, Homo sapiens; identical to SEQ ID NO: 208438
  chr2:217674466-217674687
  hypo

SEQ ID NO: 251404 - DNA, 250 bp, Homo sapiens
  chr2:217674954-217675204
  hypo
gagcagaggagcgacgctctggtgtgggcagcccgagaggtgatggggtttcagtaaatcatggcggggagttcaggccaccgccggagtccagtgggtagggctctctacggccggaggtggctgtgggggagacgggcgggaggcccagaccggcagggagctttctgcagggaagctggaaggatggtggggccggtaacccaacatggggcccaggagcgggagacatggccggaggggcggcgag

SEQ ID NO: 251405 - DNA, 201 bp, Homo sapiens; identical to SEQ ID NO: 208439
  chr2:217690998-217691199
  hypo

SEQ ID NO: 251406 - DNA, 75 bp, Homo sapiens
  chr2:217750176-217750251
  hypo
ccggacctacagcaggccatgcctaagcctccccgaccccgcccacgcccccgcccccaccgtgggctcctgcgc

SEQ ID NO: 251407 - DNA, 405 bp, Homo sapiens
  chr2:217751663-217752068
  hypo
ctcctgctggtgactcctgacggccatgagcaccaggaccctgagaagccgtgtttgaaaggtacctggttttctttgcttagccgtacttgacttttctttgagaagcacctgtttaacattcctggcgattaggctccacatcaagttcttccttatattgaaataaaagctgttgtctcgtagcattctccaccatggagggttcttgtttgctgtatgttgggtctctttcctggtagaatttaatctccacgagagcagggactttgcttaatttagaacagtgctttgcacacagtggacgataaacattggtttagtgacggtatctaagtgatctgcgtgctgggaaaggcagccgtttgtcccgtgcctttcctcgtgccatccctctcaccagga

SEQ ID NO: 251408 - DNA, 274 bp, Homo sapiens
  chr2:217931328-217931602
  hypo
ctcaccattctgttcggttgcccgcttgcctcctcccgctggctccagcttctgtgcctacaatgaaggctgtgcccattccctcacgtgcccgccgtggcctgacaccttcctgggcccaccctaacacattcctccgttgcttttaacgactgtttacagctcgctacctctaggacgtggcttctgatgaaaactgtccagacgctctgcctccggtgtaattcagagcccagctctcctccttaaaattcttttacgctattttccacaa

SEQ ID NO: 251409 - DNA, 193 bp, Homo sapiens
  chr2:218664472-218664665
  hypo
ggcagacccctgtccgaacaacacagatagataacggcacagagttttctttaactttatcatttataaagccatacaatgcattgcaaagaaacaaagcagctgtacaggagtggggacgcgtcagtgtacaatacattcatgtccaggataaggagcatacaccaggatttatacacggtggcagcggcta

SEQ ID NO: 251410 - DNA, 194 bp, Homo sapiens
  chr2:218665147-218665341
  hypo
caggcctcacctcccgactcccctcactgctgggcgacattgaatttgaagttccattgcccagcacctccaaccccgactcccaagttccctaaagaaatgagcaaaacacacgcacacacatacatccacacttgcacatgcgcacacacgtcctgtgttaccactggccaaggaaacgcgagtctcaggat

SEQ ID NO: 251411 - DNA, 46 bp, Homo sapiens; identical to SEQ ID NO: 208440
  chr2:218676420-218676466
  hypo

SEQ ID NO: 251412 - DNA, 134 bp, Homo sapiens; identical to SEQ ID NO: 208441
  chr2:218678421-218678555
  hypo

SEQ ID NO: 251413 - DNA, 861 bp, Homo sapiens; identical to SEQ ID NO: 208442
  chr2:218682482-218683343
  hypo

SEQ ID NO: 251414 - DNA, 154 bp, Homo sapiens; identical to SEQ ID NO: 208443
  chr2:218686229-218686383
  hypo

SEQ ID NO: 251415 - DNA, 288 bp, Homo sapiens
  chr2:218694774-218695062
  hypo
ccagggccgatttgcgctgtccacagaaggactccaaggggaaggccgaggcccaccctgcaaaggaccccaaggctccgaggcatagttgagtccccggctctcaggagcctgagcccctcgcagcccctgtgcccagggctctgtgggccaagtgtcaagcaggagtgtgctggctggtgagaggcagcccccagcccccttctactgatcccccgtggctcagtgtccctggccatgccgacactctgagtgggaggctatgcccagctgcgtggcttcatgggt

SEQ ID NO: 251416 - DNA, 310 bp, Homo sapiens
  chr2:218697819-218698129
  hypo
cctggcctcagagacggtcattcatggaataaccacgaagcagccccagcccacaggtacgcgcatgtttaaccaactggtgcagcggaggcgcaggtgggcccgtgaggaggtgaagcggacgagaggaccagacagggcaggagctctctcttggttcctcccttgttcacctccagctcctgaattcctcgttcccccagttcctgggcaattgggcccttctgctgaggcagatgagtgggcgacgctaaagccaggcaagtcttttgcttcctgagagaaaaattccacacgtttctccaccttc

SEQ ID NO: 251417 - DNA, 108 bp, Homo sapiens; identical to SEQ ID NO: 208445
  chr2:218700732-218700840
  hypo

SEQ ID NO: 251418 - DNA, 308 bp, Homo sapiens; identical to SEQ ID NO: 208446
  chr2:218704293-218704601
  hypo

SEQ ID NO: 251419 - DNA, 1078 bp, Homo sapiens
  chr2:218712679-218713757
  hypo
gtagtggggcagcagcggaggctggctccaggtccagcatcagcatattgagtgtttcgatggactgttcaatctcctgctgggaggctgctcgcgggaactcagggagactggggatgggggtctctgccaatggctgagggctgggcctgctggctacaagactctccaagtgggctctttcctgctggcgtggaggtgggcgaggctgctgctgctgctgctgctgctgctgccacgaattcagtcccctttgcacagcctcccggctgcttccccctcggaccggagctgggggcagctggggttcagcttccgaaaaggattgagagcggaacataccgctggggtcatgggcatagtgggaggtggtcactggctgtggccaggctgggtggggcccctccctctggtagccagctaaaccctcctgtgcagagtaggagggccgcatgggggccgtgtggccagcatgggcaggccccgcccggctggcagactcgtaggggtagcctcctccattgaccataggctccatggggtaggacttgtccagaccgttggtcagtggggacagggcctctgggtagcccccctcactggtgttggtgaccccgtccagagaagagagtgtgcccatgctgcccgcactgtgaccatcctggtttggcaattcatcgtccaggatgtctgtctcccgctcagatgctaacgccccaccattgacatgaacctgggctgggacaacgtggcgtccagaggagggcacagccgagccccctgctgggcgggacctgaggtgctgggtgtggtacatggcgccttgcttctctcgctctaagccaaagccactcagcaggcggtccagctcccgcttctcctggggactcaaggcagcagtggcactggaggccccggggacaggctcgtcggtcttgtcggtcttggtggaggctgtggagttgcccgagtcgctgctcacagaaagcgtgtgttccacgtggttgggggtggccgacagtgtaggacgtgtggcattaacagccccggtgctgccgtgcagggagtctttcttctt

SEQ ID NO: 251420 - DNA, 46 bp, Homo sapiens
  chr2:218749830-218749876
  hypo
cacacggaagatgacgtctcgggctgggcttcggaacttcttgtgg

SEQ ID NO: 251421 - DNA, 202 bp, Homo sapiens; identical to SEQ ID NO: 208448
  chr2:218757381-218757583
  hypo

SEQ ID NO: 251422 - DNA, 87 bp, Homo sapiens
  chr2:218762564-218762651
  hypo
cacggaggttgctccggaagttctcctcattggctgtgctggggaaggagacagcgatgatcctctctgtgacgtacaccaggtcca

SEQ ID NO: 251423 - DNA, 200 bp, Homo sapiens; identical to SEQ ID NO: 208449
  chr2:218765458-218765658
  hypo

SEQ ID NO: 251424 - DNA, 193 bp, Homo sapiens
  chr2:218819724-218819917
  hypo
tcatgagctccacccaacagcggctgggtgcaggtacccacgggctgtctgggcagccagagccggacaggtgtccgccatagtccccagggggttactccaaagaggagaaactgctggctaataacactgcagcacattcctgggccaagataagtggctccaggcatcctcagcacgttccagcctcagt

SEQ ID NO: 251425 - DNA, 44 bp, Homo sapiens
  chr2:219080906-219080950
  hypo
agatgtagcacaacgatgagttaagattccgcacgcaggtaaca

SEQ ID NO: 251426 - DNA, 111 bp, Homo sapiens
  chr2:219129431-219129542
  hypo
cctagtgcctagcactgggccgacatctctgcagccagcatggaggggattagaggaagcccccagcacgggagaagcagagctgactccgatggggaaaatcagtctcag

SEQ ID NO: 251427 - DNA, 313 bp, Homo sapiens
  chr2:219145048-219145361
  hypo
ggaaacgttcctcacgtgcatctgtggagggctcctgtgtgcccagcccacgccactgggggttcactggggggtcacgatgtagtggggaagccaggcaggagcaggtatgggcatccactggggcagccagccagggcagaacaggggatggggacagagggtaggagaaaaggagggcggcagagcgcagtttgtgcagcagcagggatagaggtgaagacagggatctgcatcagcctcacagaggcaggtgtgcaaagggtgtgcgtgactgtgcaggacccatgcgcagatccgcaccagcgcacat

SEQ ID NO: 251428 - DNA, 37 bp, Homo sapiens
  chr2:219180148-219180185
  hypo
ggattccaggcatgagccatggcgcccggccaaggat

SEQ ID NO: 251429 - DNA, 89 bp, Homo sapiens
  chr2:219204242-219204331
  hypo
ctggcctctccaattttcttctgtgagttcctcagttcatgtctccctgatagattttgagttctaggtgtgtccgtctcattctccat

SEQ ID NO: 251430 - DNA, 398 bp, Homo sapiens; identical to SEQ ID NO: 208450
  chr2:219209330-219209728
  hypo

SEQ ID NO: 251431 - DNA, 67 bp, Homo sapiens
  chr2:219210001-219210068
  hypo
tccctactcctgggacggcagcaaggacatgggggctgctgttagcttctccgtcaggaggcctcat

SEQ ID NO: 251432 - DNA, 377 bp, Homo sapiens
  chr2:219255971-219256348
  hypo
atgaacaacgccaccgtggccgtggacatttaccagggggtgagcgcgggtgggtggggagggcgtgacccagagaggctccccgcctcgggcagggccaccggtcctaccacactcgtccctgcagggcgtgatcctgggctgcctgttcggccccgcggccctctacatctgggccataggtctcctggcggctgggcagagctccaccatgacgggcacctacgcgggacagttcgtgatggaggtagggcagggggcgggcccaggagggcaaggggtccaaggacagcaggcacactactgggggctagaactccgagccttgtgggtcctcttttcttttctttcttttcttcctttttttttgtttttgt

SEQ ID NO: 251433 - DNA, 44 bp, Homo sapiens; identical to SEQ ID NO: 208455
  chr2:219267986-219268030
  hypo

SEQ ID NO: 251434 - DNA, 165 bp, Homo sapiens
  chr2:219294017-219294182
  hypo
tggccaaggagatccgagaccaggagcggggagggcgcacctatgtaggcgtggtggacggagagaatgaattggcatccccgaagctgatggaggtgatgaaccacgtgctgggcaagcgcagggagctgaaggcggccgtgcccgacacggtggtggagccgg

SEQ ID NO: 251435 - DNA, 170 bp, Homo sapiens
  chr2:219295536-219295706
  hypo
ccagaagtggacagcgtccaaccggacctcaggcctaggcaaaacccacactgtgggctccgtgggtgagggccaggcgggggcagtgagggagccaggatccaggagctgggccaggagagccacttggtccaccacccaccctccttccctgacgtgcatcttcaacg

SEQ ID NO: 251436 - DNA, 188 bp, Homo sapiens
  chr2:219431996-219432184
  hypo
tcatggcttgcaagacgcatcctcctctattggttattaaacagcaggaattcgtcaatgctccatcctaggtgcctttattttacagcactatactctttttcggcaatttcatccacatccatggcttcaattactatcaatatggcagatgacaaacacatacacacaccgcgcacatttacgta

SEQ ID NO: 251437 - DNA, 31 bp, Homo sapiens; identical to SEQ ID NO: 208457
  chr2:219577395-219577426
  hypo

SEQ ID NO: 251438 - DNA, 44 bp, Homo sapiens
  chr2:219586061-219586105
  hypo
ggattacaggtgtgcgtcaccgcgcctggccagggaacaccaat

SEQ ID NO: 251439 - DNA, 86 bp, Homo sapiens
  chr2:219599483-219599569
  hypo
agaggattaagtgacgggattatgaattattttgagtgtacttaatacacatgcatgcgtgcttgtagtctcgtaaagtgaatggc

SEQ ID NO: 251440 - DNA, 37 bp, Homo sapiens
  chr2:219609749-219609786
  hypo
aataaatcgtacgtcgtagtaacgacgcttcagggct

SEQ ID NO: 251441 - DNA, 48 bp, Homo sapiens
  chr2:219694762-219694810
  hypo
gctcctgcatgaagcgcatgtagatctgggcgccgggtttccgcagtt

SEQ ID NO: 251442 - DNA, 38 bp, Homo sapiens
  chr2:219773281-219773319
  hypo
gacaaactgctctacgacagtaacgaggccttagagct

SEQ ID NO: 251443 - DNA, 177 bp, Homo sapiens; identical to SEQ ID NO: 208461
  chr2:219892664-219892841
  hypo

SEQ ID NO: 251444 - DNA, 33 bp, Homo sapiens
  chr2:219919242-219919275
  hypo
gtatgggagactgaccggcggagggggtgggga

SEQ ID NO: 251445 - DNA, 92 bp, Homo sapiens
  chr2:219994459-219994551
  hypo
gtggctaaatttaacgccctgcgcggccaggggagccgtgcgccccgggcaccgtgtgtccacacagacgccagctccgccaccttcacccg

SEQ ID NO: 251446 - DNA, 35 bp, Homo sapiens
  chr2:220039756-220039791
  hypo
ctgggtttcggtgccggagccgttcaatgtacacc

SEQ ID NO: 251447 - DNA, 41 bp, Homo sapiens; identical to SEQ ID NO: 208462
  chr2:220049820-220049861
  hypo

SEQ ID NO: 251448 - DNA, 210 bp, Homo sapiens
  chr2:220066674-220066884
  hypo
cgagggctctgaggactgccagcacgctgtcacctctcaagctcacgggagagctagtgcacctgaggacaaacggctgagcattgtcacaaagattgtgtatcacacacccaagggagcaaggcagaactcagggaaggcagtcatgccagccgactaatctcctaggatctgaaaccagcttcaatcagcttccgcatcctggtactt

SEQ ID NO: 251449 - DNA, 361 bp, Homo sapiens
  chr2:220080603-220080964
  hypo
caccaaggtgggagcggcagcttctcaggcggggtctgttctcttcctcccacgggcccctatccctgcttctccggctccaccctcccacatgccctttccactggggcggcacctgagcagccctgtgacactggatgtgccccgatccgcgatccgcagcacctcccctgtgcggcgccccaggtgccagcgcagtgagagctcgtgcaggtgggagaagatgagcagctccacccgccgagacgtgaactgctgcacccggatccacaggaaggtgcgcaggttgctcacgaagcctgcagggagccgggggacgcctcagtagggcctgggagctgagggacgtcagcccagcacc

SEQ ID NO: 251450 - DNA, 127 bp, Homo sapiens
  chr2:220092640-220092767
  hypo
cacacttgctcccctcggcgacgtgcaccaacaggtcctcctcccctgggggtgaatcactataggaggcctctaggcgctggtattcagtgtcaaactgcgccatcaccaccgccccctgtccacc

SEQ ID NO: 251451 - DNA, 550 bp, Homo sapiens
  chr2:220150656-220151206
  hypo
cagcttgccgctgacgctctctcctgtcaccccgcccctgctctctccccagatgtgttctgagctggatgccgggttccagaatcgctgcacagttccaacaggacagcgccttcccccatgcgctgggaggggaccctccatttctccccctcacccatgctgagtgtagagccggggcctgggtggcgggtgggggccgggtgggaggtggcagtagtcttagcctgtgcactctcttccttgggtgtttggtgctggctcctggggactacaaatcccagagtgcggtgtgcccggcctcatttctgatagatcccgcttgggggaggtggtgtatggttacggagctgtgcatcttgggacatgtagtagcccaggtcggcttgtcactcgctgtgagatggggagattttgtcttttgatttatccctgtagggctggcagggttgtagatgaagggggaatgatctgagccttggttcccctgacacgtcttgctagccccagggttagagtgggcagggcagagccgcgcagcacctgggag

SEQ ID NO: 251452 - DNA, 130 bp, Homo sapiens
  chr2:220161581-220161711
  hypo
ggtcattggcatcgcgggacctctgccactcagcctgagccagaagcccaaccccttaccccaagccctccagacctcgcagcagagagagggctgggccaggtgggccagcagggttcactcacagggc

SEQ ID NO: 251453 - DNA, 99 bp, Homo sapiens
  chr2:220161741-220161840
  hypo
ttgccctccccctgcgcggtggcacaggtgtttggctctgcttggtaggcacagagggcctgccactccttggcaaggcggtcccggttccgcaggtga

SEQ ID NO: 251454 - DNA, 364 bp, Homo sapiens
  chr2:220309514-220309878
  hypo
gtgcctcagtctcacggtgctcctttctctagggggttctgacaccctggtgggcacctccctggacacacccccgacctccgtgacaggcacctcagaggagcaagtgagctggtggggcagcgggcagacggtcctggagcaggaagcgggcagtgggggtggcacccgccgcctcccgggcagcccaaggcaagcacaggcaaccggggccgggccacggcacctgggggtggagccgctggtgcgggcatctcgagctaatctggtgggcgcaagctgggggtcagaggatagcctttccgtggccagtgacctgtacggcagcgcattcagcctgtacagaggacgggcgctctctatc

SEQ ID NO: 251455 - DNA, 131 bp, Homo sapiens
  chr2:220316366-220316497
  hypo
tcagcgctgcgcagcgagggccgcctcctcctccgggctgagggtgagcggcacaccctgctgctcagggaggccagggcagcagatgccgggagctatatggccaccgccaccaacgagctgggccaggc

SEQ ID NO: 251456 - DNA, 39 bp, Homo sapiens
  chr2:220337590-220337629
  hypo
tagtagctcctctcccgccagacccggactccctgacgt

SEQ ID NO: 251457 - DNA, 83 bp, Homo sapiens; identical to SEQ ID NO: 208465
  chr2:220371685-220371768
  hypo

SEQ ID NO: 251458 - DNA, 234 bp, Homo sapiens
  chr2:220419207-220419441
  hypo
gtctggctgcgcagcgcagggaatccgctgtgaaggagacacagcctgagtcggccaggcccaggccattgagtaccagtcggtgacggtggccgtccgagtggatgtgacacttgggtcctggatacagctgtactccaccccgggcccactccccggtcacaccttcctgggacagctccagctggaaggtggcactgcccccctcactgatggtcacgtcctccagaggcc

SEQ ID NO: 251459 - DNA, 79 bp, Homo sapiens
  chr2:220420853-220420932
  hypo
ggccatggacaggcgagagtcgtggggcaggggctgcccacctcgcacccagcgcacggcccccgctgcacccactcgg

SEQ ID NO: 251460 - DNA, 86 bp, Homo sapiens; identical to SEQ ID NO: 208469
  chr2:220421317-220421403
  hypo

SEQ ID NO: 251461 - DNA, 117 bp, Homo sapiens; identical to SEQ ID NO: 208470
  chr2:220422087-220422204
  hypo

SEQ ID NO: 251462 - DNA, 176 bp, Homo sapiens
  chr2:220424030-220424206
  hypo
gcaccaggcggcagcgtggcccatccctctccagcaccagggcctcgctctcctccacttccagcccatccttgtaccagcgcacaggggcatcctcccgagacagttcacacatcagcaccacacactccaaggtcacggcgatcaaggtcacctcatcgcgagggtatatgatc

SEQ ID NO: 251463 - DNA, 401 bp, Homo sapiens; identical to SEQ ID NO: 208471
  chr2:220427079-220427480
  hypo

SEQ ID NO: 251464 - DNA, 125 bp, Homo sapiens
  chr2:220428140-220428265
  hypo
tgagggctgggtggcgggcagcaccaggcggcgatggggcccctcattctccagcaccacgaagtcactctcctccacctcctgcccgtccttgtaccaacgcacaggggcgtcctctcggtcca

SEQ ID NO: 251465 - DNA, 57 bp, Homo sapiens; identical to SEQ ID NO: 208472
  chr2:220431758-220431815
  hypo

SEQ ID NO: 251466 - DNA, 337 bp, Homo sapiens; identical to SEQ ID NO: 208473
  chr2:220432724-220433061
  hypo

SEQ ID NO: 251467 - DNA, 367 bp, Homo sapiens
  chr2:220434651-220435018
  hypo
agaagagttctagggccctccggatttgtacatcaatcactccttagtggtgttccaccatctgcctcggaatcatttaaggagtttgctaagaagttcctgagtaccctggagacctactaaatccgaatccctggggagtgagaggcgggcgggtttggtattttaatattcccgcggaccacctctcctccagtcttgggggcagcgctgggcaccgaggagggctggagttcggagggcctcggaggacactcgaggcccctccctaggtcccgggctccgccgtacctttcacgtgcagctgcacggcactgagcgtctggcccgccgagttgcgcgcggcgcagacgtagagcccacgatc

SEQ ID NO: 251468 - DNA, 148 bp, Homo sapiens; identical to SEQ ID NO: 208476
  chr2:220499163-220499311
  hypo

SEQ ID NO: 251469 - DNA, 119 bp, Homo sapiens
  chr2:220505456-220505575
  hypo
gggtgggagcaggccgggacgctgtgcactggggcccactggctgctcccctaggtgaagacgtggcggatgcatctgttcacctgcatccagctgggctgcatcgcactgctctgggt

SEQ ID NO: 251470 - DNA, 34 bp, Homo sapiens
  chr2:220508877-220508911
  hypo
tatggcaagggagggcggccgtagtttaggaagg

SEQ ID NO: 251471 - DNA, 86 bp, Homo sapiens
  chr2:220553963-220554049
  hypo
ctggactcttgacacggctttgcctgcagctctggactctccctcaggctccagggctccctgtgcccttgcggtgctccggcctc

SEQ ID NO: 251472 - DNA, 230 bp, Homo sapiens
  chr2:222389989-222390219
  hypo
cagatgaaaacaggcgtgagactcaatgcacaacatgtagattaagttaaaaggttaattttctgactcgtggtctggatagtagagctgtggaggaaaacgagttaccatatgctccgtaaatttcctttcggttaaaaaagatgagggaaagagagagagatatgtccttgattccgtgccattagttccggcagtgaggatgctcactgtcacgcctttcccaggtt

SEQ ID NO: 251473 - DNA, 143 bp, Homo sapiens; identical to SEQ ID NO: 208479
  chr2:223562591-223562734
  hypo

SEQ ID NO: 251474 - DNA, 81 bp, Homo sapiens
  chr2:223652842-223652923
  hypo
ttacaggcgtgggccactgcgcccggccgtgggcaggagattctaacccatgctgtcactaaccttcggcctcaatcaggt

SEQ ID NO: 251475 - DNA, 32 bp, Homo sapiens
  chr2:223743763-223743795
  hypo
gtgactcacacctgtaatttcgacactttggg

SEQ ID NO: 251476 - DNA, 175 bp, Homo sapiens
  chr2:223753468-223753643
  hypo
atagagtgtatctttccagacgctttgtttgcgacgctttgtttgcgtatccaagattgccatcttttaatgaagtagatgtgatggaaaaaggaatatactttgtccactttaatagtacgcctcactttgttttagacatgtctgtgcctgcgtctctttgagggatatacgt

SEQ ID NO: 251477 - DNA, 120 bp, Homo sapiens
  chr2:223764176-223764296
  hypo
cgggactctctctcaaaaaagaataaaaaaataaataaataaaaagagaaagataatgttacaggacaggggtcctgatctaaacctgaagggaaggttctcggatcttgcgcaagaaag

SEQ ID NO: 251478 - DNA, 96 bp, Homo sapiens
  chr2:223772743-223772839
  hypo
cctctcccagtgaacgtgtaggttgcacgagagtgggaacttaggccgttttgtttactgttactttcgcagtgcttagaacgatatctaacatag

SEQ ID NO: 251479 - DNA, 200 bp, Homo sapiens; identical to SEQ ID NO: 208480
  chr2:224640636-224640836
  hypo

SEQ ID NO: 251480 - DNA, 42 bp, Homo sapiens
  chr2:224759073-224759115
  hypo
aacagtcacttgtctccatgcggaaaaacacaggaactgtct

SEQ ID NO: 251481 - DNA, 88 bp, Homo sapiens
  chr2:224856517-224856605
  hypo
accacaccggaacacggagagctgggccagcattggcacttgataggatttcccgtcggctgccacgaaagtgcgtttctttgtgttc

SEQ ID NO: 251482 - DNA, 42 bp, Homo sapiens
  chr2:225229321-225229363
  hypo
aactacagagctatcggccgggcgcggtggctcacgcctgta

SEQ ID NO: 251483 - DNA, 39 bp, Homo sapiens; identical to SEQ ID NO: 208483
  chr2:225390998-225391037
  hypo

SEQ ID NO: 251484 - DNA, 35 bp, Homo sapiens
  chr2:225463886-225463921
  hypo
taataataactcatactggccgggcgcggtggctt

SEQ ID NO: 251485 - DNA, 32 bp, Homo sapiens
  chr2:225482441-225482473
  hypo
tgtggggcacatgaccgtacttaaatctggac

SEQ ID NO: 251486 - DNA, 48 bp, Homo sapiens; identical to SEQ ID NO: 208484
  chr2:225692101-225692149
  hypo

SEQ ID NO: 251487 - DNA, 149 bp, Homo sapiens
  chr2:227750577-227750726
  hypo
tatgctgggttttttcaatccgataaccgagatggctgttaagtgacgaatgggcaggtagtgtatgcagcatggatccactggacaaagggatggtttgtgtcccacgtgggatggagcaagacagcgtgagatttcatcacagtact

SEQ ID NO: 251488 - DNA, 154 bp, Homo sapiens
  chr2:227769068-227769222
  hypo
gggtttaagcatgcacggtcaccaaacagacaagttacaccactgtggcacatcctgcaagcggggggggaggggggtcagggaactcctgtttcagtagatatatctgatgaaaataatgctctcctgaggggatgatcgtgtatgtggtgtg

SEQ ID NO: 251489 - DNA, 40 bp, Homo sapiens
  chr2:227818767-227818807
  hypo
ttgcattcatttaacgactgttgatcgaatacctgccatg

SEQ ID NO: 251490 - DNA, 365 bp, Homo sapiens
  chr2:227841931-227842296
  hypo
ttgtgtctccccttcggcaagctccccctccctttagttttgcatttaacacagtcttgccttcatgactgccgcctcctttttttctgtaaacacaaatatgaagtgtatttgctttgcttttcagccttgtctgccccactgagtgtccgaaatagccggctggaattcatgagaatgttacgtcttcagatgtttataatccaaaagaatcccttatggtttttaataataaaacaacttagatgtcggtattttgtgttggaaaggcgagcaaagttcacaatgcagcaattacaatgcagtgcattatgtataatttgtagcctgccccaggagcaatggtgaaccgtgaaacaccatcc

SEQ ID NO: 251491 - DNA, 90 bp, Homo sapiens; identical to SEQ ID NO: 208487
  chr2:228185366-228185456
  hypo

SEQ ID NO: 251492 - DNA, 75 bp, Homo sapiens; identical to SEQ ID NO: 208488
  chr2:228212000-228212075
  hypo

SEQ ID NO: 251493 - DNA, 87 bp, Homo sapiens
  chr2:228255400-228255487
  hypo
caggcatgaaccaccgtgccgggcctacacattgtttttcgtttagttgttatgaaggcgtatttgacaaggcggaaggatagaata

SEQ ID NO: 251494 - DNA, 88 bp, Homo sapiens
  chr2:228466727-228466815
  hypo
aaaacaaaaaaacaaacaaaaaaaaacctgtttgacgttggactaggaacatctgctcagtctgccctcagcctatgagaaccatttc

SEQ ID NO: 251495 - DNA, 103 bp, Homo sapiens
  chr2:228466845-228466948
  hypo
tcttcccgagttcatgcacacacgtgccgctttgaggctgtctcagtcaccttcgtagatcatccctctcactcccacccatgcccagcgcccagcacaacac

SEQ ID NO: 251496 - DNA, 246 bp, Homo sapiens
  chr2:228632576-228632822
  hypo
ccgagccttatagcgggatcctcaaccaggggccattccgccccccaggagacaaccagctgtgtctcggacagttttgctggtcacagcaagcggccggggtggcggtgctagaggacgctgctaaacccccttggtgcacagggcaggccccatgggacgggaatcctgggctcggggcgcggctgcctgggtcccctctggcggcgccagctccaggaggcaggaaacgaggaggccctggct

SEQ ID NO: 251497 - DNA, 37 bp, Homo sapiens; identical to SEQ ID NO: 208490
  chr2:228638407-228638444
  hypo

SEQ ID NO: 251498 - DNA, 194 bp, Homo sapiens
  chr2:228735639-228735833
  hypo
gttggctgactctgtctctccgcaggctttctcatggaaacgtggcaggcaaacaacgatgctggcaagaaattggacaagccgcatgaaggcctggagagttttaagcccaggttgagagcacaggtgtaggctttctggtgtaggttccgacgcacctgccttccattcccgcctatccatttaggctgcga

SEQ ID NO: 251499 - DNA, 94 bp, Homo sapiens
  chr2:228741009-228741103
  hypo
acaggcgtgagccactgtgcccggccaagcctaggattcttaggctcacgtaattctcttgactcatgtttgcgactattgccttaatgcttat

SEQ ID NO: 251500 - DNA, 120 bp, Homo sapiens; identical to SEQ ID NO: 208491
  chr2:230743170-230743290
  hypo

SEQ ID NO: 251501 - DNA, 139 bp, Homo sapiens
  chr2:230795433-230795572
  hypo
tcaagcctgggcgacagtgagatgccgtctcaaaacaaaaacaaaagagagatgctttaccccttcgccactgcacctgagaacctcagcccagctcagctgtgctggagccctcctcgaggtgtgctgtggttttccc

SEQ ID NO: 251502 - DNA, 45 bp, Homo sapiens
  chr2:230796254-230796299
  hypo
aactctaaaatgatgtttcacgaccggcatgttggctcacacctg

SEQ ID NO: 251503 - DNA, 41 bp, Homo sapiens
  chr2:231492418-231492459
  hypo
atgctgttatagtctcccatcgtaaaaacaccttccggccg

SEQ ID NO: 251504 - DNA, 250 bp, Homo sapiens
  chr2:231522219-231522469
  hypo
aacggcacagctaacgtgaaggaacaaggcatcctaatccactgtgtggtgtggcagaatccatgacaagccacacaggtgtagggctgccgcgctgtcacacagggtcccagcgctgaaggaccgggcggtgagggggcagggaaagtcagaaagggcacccagggtacagggcacagtgctcagtttgctgtggctgcctgagtagtaataatcacagctacaactgcaggtgcgctcaggtgccagg

SEQ ID NO: 251505 - DNA, 268 bp, Homo sapiens
  chr2:231530668-231530936
  hypo
aaacagggagagaatcagagcgaaagcttccagttcaaacgcaggttgagaatgaggtttgcagagccagcgggcagtgagtgctgaccgagaagacccatggcggcccactgcagtgggggcggcggcagtgtgaccttgttgaaactagccgctccagtgacccaaggctgggggagatttggctctgctactttccagcactgtgagcttgggagccttacctgctccgagcttcagtttccttacttgtataatggggattaaa

SEQ ID NO: 251506 - DNA, 34 bp, Homo sapiens
  chr2:231585404-231585438
  hypo
ggttacaggcgtgagccaccgcgccaggcttaag

SEQ ID NO: 251507 - DNA, 160 bp, Homo sapiens; identical to SEQ ID NO: 208493
  chr2:231676879-231677039
  hypo

SEQ ID NO: 251508 - DNA, 31 bp, Homo sapiens; identical to SEQ ID NO: 208495
  chr2:231744875-231744906
  hypo

SEQ ID NO: 251509 - DNA, 141 bp, Homo sapiens
  chr2:231965554-231965695
  hypo
gaacttggaaatccacagtgggcaccaatgacttactgactgcgcagtttcttcaccttcattttcgagggttccctcgcaatctgttgcagcgttcctcacgcgggggcaccacctgccgagtctgtcctgcagattctg

SEQ ID NO: 251510 - DNA, 82 bp, Homo sapiens
  chr2:231977475-231977557
  hypo
gatgagtacagggccgtaagacgatttagaagaaaaaggatttcttttatacataatttctgaacatcggtatgttttcttt

SEQ ID NO: 251511 - DNA, 38 bp, Homo sapiens
  chr2:231992333-231992371
  hypo
ctgggattacgggcatgagccaccgcaccccacgccct

SEQ ID NO: 251512 - DNA, 42 bp, Homo sapiens
  chr2:232109613-232109655
  hypo
tcacaagtcctgttagtcaccgcctctctggagaggaagtct

SEQ ID NO: 251513 - DNA, 140 bp, Homo sapiens; identical to SEQ ID NO: 208497
  chr2:232113118-232113258
  hypo

SEQ ID NO: 251514 - DNA, 42 bp, Homo sapiens
  chr2:232162354-232162396
  hypo
caaaaatcattcttagctggcgagcataggaaagcaggcacc

SEQ ID NO: 251515 - DNA, 99 bp, Homo sapiens
  chr2:232223174-232223273
  hypo
aagtgctgggattacaggcatggggccccctccacttcccttctctcactcaccttgccccaggcccatcctggccccaggcagcgctccccacaggtc

SEQ ID NO: 251516 - DNA, 125 bp, Homo sapiens; identical to SEQ ID NO: 208498
  chr2:232247495-232247620
  hypo

SEQ ID NO: 251517 - DNA, 154 bp, Homo sapiens
  chr2:232264149-232264303
  hypo
cctgggagagagggcccagccggctctccgcagccccaggcctgcctggagacgggccgcctctgccacagggcctccactcctggctgtgtcctgtaaggtctggaagggcgaccgctctgactacctcagcgcccctcagaatctccctggg

SEQ ID NO: 251518 - DNA, 195 bp, Homo sapiens
  chr2:232283622-232283817
  hypo
atggcctccggggccccgggagtcgcaggcaccctgcctggacgctgttgtggggcctgaacgaagttcactgctgccggcgcccaaaagcgctcgctccagctcctgcacctgctcaactgtgtgctccctttcacgagggtcggaatgcggtggatctgagagagtggagtctgatcccgcccgcactgaaac

SEQ ID NO: 251519 - DNA, 78 bp, Homo sapiens; identical to SEQ ID NO: 208499
  chr2:232458617-232458695
  hypo

SEQ ID NO: 251520 - DNA, 80 bp, Homo sapiens
  chr2:232472540-232472620
  hypo
tcactcaatgactggcgagcagtggcatcctgatgagtgacaaggcaggtggaaagatccagccctcttgcctcaactca

SEQ ID NO: 251521 - DNA, 131 bp, Homo sapiens
  chr2:232485559-232485690
  hypo
gcagaaactgacttcgtttccctgttattgatatgaggctgtgggggctcactgtaattaatcagtagggtcagccgcctttgaaggttactcgttgttcctcatagcggcatctccgcagtatggatgga

SEQ ID NO: 251522 - DNA, 182 bp, Homo sapiens
  chr2:232557590-232557772
  hypo
caggacatgggatccgtgttcatggttgtacagacatgtacatgcacaccgagagactgggcgtgggagtgtggaacgggcctgctacagggaagagaggacaggctgggccaaggcctgggtgtggccgcgcgcctgcaggtgcctcttgccctgcgttctatgcccgcaccaggcctgcc

SEQ ID NO: 251523 - DNA, 245 bp, Homo sapiens
  chr2:232760319-232760564
  hypo
tgaacgcgcaagatcgcagttcacaattcagagcagagggcctgtagcccttcgaggcccgaagccagagaatgccggaggagagttttattgcaggaacttaaatttaaccagctggaactctttaaacaatcatcctattcatatatttaaaataaattgtgcatcttttagcaggcagtcagcgtttcgttattaagatggaagatgggacagagtgttcttggctgcgttgatcccagaat

SEQ ID NO: 251524 - DNA, 131 bp, Homo sapiens
  chr2:232850673-232850804
  hypo
cgtctagaacaagtcgggtaagctggcttgctgagtcgtctggcttttattttttgcccatgctggatgcttcagtccgctcctggtgcccttggacatcagactctgggttcttccgcctttgcactctt

SEQ ID NO: 251525 - DNA, 120 bp, Homo sapiens
  chr2:233159520-233159640
  hypo
ttgcagggctcttgcgaggattaaataagatcagcgtgagagatgcttaggacagaggacgtgcttaataaatattagctccattccagacatctgtcacccagccgcttccttctgttt

SEQ ID NO: 251526 - DNA, 94 bp, Homo sapiens
  chr2:233183056-233183150
  hypo
tggaggaccagtttcgccaagtgttctctggcccagttgtaaacatcattcgtttgcttgtccagcaaacattattggacgcctattagtgcca

SEQ ID NO: 251527 - DNA, 285 bp, Homo sapiens
  chr2:233198441-233198726
  hypo
gtctgtccacacatcgctgccgacggtgaggctgtgggtggtgccagccttccaggcctggctgggcagctctgggcttgtcaggctctgacccatcccgtcccgcagatggcactgtacttctgctcggggctgctgcaggacccagcgcagttccggcactacgcgctcaatgtgcccctgtacacacacttcacctcgcccatccgccgctttgccgacgtcctggtgcaccgcctcctggctgccgcgttaggtgaggggtgcagtcggggtcagggcaga

SEQ ID NO: 251528 - DNA, 41 bp, Homo sapiens
  chr2:233230827-233230868
  hypo
taccagaaggtctgcggtgctcctgttcctcggccccggtg

SEQ ID NO: 251529 - DNA, 40 bp, Homo sapiens
  chr2:233258360-233258400
  hypo
tgctgggattacaggcgtgagccaccgtgcatgtccatct

SEQ ID NO: 251530 - DNA, 45 bp, Homo sapiens; identical to SEQ ID NO: 208506
  chr2:233355393-233355438
  hypo

SEQ ID NO: 251531 - DNA, 42 bp, Homo sapiens
  chr2:233357813-233357855
  hypo
ccccagtgcccagcccggagcctggcacgtgaccccagagca

SEQ ID NO: 251532 - DNA, 37 bp, Homo sapiens
  chr2:233358340-233358377
  hypo
gaggcatctcagggcgtgcagccgggaccttggcctc

SEQ ID NO: 251533 - DNA, 108 bp, Homo sapiens
  chr2:233389942-233390050
  hypo
ctccaagacactgaccgggcttttcagagcctgggtgcgggcaggcttggggggccggcatgtggccttcagcggcctggtgggcctggagccggccacactggctcg

SEQ ID NO: 251534 - DNA, 143 bp, Homo sapiens
  chr2:233527389-233527532
  hypo
ttggcctcgcagagcgggaggtatttgagtcatttttcgatgaatgaagccaaaggaattacatgtttcggagactaacgagtgtcctttcatcccggtcatgcattcctttgaccctgcaggtatgacgctgggcgggatgg

SEQ ID NO: 251535 - DNA, 149 bp, Homo sapiens
  chr2:233540161-233540310
  hypo
ggtcaggccttcccccgactgctgagtgttagaaccacctgcacaccggcttcccaggcccacccacatccacctgggatttctccaaggtgggtttcaggaaacgtgtagtcgatggagctgtgacatgattccgatgcacagccgca

SEQ ID NO: 251536 - DNA, 48 bp, Homo sapiens; identical to SEQ ID NO: 208508
  chr2:233714270-233714318
  hypo

SEQ ID NO: 251537 - DNA, 116 bp, Homo sapiens
  chr2:233750024-233750140
  hypo
tcatctgttccgtgcggctcattttcctgacgccctcgttgcatgccttcaccacctgggacaagaaggagggcacatcaggccaccaaagccggctgtcccggccccttcctcca

SEQ ID NO: 251538 - DNA, 233 bp, Homo sapiens
  chr2:233750442-233750675
  hypo
acctaaaaatcccacgcttcctggggctcccgaggactcgttctgaaggaagacaattctgcagtgacacatggggcccggcacagggccaggctcgccgcaggctctcagggcacataaatgagcaccatgtccagggaagtgtgcgcgagggcctccctgccatgttgtctggagtgagaaacacgctcgccagcctcaacagccatcagtggattcgattaaaatagtta

SEQ ID NO: 251539 - DNA, 165 bp, Homo sapiens
  chr2:233753188-233753353
  hypo
acacacatgtacacacgtgtacaaacatgcatacaagcatgtgtgcgcacacatacatgcatgcacatacatgcatacctgcacacacacacgcatgcacgcacacacatacacacagcctccatctgacaaatggagagcaagagagcccgcaggtgtggcacc

SEQ ID NO: 251540 - DNA, 187 bp, Homo sapiens
  chr2:233753918-233754105
  hypo
acagcacggtttagacgccatcttttctcacaggcataaaagctgcatctgaccaggtggcattggtggcctcagatggagggcagtatgggttccttagcctggcacgtgctctcccacgccagcctccactcggtgtgtccccagcatgctgcctgatgtggagacttgccgttctctctggaat

SEQ ID NO: 251541 - DNA, 192 bp, Homo sapiens; identical to SEQ ID NO: 208509
  chr2:233764817-233765009
  hypo

SEQ ID NO: 251542 - DNA, 173 bp, Homo sapiens
  chr2:233767045-233767218
  hypo
gcccgagcccagcccgctgcagcgcagtctttagtgaattcgaggccggactgagcaggtcccgtgagcagcgtggggagtgggggcttggctgtctgatgggggagtgacagctaaccccttgggttgctaagggacgaggggagtcacatattcaacgcagccatgggatg

SEQ ID NO: 251543 - DNA, 171 bp, Homo sapiens
  chr2:233845597-233845768
  hypo
gagaagctgcctgggcgagagcagcggcccttgctttggccaggtctagggcacatggagtgcctgcgcaggtcagaggcaagcaggagtcctgatctggagaaggactggcaccagtagggaaggggcagctggagccctgccatctctcgctatcgtcttctgcctctc

SEQ ID NO: 251544 - DNA, 143 bp, Homo sapiens; identical to SEQ ID NO: 208510
  chr2:233945670-233945813
  hypo

SEQ ID NO: 251545 - DNA, 161 bp, Homo sapiens
  chr2:233986776-233986937
  hypo
ttggttaacatgtgcgtttgtttggatgttctgtcctcaggcatccgaaggcgtctccatgaggttcttcaccaagctggaccagctcatcgagttttacaagaaggaaaacatggggctggtgacccatctgcaataccctgtgccgctggaggaagagg

SEQ ID NO: 251546 - DNA, 174 bp, Homo sapiens
  chr2:234055893-234056067
  hypo
ccacacacagtggacgagggggatgcccctagagtctctgtgattcccgggagacgcctgtggaaacatgcacgtgcgccgctggggcaagagaagcccagtggccccacgaaggacgcacaccagaggttgcccagccatgtagacaaggggttcgggcgggggaagccttgc

SEQ ID NO: 251547 - DNA, 143 bp, Homo sapiens
  chr2:234079669-234079812
  hypo
ctggggaatcagaattaaaacgaaagtctctctgtttcagaggaggaagaaatcacgtttgccccaacctaccgttttgagagactgactcgggacaaatacgcctacaccaagcagaaagcgacaggggtgagtcctcttca

SEQ ID NO: 251548 - DNA, 192 bp, Homo sapiens; identical to SEQ ID NO: 208511
  chr2:234093875-234094067
  hypo

SEQ ID NO: 251549 - DNA, 94 bp, Homo sapiens
  chr2:234121798-234121892
  hypo
cacacaaatacgcacgcatgcacacgtgcaggaagctagcaggagggaggtgccccgcacaaatctggagaaatatcacagggctcggctgggc

SEQ ID NO: 251550 - DNA, 33 bp, Homo sapiens
  chr2:234122192-234122225
  hypo
aagaaagatcacagggcccgttaggctccttcc

SEQ ID NO: 251551 - DNA, 43 bp, Homo sapiens; identical to SEQ ID NO: 208512
  chr2:234206550-234206593
  hypo

SEQ ID NO: 251552 - DNA, 205 bp, Homo sapiens; identical to SEQ ID NO: 208513
  chr2:234206623-234206828
  hypo

SEQ ID NO: 251553 - DNA, 91 bp, Homo sapiens; identical to SEQ ID NO: 208514
  chr2:234355709-234355800
  hypo

SEQ ID NO: 251554 - DNA, 374 bp, Homo sapiens
  chr2:234369775-234370149
  hypo
ttcctgctcctcgcccgccaggtgcgggttccgcctgtgagtccctcccagccggcagctgtgctgctccgccggtgcggggcctgcctgcattctccccccgtggccgcacgctggctggtgccctggtgtccctttcttgtttcccctgggctccttcttctcctggctgtggacaggtgcacccgtcggttttgtgcccggcatgccgtgtgcccttccaggcagcctgcccagccctggcgtgcagatggatcgtctgtgccagccttcggctcttgtcgagcaggtggtcgctgtcccagtcatcaccggcgttcctcgctctgcacttccataccggctgcagtccttcctggcgctgcattctctgc

SEQ ID NO: 251555 - DNA, 1029 bp, Homo sapiens
  chr2:234372716-234373745
  hypo
cagagccctggagcggacctcacccccctgggcctcgcgctgatcagcagtgcacactctccatttctctctccctccctccgcctggagcagcagctggatccgcctcagaaggagcagctggggagtgctcttgccgagatggaccgacagctcaggaggctggcagacaccccgtggctctgccagtccgcagagcccggcgacgaagaggtatgtggctcatagggctgtgcctgggtctcccggacatggtggctctcgcctgaagtgcctgtgttccttgtgacccgtgtggctctgggatcaagatcgtgtcgctccggcagcccctgaggggccttctccagacttcgctattaaaatgctctttaaggcagggagggacagcaggtaggaaggagttctgggctgggattaagagtgccccttgaggaccagggacctgttgtcctctgaaacagaactgcagggcttcctggacagtgggtagaaggaaggctgagcccagccccacagcctcccccgagggtggagatgtatcatgggataaatggcagccttttgggatcccgctgtggacagggcgcagttggtgtgcgccactccccactcacactctcttcctgtgtgaacagaaagactccagctcgtcgcaggtctgggagggacccgaggacgcagggcatagcggaccctggggtggagtcacattcttctgcagggagtgctggctgaaggagccctggagagggccgtgtctggacaaggacaaaccccagcctgtctcttggcttccctgcttcagagatagaacacagaggggccctgaggaaagctcatcttgggcagtacagttgcagaaggcaaataactgcaagacgccaaacctgggcacccctgcccagtggggtttgtgagacctgtgggcagcagtaaggcgaggggacagaggtgggcagctgcacaacagcaccctctttccggggccctggggcgttttttgacgcatgcaatcctttcatggga

SEQ ID NO: 251556 - DNA, 304 bp, Homo sapiens
  chr2:234389316-234389620
  hypo
atggcctgtggcagcggagtcctggcggccaggggtcaggcagtgtcctggaggaagtggggtagcagccctgaagccacagcagcgtcccctggagtggccaggctctcgggaaccttggagagagcgggagaaggacagggagcccgcagcagggctgaggtggcagcaagacggggtggttctggagacctgagggtgtgggaacctgaagggaaagccaagagccaggcagagggtgaggctgcgggtgaggaggaaggagggggaccggggggccatggatctgcgggctcctcatcgt

SEQ ID NO: 251557 - DNA, 291 bp, Homo sapiens
  chr2:234394404-234394695
  hypo
aactttacccagctagatatcggaagccactcgaacttttcgggaaagtatttggcaatttcaatcttctccacgggaagacgatagaaatcggcaactctctgcctcagggagccggcagtcccaccctgggccgcgttccacaccaggtccagggcaggggcataggtcctctcaccagggatgcgcacctgtgtcctcagcagcacgtcctgggggctgtaccagaaaaccgtcaagcgccagatccaaacaaacaaacaaaaccacgtggtaacttgaggcataatg

SEQ ID NO: 251558 - DNA, 103 bp, Homo sapiens
  chr2:234396520-234396623
  hypo
agtagaataagggggcagagcgacgggagcaatgatgaatccgttggatggcagactgtccgaacacactgacaacagctgcgggtgggcctcttgctgacac

SEQ ID NO: 251559 - DNA, 283 bp, Homo sapiens
  chr2:234399624-234399907
  hypo
aggccacgaggagccgtctgcaccatgggcgtgtattgcctgcgggtacttaccactgaacatggcatatgacaaatgccatatcagaacagactgtaattgagggaaaaggagatagaagaatatattaatatctcactggaagaagccacattaccactaagttatggtgcaggaagaagtctgacctgagacttcagctccgccagcgtggcatcttctgagatctctatgtctcccaagtagaggagagaaacttgcgcaggctcgttcccagaagcac

SEQ ID NO: 251560 - DNA, 154 bp, Homo sapiens
  chr2:234545055-234545209
  hypo
aaaggataaatacacgccctctattggggtcaggttttgtgcctgtacttcttccgcctactgtatcatagcagcttagaatcccagctgctggctcgggctgcagttctctcatggctcgcgcagggtggaccagccccgttcctttatgtgt

SEQ ID NO: 251561 - DNA, 46 bp, Homo sapiens
  chr2:234545415-234545461
  hypo
tggaagatcagaaccgggaattcatggttttcgcccatgctcaatg

SEQ ID NO: 251562 - DNA, 424 bp, Homo sapiens
  chr2:234737269-234737693
  hypo
ttccagttcatgagcggcccagttctgtaccaggagaagctgctgaagccggcagctttgctgctggagaagggtgccgaccaggaggaagacgaggccctgcgggtgctgtccctgcgcgccctcggcaacatggccctgggcgcccccaagaaggtactgtgcctggccctgggcccaggtcccgggagctgagggtgcaggccgggtgccctggtcagcctgggagggagggtgcaggctgagggctgcccatgcccctccaggtgaagcagtaccggaaggtcttgctggagaagtgcctgggccccctgagggagcccgtgagcaacagcgtgactgccgagggcatggaggccctgaccaagatcctggctgagctccgggaaggggatgtggggtcctctttcgacgccatgtctga

SEQ ID NO: 251563 - DNA, 349 bp, Homo sapiens
  chr2:234751560-234751909
  hypo
gaagtgctcaaaaacgcatgtcgttgcactacacgacacaaaagccagcctgaaaggggctccctgacagctaaatctggggttacttgagcgtcaaattgcataccggcaatggattataacatgtgaatcaaagaacaaaaagactccatgaattcctactgatcctaaaaaataaaaataaaataaatcaaagcatgagagggaactacaggaagcaaaaaaaagaaccagaggggagatagctcttttgagcagaataatgccaactgacgtgtgccaaggaacggcagagacagaaacaacctgggcggggacctccacccaggcgatccgcattgctggcttc

SEQ ID NO: 251564 - DNA, 33 bp, Homo sapiens
  chr2:234764847-234764880
  hypo
caattcacagagtgcgagcggactggagcccgc

SEQ ID NO: 251565 - DNA, 58 bp, Homo sapiens
  chr2:235005079-235005137
  hypo
atgcccgcacgcacccgttcgtacagacatgcgcgcacgcacccgtttgtacacacat

SEQ ID NO: 251566 - DNA, 62 bp, Homo sapiens
  chr2:235442549-235442611
  hypo
gcaagcttgcaaggcgtggcaatgaatggggccgagcacattagtagcgcaccccacacctg

SEQ ID NO: 251567 - DNA, 89 bp, Homo sapiens; identical to SEQ ID NO: 208517
  chr2:235460414-235460503
  hypo

SEQ ID NO: 251568 - DNA, 102 bp, Homo sapiens
  chr2:235700054-235700156
  hypo
ctcctgtgtgagaacgctgacacctggccagcatcctgcctcccgggcacccagtgcactcaagattcctgcacgatgcgttctcttcggggtcacattgcc

SEQ ID NO: 251569 - DNA, 73 bp, Homo sapiens
  chr2:235809204-235809277
  hypo
ccttacctgggtttacgctaatgaaatgacactgatgccccctaaatagcttcaagaccggaggaaccaccca

SEQ ID NO: 251570 - DNA, 37 bp, Homo sapiens; identical to SEQ ID NO: 208518
  chr2:235815939-235815976
  hypo

SEQ ID NO: 251571 - DNA, 95 bp, Homo sapiens
  chr2:235868188-235868283
  hypo
tccagtggccatccccgtagttctgtgcaatttaatttttaattcaggtaggtttaccttgcctttgtttacccattttccactgttgccctttg

SEQ ID NO: 251572 - DNA, 353 bp, Homo sapiens
  chr2:235894218-235894571
  hypo
gcattttgactctccgcgcacaggtatttttgaccctctgcgcacagatatttttgaccctctgcgcacaggtgttttgactgtctgtttgtagcatcctcccttgatgtatgttcgggtgaagcagccctcgatgcacacctatgagctcagggactgtgcgcaggtgaaccagcctgtgacacacgcctacgagctcaaggagcacggtgcaggtgaaccagcctgtgacacacgcctacgagctcaaggagcatgatgcaggtgaaccagccctggatacacgcctatgagctcagggtccatgtgcaggtgaaccagccctcgacacacacctacgagaacagggacca

SEQ ID NO: 251573 - DNA, 97 bp, Homo sapiens
  chr2:235897309-235897406
  hypo
agaaggcagccactcggtgctgcgcgggtgccaggaggagctcacggtgtgtaggggggacgcatgaacaggtgaacaaagccgttgcgggtgctgg

SEQ ID NO: 251574 - DNA, 113 bp, Homo sapiens
  chr2:235909181-235909294
  hypo
ggaagcctggatcttgggctcgggctctgatgctttgtctctgagccgctgacatggaggacgtcaagccgcgatgttcatgtccccattgcgtagaggtgggtcctgtagtc

SEQ ID NO: 251575 - DNA, 164 bp, Homo sapiens; identical to SEQ ID NO: 208521
  chr2:235922810-235922974
  hypo

SEQ ID NO: 251576 - DNA, 63 bp, Homo sapiens; identical to SEQ ID NO: 208522
  chr2:235931227-235931290
  hypo

SEQ ID NO: 251577 - DNA, 312 bp, Homo sapiens
  chr2:235941053-235941365
  hypo
attttctttctgcatcgattctcttcagtaaatgatcccgcatttttgtatgggaaggatttttactcctcactcagcctattgaagtcaggctgctctggaggtggccatcactggggtctccacagtggcctccaagcagcccgggggcttgcacacgtggcccttgcatttcggggctgccgggctgcctggctgtggtagggtggtctctcacgtggcggcaagaccccttcatccagctctacacgcaggctgtgcattcagagctacttggtcactgcttctggtagggggcgagggtgctgtgcc

SEQ ID NO: 251578 - DNA, 378 bp, Homo sapiens
  chr2:235950027-235950405
  hypo
cagctcagccaccacgaatagcactggcaacatcttcgatgagcttccagtcacaaacggactccacgcagagccgccggtcaggcgggacaaccccttcttcagaagcaagcgctcctacagtctctcggaactctccgtcctccaagccaagtccgatgctcccacatcgtcgagtttcttcaccggcttgaaatcacctgcccccgagcaatttcagagccgggaggattttcgaactgcctggctaaaccacaggaagctggcccggtcttgccacgacctggacttgcttggccaaagccctggttggggccagacccaagccgtggagacaaacatcgtgtgcaagctggatagctccgggggtgctgtcca

SEQ ID NO: 251579 - DNA, 93 bp, Homo sapiens
  chr2:235950684-235950777
  hypo
atatgtctccgtcccgctcaactgcagctgtggggacacggtccaggcacagctgcacaacctggagccctgtatgtacgtggctgtcgtggc

SEQ ID NO: 251580 - DNA, 432 bp, Homo sapiens
  chr2:235960996-235961428
  hypo
ctggtgaacctggcacgctctgcacatcatctcttttctcccgtgaatcctggcagtgatcgatttcaggggacatttggtagtaggccagggaacatggagaatagagagcccatggccattcctgcgccgtctgctggaattctgcggggagcagagcctgccccactccctacactgtctcacgctgtgtgcctcttcctctgcaggccctactgaagatggactgccagggcctggtggtcagactcatccaggactttgtgctcctgaccacggctgtagaggtggcccagcgctggcgggagctggctgagaagctggccaaggtctccaagcagcagatggacgcctacgagtctccccaccgggacaggaacggggttgtggacagcgaggtgagcagcggctgagcttcgagctcaccgagcc

SEQ ID NO: 251581 - DNA, 227 bp, Homo sapiens
  chr2:236014701-236014928
  hypo
gatttgttgagcttgctggacgtgcgctgtggggatgcgtgggtgcacgtcgtcatccatggaggtgtgtgtcggtgttgacatctgcattgggtacgcggaagagggttcatttgattgtgagttgtcccacggttagcctgtcactccaggagcggctgcagccctgcctcgctggacagtggggatgacagagtttctgtgacgttcctgggaaggggtgagga

SEQ ID NO: 251582 - DNA, 186 bp, Homo sapiens
  chr2:236015360-236015546
  hypo
ccatgccctataaaacgcattcttgtcttgcgcttctgttggcgggtggtcctcactggacccccagaagctttcacatggtgtgagggccccatttgcctggcgcttccttggatcatatgccccaaaatagacacacttttggtcttccatggaaccaaatccagccctcgccctaaaagcagc

SEQ ID NO: 251583 - DNA, 199 bp, Homo sapiens; identical to SEQ ID NO: 208524
  chr2:236024875-236025074
  hypo

SEQ ID NO: 251584 - DNA, 137 bp, Homo sapiens; identical to SEQ ID NO: 208526
  chr2:236415971-236416108
  hypo

SEQ ID NO: 251585 - DNA, 286 bp, Homo sapiens
  chr2:236417496-236417782
  hypo
ggatgctctgtgcatcaaagcgatttgcccagggttacacagaggaaggtggcagagccggaagtggcagaatccagtgcacgggcgggatgccgagtgtgtcgccaaactccaccactttagtcgggggcgtggtggtggctgcgctatctgcttcccactcactggcatcctagccgtgtggggtgtgtgctcacctgcagccaccctcacctgcttgaaccagatttacctagagggtggtgtgaactcatgtgatgtgaacgattacttatagttaccgtga

SEQ ID NO: 251586 - DNA, 225 bp, Homo sapiens
  chr2:236443810-236444035
  hypo
tccaccgggccacccgcaccaggttgcctcccatcgtttgcaggagcggaagacccgatggagcaggtttcacagtgccctcgctgctgcctcccgtttcatctgcacgtctctttcaatgcgggcgtgcgaacttccaggtagagccgagttcaagaaaatgaagtactgcatgcgacgagcaagtttattgaagagggtgtgaggtcgcggcgcctgaccctc

SEQ ID NO: 251587 - DNA, 224 bp, Homo sapiens
  chr2:236452978-236453202
  hypo
cctgccgttgcttacgaggttctgagtcccgcagggactggctttcttcctctgtaggagtttcctaccatgtaagttttagaaggaaaggatactctttggggcctcagcggtccccttaggctgagcatctgaaccttcccgtggtccgtgtggctggaaggaggcttccatcgctggaaatccatttctcaaggcgaggagccagccgggccgaccacgga

SEQ ID NO: 251588 - DNA, 106 bp, Homo sapiens; identical to SEQ ID NO: 208527
  chr2:236456629-236456735
  hypo

SEQ ID NO: 251589 - DNA, 201 bp, Homo sapiens; identical to SEQ ID NO: 208528
  chr2:236459169-236459370
  hypo

SEQ ID NO: 251590 - DNA, 70 bp, Homo sapiens
  chr2:236512589-236512659
  hypo
gcacccatcaaaatgacacacggtgactctggtttcttccagcatccccgagatgaagatgaaaaactgt

SEQ ID NO: 251591 - DNA, 322 bp, Homo sapiens; identical to SEQ ID NO: 208529
  chr2:236541634-236541956
  hypo

SEQ ID NO: 251592 - DNA, 94 bp, Homo sapiens; identical to SEQ ID NO: 208530
  chr2:236553452-236553546
  hypo

SEQ ID NO: 251593 - DNA, 194 bp, Homo sapiens
  chr2:236571425-236571619
  hypo
ctcatccccttgctccgctgcaagaacccctcaccctgctcagtgctcctggccactgctgactggtgcatggcgagcagaggttttattccatcttactgtgtcagatgtgattccggggacgcagttctttcttaagagctctgatgcatgttctaactaggagggcaggtagctgccgctcccagcagccc

SEQ ID NO: 251594 - DNA, 75 bp, Homo sapiens; identical to SEQ ID NO: 208531
  chr2:236602265-236602340
  hypo

SEQ ID NO: 251595 - DNA, 197 bp, Homo sapiens; identical to SEQ ID NO: 208532
  chr2:236603369-236603566
  hypo

SEQ ID NO: 251596 - DNA, 146 bp, Homo sapiens; identical to SEQ ID NO: 208533
  chr2:236613260-236613406
  hypo

SEQ ID NO: 251597 - DNA, 109 bp, Homo sapiens; identical to SEQ ID NO: 208534
  chr2:236616175-236616284
  hypo

SEQ ID NO: 251598 - DNA, 174 bp, Homo sapiens; identical to SEQ ID NO: 208535
  chr2:236617715-236617889
  hypo

SEQ ID NO: 251599 - DNA, 192 bp, Homo sapiens; identical to SEQ ID NO: 208536
  chr2:236618370-236618562
  hypo

SEQ ID NO: 251600 - DNA, 187 bp, Homo sapiens; identical to SEQ ID NO: 208537
  chr2:236619770-236619957
  hypo

SEQ ID NO: 251601 - DNA, 188 bp, Homo sapiens; identical to SEQ ID NO: 208538
  chr2:236624442-236624630
  hypo

SEQ ID NO: 251602 - DNA, 192 bp, Homo sapiens; identical to SEQ ID NO: 208539
  chr2:236637398-236637590
  hypo

SEQ ID NO: 251603 - DNA, 192 bp, Homo sapiens; identical to SEQ ID NO: 208540
  chr2:236647745-236647937
  hypo

SEQ ID NO: 251604 - DNA, 654 bp, Homo sapiens
  chr2:236648390-236649044
  hypo
cgtctggagggcctcggacactttcaggctgggatggggactctgattttttgcttctcaggcactgatgtggttcagacccaggattctaggagggaaggttcccgtcgcaggggagggaatcagacgtcgctctgggcggcagtggagctggcaggcagcctctgggctctggcagcattgtcctctgggtccagcgatttggggtttagacagggtttctggacggcatctgcacagaggagcggaagacaagagctgggaaccgatgcgtgccttccctctttaaaacaagagtttcgaatccccatgagggttccctagcgtggtctcagagcccaggatctggagggggacgtctgtcattggagaaggcagaggagccagggtggaatccttcccgctgcccagcaggagcagggctggcctagcgggccgggctgggcactgcagcaaccttgtaccatcccctcctgagagcatcaggggccgggacgtccaaggtagcaccaggcccctcatgcccgcaccccctcctcatggtcacctctgttcctgcagggtcccggtggtctcccgctaaccccgcgtggtctctaacgcctcctgtcagccgctgctctgctgtctccacccgtgcggaggtcccatcca

SEQ ID NO: 251605 - DNA, 125 bp, Homo sapiens
  chr2:236656836-236656961
  hypo
ggtgcagtggcagagattcccgtggtgcacctttgaagccgaaatttgacagaaaccaagcgagcatgccgctgaggacggaggggctgcgggattgctcggccgcaggtcagggtctcatggaa

SEQ ID NO: 251606 - DNA, 274 bp, Homo sapiens; identical to SEQ ID NO: 208542
  chr2:236660557-236660831
  hypo

SEQ ID NO: 251607 - DNA, 421 bp, Homo sapiens
  chr2:236663445-236663866
  hypo
agggtcccttcctccgtgaagttaaggtccactagggagggtaaacatcaaacggtcacccagaaacatgaccttgtgtcttgctcaggggtggaaaagaagtgtggcagcccaggctgctttctgggggtggagcgttctcgctcctgctcacaggcgagtttgtgtggcttgcggggctgggtgagctggttccacaagatggtttctgcttgacctgggcagctgagccggacgtgggctgtgggtacccaaccgtttggattctcagcagagccctggggaagggaggcactgggggctggggcgggctggatgtgcggacttggcagctgggggctgcaggtccgtctgcagggactgcacagggctctcgttcctagattgcttcacagccagcggctctgtgcctgtcagattc

SEQ ID NO: 251608 - DNA, 80 bp, Homo sapiens; identical to SEQ ID NO: 208543
  chr2:236669006-236669086
  hypo

SEQ ID NO: 251609 - DNA, 201 bp, Homo sapiens; identical to SEQ ID NO: 208544
  chr2:236672625-236672826
  hypo

SEQ ID NO: 251610 - DNA, 530 bp, Homo sapiens
  chr2:236673974-236674504
  hypo
ggggcacctgcgagcgcccgtggcagctgctttgctttccccatgggtggtagtctcacgctgcccccacaggcccggcccctccagtgggaacatgtgcctgcactttttagtcgaacatgtaaattaatcagcagcagtccagcctaaaaagagaagctgaacactgttcgtttgggggctcatcggctcactgccgcgtggtcagtcctggtgccgtgagcacagccaaccggactgtaccacatgttcccttctccctgggctgagcaatcgcttccccgctaaatgttcggcagcactttgccttgtacgtgtctacgtctgcaggaggggctgtgactcatccccagccaactgtattccaagcacagccatagttcagagtgaatctttatggtctgtgaattctggagtttcagaaaactctctcattcaacgttgtgagtaaaccgtaagaaaaaatattgaacaccaacatagtcatctgggtactgggaaatactcccatgcccgcaccaagatttcat

SEQ ID NO: 251611 - DNA, 210 bp, Homo sapiens; identical to SEQ ID NO: 208546
  chr2:236675951-236676161
  hypo

SEQ ID NO: 251612 - DNA, 399 bp, Homo sapiens; identical to SEQ ID NO: 208547
  chr2:236685967-236686366
  hypo

SEQ ID NO: 251613 - DNA, 62 bp, Homo sapiens
  chr2:236708151-236708213
  hypo
tccaacctgttcaccgtgagtgtcaaccctgggtggagatttgaatgcgattccgaagcgtt

SEQ ID NO: 251614 - DNA, 96 bp, Homo sapiens
  chr2:236715042-236715138
  hypo
ctcacactttctcatgccatcgagagaggagactgagacgatggagctccttcagttttacccaagtcaaggtgcgcttttggttggggcttccct

SEQ ID NO: 251615 - DNA, 328 bp, Homo sapiens
  chr2:236716147-236716475
  hypo
attagaatgagaagagggaacggagacaacagacctaatgaagtgcgggctgcccgcctgcatatggagtgcgtttccaggctgagagctttcaaaggctgcctttgtagcacggctttgattgggccgcgggccgccgggcaacaggggtaactcagatcgcctacaagagccccttgtgatcacaggaacagcccgacgtggccctaatttgctctcacagacggacatctgaacactgtttcaggctggtttgtaacaacgaggcaattagttgtgataatcatagccggtgtgtcagctgtgcgctcttgtttgtaatttgcta

SEQ ID NO: 251616 - DNA, 162 bp, Homo sapiens; identical to SEQ ID NO: 208548
  chr2:236722553-236722715
  hypo

SEQ ID NO: 251617 - DNA, 59 bp, Homo sapiens; identical to SEQ ID NO: 208549
  chr2:236727033-236727092
  hypo

SEQ ID NO: 251618 - DNA, 98 bp, Homo sapiens; identical to SEQ ID NO: 208550
  chr2:236733470-236733568
  hypo

SEQ ID NO: 251619 - DNA, 188 bp, Homo sapiens; identical to SEQ ID NO: 208551
  chr2:236738719-236738907
  hypo

SEQ ID NO: 251620 - DNA, 192 bp, Homo sapiens; identical to SEQ ID NO: 208552
  chr2:236739767-236739959
  hypo

SEQ ID NO: 251621 - DNA, 188 bp, Homo sapiens; identical to SEQ ID NO: 208553
  chr2:236741689-236741877
  hypo

SEQ ID NO: 251622 - DNA, 229 bp, Homo sapiens; identical to SEQ ID NO: 208554
  chr2:236750708-236750937
  hypo

SEQ ID NO: 251623 - DNA, 37 bp, Homo sapiens; identical to SEQ ID NO: 208555
  chr2:236751637-236751674
  hypo

SEQ ID NO: 251624 - DNA, 194 bp, Homo sapiens
  chr2:236751879-236752073
  hypo
ggaggacctgagcttcggctgcggccttccagccccctgggtctcactgcttgctgcctcccctttctcacccacacaattctttccttccctccctctgtcccacgctgtgtccctttctcttcctttctttgagttcatttcagaattcctcctcggtgtctgcttattgcatggcacggtctggttgggcc

SEQ ID NO: 251625 - DNA, 228 bp, Homo sapiens
  chr2:236759876-236760104
  hypo
ctgaatatagaccatcggtgcccacctggcgctcctgctgctcggtcggagctgggagggaaacgtggctccactacagacatggggtttgggctgggaggccatggaatggtgaagatgctaagcaaggccatctcctgggaagggcagaagcagcttggccccaggtgtccgcatgtcaccccctttccctaaacttcacccgtccaccaacgcaccatgtgccgc

SEQ ID NO: 251626 - DNA, 157 bp, Homo sapiens; identical to SEQ ID NO: 208557
  chr2:236760926-236761083
  hypo

SEQ ID NO: 251627 - DNA, 268 bp, Homo sapiens
  chr2:236765492-236765760
  hypo
agtgccagccactgtcgtgagctcaggtgtctgagagcacgcttggttcccacgctgcggtccggttggacgtggtagatgtgagaccagtgcctgaaagaatgccgctgtagggaaacatgaagacacacacactcagccacactgtatttaatgggccgggatttgtgtaagtgatctccatggagacgcaggtggtgagcctgagatgctacactttagagcaggagtcatccactcccagatggcagcctggtaccagtctgtg

SEQ ID NO: 251628 - DNA, 127 bp, Homo sapiens
  chr2:236777009-236777136
  hypo
gtcagatgcatgcacggcccccggtgtctgttaaagccgatgaggaatgctgcccgcagagcaaaggcgagtggttgtggacgtgcctgttgataatctgatcttgacatggcgccgcctgcgttga

SEQ ID NO: 251629 - DNA, 150 bp, Homo sapiens
  chr2:236791006-236791156
  hypo
taggaaatttcactccgcttctgcccagtggtctctttggtcggcagggtgttcttctcctgcgtctccgttttcttcagcttggccctattgaagctggcgattccccccacgtctggtttgtctgccattttcttaaaacaatcggta

SEQ ID NO: 251630 - DNA, 166 bp, Homo sapiens; identical to SEQ ID NO: 208559
  chr2:236796532-236796698
  hypo

SEQ ID NO: 251631 - DNA, 345 bp, Homo sapiens
  chr2:236801867-236802212
  hypo
caccatgtctgtagcgcgggtgtgccatgtccatcataaggaagcgccgtgtctgtagcgtgggtgtagcgtgtctgtggcgcaggtgtgccgtgtctgtggcatgggtgtggcttgtctgtggtgtgggtgtgccgtgtccatcataggggtgtgctgtgtctgtggcgtgggtgtagcgtgtctttggtgtgggtgtgccgtgtccatcataaggaagagctgtgtctgtggtgcgggtgcaccatgtccatcataagggtgagccatgtttgtggcgtgggtgtggcatgtccacgagggtgcaccatgtctgtggtgcgggtgtgccgtgtccatcatgag

SEQ ID NO: 251632 - DNA, 376 bp, Homo sapiens
  chr2:236826182-236826558
  hypo
catttaagagggagcgctctccgccgtgacagggaccggggtaataaggagagcttgattaacgtggtgcacttgggggagagatgagaggcttcacgtggtcctgttcgggggaggcaatgaggcaccggcggctctgttgctgctcccggagattaatgaggcctaagagtgcattaggaacagtgacaaaggtttgatctaatgggctcagtcatttttcctttgagtgacagacgcacagaagtaattggctgtgcagaatggcagctcattggcggtacttaaggatacattatccccgttgtgtggcccgcagaggctgtttatcaaaactgctcacactgcagacgcggagtcgcgaagctgctgtttc

SEQ ID NO: 251633 - DNA, 565 bp, Homo sapiens; identical to SEQ ID NO: 208561
  chr2:236839044-236839609
  hypo

SEQ ID NO: 251634 - DNA, 113 bp, Homo sapiens
  chr2:236840416-236840529
  hypo
agtggctccgcagacgccaccaagcagaagccttaaaggaagacatctccaaaccaagccgggagacgcggagtcagcgaggtagctccacaccatagcggtgcgggtctgga

SEQ ID NO: 251635 - DNA, 37 bp, Homo sapiens; identical to SEQ ID NO: 208562
  chr2:236842447-236842484
  hypo

SEQ ID NO: 251636 - DNA, 123 bp, Homo sapiens; identical to SEQ ID NO: 208563
  chr2:236847371-236847494
  hypo

SEQ ID NO: 251637 - DNA, 35 bp, Homo sapiens; identical to SEQ ID NO: 208564
  chr2:236853751-236853786
  hypo

SEQ ID NO: 251638 - DNA, 35 bp, Homo sapiens; identical to SEQ ID NO: 208565
  chr2:236854026-236854061
  hypo

SEQ ID NO: 251639 - DNA, 208 bp, Homo sapiens; identical to SEQ ID NO: 208566
  chr2:236857148-236857356
  hypo

SEQ ID NO: 251640 - DNA, 40 bp, Homo sapiens; identical to SEQ ID NO: 208567
  chr2:236863816-236863856
  hypo

SEQ ID NO: 251641 - DNA, 223 bp, Homo sapiens
  chr2:236868108-236868331
  hypo
tcatattcccgtggccgagctcagcgcccagtggacgggaacccggtccttcttgccatgagaacacccagcccaggagaggtcagggcctggcctccaggtgggtcctctctggtcgctcctcactggtcttgagtcccaggtgacacttcctgcccgacttctgtctcctgccacggcccccctcaattcacatcctaattcaccccgccatcaccttctc

SEQ ID NO: 251642 - DNA, 148 bp, Homo sapiens; identical to SEQ ID NO: 208568
  chr2:236870133-236870281
  hypo

SEQ ID NO: 251643 - DNA, 147 bp, Homo sapiens
  chr2:236870521-236870668
  hypo
aaaaaagtgagatgacagctcatgtttagtgccgggtgctgggtgagcgagggtgggtgagcatccatttcccaggggaggggccccgcgcccatggagactgctggggacaggctggggcagggcggggtggagggtgtcctcttc

SEQ ID NO: 251644 - DNA, 197 bp, Homo sapiens; identical to SEQ ID NO: 208569
  chr2:236872390-236872587
  hypo

SEQ ID NO: 251645 - DNA, 330 bp, Homo sapiens
  chr2:236877179-236877509
  hypo
ccctcccctcacgccaacagaaagaagcaccgaaggaagaaaagcactagcaacttcaaagccgacggcctgtccggcactgctgaaggtaagggttccgcggtgccccgggagagagtctccactgcggaaaattctctgttatttttcaaatgcgtgaaattagacacccttagcacaacaaatgcacagtaatgctggtcaccgtatgtgctttctgtttgcaaggtggcacgagagggcccttgggaccttttcatcactgtctgattctcatattacgcaaccaaatctgctgtcatcactcttggccgccgtcgctggtagcgg

SEQ ID NO: 251646 - DNA, 109 bp, Homo sapiens; identical to SEQ ID NO: 208572
  chr2:236881386-236881495
  hypo

SEQ ID NO: 251647 - DNA, 87 bp, Homo sapiens
  chr2:236897037-236897124
  hypo
tgccatgaatcagtcgcacctgcttcagatactactcagaatttcttgtccttaaatgccacccccaacccccgccccgaagtcagg

SEQ ID NO: 251648 - DNA, 107 bp, Homo sapiens
  chr2:236897390-236897497
  hypo
ttgcacttcagaatcggtgatgcgcactcattcccctgcacccacccttttttctgtggtcagcatgtgtttcccagactgggcgtcactgtcgcctccttgactct

SEQ ID NO: 251649 - DNA, 156 bp, Homo sapiens; identical to SEQ ID NO: 208573
  chr2:236900737-236900893
  hypo

SEQ ID NO: 251650 - DNA, 216 bp, Homo sapiens
  chr2:236901340-236901556
  hypo
actcaccaagaatatcgtggccgctgaggtcctgcacacctggggatgcgtcgtgggcgccgaggagagcgtagcctcctgttaacgtagcctcctgctgctctttggggtagaccagccgtttccacgcacaggctgcacattgtttcatggcctttgcagttgagcttgtgttggcctctttccgtcgtgaaccatggacgtctctccttgacc

SEQ ID NO: 251651 - DNA, 171 bp, Homo sapiens; identical to SEQ ID NO: 208575
  chr2:236909411-236909582
  hypo

SEQ ID NO: 251652 - DNA, 155 bp, Homo sapiens
  chr2:236945110-236945265
  hypo
agctgaacccagaggcgcttctgtgacagagggcccgcagggggactgctgtctcataaaagctaaactcttcatcccacactctgtgtttcagaacaagaagaaaattttgagtttatcattgtgtccctcactggccaaacatggcactttga

SEQ ID NO: 251653 - DNA, 252 bp, Homo sapiens; identical to SEQ ID NO: 208576
  chr2:236949322-236949574
  hypo

SEQ ID NO: 251654 - DNA, 176 bp, Homo sapiens
  chr2:236950837-236951013
  hypo
gaggccagccagggtcggcttggccgggaagggagacaggagcccaggactgctccagacaaaagggaaaggaagcgccccctccaagagtccactcagcagcatagcaggcaggggagagatcaaaagtctgtctgcggcctctctggaagcctgtcctgcgggtgagggaaggg

SEQ ID NO: 251655 - DNA, 211 bp, Homo sapiens
  chr2:236954182-236954393
  hypo
ggcagtgctagcaggtggcacgcacacaggtgtgagggcctggagagcaggcagggccgccctggggctgtgggaccagcggggcctgaagccaggtggaggggcaggagacagtgcagaggtctgagtccgtgccaggaggctgggatcagccacaggccgaggttctccacccaggccgagacacagcgaagtgtcccagttgggcctt

SEQ ID NO: 251656 - DNA, 45 bp, Homo sapiens
  chr2:236970389-236970434
  hypo
ttcttttggagacaacgaaaatgatctggatttacatagtagtga

SEQ ID NO: 251657 - DNA, 165 bp, Homo sapiens; identical to SEQ ID NO: 208577
  chr2:236970494-236970659
  hypo

SEQ ID NO: 251658 - DNA, 56 bp, Homo sapiens
  chr2:236976366-236976422
  hypo
tcatctcttaacagacgttccgcacatcctttccagtatgccgtgttcacgtgagg

SEQ ID NO: 251659 - DNA, 188 bp, Homo sapiens
  chr2:236994423-236994611
  hypo
cctggctccatgggccgcctcaggatgtggcccagccggcttcctttgtgaaggcaagccccacacaaggagcaggactcctggaggggacaatggctgtccatcagtgatagcaaattccagcgtccaggccgtgggttcatctggctgccaggctgggctgatggcagcaacgctgaccacactcg

SEQ ID NO: 251660 - DNA, 154 bp, Homo sapiens; identical to SEQ ID NO: 208578
  chr2:236996175-236996329
  hypo

SEQ ID NO: 251661 - DNA, 143 bp, Homo sapiens
  chr2:236997672-236997815
  hypo
ggtagaaggtacatcaccaccgtccatcacgtgaaggagtagaaaaagtgggatgccacagttgcggcagagaatatccaaaaggaaagggtccaagtcagaccgctcacgtgggtggcagcgtccaagtccagtttgtacat

SEQ ID NO: 251662 - DNA, 93 bp, Homo sapiens
  chr2:236999643-236999736
  hypo
aagtgctgggttgacaggcgtgtgccaccgcaccggccgtaatcgttcctggtaagcacatttctgaacacatcaatccgctgcctgcatgcc

SEQ ID NO: 251663 - DNA, 39 bp, Homo sapiens; identical to SEQ ID NO: 208579
  chr2:237007808-237007847
  hypo

SEQ ID NO: 251664 - DNA, 133 bp, Homo sapiens; identical to SEQ ID NO: 208580
  chr2:237015289-237015422
  hypo

SEQ ID NO: 251665 - DNA, 157 bp, Homo sapiens; identical to SEQ ID NO: 208581
  chr2:237018158-237018315
  hypo

SEQ ID NO: 251666 - DNA, 161 bp, Homo sapiens; identical to SEQ ID NO: 208582
  chr2:237020448-237020609
  hypo

SEQ ID NO: 251667 - DNA, 275 bp, Homo sapiens
  chr2:237022763-237023038
  hypo
tagctcattagctaacggaggctgtgaacggtgatcctcccggggattggaatgaggggaggtgatctactgccggctgcctgctcttgaactggccttccttggggaaaatgaaaggctcagccaagacaagccagggatcccagaagtagaattgcggcctccgagtgaccatttgagtctgtgtgctttgacatcatggcttcttagggcaaatgcctctagacggaatagtctcatcgagaagaagccattgtcagcgtgtcccttggtca

SEQ ID NO: 251668 - DNA, 164 bp, Homo sapiens; identical to SEQ ID NO: 208584
  chr2:237032441-237032605
  hypo

SEQ ID NO: 251669 - DNA, 403 bp, Homo sapiens; identical to SEQ ID NO: 208585
  chr2:237032665-237033068
  hypo

SEQ ID NO: 251670 - DNA, 54 bp, Homo sapiens
  chr2:237034241-237034295
  hypo
gatggggtggttttccgaatgccagaccgaggtgccttacgaaggcagctgcca

SEQ ID NO: 251671 - DNA, 161 bp, Homo sapiens; identical to SEQ ID NO: 208586
  chr2:237037749-237037910
  hypo

SEQ ID NO: 251672 - DNA, 373 bp, Homo sapiens
  chr2:237489568-237489941
  hypo
gcagcaggaagaagatggtacgccgtgtcgtctgcatcctggtgtggctgctggccttctgcgtgtctctgcctgacacctactacctgaagaccgtcacgtctgcgtccaacaatgagacctactgccggtccttctaccccgagcacagcatcaaggagtggctgatcggcatggagctggtctccgttgtcttgggctttgccgttcccttctccattatcgctgtcttctacttcctgctggccagagccatctcggcgtccagtgaccaggagaagcacagcagccggaagatcatcttctcctacgtggtggtcttccttgtctgctggctgccctaccacgtggcggtgctgctggacatcttctc

SEQ ID NO: 251673 - DNA, 463 bp, Homo sapiens
  chr2:237496907-237497370
  hypo
aatgtatgttggcacggcaacatgtcatggggcgagcggcaaacatgtcctgtcggtggcggtggcgtgtctgaaagggccttgggctccaccgtgccatgctggatttgcttccttttagcctttcacatgaaagtgtttgaagctaatcttttcattcctttacgcggggctcgtcaataggacgaacgcattaaaggtttccccaccgttgcgtttctcagggccgttgttaaaagtgtgaattgtgtttcgtgccacactgtaatgagaattttaatttcatgcgcagcccaaagtgtaaatgaaaaatcgtccgttgcccagctatgcagacggtgaatgtctttccctgcgacatattccacactcgttcttgttaatttattcatccatccacacgtttgttcgttcactcactgatggacaagctttagtgcgcgaccactgtgtgccctgctct

SEQ ID NO: 251674 - DNA, 199 bp, Homo sapiens; identical to SEQ ID NO: 208589
  chr2:237542535-237542734
  hypo

SEQ ID NO: 251675 - DNA, 200 bp, Homo sapiens
  chr2:237544239-237544439
  hypo
tttgcggcacattggtagggtagccacgggaggccggtgcacactcctctcacacatcgggacggtgtgaagtgggtgagagcacatgtctgacacaggctggcgcagagccaacccgccgcacctgctgggccccaccggctgttatcctgccttatccacccgccctccccactcccgaagaagggctctgccctctg

SEQ ID NO: 251676 - DNA, 209 bp, Homo sapiens
  chr2:237629784-237629993
  hypo
tggcagcgcttccacggtgacttgagatgatgtatggccacgcacgggcttgttatggcacatcccttgataagtctgtgtaattaattggatgccatctgatgcggcagcaggttagacatttaagaaataaaaagttgtccatgccccacggagcacatctgtttaatggcataattcaaattaatttccaacgattccataagagc

SEQ ID NO: 251677 - DNA, 54 bp, Homo sapiens
  chr2:237925352-237925406
  hypo
caccgcaggacagacgggcattccctctgcgctgaccggcgggagttagagtcc

SEQ ID NO: 251678 - DNA, 56 bp, Homo sapiens; identical to SEQ ID NO: 208590
  chr2:237973044-237973100
  hypo

SEQ ID NO: 251679 - DNA, 165 bp, Homo sapiens
  chr2:237999668-237999833
  hypo
tgattgtggtggggcggtcacaggccatgtgccttttcccagtgttttacagcgggttgattggcaggactgggcttgggaactccttactcgttcagcaagcattctcttgtgcaccgtcgggtccgtagttttattccttcccggagccgcctctcactgaat

SEQ ID NO: 251680 - DNA, 159 bp, Homo sapiens
  chr2:238249170-238249329
  hypo
tttgaagaagacgtcgtttggctcactggcgaaggtgtatacctccttgatgttcaccttcctgccaatgcccaggaccacgaagaagtagcccttgcatttggcctgcaggatgactctctgggcctcctccagctgctgctccggcacctcgcccgt

SEQ ID NO: 251681 - DNA, 186 bp, Homo sapiens
  chr2:238264427-238264613
  hypo
ccacctgcttcagcggaagatcttggccaccttccatggaaaatttgagacaaggggacactgttctcctctacaaaccaacaatctggcctggcccctcccaaaagagacatgctagagttccatgagagtccagcagcactcagtgatacattgctcaggccagaggccgcctgcggagactct

SEQ ID NO: 251682 - DNA, 656 bp, Homo sapiens
  chr2:238280412-238281068
  hypo
atctgctctgaggtcagggtcgtgatgggcgtcagcagtttctgctccaggctgggcagctcccggaaggtgctcaccgagaacacatattcggggctcagcgagatcttcaccagctcctcctggtctgcgttcctggcgatcgtgaaaggggccacgccaaactgcttgagctccaccgccgggtcgtccacctcatcgtcagactttccagacgagatgaggaccaggaactgcgggacgccctcttcaatgcggctccccaggggcctcttgaagatgttcctggacacgtactccagggcattgcccacgttgatctgccgccctcccttgggcctcagccgctgcaccgcgttctgcacttcatccttgctggaatgggcgttcagcaggaactccaccttggggtcatcgctgaactggatgacagccacccgggtggtgtcaaagcccacgtccaggtagtcaaccagcctctctatgagggtgcgaacgtactggaactcaggcccggcactttgggacccatcgatgagaaagaccacgtccctcttgccaccaacacctgcgaaacaaatgtgagcatggcttcaccttcatcgtcaccaaattcttagcgttcatgagccaccgcccagtttgtcatggattca

SEQ ID NO: 251683 - DNA, 535 bp, Homo sapiens; identical to SEQ ID NO: 208593
  chr2:238283029-238283564
  hypo

SEQ ID NO: 251684 - DNA, 36 bp, Homo sapiens
  chr2:238320937-238320973
  hypo
ggaaccgatgcccccgccccacggtccacctccctt

SEQ ID NO: 251685 - DNA, 354 bp, Homo sapiens
  chr2:238359242-238359596
  hypo
gagagacgaggagccgagtaccttttcaacacccacacactcctcaccctttcctcagttcagctcgtccaccccaactacgcacaacagcagcacagcagtaaggccaatggtgcaaggcgccgggctgcccggcctggcacacaagctgcatgggaggtggtgatgcccagccaggtgggcacggacctccccaccctgggtctcaggccaaggccacagggcagcaaaaggaggtgctgtaaggggccagcctgcgctgcatgcccaccttcgacgaatcccagtgaccagggaggagaggcacatgtggctggtggccaccaccgtgaacagggccggcaaatgtttcct

SEQ ID NO: 251686 - DNA, 41 bp, Homo sapiens
  chr2:238392737-238392778
  hypo
ttacaggcgtgagccaccgcgcctggccttatgaaatttta

SEQ ID NO: 251687 - DNA, 144 bp, Homo sapiens
  chr2:238486156-238486300
  hypo
ctgcagggctgctccgttcctctgaggagggcacgttcctgtcctgggtgacctgtgcggccaggcagaaaactgctaggacacacatcagatccttcaccctgaccaggcccaggagactgccagccacggggtatttcaggt

SEQ ID NO: 251688 - DNA, 205 bp, Homo sapiens
  chr2:238486659-238486864
  hypo
tcgtacaccagaagcgcagcgttggcacccctgaagtagaggtggcagacgctgtggtacttctcctggccagctgtgtcccagatctcaagcttcagagaggtggcacccacatccaccacctttgtgaagaacgcacctgaaacagggaggcccagagggcttactcagaggacgaggttgccacatgcggctcaggtgggac

SEQ ID NO: 251689 - DNA, 82 bp, Homo sapiens; identical to SEQ ID NO: 208596
  chr2:238492723-238492805
  hypo

SEQ ID NO: 251690 - DNA, 171 bp, Homo sapiens
  chr2:238540447-238540618
  hypo
gcattaggaactcaccgtggggccttgagacagtgcggtgagcttattatcccctggtggtgccataggtaccccttcctcacccagcaggacggaggccctccccccataactgtttctgcagcctcctctccaagctggcccctctgtggcctgcggcctcgggccctg

SEQ ID NO: 251691 - DNA, 192 bp, Homo sapiens
  chr2:238625970-238626162
  hypo
tttccctgaggtcccaacaccggaatggctctgagcttctgcttctcttcgatggtgttttattccttcatcgcgtttgctttgaaggcatgagcagcctgttggagggggcgtgaaggctgctgggccggctttactgtcctgctctcccccgaggcccttcacctggggaagcttcgtcctgggctctct

SEQ ID NO: 251692 - DNA, 62 bp, Homo sapiens
  chr2:238629646-238629708
  hypo
atgatttatatgcataggcacgttggttgtttctttctcccgagatgaagtcatcttttttt

SEQ ID NO: 251693 - DNA, 131 bp, Homo sapiens
  chr2:238669911-238670042
  hypo
taatcccagcgctgcgggtggccaaggctggaggatcacttaagaccaggaattccaggccagcctggcaacctagcaagattccgtctctagataggtatgtagtatctatataccgttgttgagaaaag

SEQ ID NO: 251694 - DNA, 332 bp, Homo sapiens
  chr2:238706995-238707327
  hypo
acaagccaaaccccgggagggaccacgcggcctgggaaacagttcggcaaggaggccgggcccctgtcccgcctctgagggcggaggactcggcctgcaccggacccaagcgaggggcagtctggcctctgctggcagaagcagcgcttccaagtattttcatatggtgactttgcagagctgcgcggtccagacgagggtttcaggctgcaaagcgggaaagtcttgggggccgctctgcgctccaagacagacgcccacaatctcttctacgtcgtgcaacattcaagcaggcggcctccttcccgcgctttcgcgcccacaggctgggc

SEQ ID NO: 251695 - DNA, 40 bp, Homo sapiens; identical to SEQ ID NO: 208599
  chr2:238785779-238785819
  hypo

SEQ ID NO: 251696 - DNA, 176 bp, Homo sapiens; identical to SEQ ID NO: 208600
  chr2:238786045-238786221
  hypo

SEQ ID NO: 251697 - DNA, 33 bp, Homo sapiens; identical to SEQ ID NO: 208601
  chr2:238793664-238793697
  hypo

SEQ ID NO: 251698 - DNA, 344 bp, Homo sapiens
  chr2:238793972-238794316
  hypo
cgcctgcccctgcccggaggcctggccctggagcccacccacctccctgaggcctgtcgtgagcatcaggagctcccagtacagcatctggggctgcctcggtgccctcgtgggtttgttcatggcggtgtccgccctggaacttgccacatgcccacgagcactgggacccctctgtgctctccctggtggctgtggtgctgtcatccctgtgtgtgctggtggaatagcgtgggctccacggaaaggccctcaggcgtggacaggacagatggcagtgcccagcacagccaggtctcagaggatccaaaggcgagcattgcccaggccgaggccgccctccc

SEQ ID NO: 251699 - DNA, 185 bp, Homo sapiens
  chr2:238794726-238794911
  hypo
actcctgtggcctgcgcaggcatcagccggggtgccgggtccccatggggacgagctgtagacacagctgtccagggctgggcagagtggggcagtggctggggatatgccggccctgcccaggccgccccacgggggtgtcgttccaccttcctgtagtctccttggcgcgcgtgaccgtggtt

SEQ ID NO: 251700 - DNA, 32 bp, Homo sapiens; identical to SEQ ID NO: 208602
  chr2:238820428-238820460
  hypo

SEQ ID NO: 251701 - DNA, 354 bp, Homo sapiens
  chr2:238821616-238821970
  hypo
ctgtggtgtgggcccgttttcccaagaggagcaggcgtggctgcaccttacactgggtcaggagaggagcccagggtctactgacagtgggcggtggcctcagggactgatcctagtctctgtcttgttgggaaccgccgggactccactgtccgtgacccagtctcagccttgggccctcagtgagggtctggtcagtctgctacgccaggccccagcttcctccgcttctaggatgtcaccacctgtgagtggagaagccgagggtgctctggggccagtggctttgggccataaggaaataataagaatgacaacagcagtagcgtttgcgtgagccgggcactgcgctgt

SEQ ID NO: 251702 - DNA, 157 bp, Homo sapiens; identical to SEQ ID NO: 208603
  chr2:238822319-238822476
  hypo

SEQ ID NO: 251703 - DNA, 59 bp, Homo sapiens
  chr2:238934774-238934833
  hypo
tgagtccagctcgccgcccccgcccccacccctgcccggctgcccggggcagctgtggg

SEQ ID NO: 251704 - DNA, 39 bp, Homo sapiens; identical to SEQ ID NO: 208605
  chr2:239005248-239005287
  hypo

SEQ ID NO: 251705 - DNA, 45 bp, Homo sapiens
  chr2:239006885-239006930
  hypo
gccaggaacgcgctccggctcagcgtgggccgcagcaccaccagg

SEQ ID NO: 251706 - DNA, 278 bp, Homo sapiens
  chr2:239010179-239010457
  hypo
ggaccctgtggccagcgggagggcactggggcaggggaccagccagaggtaggtgtcctgggaagcctttctgaccatgagcagagtgggcaggtgtctgcgggcacccgactgcgtgggaaagggccttctccacactggggacgggcccaggagagggcagggttgccagaggtggcctcccaagacctggacctgagtcctggccctcctctcacctcagtcccagcagggagcacctccctccatgttgcaggcagaaacggagggaaggagga

SEQ ID NO: 251707 - DNA, 71 bp, Homo sapiens; identical to SEQ ID NO: 208606
  chr2:239011437-239011508
  hypo

SEQ ID NO: 251708 - DNA, 73 bp, Homo sapiens
  chr2:239039048-239039121
  hypo
aggcctcaatcccagcggctgagcccgcagggtctgcggaggcctcagaggtggcccccggggtgcagcccct

SEQ ID NO: 251709 - DNA, 169 bp, Homo sapiens; identical to SEQ ID NO: 208607
  chr2:239041690-239041859
  hypo

SEQ ID NO: 251710 - DNA, 789 bp, Homo sapiens; identical to SEQ ID NO: 208608
  chr2:239049320-239050109
  hypo

SEQ ID NO: 251711 - DNA, 95 bp, Homo sapiens
  chr2:239051083-239051178
  hypo
cctaggcagtgactgcttaccggccgttcctaagacagccagcatttcccactgagccgggacaccctcgtgccgcctgctggaggccacccagg

SEQ ID NO: 251712 - DNA, 265 bp, Homo sapiens; identical to SEQ ID NO: 208609
  chr2:239056521-239056786
  hypo

SEQ ID NO: 251713 - DNA, 512 bp, Homo sapiens; identical to SEQ ID NO: 208610
  chr2:239059358-239059870
  hypo

SEQ ID NO: 251714 - DNA, 174 bp, Homo sapiens; identical to SEQ ID NO: 208611
  chr2:239065004-239065178
  hypo

SEQ ID NO: 251715 - DNA, 282 bp, Homo sapiens; identical to SEQ ID NO: 208612
  chr2:239074294-239074576
  hypo

SEQ ID NO: 251716 - DNA, 145 bp, Homo sapiens
  chr2:239079153-239079298
  hypo
tgctcctggccgcgcgccacccctcagtgccctatccgcaccaccatcacagtgacgttgtcggccgagccccgctgcaccgccttgttggccagcctgttgcaggctgcttcgtagcgggcgtcggctgcggacttcccttccc

SEQ ID NO: 251717 - DNA, 61 bp, Homo sapiens; identical to SEQ ID NO: 208613
  chr2:239082212-239082273
  hypo

SEQ ID NO: 251718 - DNA, 139 bp, Homo sapiens
  chr2:239083073-239083212
  hypo
aggcagagaaccatactcaacgtgtgagagagcactccgcaaatgccacggctgcgcatgggcgtttaagatcaccacggggctcccaaatcatggaccaagcaagttcaggagatgcggtgcagatggctgcacatgg

SEQ ID NO: 251719 - DNA, 139 bp, Homo sapiens
  chr2:239091203-239091342
  hypo
aaagaggagggcaagcgttgtgcatgctggccgagtgccaggtaggccgtccacaccagtgcctccaggtgttctcgcccctgccaggttcattgtgtctgttttacaggaagacactgaggcacgaagaataagtaac

SEQ ID NO: 251720 - DNA, 52 bp, Homo sapiens
  chr2:239096416-239096468
  hypo
gaagcgtcatctcccgctcagcagggctgctcaaccgcgacactactgacat

SEQ ID NO: 251721 - DNA, 316 bp, Homo sapiens
  chr2:239133161-239133477
  hypo
caaatggactgtaacgatgtgcgcactggagtgttagggaagccgcctgaggtctataatttacttggaaatgcataaaaaataaaacggatcaaagcagggaggattaactagatgtgacaaagtccagtaacatgtgaatggcacactcaggtggtgggtgtatatccagacgcgcaatgtaaaattcccgcatcgctgctgagagccggcaaatgtccgtcgccaggtgttgggggcgaagggaggtctaggcctctgctcctctgcttcagatgccggcaggccccggaggagcgcccgcgacccctcggag

SEQ ID NO: 251722 - DNA, 176 bp, Homo sapiens
  chr2:239147431-239147607
  hypo
ccgggcccacccccgcaggactctggctggcattggtcaccaaggcctccagacactccgggcaatttgggctgtggtcaggctgcccagggctgcgggcaccaagtcgggcccctcagcaggagcctgactcagttcagcctcaggggcctcctccaggtcggagcacaggtcgt

SEQ ID NO: 251723 - DNA, 95 bp, Homo sapiens
  chr2:239167995-239168090
  hypo
gtgagaaatacatgcgggacagaggagcagcatgaatctgaacccgcgcatgacactgtgaagctgcctgggaagtgtggcgctgtggtaggaaa

SEQ ID NO: 251724 - DNA, 190 bp, Homo sapiens
  chr2:239186416-239186606
  hypo
tgcgagtcccgccccgtggagcagttttcgttggtctcatgtccactggagccactgctcatgtccacatcttcctgcagtgggacctggctgggctggggctccacgggctccttggtggggttactggggctgggcggaaattccgcgtatccattcatgctgggctctggaacgaagctggcaaaca

SEQ ID NO: 251725 - DNA, 115 bp, Homo sapiens; identical to SEQ ID NO: 208617
  chr2:239188886-239189001
  hypo

SEQ ID NO: 251726 - DNA, 131 bp, Homo sapiens
  chr2:239189367-239189498
  hypo
ctttctgaaagagacgagaacaataaaacagaaaccataatgagcgagacacataaagagaaccatcctgaaccagagacagatctgaatctgccaatcaaaggacaagagtccaacgcctaagtgcatcc

SEQ ID NO: 251727 - DNA, 78 bp, Homo sapiens
  chr2:239192200-239192278
  hypo
aggctggagcagagcgggcagcggtaggagggcggcagcaaggccagatcacggagtgccttgcgggggcagtcagaa

SEQ ID NO: 251728 - DNA, 55 bp, Homo sapiens; identical to SEQ ID NO: 208618
  chr2:239211886-239211941
  hypo

SEQ ID NO: 251729 - DNA, 206 bp, Homo sapiens
  chr2:239212968-239213174
  hypo
aaaactgggcaggagcgtgccaagtgatgccccagaagccagctgtgtgccagggtgattctcctccaccccggttccagcagcccttcctgctcttgaggatcagagccagtcacccctgctgggacaccgactcctttccttgcttgctcgtcttttggcacagagcctgagtgaccagtgacagccatcgcttattgtccact

SEQ ID NO: 251730 - DNA, 164 bp, Homo sapiens
  chr2:239224075-239224239
  hypo
ttgggaagactctcccgctttcagccaccacagcatcacctgcatctggtgcagcacccctggagggccctgtcatcctgtgaagatgaccgccctctctctaacacctgggagcaggaggctgctgcagtcttgtctaagggcttcatcgtttcagagcttta

SEQ ID NO: 251731 - DNA, 106 bp, Homo sapiens
  chr2:239265745-239265851
  hypo
atacatgttctattgtacctggttccccgcagtctccctcacacatgtgtgatgtgcttttgttgggacctgtggcctcttgccagccactaccctttccttgggc

SEQ ID NO: 251732 - DNA, 241 bp, Homo sapiens; identical to SEQ ID NO: 208620
  chr2:239306052-239306293
  hypo

SEQ ID NO: 251733 - DNA, 212 bp, Homo sapiens
  chr2:239316288-239316500
  hypo
cctgggcttcccagcggcgcaggcactgccacgcccttggccttggctgttggcttaggcaggtggcctgactccggcctccctctcccacctgcttggttggattcaagagtgctggcctcaccttgtcatcagagcatacgtgcagcattaggtggaaagtgcgaagggcagccctcagcacacagcacacggtgcgctccaggcggacc

SEQ ID NO: 251734 - DNA, 153 bp, Homo sapiens
  chr2:239321159-239321312
  hypo
ggcctgcccaataccggtgctttgaacggtgtggaggctgccctgatggcccagcacgtggtcactttcataaaagcgctatatatttttttcacaacttaattactttattgggcttaacaaatagcatttcctgctcgctgtactaaaatt

SEQ ID NO: 251735 - DNA, 38 bp, Homo sapiens
  chr2:239344603-239344641
  hypo
ctaccacgcctctcgcgtgggccgggcagacatcctga

SEQ ID NO: 251736 - DNA, 56 bp, Homo sapiens
  chr2:239467687-239467743
  hypo
aagcatagctggcagcgatccggacagaggggggtgcccaccgtggagaaggttca

SEQ ID NO: 251737 - DNA, 167 bp, Homo sapiens
  chr2:239482480-239482647
  hypo
ctgataacacaaagcttatccgagcgctttttttttcttaaaactcccaattggctgcgtgatgtgctttgtccaacagggccccccgctgagcctctttgggtctcccagagttggccctgccttccctgagccggaagtatcccgccagcctccctgtgccccat

SEQ ID NO: 251738 - DNA, 240 bp, Homo sapiens
  chr2:239494957-239495197
  hypo
agctgctgggggtgcgctggggcggatgaccacaccacgaggctctgtgcactggcaggcccagtccccgtcacatgcgggtccaagacactccacggcagcattcctgctttgacaacacgtttcccacttggagtgaaatcagtccgtgaaaatctctgcctgggactgcctgctctctgcccaagtgcagcagccgcagaacaagcccgattctccgagccccgtcagccgtccatg

SEQ ID NO: 251739 - DNA, 159 bp, Homo sapiens
  chr2:239684265-239684424
  hypo
ggggatggagtgagcgggagctgggttttacgaactcccgttggaggaaaagaatgcggctatactcacagtgtggtgggacaccggtggagggtcttgaacacaggagtggtgcaatcctggttgagttttgggggtcacccccgttgcaatgggtgt

SEQ ID NO: 251740 - DNA, 467 bp, Homo sapiens; identical to SEQ ID NO: 208621
  chr2:239800520-239800987
  hypo

SEQ ID NO: 251741 - DNA, 470 bp, Homo sapiens
  chr2:239888394-239888864
  hypo
tggtgagtggtcagccaggacgtggctccccgtccctccggtgaccaggtgggcactggctcctgatggttcgaagccccggtcagcccccgccatccctaaactagtgacttccacttgcgttctcccccagggtcttcggggcaccccacgggagagagcacctgcaaggaccataacacgtgaggctgtgctgagtcctacgacaggcaggaacttgtacttggcccccggcgacccgggcgatttgcgggtcttcctcttggtttaacgaaggctctagcccggttccggagcccaccaagacgctgaagccatcagttcttggcttgcatttctagagccacccgtgtagttgcgagacagtgagaaagttcgcccgagttgcaatcctgcccgtgcctctgtctaggagcgactgtggcttcgggttaagcctctgtctttacctgtagtgggagatgtctgct

SEQ ID NO: 251742 - DNA, 78 bp, Homo sapiens
  chr2:239925671-239925749
  hypo
tgagaacttcatggaagcctcgcattttgcagcaatgccgggtccgtgcgtaccatcgtctgtcctggttgtgtctct

SEQ ID NO: 251743 - DNA, 43 bp, Homo sapiens
  chr2:239947345-239947388
  hypo
ggggactgcatccacgcttctgctgttccgctgggaccagggc

SEQ ID NO: 251744 - DNA, 321 bp, Homo sapiens
  chr2:239949578-239949899
  hypo
cagctcccgaggaccggcacgcctatggaggggacgccataactccaggccaccaagcccttcccctcactgccccagaagagttttaatctttaggacaacgcaatcagaaccagatgttcccccaaacaggggccgggccaaggcgcgccctacacacagcgccgctgagccaacagagttgcgtcttttgtctggcgtggtggcccacgctgcgcgcacagccagggacccagctgccgacaccttgtttccccccaggcatgttgaccacaaggcacagagccacgctcgggtgggcccaggcgcagcatggggctc

SEQ ID NO: 251745 - DNA, 97 bp, Homo sapiens
  chr2:239957317-239957414
  hypo
ctaaactgggccagcctggagtcaggtgcgtgcagccctgccactctacctccttgcagcgaggcctggagggcgttccacgcgtgggcaccgcggc

SEQ ID NO: 251746 - DNA, 56 bp, Homo sapiens
  chr2:239958980-239959036
  hypo
ggtgctcgcctaggccgtgtgggttctctgtctttcctgttcgctgcatttgtgct

SEQ ID NO: 251747 - DNA, 933 bp, Homo sapiens; identical to SEQ ID NO: 208624
  chr2:239969832-239970765
  hypo

SEQ ID NO: 251748 - DNA, 152 bp, Homo sapiens
  chr2:239971451-239971603
  hypo
acgctggggaggggcggccagtcccagcgggccacggcctccgggacagccgcctgctggtggggcgtgggcacgtgggcacgctgcggcacggcgggaagccgcgagggcagggcagacgccaagaggcccagtggcgtcatcagggtttc

SEQ ID NO: 251749 - DNA, 839 bp, Homo sapiens
  chr2:239973899-239974738
  hypo
gcaaaacagggaccgccgggctgcagcccctggccccggagatgacggctggtgcccgtgcttgaggcgtcaggccagctcgcggtgccagcactgccaggctcggctggccacaggaaactgtcccaccgattcctgctgtttgttttttcttaaggcattgttcctcagacttcagaaaacccagccacaaaaatccaccagagcaataaaaaaaaaggcacaaactcgcatcttccgatggcttttgagaaactcaagccagctcccccagctcacattcctgtttctgtccagttttgttttctttaaaggtccctctgtcccccacccgggtgcagaccccccgccgcacaccgctatggttcacagaggcgggccacagccgtagaaaacgtcctctttaaaaaaaaataagctacaagatgagtcgagtggtttacacagagactgtggagttgtgggtaataaactttaagcaccagttttaatcaagtttgttttgtattattagatctttgatatttgttttctgtgcctcgtgtcaactgaattcggcagctcggccgcctgttgccacaggctcctttcttccacggcgtcccttgcgggacccgccagagtgtgcttggcttccgcgtgtccgtgtgtctgcgcgtcgccggcgtctgtcccgtgttccctgtgaggctgccacgcccaggcgtgcatgtgcgtctcgagacctgtgggcctgggcggcagaaaggcttcccgtggctgttgcacgctgggtgtccctgggtgctccaagagagccccacggtgggacgcaggcgtgacacgggaaagtttcttgg

SEQ ID NO: 251750 - DNA, 205 bp, Homo sapiens
  chr2:239986521-239986726
  hypo
gaggcgtcctctgcgaggtgccctgtgtgctggccacctcgaggcccactgcgcatgctgaggccactcacagacagtgggccagagagtggaccctccctctgcattttccagaacaatgcgaacgatgcctgcacaccagaccccgcgagcgccgtgcttaactacaggggtccgtggcctcctgtgcggcctgacgtttccc

SEQ ID NO: 251751 - DNA, 296 bp, Homo sapiens
  chr2:239997291-239997587
  hypo
taaggggagagagcggcttctcctcgcggtggcctctgcatttagggaggtcccgtgtgaagccgtggggtgccacgcatccccttcccgtggcctcaatgtggcttctctggcaccttcgttaccgacacagcactgcacccttcactcggtcatcagccaacctgcacctgcagcctgaagacgacatctcccctcagcttcccagggaatagagctgggctgggacagcagacaggtgccagccactccccttggtttcccgggaaacaaagctgggccgggatagcaggtgg

SEQ ID NO: 251752 - DNA, 138 bp, Homo sapiens; identical to SEQ ID NO: 208626
  chr2:239999815-239999953
  hypo

SEQ ID NO: 251753 - DNA, 1420 bp, Homo sapiens
  chr2:240002664-240004084
  hypo
gaccccacagccccgttcagccacagaccagtttcagacacgctcatctccaacaagtgcttcctggaatgtgtgcacagaggaaaagctgctacttcaggtgtcatgtgaagccgggaggctcacctgaaggccgccaagtactcagcgtctcccatgggggggtccaggccgccggtgaaagccatgttgacgttgaaacccacgccgggccctgtgcccacctgtggccagaaggagagaaacacacgtcatggaccccgagcgggacctgtctgacaggaacgcctgatgcaggtggcaccgggatgggctcggccttggtgggcccctggggagagcccacgtgtcctgatctcctggtgcatattcattaagacgcgtgtgaaggggccccactgacaggggcacactgacatcagcaagggggcccttttcctggctgctgtaggctctcgccgaccctgcccttggcacaccaaggccctgcactgacatttctgcggacccgccgccctgtgttgtgtgccgtgtgttacatcagggaatcagacctgggtctctctgggcagaaagtgtctccgatgagcctgtcatttcctacttcctctaaaaaaataatatccagaggcagacggagcgtcttcctggatgaaagccctgctgttggagcctctgttcagagtgggcaggctctgaacggggacctggggcgttgtcaaggagccgctgggcctgccgttcctggggccgccatgcagccccgcgccgggcaaaggacagtggacagagccccttgccggagggtgtcctgtggaagacagtggcctgggccctgcccggaggaaaacgggcaccacacacctcctccttcacaaacacctctgtctgcctggatgggaaccagaaacaatatccagcctctcatttgtacttcagacaaaacacaggccacctgtgcacacgcgatacgatgcaggctgacgtctgactgaagttactgtctgggcttaagtgagcacgaaggccgcactcactgctgccgggcagctgtggaccgtctgccccgtgcccccacagcggctccccgcagtccccctttccccccagaggcccttatataccccacctacctcatcaggagccccgctgcctgggaagaagttcccatcgtcgtagcggtggagggacatgtacaggacgctggggtcgctgtagaaagcctgctgggtcccgtttccatggtgcacgtccttaaagagcagggacaactacttcagggctgaggcaggtattggagggtggcctcccctgagggccgtccccaaccccagttgtgcttagtgacaacggctcctgctcaggaatgacattaccctccagctgggcccgtacccggcaggcgcgattctggggctgt

SEQ ID NO: 251754 - DNA, 169 bp, Homo sapiens
  chr2:240014779-240014948
  hypo
ccgctgggcgaggccgagcagggacaccagctcctcacccagttgaaacttgcggtcactggagaggagcaacgcaggagctgatctggtttgaaaaagaggtcaaagcactttacagctcccatttcccagcgccgaggagtggtgagttttccgtgttccaagcccc

SEQ ID NO: 251755 - DNA, 179 bp, Homo sapiens; identical to SEQ ID NO: 208628
  chr2:240015872-240016051
  hypo

SEQ ID NO: 251756 - DNA, 388 bp, Homo sapiens
  chr2:240016397-240016785
  hypo
ctgccacagacttcgaaggggatgagatgctggctgcatacaggatcctgtttcttaaagcgagagccactgcaccccagagccccagccacctgcgccagacaaccttccccagagaaaggtgcccgagtcggcgatcaaaacgctctcggctcacacggcctttgaagccgcacatgggcagcccctgcgtatggaaaacacctggcagcaattattcactttgagggaagcaaggctgcgatttctgtgaccactgggactcgagaagaaacaggacattatttacacattaaaggaacacttaccccaacaccaccgcaagggagccggacgaacacggaggcgagcgagcctgtgggggggagggagacggtcagagaggcca

SEQ ID NO: 251757 - DNA, 55 bp, Homo sapiens
  chr2:240029183-240029238
  hypo
ctgcagctccattcccttcacgacccactgcctcgccagcaccttaactctgagg

SEQ ID NO: 251758 - DNA, 198 bp, Homo sapiens
  chr2:240029726-240029924
  hypo
ctgccccggtcggcgttacctcgcatttgccccggaggcccgtctcctgcaggcgggaccagatgctctggatcctcccggcgtgctcggggtggctgctgctactcccgcaggtgcactggtgcttcagcatcagcgtgtcatacacgaggcctggggcggggcagaggggccaagatcagcgcacatccaggggcg

SEQ ID NO: 251759 - DNA, 127 bp, Homo sapiens
  chr2:240031620-240031747
  hypo
cagaaaagctggagcgtagagagatggagaagcggcaaagcccacacagctgagggtggcagagccagccaggagaccacgtggctaaaggaacgcactgcgtcgctgtgcacggacacgggaagat

SEQ ID NO: 251760 - DNA, 156 bp, Homo sapiens
  chr2:240032302-240032458
  hypo
tgagagtgagaacctcgcagactgcagaacactaagccacgtgatgagaatcatctgaagaatgaagccgtgctgtatttacagaacatttttcttagtgcgtcattaacaagaaatattagatcataacaacatgaagagcgctcctgcctctgt

SEQ ID NO: 251761 - DNA, 552 bp, Homo sapiens
  chr2:240054228-240054780
  hypo
cacagagcctgggcagggcacggtgggcaggtccccatgccaacgagcaagctgcacctgggaggaaaagagggatgagcgcacacagggaagaagcaacgccgagttcagtgcgtttctcagagaggtgagacccatgcacactcgatatccaggttctatcaaaaaggctgttttccaaaaacctgatacacaagattacgcatgctatttaatcgtgcagaataaactgatttagagaaggaaagaagataagtgacaaacatctctgacgaagtgaatcccaggaatcctgaagatcaggcacattttacgtttttaaagacaggcgagaaactcaggtgtccttcactacccacactcgtgccagctgatctagagcatccaagagactcagacgcaacctcagatacattcctccagagagatccgcgtgcctgccactgtggccgcagctcagagaggcactgtgagggctgccccctccctcgttacaccacgggctcctctgctctggacaggcagggacacgaattcaagcttctggagaaa

SEQ ID NO: 251762 - DNA, 177 bp, Homo sapiens
  chr2:240061313-240061490
  hypo
tttcaagctcatccgtcccgagtccgactctagccgtaggacacaggacaaacgcttcgcactgacctccgccgggatgctggggacggcgggcgcgataccgttctccgcgctgacgctcccggagctgttgttgggtgagctgggtccggagcctggggcgctgctgcacgcgga

SEQ ID NO: 251763 - DNA, 40 bp, Homo sapiens; identical to SEQ ID NO: 208629
  chr2:240064716-240064756
  hypo

SEQ ID NO: 251764 - DNA, 361 bp, Homo sapiens
  chr2:240066060-240066421
  hypo
ctaatgccaggagcagggcccggcttagacatgccggagtcatcaaacctggtcccctgggcctggcacttccagcgccatgggaacaggaccacactgggggttgacagcgtgaggcagacacgtgggttttcagaagctcctgagagaaatcgcctatggcaggaaggcctggcagagagggcagcggggcgggtgtacctgctcagccgacatacctgtgacatccaacggacgcttttttagagcagtgaccactggcccgtctttcctgcgtaacagggggctgctccgtctttcggccactttctgctttagcctggaccgtaatttcagattcggttcagaagctgcacaaaaa

SEQ ID NO: 251765 - DNA, 146 bp, Homo sapiens
  chr2:240067065-240067211
  hypo
actgggcgtgggtcggtttctgtgaacagctctgcctgtgtggacagagccatttgcgaatctacacctttcagcccaccgtggtccccaactcatctgcatctggaacccaaacctccggcgcgaggcccgccttgggaagcact

SEQ ID NO: 251766 - DNA, 215 bp, Homo sapiens
  chr2:240077356-240077571
  hypo
tgtgtgactgagtacgttcactgtttccgcccagaactggccaaaacctttggataacagagaatttgtttagcaaaaaaaagcggtgcccctaggctctcatctccaagagccgccccctagggaggacgccttgggatttcccacactgtcttgcagtttgtaggatccactggccacatctgggatgaggcactgcccgccctcagcacctg

SEQ ID NO: 251767 - DNA, 216 bp, Homo sapiens
  chr2:240080393-240080609
  hypo
acaccatgcagagcccgccccaccgcgcacccgccctccagacaccaggagagggcggccctcaccgtcagggcaggtcacacccgcccagccctggtcacatggtcccaggccagaccgcacacgcgtgccctccgcgaagaagcgtccagcagggcgagcagaagtgaagctctatccctgctgcaatcacacccgcaccgcacacaattactc

SEQ ID NO: 251768 - DNA, 152 bp, Homo sapiens
  chr2:240103122-240103274
  hypo
acgcccggcagcagcgtgtgcgcaggaggggcagggagggccgtcagggctagctgcacacaccaagcatctcacctgtatctttcccatggcaaaaacttaattccgaacaaccaacttaaatgaacttcttggggatggtgggataaaca

SEQ ID NO: 251769 - DNA, 418 bp, Homo sapiens
  chr2:240103304-240103722
  hypo
ggcagcgctggcctccgaagactcacaggcggcccatagcacgctggctggagggcagtgcccaggccaggctgcctggctgataaaacctgctccacccacctgcttgctgccagcgcacttgcacctaaatatttaacctctccgtgctgggttaaatgtggcacctgcccccaagggttcctgtgaggactggaagaggtggcatggggagaacactcagaagagctggtctgggcttgcctccgtgcggcctgattgtcatcaaaccgtcacttttgaaagatgtcgcctagagacgccgacttcctgcagacactaaatatcctaaggtaaaatcaggccccctcaaggctagggagatactacctggagcacaccttcctaacgcggtgttccttgccgccacatgcaagca

SEQ ID NO: 251770 - DNA, 171 bp, Homo sapiens
  chr2:240105072-240105243
  hypo
gcagatgccgcgcccgcataaagcggcaggggccaggaggaaagggcggcagaatggacgccacggacggtaagctgccgcccatggatgggaacaccaggtgcagaccagctggggtagggccacggcatccatggctctccaggtgtgtgcccacgtgccctatgtgtc

SEQ ID NO: 251771 - DNA, 173 bp, Homo sapiens
  chr2:240107031-240107204
  hypo
ctatgaagggtgccccgtgtctcgtggggagacatgtgccctgcagggggtgccccacgcctcctggggagaggtgtaccctaactgctggggaaaggtgtgccctgtgggggtgtcccgtgcctcctggggagagatgcaccctgcagggggtgccccgtgtttcctaggga

SEQ ID NO: 251772 - DNA, 183 bp, Homo sapiens
  chr2:240112235-240112418
  hypo
gaagtcaccgtgccgctgtgagagccacaagagcgtgtgccccagaagtggtccagacagacgctcgagacccggagcccgtttccatggtgagacaagcgcccccttggaaaacatgtttaccagacacagccaacgagacgtgctcctggctcttggcacaagtgcgttcctctgggcatg

SEQ ID NO: 251773 - DNA, 458 bp, Homo sapiens; identical to SEQ ID NO: 208634
  chr2:240116630-240117088
  hypo

SEQ ID NO: 251774 - DNA, 188 bp, Homo sapiens; identical to SEQ ID NO: 208635
  chr2:240117493-240117681
  hypo

SEQ ID NO: 251775 - DNA, 36 bp, Homo sapiens
  chr2:240129719-240129755
  hypo
aagaaaacacaagaaaaggccgggcgcggtggctca

SEQ ID NO: 251776 - DNA, 164 bp, Homo sapiens
  chr2:240165146-240165310
  hypo
tggataaattaacattctaaagtgtgtttggtggggggttgctgacatagacaaaaacaatgaaaccgctgtgactcaagagtagtataggtcacacctcactgtgcacaccccactgtgctaacagagctgcttttcagacacgggaacggaagcttagggct

SEQ ID NO: 251777 - DNA, 472 bp, Homo sapiens
  chr2:240167440-240167912
  hypo
tgccaggaataaagacgagcctgcccccaccttctattcaatatgtctttcctgagcatctgctgggtgatctacctaacttgttccttcacgaatatcccaacagtcttcagttcatccccagcccctatgtgttcaagcagacacacacgtctggttcacagctcagcgagcaggccctgagcgtctgggaacgtgagagtgagcaacgcagaggcctggccccggcccagcagaaccggcaacccacactggctgcctgcgtccagtcccgccatggggtctgcctggtgccagcacctgcccagacacagggcagaggagactgcaggggggtgtccagctgctctcacgtgccaggccaggcttgctaacacctgtggcttagtcgggtgatagggacaaaacgtgcaaactgagcccgctggacacgcagactcagcaggcaggcagagcccggtggggaggcaaa

SEQ ID NO: 251778 - DNA, 417 bp, Homo sapiens
  chr2:240168781-240169198
  hypo
atgaaaggtgatgcagctatcggcaatggctggagactagctctgcggtctgctcgtggataaccgcgctccctcgctgccgggccacccgcacagccgggcaaaccaaaaggcccactttttcatgctgtacccaccacttctgtttccccgcaggcatcctactttctaaactaacaccttttcactcccgagaattctaacaaatattatacaattcctacccgcatctaccctccacctggacgtagaacccgtgtgggaggcagtcctgcagggtttggggtggaatatcccccctgtcgagtggagacgaggctgacatgaggagtgaataaacgaacacagataaagaacgaggcacacagtacgtgcggggcgagagactccctttgctcctcccgcttcacctttgct

SEQ ID NO: 251779 - DNA, 41 bp, Homo sapiens; identical to SEQ ID NO: 208639
  chr2:240169831-240169872
  hypo

SEQ ID NO: 251780 - DNA, 192 bp, Homo sapiens; identical to SEQ ID NO: 208640
  chr2:240170922-240171114
  hypo

SEQ ID NO: 251781 - DNA, 131 bp, Homo sapiens; identical to SEQ ID NO: 208641
  chr2:240172542-240172673
  hypo

SEQ ID NO: 251782 - DNA, 511 bp, Homo sapiens; identical to SEQ ID NO: 208642
  chr2:240212280-240212791
  hypo

SEQ ID NO: 251783 - DNA, 309 bp, Homo sapiens
  chr2:240213547-240213856
  hypo
ttctccccgggagccgccgattacatttgcatgaaaatagaacctttgtttgcaagagttcccgctccagtggatccctcctttgtctgcagcacagcaactgatggggcaggatgctggtgtgtgcacacagcccagctcaggacagccacgccaggggctgcgcgcacggcccagctcggcccagctcagcccagctcagggcggccacaccaggggctgcgcgcacagcccagctcaggacggccacgccaggggctgtgcttgcccatcgtggcaaggcaggcaaggggacggccaggatggtag

SEQ ID NO: 251784 - DNA, 504 bp, Homo sapiens
  chr2:240226678-240227182
  hypo
ataggacagtcccgcgctttcttccagccggcctggggcatgtcaggaggcagggcctgtactgcaggctctgtgttcttagacagcctttgcagggggcagaggtgcccactgccacatgggcacacacaggaggctcaccacgtttcttcaaatgcagatgacaaagcagcttgagtaacacaaatacggccacactcatctgaggattgctgctgtgttttctaactgcatggccatgaccaagcagtcggttttcatccaggttggtagtcaggtttctgaaagcgatggcagtcgcctcagggctgacacggggagtctgcttggcacaccttcaccctcgttacattttctggacaatggtagggaacattccttactccgctggcctgtcagcttggctaagcctggtgcaagtggctcgctgtgggtccgcggctccattacgggggagtctgggtcatctgtgagcccaacagcgccctgcaggcacagacagcc

SEQ ID NO: 251785 - DNA, 312 bp, Homo sapiens
  chr2:240232940-240233252
  hypo
cagcctgaactccacgtgtcccctgctgtgtcactggcatgctggtcttgcatggcactgagatgtgtggcacaagcaggcaccaagcccggagacacccgacgctcaccgttagactgggtagcatttgtcaagcgccgagcaaacagtggatgaagtgtcctcagccggcgtcagctgttctgatccgcagaacacataactcctggcactcctttccaagcatccgggaaatgtagaatccaagtgttacaccatccagttgaagatgacagatttacgatataaaacggcacccgcgactgaggactt

SEQ ID NO: 251786 - DNA, 46 bp, Homo sapiens; identical to SEQ ID NO: 208645
  chr2:240234573-240234619
  hypo

SEQ ID NO: 251787 - DNA, 112 bp, Homo sapiens
  chr2:240262930-240263042
  hypo
gcacatgagagagacgtggggcgaaggccgcctttgctcccgcacagccacattgagactgcaggtgttcaggcaaagacagggccaggcagcacctcggtgagcctgcagc

SEQ ID NO: 251788 - DNA, 114 bp, Homo sapiens
  chr2:240265816-240265930
  hypo
cacagcctggcacccggaggcagccacgcacctgcacacctgtccacgtgcgacctgcccccactgccgggtgcctcaatcacagcctttctgttccccgccaagctgtgctca

SEQ ID NO: 251789 - DNA, 1543 bp, Homo sapiens
  chr2:240270280-240271823
  hypo
ccccgtgggctttccgtccacactcccggtttcatgccagggactctggcttcaaggcagaggctctgtgtcctgacaaacgcatcctgccctgccacagcgcatcccctcagggagggtgtggagggctggccgggcaaggggcgtaaggctccagggcctcctttcaaaggagagcccttccaggctaagtcaatccaggttcttccctcaggccgctcacatcattagaaatcgttctttagagcaataaaatcccaacagttaagcagctttgacgtcagagaaccagggcctggctctggcaaagttcagcgggaacagcaataaaaccgtaacacaaaactcacccagcagcagaggactttcacagaacacaggagaggaaagccacacacactgcactagaagggcacttcatcagcagggcaaagccaagtcacatgacaaatgtgagagggggcccatgggcggctggactcccccagcccggcctgcccagggagtgagggcggcacgggcacccacaccaggccacacaggagcagggcccccatgccagatgggcaggcaagggtgagccaggcaggcaagagtgagccgggtgggcagggcgaaggacagggccagctagcagaggacggcacgagagacacacggagggaggggaggtgcagccaggtaggccccgaacaccacgttgccaggactcggctcctcggctcaaggaaaagggacagcggttccgtggctgtgctctgacacacctagaaatttcccgctcaagagagcaaactgaatcctttagtattaatgatttctcttcctcccaaaacccactaaaatgatgaaaagcaggattggaaagcacttccagcaatgcctgggagcggacggacaggtgcatcagctgacaagaaacacagaggaacttcccgaaactagagatctctggggatggagctgcttgggaaggcacacaagcgagtgggcctcgcccaggagggagggcacggttctgggcaagccccatcccccgcctgagacgtgggcagaggccgctgggccaccagccagtgtgtgcaggtggtggtatgcacgtgttgggcacaaggggtcctgcctcccaagggacctccgggcggaagggcagacacggcagggaaagatgacagcggacagggcagaggaggcagccagcagacttcaggccccaggcaaaccacctcagctgtaccccctgcacagatggagagcagagaatgggctgggccaaggggcagccctgccctcaccagtgcggcctgtcttcagcctccaacccactgagagagagaatggagaggtcgtgggtggcaataaggcgcacacaacccaactcacatgggcaggacaggcccgggcaggccggtgatcaaactgaaccgcagcggctgaaattcccacagaaaaggccaaacaaacccagcaccccgcggtttccagagctgagcctcaaagaacccggcctgaaaaggttagagacaagcggatggagaaatat

SEQ ID NO: 251790 - DNA, 245 bp, Homo sapiens
  chr2:240291771-240292016
  hypo
acaggacggcaggccgtctgccctgtgtccccgggactggcaggtcagtgagggtagcatcccgacttttcccaaggggctctgcggggtcaaaacagagtttaaaaatgcaaagacaaccatgcaacccttagccatgggccaccaacaaccgtcagagagtggtgctagaggtccaaaatgctgcgctgagggaggcaccccacagctctgaaatgttccaactccctcgatcccactgaaag

SEQ ID NO: 251791 - DNA, 246 bp, Homo sapiens
  chr2:240298221-240298467
  hypo
tggcccgaaggcacgtgtctactaccatcagtaacatggcctcctggccacaccacacacaccacctgccgggagcacaacacccgccccagggggaggtgatgaacgccatccagccacagattgcccgggacgcctagttttttgttagttcagaccgtgtgttcctgaatacagcctgagtggccacacttgagtaacgattaaaaagccacagtgctcaacagaacacgccactgctatgac

SEQ ID NO: 251792 - DNA, 43 bp, Homo sapiens; identical to SEQ ID NO: 208648
  chr2:240312832-240312875
  hypo

SEQ ID NO: 251793 - DNA, 95 bp, Homo sapiens
  chr2:240316127-240316222
  hypo
gcctcctcacacgccggggccctgggcgaagcggctggagaacaagctgcacacacctgccttggccttggcacaacagtcgcatttgccactcg

SEQ ID NO: 251794 - DNA, 251 bp, Homo sapiens
  chr2:240318370-240318621
  hypo
ctcgtctcttagcccggctgacggagtcttttgccaaagagattttttaaaaaactcttatcctattaaatctgtcaagattttctttaaggtttctgggttggtattgaaagagtagattaacttggtcctcaaatgctttcttccaataaaatcttccaaggtaatcaacagaccgaacaacaaacactaaaagctgctccggctgaagtggacttggagcattagctcccttccgtcacccccacctg

SEQ ID NO: 251795 - DNA, 94 bp, Homo sapiens
  chr2:240319794-240319888
  hypo
ctcggaggaaagcccggccacagcctgtcgccccgctgcctctcagcaacggcagttctctcggcctctgcggctccttcgcgccctacatcag

SEQ ID NO: 251796 - DNA, 38 bp, Homo sapiens
  chr2:240320282-240320320
  hypo
ctgcctgagccgcacgtggccagcgtgccaggttgtcc

SEQ ID NO: 251797 - DNA, 42 bp, Homo sapiens
  chr2:240342330-240342372
  hypo
atgcagcccaaggctctcaccgggcaaagcccccacctgtgc

SEQ ID NO: 251798 - DNA, 120 bp, Homo sapiens; identical to SEQ ID NO: 208649
  chr2:240361083-240361203
  hypo

SEQ ID NO: 251799 - DNA, 142 bp, Homo sapiens; identical to SEQ ID NO: 198787
  chr2:240402418-240402560
  hypo

SEQ ID NO: 251800 - DNA, 48 bp, Homo sapiens
  chr2:240420316-240420364
  hypo
cctgcactgggttccgaggacaatctgggccggactgcaaagggaggt

SEQ ID NO: 251801 - DNA, 128 bp, Homo sapiens
  chr2:240420394-240420522
  hypo
ccagactgcaaagggaggtggggccacaccgggttccgaggacgatctgggccggactgcaaagggaggtggagccacaccgggttatgaggacaatctgggccggactgcaacgggaggtggagcca

SEQ ID NO: 251802 - DNA, 196 bp, Homo sapiens
  chr2:240567504-240567700
  hypo
tggagagttgttcacaagctcgtatgcattgatagtgtggtcctcgtgtggccgatagagttgcactgtggatatatcaagcgtgtgggtctttcgcctgctgaggggcgtctgggctatgccagcgtttgaagttgggaatacgctcagactttgtgactttaccttgcagggcgctgggcatctcagtcttcct

SEQ ID NO: 251803 - DNA, 311 bp, Homo sapiens
  chr2:240582220-240582531
  hypo
caccagtccagagccggcttcgccacccagccttgagtcacctctccacctggccacctacggagaagctcctaggtgattcatttgtcaagtaccgacgagacaccctctggtgtgaggcggcattgttagtaaccttgttatgatctaaatattcgcaggtttggatctcatcgctaccatagactgttggagtttcaagggtggagatccgccattgctttttccatatccgcagaaattcctttcacatgaaatgtgagtctgttgggttcccccccgagaccagcggtggaagaagaagctggagg

SEQ ID NO: 251804 - DNA, 259 bp, Homo sapiens; identical to SEQ ID NO: 208651
  chr2:240599653-240599912
  hypo

SEQ ID NO: 251805 - DNA, 114 bp, Homo sapiens
  chr2:240600458-240600572
  hypo
ggccttttgggctgcgcgcacattcggtgtgaccccctctgtccctctcctctcgcataggggtcagcgctgcatgaggatagagtgtgtccccctcctcgcatgtggctactc

SEQ ID NO: 251806 - DNA, 34 bp, Homo sapiens; identical to SEQ ID NO: 208652
  chr2:240612328-240612362
  hypo

SEQ ID NO: 251807 - DNA, 110 bp, Homo sapiens
  chr2:240618673-240618783
  hypo
gccttttctgtccaccgcaacagacccaggccccaactgtccttcaccacagagcagctgctgatttccttcttgctgcttataatcaaagctctcgtatttatggcttg

SEQ ID NO: 251808 - DNA, 225 bp, Homo sapiens
  chr2:240639523-240639748
  hypo
agctgggcccagctgactatcgctgcggaccctcaggcttctctcactgcctcccagaggcgcaggcctgaactgatgcctggggagctgtgtgaggtgtgcggccccaggacgtcagggcctgtgagaccgggcaccgcggctccaccatttcgtgggttagggcgtgccacacagcaccaccggcaagggcgcgagggggccgaggaaggcagctgtctccac

SEQ ID NO: 251809 - DNA, 151 bp, Homo sapiens
  chr2:240643423-240643574
  hypo
caatgcaccctcaccggatttcagaggcctctgtcactgtgacgcagcagccccattctccctgccccacccaggccctggtgtgatcaacgattcacaaacctcgcgcctcagagtctaacctaagatgaggatccgccccagcaacctc

SEQ ID NO: 251810 - DNA, 743 bp, Homo sapiens
  chr2:240658161-240658904
  hypo
ctccttggtgaggtcgcgtggaggcagtgatgtctgtcggtaccccaaggcctgtgtggaggcagcaaagtgtctgggggacggactggtttcccggctttgctcaagctccgatgcccacgggaggagggtaggaggcagtcgctggtctcggtaggacacgggatgccacgcatggctggttggccaatctgtgtttgggtcaacgcgcccctgtgtgctcggacctggaactgcacctttgtcgggcaccctgagataggaagggctcacaccctgacaggtgcgatcagtcagggcagggaggcgggcagcaggactggccactggccccgataggtgctggtgagctgggcagacactcggggtcttcctcccaccctccaccctgaggacaaggcaggacccccaggagcccccaacccaacgccccccaacccagcgcctcgcttcttccctctcccctccggcctccggaatgtggcgcccagcgacacagacaagcccatcctcaaaagcaccgggtctttcaaggcaggagctctgacgtcatcggagtcacgtgaacctggttccttcacaggttctgaaaaatggacgcaacaaaactagcggtggaaaaagcctttgactcccgccctcaaattcttgccagtgaaatacccggaaaaggagacatggcttttcccttgcaggcaagtcaggctcctgagtgcttctctccaggtcgcagcagggcacgg

SEQ ID NO: 251811 - DNA, 206 bp, Homo sapiens
  chr2:240666723-240666929
  hypo
cactgagagtctggccgtctggaagccaggaccagctctgcccggaagtcgtagagccaggtcagcctccgccttgctccctgcctgcgctgcgcctttgcggcagcagcagcttagaggaggaaaggtggctccgagcaccctcatggctcccgagcgcccgagcccagggacttgggggacagcatcggcgctgagtcctcgag

SEQ ID NO: 251812 - DNA, 120 bp, Homo sapiens
  chr2:240672186-240672306
  hypo
agcctctcaggcatcggcgcttgtccctgggatctccctgggcagggccaagccaggcgggtcattctcctgggagcaccgcactcattcccaggctctacctagcggcgctgtccggac

SEQ ID NO: 251813 - DNA, 130 bp, Homo sapiens
  chr2:240687707-240687837
  hypo
gagctgtttgagggcagggccgtatcagagttgcctgtgcactctcacacccagcgctgtgccctggggacctcgccagcacccagaaccttttgttggagaagctggcggtcatggtgatgggaggtgg

SEQ ID NO: 251814 - DNA, 194 bp, Homo sapiens
  chr2:240690338-240690532
  hypo
gtctcccatcctgggctggacggtggctcggcaaagtcagtccctcacacatcctcgatccaggtcccgcacgtgccccggctctgaggtttagcctgttggctgatggggggaaaggtgtatggggcctttgtcgacagcacatatgccgggctgtggagtggggcccagggtgcctgcgagtgtctgcactc

SEQ ID NO: 251815 - DNA, 380 bp, Homo sapiens; identical to SEQ ID NO: 208653
  chr2:240700324-240700704
  hypo

SEQ ID NO: 251816 - DNA, 253 bp, Homo sapiens
  chr2:240725285-240725538
  hypo
agggttttaagttccgatgtagcgtcattatcctggcgatgtagcatcgttatcctggcgccgtagcgtccttatcctggcgccgtagcatcacagcacacctttccccggttcaccacctctgttgccagcggccaccagggaggacccttcagtgctccagcagcagccaaaacatgttaccgcaaattcttaacaagattcaggaggaaccaatgtggttgtctcgcaggcttgacgagccagtgccttg

SEQ ID NO: 251817 - DNA, 206 bp, Homo sapiens; identical to SEQ ID NO: 208654
  chr2:240733615-240733821
  hypo

SEQ ID NO: 251818 - DNA, 105 bp, Homo sapiens; identical to SEQ ID NO: 208655
  chr2:240734677-240734782
  hypo

SEQ ID NO: 251819 - DNA, 139 bp, Homo sapiens
  chr2:240735060-240735199
  hypo
acaggcccgggtgacgggtgccttcagctgctggaggagccctgccattcccaggaggagggcgtcagatctgccgccggcacacgcagagcacccttcccaggcactgatggcacctgctttccgagtgcctctctga

SEQ ID NO: 251820 - DNA, 187 bp, Homo sapiens
  chr2:240747276-240747463
  hypo
catgctggagcatggcgggctggagtcctcctaaaagggggacatttggacacaagcaaatggggagaagggcacgtgaaggtgaaggcgcagatcaaggtggtgcttctgctagcccatgaacaccaaggctgccggcaaaccccagaggctggagagaggcctggagctgcggctgcctcccagc

SEQ ID NO: 251821 - DNA, 90 bp, Homo sapiens
  chr2:240750695-240750785
  hypo
gggccttccggggccgggtgcggaggaatcctgagtcgctccctcacactctctgggccagaactcagccacccaggtccctggcagcag

SEQ ID NO: 251822 - DNA, 138 bp, Homo sapiens
  chr2:240756517-240756655
  hypo
gtgggactccgtctcagaaaaaaaaaaaaaaacatgcggtagccgctatcttgcatgtctgctgcgccatttaattttaacatccgcacactggtgaaaggtgagcgctgaaagagcgatttcttgggaaactcaagt

SEQ ID NO: 251823 - DNA, 138 bp, Homo sapiens
  chr2:240809618-240809756
  hypo
acctgggacacctgtcactccgatggagaatcctggacacgcagcctcacctgggacacctgtcactccgatggagaatcctggacacgcagcctcacctgggacacctgtcactccgaaggagaatcctggacatgc

SEQ ID NO: 251824 - DNA, 90 bp, Homo sapiens
  chr2:240905550-240905640
  hypo
ggagtgttccagggcgaggcctggagctgggaagggattttagacagtgcactgggaggcaccctgcccagtcaccgacaacctgggctg

SEQ ID NO: 251825 - DNA, 146 bp, Homo sapiens
  chr2:240905881-240906027
  hypo
ggatctgtactttcttctcccggaaaaccccacaggaccggacttgttcccacccgtgcatcctgattcatatacaggaaagactggagaagagacagtattggacacgctcatcaaacccactcgtgatttcccccaaatatctg

SEQ ID NO: 251826 - DNA, 324 bp, Homo sapiens
  chr2:240906448-240906772
  hypo
gttcccagttttcccgtcataaataacaccgatgtgccccctctagatttatgtgcttgagataaatttctagaaatggaactgcttgcttaaggaaaaacaataaacagagcaatagatgctgacgcagccatcggaatgggttgaatttaataacgccaagatgctgctccagatcattatgctgctgcttacacttcggggctgattcagagccttggtttctcgttatgaatttataccaggctcttggccttttactgcctcatgcatgggtcggcaaactgtagcccacagatcaaatctcgccgctgactgcttctg

SEQ ID NO: 251827 - DNA, 58 bp, Homo sapiens
  chr2:240927101-240927159
  hypo
gatgctacatgcaggcgcagcgcccagggaaggggtgggcagccgtggggcgaatgcg

SEQ ID NO: 251828 - DNA, 141 bp, Homo sapiens
  chr2:240928844-240928985
  hypo
caaaccacagccaccactgccgcggatatggatcgtgctcttcccagtccactgacattgggatttgcagtgcaggctgcaactcacccgctggttcccagcgaaacttacacacgcctcgaacctaatggaatcttgcca

SEQ ID NO: 251829 - DNA, 241 bp, Homo sapiens
  chr2:240930582-240930823
  hypo
gaacccaaggctcacgggatccatgaatcatgcttccacagacagccacagagctgcgaacctgcggcaagctgaagatgagtggacggtaggtatagcgtcaggagcgtcctagtaaaaaccgcgtcgctcatacacggttagtgatccaataatgcaaatgcccctccaagaaactgctgccaggataacaatgatcgtttgctttcctaagtgtatttatgtgcgtttccacatgggt

SEQ ID NO: 251830 - DNA, 86 bp, Homo sapiens
  chr2:240940091-240940177
  hypo
gtcagctccactcacggtacatgccccagacgggtggaccattttcaccttttataccatattattttttatgtttagatacacaa

SEQ ID NO: 251831 - DNA, 139 bp, Homo sapiens
  chr2:240965863-240966002
  hypo
tcagaaatgatcatgcgattgtaaaacagtgggaatgcagctgtgtaaactacggccggttctatggatgtttctataattgaagaattgctttttgtcaaaaatacggattcccggtccccaacgcaggagggtctgg

SEQ ID NO: 251832 - DNA, 82 bp, Homo sapiens
  chr2:240966216-240966298
  hypo
tcacagcacgcagacgtaacttctcacaacctgtttgcgtggatgttttgttgtacctgagcgagttagaaaaacaccacct

SEQ ID NO: 251833 - DNA, 193 bp, Homo sapiens
  chr2:241068023-241068216
  hypo
ctctgtgatgaaggcgatcaggtataaaaaccgagaaaatacctctttgtcagtgtaggtgaagacacatcactgacaatggctggagttttgccacgggagtgaccgtggctgggcccgtcagctgcagtccgatcacccaggtcatcactcttcctgacagcctcacggtgacagccgagtcacacggaga

SEQ ID NO: 251834 - DNA, 173 bp, Homo sapiens; identical to SEQ ID NO: 208657
  chr2:241069130-241069303
  hypo

SEQ ID NO: 251835 - DNA, 195 bp, Homo sapiens
  chr2:241130457-241130652
  hypo
cccaaagtcggcggcgggggtcttggggcatctgggtggctctgggaccagcccacccaacataggaggggtcacccaggggttctaggtttgtcgcatccctggcggctcacccaggacccacggtcattcaagcacaccattcctcatcccctcattcagccgacacttgctgagcaccgccttggcgctgga

SEQ ID NO: 251836 - DNA, 253 bp, Homo sapiens
  chr2:241157270-241157523
  hypo
acaggtagcatgcaccgcctttccgcacctgctgtagtccaaccacacgggcactgggcggtggccttgatctcagtccccgttgctcacggggtctcagatcccacctgtgaggggctgtgctgacccgaggccccttccaggacccgcggggttcacaattcaagtgactcaggccctagaaggcttgtaccatacaagtgcaggttgacgccccatagcagggctcacagctttgcgctgttctagatcc

SEQ ID NO: 251837 - DNA, 214 bp, Homo sapiens
  chr2:241175124-241175338
  hypo
gagctctcggtccccgagcccggtcaatacctgagccaggcattcttaacctcctgtgcaccgaggccccatggcaggtagtgaaagttagggacccctcatcagaataatgtttttaggtgcataaaataaaatgcatagaatcgcaaaggaaacgcattgcattgaaattgttagcacaggtgagagctgagttttccgcagagtgaggtgc

SEQ ID NO: 251838 - DNA, 99 bp, Homo sapiens
  chr2:241196841-241196940
  hypo
cgcattggacggagcggtgtggccccctaagatgctgaccagccccggccaatcatctccagccacagccacccagggcaagtatttgtaggcccagct

SEQ ID NO: 251839 - DNA, 72 bp, Homo sapiens
  chr2:241196970-241197042
  hypo
aggatagagggtgacgcgggtggtgccgtccacccagcttccccgcaggcttcgttcccagctcacccacct

SEQ ID NO: 251840 - DNA, 141 bp, Homo sapiens
  chr2:241197102-241197243
  hypo
acaaatatcgtgagaccacgcagccctgggtttgagaaccaaaaagccaagaaatggtgcgtgggctcagcagaaatgactgtcctgggggctggaacggacgatgtggcgacatcatcagccgaccgtaaacaccaggct

SEQ ID NO: 251841 - DNA, 154 bp, Homo sapiens
  chr2:241226633-241226787
  hypo
ccaggggcggtcagcggtgaccgtgtgtgccaggggcagtcagcggtgaccgtttgcgctgaggacggtcagcagcatctattggattccctccctcttggggctggtgtgagcagccattccctgagcagccctgtcccgcacacaggcagct

SEQ ID NO: 251842 - DNA, 114 bp, Homo sapiens
  chr2:241262543-241262657
  hypo
gggagacgaaatgacggggcatccaataagccccaagtcggcccgcccctccctaccggagggcagtggaggccccgccgggagtccaggctccgccaccgccatcagacccga

SEQ ID NO: 251843 - DNA, 285 bp, Homo sapiens; identical to SEQ ID NO: 208659
  chr2:241286544-241286829
  hypo

SEQ ID NO: 251844 - DNA, 121 bp, Homo sapiens
  chr2:241306456-241306577
  hypo
catgcacatgcaaatgcacacacacgaatgcacacacgcacatgcacatgcaaatgcacacacacgaaggcacacgcacatgcacacacgaatacacacatgtgaacgcacacgcgaatgc

SEQ ID NO: 251845 - DNA, 311 bp, Homo sapiens
  chr2:241314526-241314837
  hypo
ctcggtttccccaccgctctttggattcaagctgctgcaaagccctccccagcctgggtgtcgagaagttgcttggcccagtcgcatggcacgcccaggcagtggggcccgcagacagcgtgggcaccgtttacggatgaatcgacgagcccctcttcgcctccatccctacgcgatgcacttccccattctcctgacaccgcatgggctgtttctgacttccagctaccaggagcaaggctgccatgacctcctgtgtgtgtacatcgtgctgccgtcacacgtgccccgatttccgcagggtgcccacg

SEQ ID NO: 251846 - DNA, 194 bp, Homo sapiens; identical to SEQ ID NO: 208660
  chr2:241328246-241328440
  hypo

SEQ ID NO: 251847 - DNA, 172 bp, Homo sapiens
  chr2:241338271-241338443
  hypo
tgtccagcaggccacggggcagcccgcaggcgccagggtgtggggtgccccacttcatcttttcacatccactcggagtgcatccccccaaaactctgagcgtgtggggctggtgggggcattgaggctgtgctgcctccccaggtccccccaaaagcgagtgctgggttcc

SEQ ID NO: 251848 - DNA, 340 bp, Homo sapiens
  chr2:241350508-241350848
  hypo
aggtgtgagggaggcggccccaccatcgcaggtgcgagggaggctggcccccagcatggcaggtgcgagggaggcggccccaccatcacaggtgcgagggaggccggcccccagcatggtaggtgcgaaggaggtgggcccccaccatcaaaggtgcgagggaggcagcccccaccatcgcagctgcgagggaggcggccccaccatcacaggtgccagggaggccggcccccagcatggcaggtgcgaaggaggcgggcccccagcatggcaggtgcgagggaggtgggcccccagcatggcaggtgcgagggaggcgggcccccgccatcgaaggccc

SEQ ID NO: 251849 - DNA, 348 bp, Homo sapiens
  chr2:241352750-241353098
  hypo
ggagtggacggacgcgcaggagtgccacgcggggccagacagtctgtgttgcgttgcactgggctcctcggctccctcacacggagtgggtggagctgggaggacttgggtccagtcgggacacccggctctggccttgccctccccgaccagccatggggtcctctgtgtcctcacatgacagccagccccactcgcttctgctatgatgtctgccaggggccgctggatccagtgacgctgaaccccagggaggggttctcaggtgcatcctgagacagcaggcctcatgactcctccccactccctctctctctccatcggctttgtggccgtgttgtcatggga

SEQ ID NO: 251850 - DNA, 236 bp, Homo sapiens
  chr2:241364406-241364642
  hypo
accccgcaaaaacacgcacccatgtgcccctggtggcagagacaaacacagctacagcagcgctcttgaaaccacacgattgtccagccacggtggcctgggcatggagaccacaggcgctcacaacggaaggccacctgaggacgagaagtgggcagcaacgcaggtggtgctcaggatcgagagaccgaggtcagcgccagggagagtgccaggcccggcggcccagtccatgg

SEQ ID NO: 251851 - DNA, 213 bp, Homo sapiens
  chr2:241373310-241373523
  hypo
ctggtcagattaagaggaggcgtagacagtgacggggtaactatagagcctcaggccgggttaacctcaagtccagcttcctaggcccaggcagccctgcctgatcccgcagtgcgtgagaccacacagagagagagcgggatcgtgggcccaggctcctgaccgtgctggataaggtgtgcaggcagccacgccaggcccaggcaagaagga

SEQ ID NO: 251852 - DNA, 73 bp, Homo sapiens
  chr2:241378904-241378977
  hypo
ggagcgggcaccagcgtgccctggagcctgtaccaagcacccactcgttgggcccctccgaaggaatcttttc

SEQ ID NO: 251853 - DNA, 599 bp, Homo sapiens
  chr2:241379290-241379889
  hypo
gcgtgaggaccgagcggagcccaggggagccctgatccgacagggccacctgcgtgatgcaatggcctgggtccctgctggaccgccaagcctcccatgccaggcaggccacagcactcctcaggcacagatgcccccacccccatcccatccccggtgtccccgggccttttcacaggagagaaagggaataatcgtgacctcctgtgaaggtggccaggagggagaaggtgctggggctgtgcacctcgtgggcagcctcgggctgtgtcccccctctccccggacaccctctgcaaaggcccacacacacccctctcagttaatggcatccggtaccctaagagcactcatgaacccgggtgctcttagaacacggggaaacccggcttgtggagcgtttcccatgactgtctggttaacacatcagacggaaggggtctttgtagacctgttttacaaatgagtaaaccgaagcctggtgaagcgctcctcttagggccagatctggctacagcattgaccactgcccagtaaagccaggccaggctgcttgtcccaggctctgcacttcttggaaggctcgtgcttttcccagc

SEQ ID NO: 251854 - DNA, 798 bp, Homo sapiens
  chr2:241380567-241381365
  hypo
tccctacagcaggacggggggcatacctacctggtggccgaaccgcagggctgcacatcagacctcggaggagagcttagtgggtgtctgagcatgcccatgtctgttctatggcatccatgtgcatggcacaggtgtcagccatgggctggcactagacaggagacgagccaggggaggggctcacccgaagccacactggtcaggtctggcctggggccccacatctgccgtgcccgggccagtgagaggctggacgccttttcttaagccagaccgtcctcacagggcctggctcagttatttcagatcaagactggacccgtggtggaggctggggtgggcactcctacatgcggggcctctgcccagccctggccctgtccagtgtcgacgtgcccagagccctgagccggcctggatcttgccagtcgccagcacagccctgtggggcccgggatcttgcccactttacgtgggggctccagacaggagccgcctgcccggagcctgggctcctcgctgccgtgcctgtggtggcttttctttgtctgggaacaggcctgggcaggtgccctgagccgcttgaagtctcctgacggggtggggggtgcagtgtagggtgttgaggcttgggccagggaagcgggcggttctccctccacctccaggccccacacccaggcgggagcacgcagcagccaggtgttgggtgagggctatgctgaggagcagggcccagagctgcagcctccttggctgcccttggcccgccgtgggtggcggggaagtacaggt

SEQ ID NO: 251855 - DNA, 114 bp, Homo sapiens
  chr2:241381612-241381726
  hypo
ggcatcggccaacacgtaccctccctgttgccggggcccccgcctgggcaggcctgagctccacacagggtggggaaggccccgagtccctcccggtaccgggtggggctgggt

SEQ ID NO: 251856 - DNA, 157 bp, Homo sapiens
  chr2:241502881-241503038
  hypo
gcgctgggattacaggcgtgagccacctcgcccggccaatccactgagcatttctaagctgtgtatctcttaacaagacccagtcaggccctattggaacagggcttttaccacctaggcggaagctcagccattgaaatgacgatcaggtgcttca

SEQ ID NO: 251857 - DNA, 95 bp, Homo sapiens
  chr2:241513636-241513731
  hypo
tcgatgtcatccacgaggtggcccacagttggttcggcaacgctgtcaccaacgccacgtgggaagagatgtggctgagcgagggcctggccacc

SEQ ID NO: 251858 - DNA, 41 bp, Homo sapiens
  chr2:241541853-241541894
  hypo
cggctccacctgagcgctgccctcgctggcagccctgcctt

SEQ ID NO: 251859 - DNA, 807 bp, Homo sapiens
  chr2:241541924-241542731
  hypo
caggccccttggcgcccttcagccgtgttcatgattgtctcctggcctctgctgtttagaggtctaatgccctccgcccccggcgagccaaacccagtgatggtggttcctgccaccagcttcctgtggcaccgctgccactcccgccaggctcctggggcaccgccaccactcccgccaggctcctggggcaccgccggccactcccgccaggctcctggggcaccgccgcccactccctccaggctcctggggcaccgccgccactcccgccaggctcctggggcaccgccgccactcctgccagcctcctgcggcacagctgccactccctattaaccagcatggcacaggtgagcggtgtgaccttggtcttcccagggaaccagtgcttggcagctcacaccacacacgcctacgcctaccctccaccagccacagcagttgtggcatctctaccctgcccagcaaaagtggaagtgttgcctgtgccgctaggaacctccaggtttgctccacctccaggggccttgccagggtgtcaaacctgtgtctcgggacactgctgttaggtctccagcttccctatcaggcgcctcagcacccagtcctaccagtgctcccgcctcccgtccccagctggctgggcctgcagccccctcctgtgccccgagctggccgggcccgcagcccactccctggtcactggatgttgctgacacttcactcggtcagagccctagcacccaaggggggccagggcctgacgggggtggagcgaggggtgggccgcgtctgtgcaggctc

SEQ ID NO: 251860 - DNA, 48 bp, Homo sapiens; identical to SEQ ID NO: 208665
  chr2:241543042-241543090
  hypo

SEQ ID NO: 251861 - DNA, 54 bp, Homo sapiens
  chr2:241543513-241543567
  hypo
ccctgggaacacctgcggggagaagcgcccttggcctggcggcttgggggagac

SEQ ID NO: 251862 - DNA, 81 bp, Homo sapiens
  chr2:241544693-241544774
  hypo
tgtgggctgaagaccgtctccccaccatggtgggaagggacaaagggtggccctggcagatccggacgggcaggactgggt

SEQ ID NO: 251863 - DNA, 194 bp, Homo sapiens
  chr2:241544975-241545169
  hypo
agagcttctggggtgagtgtcgagatcctgtgtcctgagagcggtagtcagggagagggctggtcggggcagggctgcccgggcaggacacaggatgcggccggccaggctggggccaaggtgttcagacctggactttgggctcgtgctttcttcatggttgcgccttgctcgctgtcccttggagtcttcat

SEQ ID NO: 251864 - DNA, 47 bp, Homo sapiens; identical to SEQ ID NO: 208667
  chr2:241555876-241555923
  hypo

SEQ ID NO: 251865 - DNA, 33 bp, Homo sapiens; identical to SEQ ID NO: 208668
  chr2:241581263-241581296
  hypo

SEQ ID NO: 251866 - DNA, 115 bp, Homo sapiens
  chr2:241631410-241631525
  hypo
cctgctcccagtgggcgcctatgaagtcttcgcccgggaggcggtgggtgcgggtgcagctcgggccctgctgcctggagatgaggacgctggtcgagctcgggccctgggctgg

SEQ ID NO: 251867 - DNA, 40 bp, Homo sapiens; identical to SEQ ID NO: 208669
  chr2:241655278-241655318
  hypo

SEQ ID NO: 251868 - DNA, 160 bp, Homo sapiens
  chr2:241660274-241660434
  hypo
ggtcatgggtcagccgtggtgccagaagccactccgggagcctggagctcactcacctcaggtcagtggcaccgtaccgcccttcaaccagagaggggcaagtggaggagggggtgagagtggccacccctagaggggacatcgacgggtcccggagcag

SEQ ID NO: 251869 - DNA, 242 bp, Homo sapiens
  chr2:241661235-241661477
  hypo
ggcactgacgcagacgtggctgtgtgtgtactctctgttgaatgtgtgcgtgagcaggcgcaagcactgtggacagagcacacgcgtggtcaggggccaggcctcccgggaccctgctcagacagccttgcaggctcttctacccacccctccccagacacaggtgggttccgacgccagagcacagtgggtcaaggtgggcagcacctccaccccgcccaggtcatcgggtgagcccagga

SEQ ID NO: 251870 - DNA, 339 bp, Homo sapiens; identical to SEQ ID NO: 208670
  chr2:241689804-241690143
  hypo

SEQ ID NO: 251871 - DNA, 149 bp, Homo sapiens
  chr2:241697789-241697938
  hypo
ggaaccaggggaagcggtcatagaaggggtctccgccggtcaccacgttgtcacagtcctcgatgacactggagggcacctctgcagcgcggtcgtacatctcccgcatcaggtccagacgctgcctgcagggacggcaggggtcaatg

SEQ ID NO: 251872 - DNA, 1184 bp, Homo sapiens
  chr2:241721305-241722489
  hypo
tggaactcctcacacgggccgcacagctcttcacaattcacacagttctctgtccccacacagccaccgccgagttccctgtgcgtttcccagtgagcacctcgcggatccccgtggtggcgcccgccctgtctcacgcattcccacgctggctcactccgttcctgccggtccctcgaacgctttcacggctgcccacgcggttcctcacacagtccccagcgtcgccccaggcagcttcacacgtggcgcgctccgcggcacctccgactccacacgcgcccgcctccccctgtggccccgtcacgcctacggctgctcagagtccagcacgcctgtcacccgcttcctctcagggctccccagccctctccatgtccgaggggctcctccgcgcccctttcagctcctcccagggcccccacgccccccgggccacactttcccacctcggtgtctcccagcagcccccgccccaggccctgccgtgaggccgccccggacgccctccgtccccgcaggcacaggcaccgcacggggcctcccacacccgctttcttccttcccgggatccacccccacgtcccccatctcccagcgcactcactgcccgccccgcccctcaccacagggcgccaatgcagggcagacaccgccaccagcctcccgcacctgccccggggctgaaggaagccgcttaccttgttgggtccggagtcctgaaaaggaaaagacagagagaggctgaggcccggagcgaagctggcgcgggctgtgggggcggaagagcaggcggcccggctgcctcgccctggccatgactcaggctctaccaccccgtggtctcctagacagcagctcccccaggcagggtccctccagggccgcccttcccgggcccaggcctgggctgcctgctgcacggggccaactgtggccatagccccactttacaggcggggaaactgagggtcccgggagaaaccagggcccctaccccttctccagcatgtgacactctggccatctccgggctctcccttgaacctggccacctcccagacacagggcccggaaacgagggtgacaggggcaggatggggcgccaaagaccctctggggttctggctatggaagccgggccgggccactcaccatttcagccagggcggagatgaccttgc

SEQ ID NO: 251873 - DNA, 457 bp, Homo sapiens; identical to SEQ ID NO: 208674
  chr2:241724229-241724686
  hypo

SEQ ID NO: 251874 - DNA, 173 bp, Homo sapiens
  chr2:241727448-241727621
  hypo
cccgccccccgcttcgtgcctgtgggatgatgccctgctggtccttctcctgcttgcccatcatggtgtaggacttgccggcacccgtctgcccataggcgaagatgcacacgttgtatccctcaaaggcatgctgcagcatctcctcgccgatgtcccggtacacctgcttc

SEQ ID NO: 251875 - DNA, 156 bp, Homo sapiens; identical to SEQ ID NO: 208675
  chr2:241750153-241750309
  hypo

SEQ ID NO: 251876 - DNA, 112 bp, Homo sapiens
  chr2:241776236-241776348
  hypo
ggatctgcttgtggcgcactggacggccgggtgctgactcagtgtctggccagcagcaactgggctggggccagatcccatcgcagcgcagccgtgtcggcaggcagctgct

SEQ ID NO: 251877 - DNA, 208 bp, Homo sapiens
  chr2:241842760-241842968
  hypo
cccagggcgttccccggggggcccagccaggctccggccaaggcctaccctgtgggttcttctagtctagccatggccctggtctgggagccccataatggacaccccgcagtgaggccttggggggcatgcacggggctgggccagccctcgcgccctggaaaggcatcctggggggactccgggccaccgccggcaggcgtgggct

SEQ ID NO: 251878 - DNA, 115 bp, Homo sapiens; identical to SEQ ID NO: 208676
  chr2:241858348-241858463
  hypo

SEQ ID NO: 251879 - DNA, 90 bp, Homo sapiens
  chr2:241861964-241862054
  hypo
cggctggagaccaccgaggctcagctgcggaggtcagagctggagcacagcgtggatctggaggaggcccttggccgtctggaggctgcc

SEQ ID NO: 251880 - DNA, 183 bp, Homo sapiens
  chr2:241862320-241862503
  hypo
gggagaccccaggccgagtggaaacagtgaaacactcagcctcctgggctcagcgtgggcctctcacgcaaccaggcaccaccgtcccagcctctgagagcggctcagcagcatccctattatagtagctgcatcacgattgtacccatcgctatcagacccctcccccgctccacaggccag

SEQ ID NO: 251881 - DNA, 103 bp, Homo sapiens
  chr2:241865150-241865253
  hypo
ctctgtcaggtgaacgcgctcctgcgggagcagctggaacatatgaagaaggccaatgacgcgctgggccgggagctggccgggatgacgggcagcgtgcagc

SEQ ID NO: 251882 - DNA, 268 bp, Homo sapiens
  chr2:241872036-241872304
  hypo
ctcaggactgtctgcgcggtccccaccaaatcatggccctgtgctctgggcccctctatcccttcctctctgcaccttgaaggtggcccaggaggacgcccggtgcctggagctggcaggtagcagcatcactgaattgggggagccacggcgcccactgaggagcccccaacgtgccacatccccccatcaaggggcgtccccaccacacatctgctccccagccaccctggaccccgcactgcaggccatgcgggcagccatagag

SEQ ID NO: 251883 - DNA, 75 bp, Homo sapiens
  chr2:241872595-241872670
  hypo
caggagcagctgtccgaaagccggcgggagctgtgggccgcacagaagctccagcaggagcgggctcgggagcag

SEQ ID NO: 251884 - DNA, 160 bp, Homo sapiens
  chr2:241896341-241896501
  hypo
gtggccagagcccagcgataggacatagatgcaggagttacagcaggatctccaagggcccaggcggcctgaggagaggctgtttgtgttgaggtcggggctgctgtcctgggtggcaggggctggccctgaatagacacaggtgcgagggtgccctggg

SEQ ID NO: 251885 - DNA, 297 bp, Homo sapiens
  chr2:241896820-241897117
  hypo
acacaggccatggtgccaggcgcgggaggcagcccccttctctgcccattctgaacgggagcccttctcactgactgcacagaggcacgcgcaggccgcctgctggggggccggggcgtccaggcagcggggccttgggggacgctcggtgactcggagccgggatggagggcttgtgccccatccccagggcactgcgcagcgggagagggcgctgcaatgaggaggcggctgctggagtgtcgcttcacctcctcctgcctgatgccacaacccggactcctagtcccttcaagc

SEQ ID NO: 251886 - DNA, 146 bp, Homo sapiens
  chr2:241971087-241971233
  hypo
ggcccttactggctctagtccgccctgtcccctagacggtgccaccaccccaattctacggccctcgcgtctttgtttgttttccgagtgttagcacttacgttcgccttcctgaagcagagcacgtagtttctctaatgttgact

SEQ ID NO: 251887 - DNA, 91 bp, Homo sapiens
  chr2:241988026-241988117
  hypo
tgccatctttctgcgcccccacatgggaggctcctccctctcttcgtggcaggagtccccgatgactgtgagtgccgcaacggaggcagat

SEQ ID NO: 251888 - DNA, 218 bp, Homo sapiens
  chr2:241989256-241989474
  hypo
gacccctgcttcaacggaggctcctgcgatgcccatgacgactcctacacctgcgagtgcccgcgcgggttccacggcaagcactgcgagaaaggtatggcgggcaggggcgtccgggccggcgtcagcaccctggagagcgcccgcggtccgccgtcctgcttctctgctgtctctctccttgtttcgcgaattgctgacctcgtctagagccttgc

SEQ ID NO: 251889 - DNA, 250 bp, Homo sapiens
  chr2:241992477-241992727
  hypo
tgggccctgcagtcgggtcgggcagaggcagggcggtggggaggggccaggaaggcacaggaccgtgcgagacaggctgccgtgccttgcagaggtggactgcggccccccggaggaggtgaagcacgccacactgcgcttcaacggcacgcggctgggcgcggtggccctgtatgcatgtgaccgtggctacagcctgagcgcccccagccgcatccgggtctgccagccacacggtgtctggagtgag

SEQ ID NO: 251890 - DNA, 729 bp, Homo sapiens
  chr2:242004393-242005122
  hypo
cagtgagggagccacgagggggtcccctctccctagagggcccaacggtctccaagggcagagcgtctggccgctgcttgcccaggccccttccctgaggaacagggaggggataaaatcccccggtgggcttgaaacacggtcacacattcaaaagtgtgaccctcctggaggtacgtggccagggacaaagaaggactctgccagcgatggctgtgtcaggcccaagagccagacccggctgagccgccgacgggagccaggcatgcatagctaacggctgaccagtcccctccccttgttttgacccaaaccctgaagagctcttcccaccgacggccctcaagatggagagagtggaggagagtggggtctctatctcctggaacccgcccaatggtccagccgccaggcagatgcttgatggctacgcggtcacctacgtctcctccgacggctcctaccgccgcacagactttgtggacaggacccgctcctcgcaccagctccaggccctggcggccggcagggcctacaacatctccgtcttctcagtgaagcgaaacagtaacaacaagaatgacatcagcaggcctgccgtgctgctggcccgcacgcgtgagtgtccccgagcctggccgtccctgcccagcccctgcccctcgagggcagcgctggccccggcacctgcagggcggctgtcatgccgtccaccctcctagttcttgc

SEQ ID NO: 251891 - DNA, 352 bp, Homo sapiens
  chr2:242009176-242009528
  hypo
gccagcccacaccccgcctcggcactgtaccattctccataataaagaatctggcttccagcaaggctgcggcagcccatgtccggttctcaaaccgtgttcttgccagaagaccctgtgggcaccccctcacctctccctgctcctgcctcatccagggcccctgcctccagcaaacctgaccgccgcccgagtcactgccacctctgcccacgtggtctgggatgccccgactccaggcagcttgctggaggcttatgtcatcaatgtgaccaccagccagagcaccaagagccgctatgtccccaacgggaagctggcgtcctacacggtgcgcgacctgctgccggga

SEQ ID NO: 251892 - DNA, 492 bp, Homo sapiens
  chr2:242010983-242011475
  hypo
tctgcagcccccagggatggcgctgacagacgctggcaccagggaggacaccaccctcgggtgctcaagaacagaccgcccccggcgcgcctgccggagctgcgcctgctcaatgaccacagcgcccccgagacccccacccagccccccaggtacatgccccacccatcggccccatcgcccgaggcggcgctcggactgtggtgaccctcccaccctctctgcaggttctcggagcttgtggacggcagaggaagagtgagcgccaggttcggtggctcacccagcaaagcagccaccgtgagatcacgtgagtgccagggcctccccacccaccttggtggcccaccctcgtcctcactgccactctcaccaggtcctgtcccctacatgatgagcccacccccaccgccagcgcagtctccagccagtgacccccaccccgactgtgcacaaggcgcggggctcgtgggccgccggcagcatgcacct

SEQ ID NO: 251893 - DNA, 220 bp, Homo sapiens
  chr2:242021672-242021892
  hypo
ctgcccttctttgtcgcagcctgtataaaggtgtcccgcccctgcacaaggctgttctccgagacaaaggcctttccagtctgggagggaggcgtctgtcaccacgtgtaagttggtttctgtcctccgccttaccgcatttgtcgtgtgttcttgactcctcaaagtgctgtctcaaagctacccagctaaccctgaggagggacgatggctgcagtca

SEQ ID NO: 251894 - DNA, 148 bp, Homo sapiens
  chr2:242065197-242065345
  hypo
gctcacatccctctcggcctgtctgtgtgaccactgaggtgggggctggtgggaggtggagagacagactctagcgtgacacccccacgcttctcctgctcccgacgggatctccccaggctgctgggaggagcggctctctaagtgt

SEQ ID NO: 251895 - DNA, 92 bp, Homo sapiens; identical to SEQ ID NO: 208685
  chr2:242076563-242076655
  hypo

SEQ ID NO: 251896 - DNA, 110 bp, Homo sapiens
  chr2:242102770-242102880
  hypo
tcagaacctggatgcgctcaccaacctgacagtcctcagtatgcaggtacggagcttcctgagccgcccttccctgcgagccctggcagggccagcgctgctggacacaa

SEQ ID NO: 251897 - DNA, 314 bp, Homo sapiens
  chr2:242122192-242122506
  hypo
cctcccctccgtgcggcagatcgatgccacgttcgtcaggttctgagtccttcttggctcctcatgtggtccctctcctcggaagaactgcccagccacgggtttttaacccacctgttgctcctgaggtcgtcactatatcaacagtcacaaacccaatggcaataaaggcactgacgatagctggcgcgcgcgacgtcacacaccattttcagatgccgttgcaattaaatcttgccacactgtcctcctgggtgattgttgacagttattgtagccacagagagaacataagacacgttgcgttcattcgc

SEQ ID NO: 251898 - DNA, 934 bp, Homo sapiens
  chr2:242128594-242129528
  hypo
tcccagcctggggccggggccgagtcctaacactgagacctggctcgggcttcagggttaggcaggtgcaggcggcccaggctcagtctctgtccctctgggcctccgctaatgtgaagtgaagggtagaactagaaggctgcccctccgacctcctgcggcgcctccatggtcacaccctccggtcatcgtcgcagctccaaatgccagccccagctcgaaccctctccttccagggccacagatgtcgtgctcctggccccgttttgccagcccaagactaggagccacggcacctgtcctcccacagagagagacccccggggcgaaggtgcgggaggaagctgggacccccaagagttgtgaggccgggctccatcaggcccgccttgctggggagctcagggcctatgggtcctggcactgggtcctcaggccatgagcgaaggcaggcgacttgaggggtttcctgtccctggctcacatggctccaccctacggataagagagggagaggtgtctgtactccaggcccacctttctgggccttctcaggctccactgagtacccaggcagagtggacggcattcagggctgggggacacgggcactcactggatggacagacagacgcctgctgtgccaggcctgccagacgctcccgccccggcactggtttcttcctggagctcgtggctggctagggggttctccatgtgctcatggccaggagagtctgccgagccagcccagccccattctactccgagtcgagtctgtaaagtgagctcactgcaggcagtgtggtggccccaggaacgggtctcacccatcccctctctgacccccatccccacccggccttgctgggtgcaggagcaggatgctgcggcgacgggcccaggaagaggacagcaccgtcctgatcgatgt

SEQ ID NO: 251899 - DNA, 45 bp, Homo sapiens
  chr2:242130373-242130418
  hypo
tctggccctgcctgccgctccccgcgcctgcgcatcctgtgcccc

SEQ ID NO: 251900 - DNA, 52 bp, Homo sapiens
  chr2:242142973-242143025
  hypo
aacaatttgccagtccgtacccctggagggcagcgtgcgtgggggcctggac

SEQ ID NO: 251901 - DNA, 178 bp, Homo sapiens
  chr2:242148773-242148951
  hypo
ggagtactggaagcggaagagcgccacgctggcctaccgctgggactgctctgactacgaggacactgaggtgagccacccccgctggaccacggtcacacccggcgagggccgccactgagcaccggctcccttccaggagaggcctcggccccagtttgccgcctcagcccccatg

SEQ ID NO: 251902 - DNA, 67 bp, Homo sapiens
  chr2:242169267-242169334
  hypo
tccagggtgcgtcccgcaccacaaagcctctggaaggtgccttggcctcttcgtgtgctgggggttt

SEQ ID NO: 251903 - DNA, 359 bp, Homo sapiens; identical to SEQ ID NO: 208686
  chr2:242169867-242170226
  hypo

SEQ ID NO: 251904 - DNA, 138 bp, Homo sapiens; identical to SEQ ID NO: 208687
  chr2:242190665-242190803
  hypo

SEQ ID NO: 251905 - DNA, 222 bp, Homo sapiens
  chr2:242209285-242209507
  hypo
ccgcatccaccctccgccctcccacgcttgcttgctgactctcacctggcatggtctctcactcaaggttgtcccgggctccaatgtcacttcttaaacccagacacccacccccttatcaagctaggttctgggcaagtctctagtgcccagtgacagccacactagaagtctgcaaaatgcagttccgtccatgtcagcccgcaccgactctccagcacg

SEQ ID NO: 251906 - DNA, 120 bp, Homo sapiens; identical to SEQ ID NO: 208688
  chr2:242268832-242268952
  hypo

SEQ ID NO: 251907 - DNA, 172 bp, Homo sapiens
  chr2:242277164-242277336
  hypo
acactctcaccctgaaggaacgggagcggctgaagaaaagggtgagtgaggctggcgtcctgccctccctctgggtgcgactcgggggcatggggatgaagaaaggagtgtgttcccacgctcagtctgctcaggtgtcgggaggcagggcgggagaatttttcctgcattt

SEQ ID NO: 251908 - DNA, 255 bp, Homo sapiens
  chr2:242277632-242277887
  hypo
aagcgcctctcacccgccagcagctcctgtggtgtcccagttttagtgcctcttccgtgtatgtctgtaaagcctctttattgattctctgctatatatttttaaattgcttactttgttctgattatatgctccttaagaaagtccaaatagtttatatatgctaaactctaaaaatacaaatccctaactgaacataccggtacgtgcataaaaatacaaatccctaaatgaacataccgatctgtgcgtgta

SEQ ID NO: 251909 - DNA, 502 bp, Homo sapiens; identical to SEQ ID NO: 208690
  chr2:242350119-242350621
  hypo

SEQ ID NO: 251910 - DNA, 283 bp, Homo sapiens; identical to SEQ ID NO: 208691
  chr2:242353962-242354245
  hypo

SEQ ID NO: 251911 - DNA, 42 bp, Homo sapiens
  chr2:242354475-242354517
  hypo
ctccattgtacatacggtcagaccatgcgtgcagagctccat

SEQ ID NO: 251912 - DNA, 85 bp, Homo sapiens
  chr2:242357376-242357461
  hypo
gggccagacacctgctgagtcggatttccaggtgctcgaaattgctcgaaagttggaaatgtacggcatcagatttcacatggct

SEQ ID NO: 251913 - DNA, 85 bp, Homo sapiens
  chr2:242393498-242393583
  hypo
aggagtggccctttctaatttacagccctattaccccaccctagccatggcctgtttgcaaccccagcagcgtcatagcagcaca

SEQ ID NO: 251914 - DNA, 208 bp, Homo sapiens
  chr2:242435159-242435367
  hypo
cccaggctcctgacggcctcttgggtgtgcagtctgcggtggcagccctgacaagccaccgcaccacgtgggtctgaaggtgtccccaatgcacagggtctcaggagcagcaatgactggcccagaccccacccccagagctgctgcccaggggcgccgggaaggggtccctgtgtgtggaccaggacttggcgcatctgccggcggc

SEQ ID NO: 251915 - DNA, 222 bp, Homo sapiens
  chr2:242435718-242435940
  hypo
gcagccacacccacgagtgagcactggacctcaccccacgtccagcttcttggtgggggtgctctccccgaccctatggcacggccgccctcacctctgcactcgctccaccaggtgcaccatcagcttgtctgagatgccggggcaggactcctcggccaggctgaaggcgttctccagctcctccagcgcacccacgctcccgccgctctgcttgtgctt

SEQ ID NO: 251916 - DNA, 409 bp, Homo sapiens
  chr2:242436356-242436765
  hypo
tgagcctcctgtcaccgggtgtcacccaccctcggggggctgtggctggatcagcaggctgcccaggacctggacccgagtggctgcttcccgctggggcctccacatgggctggggccaacgtccctcgaccgtgctcctccctttgccgtcctcaggcaggccctgccttcaccacctctcacccacatcctccatcctccctccccaggctccaggtggggctcctggagggcacacctgggcccaagcccgctggccacgccctgggcacacagatcctggctgtatcacatttctgaggacggtgctgactgcccatcagcaggtgacgttgatgcagggtcacgtgactaaccagggcggcacctgcccggggatggaccccgactaaaccttctctgctttc

SEQ ID NO: 251917 - DNA, 413 bp, Homo sapiens
  chr2:242438422-242438835
  hypo
aggcaggcctccacgaactccttgaagggcttgctgtgctggccctccagtgtgggtgggctgttcttgggaatcaggaacaggacgcgcatggggtggaggtcagagtttggaggctcccccttggccagctcgatggctgtgatccccagggaccagatgtcagcctggacagaacacaaggactgttgctgccctgagcacccgagccaggcatggtgcccgcacctgcccgcccgctgcacccaccttgaagtcgtaggccgactgcttgatgacctcaggtgccatccagaagggggtgcccacgaatgtgttcctcttaatctgcgtgtctgtgagctgccctgctaccccaaagtccgccagcttcacgtcaccctgctccgagagtagcacgttggcagctgctt

SEQ ID NO: 251918 - DNA, 287 bp, Homo sapiens
  chr2:242439377-242439664
  hypo
gctggtttcctcagcgtacaaggaaaccgttacaagtagtatcttctggaaagggagcgagacaggactgctcagtttcagggtggccacaaggttctctatactccagaccctgggcaccactagccacttgcccctcacaggccccggcctctctaaggtcagtggggctcaggacgttacaagagccacatccacccccagcaggacctttgatgtctcggtggatcttgcgttcggagtgcagataatccaggcccttcagaatctcccgcaggatcgtggca

SEQ ID NO: 251919 - DNA, 341 bp, Homo sapiens
  chr2:242440834-242441175
  hypo
acatggaagagagccgggcacagcaccagcagggtccccgcctccccacaacaggcacctttaggtaggagccaaagtagcgggtgatgtaggggctgtcgcactgactgaggacagtgatctcctgctggatgtcctcgatctcatcctcggcctcctccaggtcgatgatcttgatggccaccacctcctttgtgtggttatcgatgcccttgtagacctccccaaacgagcccttgccaatgcggtcgagcttggtgaagagctcctcagggtccactcgagagtgctgtggggccagggcggggacagagggcagacagcgccggtcacaagaggcg

SEQ ID NO: 251920 - DNA, 77 bp, Homo sapiens
  chr2:242459133-242459210
  hypo
aggcactgcgcccggcagaaagaagaatttctataaacaaagagtgccattgagccatgcgacgatctaggatgtgt

SEQ ID NO: 251921 - DNA, 660 bp, Homo sapiens
  chr2:242523726-242524386
  hypo
caccacacccagcccccttcttaatttcttagggaacgctttggaaaacaaacatcagcagataaaaaaaaaatgtacagcctacgcaagtgataatattcaaaatcctcagccataaaaataaaggccttttatttggtttttctatgccagtacagaaacatctggacaacactcttgagcctgcagaggctcacggccacacccacttctgccgcagggactgtctgttgaggagccgaaccgttgaggcacagtagccaggccctcccgagggctccagaagctctaggtttacggggtcaccttcttgtaggtgacgtgaagatgctgagtcattggctgtgtcgtggttgccatggagaccgtctgctcaagtttgccttcagaattcagcctgaacttccgggtgatctgagcaggagaatggaacaaagatagcttagttttatcttcaaaagattcaatcaatgcctgtgcgcccactgcatgccacacactcatcacgggctgtgagccaggcagtggccctgccagaggagggtagacacacagcccagggcccctgggcatgtcacaatccaggtgcccttcagctgcctccagaagaccaccaggggaacacagggattgtttatttagaagtcaccttttttgtcg

SEQ ID NO: 251922 - DNA, 201 bp, Homo sapiens
  chr2:242554491-242554692
  hypo
ttgaaaacactgcgcgaaaagaaagaagccagacaaaaacgtatatattctatgattccaattagatgaaattcgagaccaggcagaaaggatggagggtggggaatctgaacggtgacggggaggggcttggaggggagtgcaaaggagaacctggaccgctggacgtgggtgtggctgcacaagcgcctgcacctgcca

SEQ ID NO: 251923 - DNA, 302 bp, Homo sapiens
  chr2:242566820-242567122
  hypo
ggcaagcaagaccgcgaacacgtggttcatagacgtgctaacaatgtaccctcaaggaatcgctgctggcggagaagaacactacgtccacagaacgccaccgggcactgcctctggagcgtggcttcaacccacctctgaagcccactggcccgcatccttcagtttggggaacctgcccaaaagcagacactggctagcgagctgaatagacaagtgtgcggcgctttccacataaatccctaaagaatgacccaaagagtctgtcactgaagaacaaatccacacggacagcaagaacc

SEQ ID NO: 251924 - DNA, 402 bp, Homo sapiens; identical to SEQ ID NO: 208697
  chr2:242572245-242572647
  hypo

SEQ ID NO: 251925 - DNA, 560 bp, Homo sapiens
  chr2:242578416-242578976
  hypo
gggtccaggctcgccgcaggagataccccatctacttggtccaccggtgggcacctggtttgcactatggcacggataccatggccaccatgactgtatgctcagcccctggcgggagtgggtgtgtgggtgagtgagtgccgggtcccgccagctgtttcaagcgcaggcaccagagtgggctctgcagagcttacagctagacatgtggcaagcaactcccacggcggactccagcgtccagacaaagggacagtggattctggtgtccagacaaggggaaggtagtggcgcccaagcaggggtgcttacaaccctgaagcccaagagggggtgttgcagagtgtcagcagccctgttactcccattgccctgctccaggctatagctctggggctggctccgtccccgctgcttccctttgctgcctcctgtcacgtggggtgtcacagtgggtggctgccctttgccggcagagggcccagggccacagtgttacagccttctttgtacttgcattcattgggtccctagttcttgtcccacgtccaagaagaatg

SEQ ID NO: 251926 - DNA, 71 bp, Homo sapiens; identical to SEQ ID NO: 208698
  chr2:242585229-242585300
  hypo

SEQ ID NO: 251927 - DNA, 222 bp, Homo sapiens
  chr2:242599563-242599785
  hypo
cactgcactccagcctggccacagagcgagaatccgtcccccgccccccaaaaaaaagacctcattcagagccacagccgtaactgcgcacagattcacagtgggagtgggtcctgccctgtgactgtgggtgtgccaggtcaccacacaggtgtgtgctgggtcacagacacgccccttccctgcctctccattctgtttcttcatcgtctggccatcctc

SEQ ID NO: 251928 - DNA, 252 bp, Homo sapiens
  chr2:242600213-242600465
  hypo
cactgccccatcctccctcccgtgtttggggaaatcacttaccccctcgttccgcacgcgtgctcaggatctcaccaagtcacacctcagtccctggcctcggattagggaggctgttgctgggtgcagtggccaggaaggcgcaagggtcagggcttcctagaacctccgtccctctgggtgcaggtagcactggtgggagtgttgggggcagcttgtctgtgtggactccagctccgtcccttcgggagt

SEQ ID NO: 251929 - DNA, 201 bp, Homo sapiens
  chr2:242602197-242602398
  hypo
atcaataaagcgggccgggcgcggtggctcacgcctataatcccaacttcaaaaccaataaagtgggccgggcgcggtggctcacgcctataatcccaacttcaaaatcaataaagcgggccgggcatggtggctcacgcctataatcccaacttcaaaaccaataaagcgggccgggcgcggtggctcacgcctataatc

SEQ ID NO: 251930 - DNA, 207 bp, Homo sapiens
  chr2:242606339-242606546
  hypo
ccatttgtgcagccggctctcgggggaggggtaaacaaccctggtttacaccgttgcccaaggggtgagtgggcgtgaggcacgtccatcagtaggcacgtgctgctttcgttctgcaagtgtcaaggcgagtgtcgaggatgaaagcatgaggcgcttgcagggggtccttggaaccaggtgccactcctcggcctgacggggagc

SEQ ID NO: 251931 - DNA, 390 bp, Homo sapiens
  chr2:242608061-242608451
  hypo
cgcatgagcatcgcggagcttgacccgtccatcgctgtggtacgtggcggccacctgagcacacaggcatttggtgctgaatgctgtttgggaatgacgaggaaaactttcggatttttgcgttttttttttcagcatgttgggataagtactgtgttcacgtggttgggaatctgaagggtataagagccggaactgtgtccttgcaccctcacgtccctcccccaggcaccacctcctgtgcagccttcatggccttcgagtggcccagagagcgtgtgtctggatgtgagcgtgtgtgggcgcgtgctgagtgtgcatggatgagtgtgagccatggtgagtgtgtccccctcacacctacatttaaacacacgggcggcccctcca

SEQ ID NO: 251932 - DNA, 214 bp, Homo sapiens
  chr2:242608728-242608942
  hypo
gcagttaaccgaatcgggggctctgttgtggatgctccgccccatttaggaggaagaaggcagatctgggcctgaaatgggacggtctctgagctgtggcgcagccccagagtgcacaccacgctccatgcacctcctgggcagggtggcagtagtggggaacatgggctggagctctgtggctcacactttttgtttgtttgtttgtttttga

SEQ ID NO: 251933 - DNA, 33 bp, Homo sapiens
  chr2:242609242-242609275
  hypo
acctagtcacgaattcctcgtcgaactagaatt

SEQ ID NO: 251934 - DNA, 184 bp, Homo sapiens; identical to SEQ ID NO: 208700
  chr2:242610782-242610966
  hypo

SEQ ID NO: 251935 - DNA, 206 bp, Homo sapiens; identical to SEQ ID NO: 208701
  chr2:242611928-242612134
  hypo

SEQ ID NO: 251936 - DNA, 596 bp, Homo sapiens
  chr2:242616805-242617401
  hypo
ctgctatcccacctgcgttccgggaaacgaaaagctgcgtgaccagcatcatctgcaggcacagccagtcgggctggggcgagaccctcggccctgctctggaggaggagctcaagggactgaagctccgcgggccgtggccacaagcgacagtgctggcgcccgacgtgccagaagccctggctgccgcctggaaagaggccacgtgggcagcggtgggcacgggcgactggagtctgggagagaggtaggggctgcggtcgggaggagcagaggcggccagcctgcgagtccactgggaggggagagtccagcgtcctgggagcagagccagacctgggactgctgagattgaaggaggcaggactgaagggagaggcagcacacagcaccctcctgaacttagatggccaggtgctgctgcagggcccatgcccagcgagaggccgcaccagaggacacagtggcaggaacaggctggcgctcgtgtctgaagaggggctgaggatgtggaggattgcgcagactctcacctgacccaccagacaaagcgccaaatgtcaacatttagcaaaactcatcgggttagaatttgc

SEQ ID NO: 251937 - DNA, 713 bp, Homo sapiens
  chr2:242617756-242618469
  hypo
ggaccagacggaaacggcagcagctttgctgacacaactgtgccagccaccacggtgtcatcctgagccacttctccacgcttcctagtgtgcaattctgggattctcaccttccagttcaaagtcgtgtctttcatgagctggtggaaacaccggagcgcccgctcctggaaagccccgttctcatagcgctcatggccaaacgctccccgcttggcagcatccgccagctgtaactggaggaacaggaccaggtcgggtttgggaaggcccacgtctggctgtttacaccaatctagggaaaaattctgccaagaaagaacccaacagttaaagcttagtgtagtctaggtttttgtttcgaaagtcgtaaaaacaggaaaaaatgaggggacatttggtgaggtaccaagatgtgagactgtttatattgtggctcgtttaatttttagaacctcaaacgtgtcggtttctccagtgtcacctttgtttttcctttgtaaacagacaagtggacagaaaagtaggtagatagaacggctgccagtccccgccacccacagcccaggccccatggaggccctcccagcacagctacaggcctgctggccaggagcaaacagtctatgtacagaacccctggagacccccggcctagaacgcctgcagcacagagcagctgggtccggacacaggcacgaggtccttggcag

SEQ ID NO: 251938 - DNA, 164 bp, Homo sapiens; identical to SEQ ID NO: 208706
  chr2:242618723-242618887
  hypo

SEQ ID NO: 251939 - DNA, 103 bp, Homo sapiens
  chr2:242618947-242619050
  hypo
ctgaagcgggaggatcacttgggcccaagagttgttatagcgagctttgcttgttccactgtactccagcctgggcaacagagggagacgccctctttcaaaa

SEQ ID NO: 251940 - DNA, 37 bp, Homo sapiens
  chr2:242620782-242620819
  hypo
ccgtataccctccacgaacataaattcaaaatgaatc

SEQ ID NO: 251941 - DNA, 120 bp, Homo sapiens
  chr2:242636478-242636598
  hypo
agagagacagactccgtttcaaaataataataataatataataatcaaaaattggaagtaaccaagatgctctttaataagtacatgggtggccaggggctgtggctcatgcctgtaatc

SEQ ID NO: 251942 - DNA, 120 bp, Homo sapiens
  chr2:242636838-242636958
  hypo
gactctgtctcaaaaaaaaaaaaaaaaaaagtacatgggtaaactgtggaacatccggacgttggaatatttttcaaattaaacatgaactagctattaagccacggaaaggcacgctgg

SEQ ID NO: 251943 - DNA, 219 bp, Homo sapiens
  chr2:242637018-242637237
  hypo
ttccaattacatgacattctggaaaaagcaaactggaaacagtaaaatgatcagtggttgccaggggcctcgggagggggagagggatgaatcgggaagcgcaggggatttttagggccacaaaactatgctgtatgacatgtaatggggggtagctgacattatacatttgtcaaaacctataagaatgcacaaggcactgggcgtggtggctcacgc

SEQ ID NO: 251944 - DNA, 79 bp, Homo sapiens
  chr2:242648697-242648776
  hypo
ccagcgcgtggagcgcctgcagaagatccagaacgcctacagcaagtgcaaggaatacagtgacgacaaagtgcagctg

SEQ ID NO: 251945 - DNA, 245 bp, Homo sapiens
  chr2:242664010-242664255
  hypo
ctggctgggtttccgtgggcctgaggggctgccatgctctcaacgcgtgcttggtacctgcagcccccacagactgcagacagagggcaccagcgaccctgccatcggccggggaagaaggacccacctgttaaggaggaacgcctgggtgtcaaatcggttttgctcattgatggtgtatctgtcagcttcagaaccggcgtcctgcatagagccgcacgtgcatcggcgcattttccctgcgg

SEQ ID NO: 251946 - DNA, 751 bp, Homo sapiens
  chr2:242664619-242665370
  hypo
agggcgaccttgcagggactcgccgccgcgacctcagtgtggcttttacaggactccccccgagcatcagcagggaccccggcggacgtgggcgggcgcgcgtgagctcgggctgcccggccgggcgtgcgggcggggacatggtaacctggtccacggagggcggccgccaccctcgcgtagctttcctgtggttttccaggactgtccggtacagcccgggctccgcgtgccccgcccgctggagcacctgccaccgaggcgcgcgtggggccactgccgtggcggcggctgccctcctcacactcggctccgcgccgcctccggccaccgtgcgctcccgcgtggggcgcctcggatgggcccgggagggctgggggctcttccctggaggaagcggcctccgcttcgctggcgccgcctttttagcttggacttcagtcctccctcggggactcacctccggagtaaacggctcttcattagcttggagtggccgcaggtcccgtgaccagcacccgcgagaccctgtgcgacagctgggctgatgctccgtttctctgggaattggtgattttttactgtgaagatgaaattaccctaatagcatgaagatcgtgggtctgtgtgtccgtgaagtgagtcccgtctgccaggagctgacgaaccacgaatgcttctgcctgtgctgtgcattcccaggcccgcagctcccggtcgaggggactccgatgtgaatttgttgtgaatt

SEQ ID NO: 251947 - DNA, 107 bp, Homo sapiens
  chr2:242712093-242712200
  hypo
gcagaggtgacaggcgtacagggcagtgtgtctggacccagatggcaggcacgttaacgaccagtgaccagggctctgcccacctggcccggcgcgttggcccccca

SEQ ID NO: 251948 - DNA, 179 bp, Homo sapiens
  chr2:242713977-242714156
  hypo
cttgcccgcccgcctgcagtgtcggctgaagagggtaacgtgcgtgcgccccggctgctcccggctgctcccggctgctccccggctgctccccgctgctcccggctgctccccggctgctccccggctgctccccgctgctcccggctgctctcggctgctcccggctgctccccagc

SEQ ID NO: 251949 - DNA, 615 bp, Homo sapiens
  chr2:242716188-242716803
  hypo
gagggcgtggctcccgtcccaggaggcaggtgagcttctggggattccagttcacctgccccacagccgcaccctgcctgtgcctgcaccctggggagcccagagccggcaggggccgaggcggtgggacctcgggggagctcaagcctcgactgtcccctcgctggaggccagaggccaagatgatgtccatgctgggcggcttgcagaggtaaggggggcagttggaccccccaggtggacaaagcgcttcatctgtggctattctgagagacggacaggagtgggttttgtttgtctttcgaaggaagtgacttggatttggaggctgttcctactcaggcttccctgaattcacctgtcttggcttcgtttcggaagtagggggcccctcctgcccaggcctggtgctgcttctgggtgtttgggggttctgggatgtggggcccagtgagaaagctgccccccaacactgtggcgtggagacgctcgagtgtccgcgtgacggctggggagggtgagacctgctgggcttgggacctcccagcctcggtctgcggctcaggcccatggctgggccgtgttggtgggagtgccaggcgcttgctggagcgt

SEQ ID NO: 251950 - DNA, 78 bp, Homo sapiens; identical to SEQ ID NO: 208711
  chr2:242734968-242735046
  hypo

SEQ ID NO: 251951 - DNA, 453 bp, Homo sapiens
  chr2:242735076-242735529
  hypo
gaagtccgcagaagtggcccaatggcagagcaggagctccgctctcagtgtggggcctcgtttgggtttgggaaaacatgtcctctctcacgaagacgtgggtgtctccagcgggaccctgatcccgcgtggggcgcatggccctctctgctctgcggcccctctcgctctcctctctgtgcctgggaattctagtgtttactgggccttggccgctgggagcctcttcaaggtggttccattttgacgtaaggactggaggggtgcattgaagaattgtagagtgcaggtgaagggagggcctggaagctcctgtcccgtctcctagaagcgtggctgtggtggcactggcattggagtctgaggtgccgcgtgtgccgtgaggatgaagtgtgagaaattttgggaggtcctagttctaccatccccagtgtcttcgagacccacaccctt

SEQ ID NO: 251952 - DNA, 320 bp, Homo sapiens
  chr2:242754378-242754698
  hypo
tgtgcatgggtccccgtcgtaggcaggcgttctgccctggccaggcgtggtgtccggcatccggccatctccctcctccctccttcccttagccccgcatccaggtgccccgtgtgcccggcctgggcggctggccgtggatctgaccgctcctgcatggtggaggaccagcgttcccactgtctgcagctgtgccacctccctgtgccgggctgtgcgtgctcacgctcggctccgtctgcctttgtgcgatcagactgagagaccccccaggcaggtcccgcctgcaacaagcagaccccatgcgtgccccaaatgcc

SEQ ID NO: 251953 - DNA, 761 bp, Homo sapiens
  chr2:242755673-242756434
  hypo
agcagagcatgggggtccctcgtaccccttcacggacagtgctcttcgagcgggagaggacgggcctgacctaccgcgtgccctcgctgctccccgtgccccccgggcccaccctgctggcctttgtggagcagcggctcagccctgacgactcccacgcccaccgcctggtgctgaggaggggcacgctggccgggggctccgtgcgggtgagtgagtggccgggggctctgtgtgggtgtagtggccggatctgctggggctgcacaccccgggatggggcgggggtggcggcggcaggcagatgcccgaggtagagatgagcaaaccaggctcagcgatcctgggtgccctgcggggggctgtgcccaggtccctggacgtcctggtcagcggaacttcctcctctgggcagtggggtgccctgcacgtgctggggacagcagccctggcggagcaccggtccatgaacccctgccctgtgcacgatgctggcacgggcaccgtcttcctcttcttcatcgcggtgctgggccacacgcctgaggccgtgcagatcgccacgggaaggaacgccgcgcgcctctgctgtgtggccagccgtgacgccggcctctcgtggggcagcgcccgggacctcaccgaggaggccatcggtggtgccgtgcagggtaggcgggcagggtgccggtctgggtccctttgattggccacggtccacatggaagggagattccagcgggaaattgccattctgcccc

SEQ ID NO: 251954 - DNA, 410 bp, Homo sapiens
  chr2:242762674-242763084
  hypo
ggcagaggctgcagtgatgccgccaccagccacgggggctgctcagagctggaagaggctgaaggaccctgcgctggagccttcagagagggtgcgggcctgtcacccttggcttcagacggcctccagagccgcgagaggacgcatttgcattgcttcagcctccagtcggtgagatttgttgcggcagcctgggaagcagcacaccttcctgcctttgccgtctgtccgtccgtccgtctgtccacatgggcctcagaccccgggggatcctggccgtcactgcccggccatgtgcagcctcggcctgtgtcagacagacttgggctcgaggtccccaggagctccggtcgccgtggtggagcctctcgatgtctcgggctgtctgcggctggagcaccctctgagct

SEQ ID NO: 251955 - DNA, 455 bp, Homo sapiens
  chr2:242766033-242766488
  hypo
gtgttcttctccacgacgttctctttgtctgactttctgctcctgccgcgtgcgcagaggggcgaggaggaagcatttgcgcatgcgcagaaggctcgctccacgccacgtgcttcaagcgcgtcgttccgtttagtatgaaataaaggcccgcggggtggagaacgtgtctgttttccagatgtggagatcaaggcccggcaagtcctctgttgttgacggttctcaggtggtagaaacgatctcgcagcgcacctgcgtggcttccgaaaccgttgtctcaagcgtgttccacttgatgtgattaaaaaagttctcgtggccccaagcacctgctttacctgctcagaccagagtgtcgttccgtcccattcattccgcagctttccccgaacgcacacaagtgaaatgtaaatgtcagtgtgtgtgtatctatctcccgtttctcccaaagc

SEQ ID NO: 251956 - DNA, 281 bp, Homo sapiens
  chr2:242791134-242791415
  hypo
tttgagagctgtgagttctggacgctgatctcacaggcagcactctatggctttctcattgcctgtggtcattttccatgggacctatcgggttttgcggatggaaacccacatcatgtgcagagcccccgggcagcgttccctgccaggcctgatctgccggatctcaccgggagttcccagagctgcgaggtctctgtgcctgtccctgacacaggcatggggtccaggactgggctccaggatggcaagcagagaatgagccccggggtgtcagtggg

SEQ ID NO: 251957 - DNA, 158 bp, Homo sapiens
  chr2:242793064-242793222
  hypo
caggctggagccccggtcgcccccaggcagctcagcccctggacggcctgcaatggcctgcaccctgcctgcttctcctgaggaaatgcgctgacccgggctcatggtggagggtctgcagaacactggtggccaaggaagccggtcagaggggccaa

SEQ ID NO: 251958 - DNA, 257 bp, Homo sapiens
  chr2:242794840-242795097
  hypo
cagaggtaggtgccgctgtcattgcgccgggccctgaccacgctcatgtggaagtcacgcccgttgggcagttgtgtgacacggaagcggcagtcctggccgggctggctgcggtcctcggggaaggcggccagcttgtccgtctggttgctggggctcatgcggtaccagtttagcacgaagctctccgatgtgttggagaagctgcaggtgaaggtggcgttgtccccttcggtcaccacgagcagggctgggga

SEQ ID NO: 251959 - DNA, 114 bp, Homo sapiens
  chr2:242815160-242815274
  hypo
agggcggtggccacgttgcctacggcccccagggcaatggctgcttctcccaaggctattaccagaagaggcagctgaggtccaggttccacaaggcccgctgtgggtgccgcc

SEQ ID NO: 251960 - DNA, 387 bp, Homo sapiens
  chr2:242832881-242833268
  hypo
ggatacgtcccagccgaaatgttcaccgtgaatccggcaacctgtggagctgatttccatttctaaggaatgaggggggatggggaagaaccccccaggacagcaccaacagtccctgcggggacctttcccggacacccggccttctcggcggtgaggcaggtggcggcaccgacaggcccgggggggacctttcccggacacccagcctcctcggtggcgaggcaggtggcggcaccgacaggcccggcggggacctttcccggacacctggcctccttggcaaggcaggtggcggcaccaacaggcccgggggggacctttcccggacacctggcctcctcggcgaggcaggtggcagaactggttccacgtctgatcttcctt

SEQ ID NO: 251961 - DNA, 338 bp, Homo sapiens
  chr2:242833525-242833863
  hypo
caggagctcagaccccggcatcagaccggcctccgcagggaggagctgcggtgcccaggccaggccaggaagcaccatggcccactgcctgggcctcacctcacgaacgccaagcactgtggcgggcacaggcggagcctggcggcttcacgcccacaccggcagctcctccctcagcccctcgcccgccgctcccaagtccggcagttctggagcacgggaagctctctgggggttgctgggcagcaggacctggtctgagatgactgagtctgcccaggtcttcacgcgcctaactgagcgtgagcgtgtctgagtcttaccgcagaaacattaaa

SEQ ID NO: 251962 - DNA, 300 bp, Homo sapiens
  chr2:242836340-242836640
  hypo
cagagtctggagctcgtgggccctcaggccgccttcttgtccttggtgtggagggactcagtggcctccgggaccctgtctgggcatctccctgggccctgcagcatcttgttcctcccctccagctgctcagcccatcccacgcggagcctggggcagggcgataatttcggcattgtgagtcaagctctcggaacttagtgacggccaagcccgtgtctctcagcacctgggcacctgtgagagcaggagtatgacactccctgccaggggtgggggtgtcaccgcatccctgcccag

SEQ ID NO: 251963 - DNA, 85 bp, Homo sapiens
  chr2:242845592-242845677
  hypo
caaggctgaggcccgagtgcggaggctgcacctgctcagctccactgtgacctcttggtgccggggacacgcctgcccccgcgca

SEQ ID NO: 251964 - DNA, 175 bp, Homo sapiens; identical to SEQ ID NO: 208719
  chr2:242874827-242875002
  hypo

SEQ ID NO: 251965 - DNA, 189 bp, Homo sapiens; identical to SEQ ID NO: 208720
  chr2:242887764-242887953
  hypo

SEQ ID NO: 251966 - DNA, 105 bp, Homo sapiens
  chr2:242890286-242890391
  hypo
tctgctcagccagcgccctcacctgcggtcggtgagctgtgcacggggaagcagagcctggcggccacgtcggcctcctgtgagagggtcgagggctccagcccc

SEQ ID NO: 251967 - DNA, 407 bp, Homo sapiens
  chr2:242925459-242925866
  hypo
tgcatgaacttctggcgtccacaatctagtggatgaatctcaaaagatacttcgagcaaaaacaccggacagaagcgtccgtgccagccccgcaggctgcctgtgtgccaggctatcccgtgccatctgatccgggagaagcaggactttcttgcacaggtactcagcgctgtggctgtgggaggagccgggagggccctggcgtgggtgggcttggggaaactgtaggagctggaaatatttcatatcttatttggggtgttgtttacaggggaacttgacaaactcatctaatggtacaatcgagacatctgtgtaaataaagtgtcaaaaatcatcctgctgacatccatgctccccgccccacggcacttcccggccctcagccctcccgtgcggctcctgcc

SEQ ID NO: 251968 - DNA, 264 bp, Homo sapiens
  chr2:242933406-242933670
  hypo
tttgacatttgatacggtttggatcgtatccctgcccacgtcccacgtggacgtggaatctccagcgttgaaggcggggcctggtgggaggtgattggatcacggccggcgttcccacaaatggcttcgcaccgtcgcctccgtgacgccctcgtgacactgagtgagcaagttattgtgagacctggtcgtttgaaactgagttggggcccagctcagcgggcacgaccctgctctgggccacgcttacgcgcttgttcctaa

SEQ ID NO: 251969 - DNA, 141 bp, Homo sapiens
  chr2:242938360-242938501
  hypo
tgggtggtggccttcgtcgcaggcagggctggtcagaggcgacgcctgtcctggcctgcttgtcacagccaggtaggcaccaggccagaagctgcagagcccaggcagtattgctcacctgtccagcgcgctgtccgtatt

SEQ ID NO: 251970 - DNA, 113 bp, Homo sapiens
  chr2:242948202-242948315
  hypo
ttgccattagtgaaaaatgccgtaaaaacccatacccctgctgaggcctcggaacctgagaggtgtggcctgtctcctctaagccgtttatcatccgtggtccacagacacat

SEQ ID NO: 251971 - DNA, 220 bp, Homo sapiens
  chr2:242948345-242948565
  hypo
ttctcccaagtaccccggacaggcactgttgttggcaccagggaacaccccggggaacagagcagatccaacaccaggcccaggagagtcggctcccggtgacgcctgagatgtctgtggactccaggcaatacttgtgcaagaggccgtgggggccaatggggcatgatagtgtgaccttcaaattaccagtgtgcacggcacacggaaggaacacaca

SEQ ID NO: 251972 - DNA, 32 bp, Homo sapiens
  chr3:3167655-3167687
  hypo
cggcaaaagtaatcccggcacttttgggggcc

SEQ ID NO: 251973 - DNA, 91 bp, Homo sapiens
  chr3:3167927-3168018
  hypo
aaaaactacacattttcgcactttaagggctcaacggctgtattcccactcctttgccactctctttgctcttttccgctctagaaagaat

SEQ ID NO: 251974 - DNA, 209 bp, Homo sapiens; identical to SEQ ID NO: 208721
  chr3:3179063-3179272
  hypo

SEQ ID NO: 251975 - DNA, 37 bp, Homo sapiens
  chr3:3426022-3426059
  hypo
taagaggtttaaagcatggccgggcgcagtggctcac

SEQ ID NO: 251976 - DNA, 41 bp, Homo sapiens
  chr3:3639126-3639167
  hypo
ccttaggccgggcacggtggctcacgcctgtaatcccagca

SEQ ID NO: 251977 - DNA, 165 bp, Homo sapiens; identical to SEQ ID NO: 208722
  chr3:3786390-3786555
  hypo

SEQ ID NO: 251978 - DNA, 232 bp, Homo sapiens; identical to SEQ ID NO: 208723
  chr3:4347747-4347979
  hypo

SEQ ID NO: 251979 - DNA, 83 bp, Homo sapiens
  chr3:4669493-4669576
  hypo
cagttctggaaagccgctaagcctggggccaacagcaccacagacgcagtgctactcaacaaactgcacgtacgtattgccat

SEQ ID NO: 251980 - DNA, 218 bp, Homo sapiens
  chr3:4735234-4735452
  hypo
tgatccagatgatgcggtcagaacgggatcggatggatgagaacagccctctcatgtaccacatccacttggtcgagctcctggctgtgtgcacggagggtaagaatgtctacacagagatcaagtgcaactccctgctcccgctggatgacatcgttcgcgtggtgacccacgaggactgcatccctgaggtgagcgagcccagcctggctgtgccc

SEQ ID NO: 251981 - DNA, 405 bp, Homo sapiens
  chr3:4755878-4756283
  hypo
gggcagaaataacccggagccaaagaactaagctttctcaagcaaaccagttggcttgagtcaatataataaatgaggtgttctttggcctgggtgctgaggacgacaccacggtgagtgtggaggccgtttccctcctcccatccctgttttctgatgagtggcctcttatggagcttgtcccatgactgacacttccctggtgatgtccagaattgttctgcttctctgccctctcctgagccttcaccgccaaagaatcggatctggaggggccctggcatggcttcttccaactctccctgtgcctacgaggaggctggggctaagagctgagagactgcccgaggtcacgtgtgaagtctagatgagatcaagactaccgtctgggtttcccaaatccct

SEQ ID NO: 251982 - DNA, 62 bp, Homo sapiens
  chr3:4840917-4840979
  hypo
atcaagggcttgacacgatgtctaacaattgttaaatgcgtagaaagcggcacatgtgcctc

SEQ ID NO: 251983 - DNA, 760 bp, Homo sapiens
  chr3:4865776-4866536
  hypo
tattcgtcgactaacgtggacagtgaaatatcgggggagaacctgcccccccatggtagctagagtgttctggaatgcaccagcgctgccgtttctggaggagcagtctgtgctgggctctgctttacctcgggaagggcagattggatagtaaggaatagctcgtgtgtaatcagtgtgcggaaaataaacactgtatgtgcatgatctcactcaatcctcatcacagcatggtaggtggtactattaacactttatagatgggaacctaaagctcaggaaggtcgagcaacttttgcagggtcgcggcgctgggaagtgctagagccaagactgaaatccagagctgctgaaccagaacccaccctcaggttgtcctgacccacatatccgcatgtggttacctgtgtgcacatgcacacagccctcctgtcagtctgcagccattggctggctggcggcatctggtttggactggcgcatcttagacttggactggctcatctcccagccccgaccccgagtgatactgaattagcctcctttaaaagaggcaagatgcaggaaaggcccctctgcgggtagagaggagagtgggaaagaggatctcccggggatactgaccggctcatgcataaatcagtaagacaggagttagatggggtgtgactttccgagctgctgccgccagcaaccactgctcagacaaccacttcacaaccctaggggttgttgagacggtaggagttcaggaaggggt

SEQ ID NO: 251984 - DNA, 37 bp, Homo sapiens; identical to SEQ ID NO: 208728
  chr3:4993606-4993643
  hypo

SEQ ID NO: 251985 - DNA, 176 bp, Homo sapiens
  chr3:5030720-5030896
  hypo
tataagaggctgcctcgctttgtggaacagggccaggatctcaggttagagaggagacagcatgtgttgagttcccacatggtttcatatgaagactgtgtgttaacgggatcggcatgttctcctgagacccagcattccctgaggtgtctgccacgtggcgtggagggagggaa

SEQ ID NO: 251986 - DNA, 31 bp, Homo sapiens
  chr3:5126485-5126516
  hypo
aatgaatgaataaatcgctcaatgtttttat

SEQ ID NO: 251987 - DNA, 79 bp, Homo sapiens
  chr3:5165843-5165922
  hypo
gcgcctggcctcctattgtaatattatgattttttgcgcttggaatgactatctttccgcaggaatagaagagtggaat

SEQ ID NO: 251988 - DNA, 174 bp, Homo sapiens
  chr3:5252798-5252972
  hypo
ttgtaggtgtgggtacgccacgctgcatcacgtcattgacaagtccacagaagaccggatggagagcttctttctcagtgagacctgtaaatatttgtatctggtatgtgtgttgcaagatgaacccaggaatatttagtattgcttagagcaagcattcgcatagtcttccat

SEQ ID NO: 251989 - DNA, 42 bp, Homo sapiens
  chr3:5296187-5296229
  hypo
gggcaagcttcacatattcccgaggctgactctgtaaagccc

SEQ ID NO: 251990 - DNA, 93 bp, Homo sapiens
  chr3:5824093-5824186
  hypo
ccactgcgcccagctgcaattatgataagttctaagaataatataaagattatgctttgatagaaaaatagaaagattcggtgaaagaaggga

SEQ ID NO: 251991 - DNA, 35 bp, Homo sapiens
  chr3:6109803-6109838
  hypo
tgttttgttttgttttgagacggagtcaggctctg

SEQ ID NO: 251992 - DNA, 35 bp, Homo sapiens
  chr3:6110078-6110113
  hypo
gcgtgagccaccgcgcctggcctagatccaccaac

SEQ ID NO: 251993 - DNA, 84 bp, Homo sapiens; identical to SEQ ID NO: 208730
  chr3:6811742-6811826
  hypo

SEQ ID NO: 251994 - DNA, 161 bp, Homo sapiens
  chr3:7188149-7188310
  hypo
tagttatgcatcaacggcacccgagctaagtgatgaccggcgctatgacttcttctctcgcgtggtgccacccgattccttccaagcccaggccatggtagacattgtaaaggccctaggctggaattatgtgtctaccctcgcatcggaaggaagttatg

SEQ ID NO: 251995 - DNA, 47 bp, Homo sapiens
  chr3:7620289-7620336
  hypo
accagaggcccaatgaaaatcgaaccggatgccaggatattcccatc

SEQ ID NO: 251996 - DNA, 76 bp, Homo sapiens
  chr3:8505219-8505295
  hypo
gctgacaagaccctccggaactgagcctacctctccaatctctctctctctctcttttttttgagacaaaatctca

SEQ ID NO: 251997 - DNA, 43 bp, Homo sapiens; identical to SEQ ID NO: 208731
  chr3:8595738-8595781
  hypo

SEQ ID NO: 251998 - DNA, 223 bp, Homo sapiens; identical to SEQ ID NO: 208732
  chr3:8595841-8596064
  hypo

SEQ ID NO: 251999 - DNA, 45 bp, Homo sapiens; identical to SEQ ID NO: 208733
  chr3:8669371-8669416
  hypo

SEQ ID NO: 252000 - DNA, 213 bp, Homo sapiens
  chr3:9173888-9174101
  hypo
catcttgcattccatcgtgcatttattgcaattgaagagccaatactgacacaccaaagtctgtcacttacattacggctcaccctttgtgttgtacattctctgggttttgacaaacgtctaatgtcatgtgtccaccattacagtatcatacagaatagtgttgccaccctaaaaatcctcgtgctccacctatttcgccccttattcttc

SEQ ID NO: 252001 - DNA, 148 bp, Homo sapiens
  chr3:9553508-9553656
  hypo
ctcgccactggctgccggatgcatcttgcatgtgtctggtgtttgggaaacacaccccaatttgtcctgcctccacaggaggcttggctgcatcctttacatggcgactgtttttttttttttttttagacggaatctggctctgtcg

SEQ ID NO: 252002 - DNA, 36 bp, Homo sapiens
  chr3:9554924-9554960
  hypo
tgagccaccgcgcccggcctggacatttgttttata

SEQ ID NO: 252003 - DNA, 127 bp, Homo sapiens
  chr3:9704771-9704898
  hypo
gagagccattgtgacgtttgagcggggaaattccgaatgcaagtagcaacggtgcgaaaattggtccaagaagagtggactgacatacagagagcctcagaggggaagggagcggaattcagtctat

SEQ ID NO: 252004 - DNA, 154 bp, Homo sapiens; identical to SEQ ID NO: 208734
  chr3:9782960-9783114
  hypo

SEQ ID NO: 252005 - DNA, 39 bp, Homo sapiens; identical to SEQ ID NO: 208735
  chr3:9793443-9793482
  hypo

SEQ ID NO: 252006 - DNA, 257 bp, Homo sapiens; identical to SEQ ID NO: 208736
  chr3:9905283-9905540
  hypo

SEQ ID NO: 252007 - DNA, 120 bp, Homo sapiens
  chr3:9924114-9924234
  hypo
aaaaaaagacaaaatgggttagtggttgcttcgggctgggagtaggggatgggaggggaatggggagtggctgctaattagtacagggtttctttcagggttttcttttctttttttttt

SEQ ID NO: 252008 - DNA, 37 bp, Homo sapiens
  chr3:9941464-9941501
  hypo
agaaaactcattatttgggccgggcgcagtggctcac

SEQ ID NO: 252009 - DNA, 33 bp, Homo sapiens; identical to SEQ ID NO: 208737
  chr3:9947648-9947681
  hypo

SEQ ID NO: 252010 - DNA, 155 bp, Homo sapiens
  chr3:9987359-9987514
  hypo
ttccgcataagacacggcctctgtgcaaaatgccggctgaaaaaaaaatagaaatattaaaagcaaaaaacggcatgggggtggggtgagttcaaacctggctgtcccccgggggttgccgtcaggtagagaggcctggggatgccttttttttt

SEQ ID NO: 252011 - DNA, 229 bp, Homo sapiens
  chr3:9991408-9991637
  hypo
gaggtcctgtccagccgtgggagcttggtccttgagccatctggaggtcatcagttactgggagtcgttctctctgagctccttgtgctgctttgggcccgtacagggctgggccaaggggagaggctacaggcttctcaggcatctcttcagcaggggcgtggcggacatcagagttcctgtgactgtcagctctggggttctccgggaacacgtcaaaggcctgggg

SEQ ID NO: 252012 - DNA, 86 bp, Homo sapiens; identical to SEQ ID NO: 208739
  chr3:10011411-10011497
  hypo

SEQ ID NO: 252013 - DNA, 32 bp, Homo sapiens
  chr3:10127376-10127408
  hypo
caattcttttttcaaaccgttaaactattgat

SEQ ID NO: 252014 - DNA, 203 bp, Homo sapiens; identical to SEQ ID NO: 208740
  chr3:10131932-10132135
  hypo

SEQ ID NO: 252015 - DNA, 78 bp, Homo sapiens
  chr3:10182838-10182916
  hypo
tttgtactttataagcgtgatgattgggtgttcccgtgtgagatgcgccaccctcgaaccttgttacgacgtcggcac

SEQ ID NO: 252016 - DNA, 139 bp, Homo sapiens; identical to SEQ ID NO: 208741
  chr3:10212191-10212330
  hypo

SEQ ID NO: 252017 - DNA, 112 bp, Homo sapiens
  chr3:10332492-10332604
  hypo
gtggcctagcttccgtggggctgatgtacattccttgggaactaaaaatgttcttgtcctctgggtagaagtcaacagtggaggtcagatgccctgcggaattgctgggttg

SEQ ID NO: 252018 - DNA, 41 bp, Homo sapiens; identical to SEQ ID NO: 208742
  chr3:10363448-10363489
  hypo

SEQ ID NO: 252019 - DNA, 242 bp, Homo sapiens
  chr3:10384503-10384745
  hypo
gtcctggagatgagcggcttgttgcggccgtacggcttcctcagcagcagggtctccgtgggcggctcagtggccagtgccagcgaggcaaacgtgtccatgatgaggttcacccagagcatctgcacggccttcagaggggagtcctggggacgggcaggagagggctgtcacctgtgcgcccacctgctgctgtgaagtgctgggcgggctcatggtgtagtgtccgcaggctcctgctg

SEQ ID NO: 252020 - DNA, 227 bp, Homo sapiens
  chr3:10541007-10541234
  hypo
cctcacgtgacaaccgggaagatgggtgctcagctaacccttggtttacggaggagcaaactgaggcgaagtcactggttcaaccacacacaaccgaacgcacatgactgaataagcaattcccctcccacgcattacatgggaaaacaaaaagcatttgtaaagtgcttgcggacacattttagcgattagtactattatgatgaacatttcggtacttggcaatt

SEQ ID NO: 252021 - DNA, 131 bp, Homo sapiens
  chr3:10569429-10569560
  hypo
ctggccagagatggcggtgaatcacccggtgtccccgctgggtttcaggccacggacacaagtaccctctctgactgctcggctccagcacctacagtcactgcagaagtctgcagcgtatggccacaccc

SEQ ID NO: 252022 - DNA, 119 bp, Homo sapiens; identical to SEQ ID NO: 208743
  chr3:10638628-10638747
  hypo

SEQ ID NO: 252023 - DNA, 201 bp, Homo sapiens; identical to SEQ ID NO: 208744
  chr3:10959983-10960184
  hypo

SEQ ID NO: 252024 - DNA, 33 bp, Homo sapiens
  chr3:10976104-10976137
  hypo
ctgcatacgcaaatcgggcgctggatccgcctc

SEQ ID NO: 252025 - DNA, 127 bp, Homo sapiens
  chr3:10991635-10991762
  hypo
gggcacgtcatccacgcaaaccccacaaccatcttttcagcacatattttgtgcccattttgcagatgaggaccctgaggttaacggaggtaatgtgacttgcctcgcgtctcgcaaagagggaatg

SEQ ID NO: 252026 - DNA, 120 bp, Homo sapiens; identical to SEQ ID NO: 208745
  chr3:11133518-11133638
  hypo

SEQ ID NO: 252027 - DNA, 215 bp, Homo sapiens; identical to SEQ ID NO: 208746
  chr3:11210148-11210363
  hypo

SEQ ID NO: 252028 - DNA, 42 bp, Homo sapiens; identical to SEQ ID NO: 208747
  chr3:11300932-11300974
  hypo

SEQ ID NO: 252029 - DNA, 37 bp, Homo sapiens
  chr3:11574543-11574580
  hypo
gcagcccggaggtgcgctggtgcgcagagcagacagt

SEQ ID NO: 252030 - DNA, 257 bp, Homo sapiens
  chr3:11577995-11578252
  hypo
cttctgtttcccatgcaaaacgccaccacacacctagggaggatgtttgtgttccacggaggtcgccacccatctgttttcagagtaaacgtttgtgtgagcgcactctggcggggagtcccgagagcggaccctcttgccactgcacccataggtgcggaacgaacctgctgccccgaccctgcggctccgaccggggccgagcagcgaaggaccaccctggtctggtcacctacgattctgggtccagctcagct

SEQ ID NO: 252031 - DNA, 285 bp, Homo sapiens
  chr3:11581143-11581428
  hypo
tgtgaaactccccccgtcttaagctatattcgttttctcttatgaatttaaaaaataaaatctattgatgcgcatacaatcaaatatatgtaaaagtgcacatttctgagctttgagaaacgtactcgcttgtggaaccagcacagttcggcgacatcgagcaggtctgtctggcctgtcctgccctgcacagccgcctggaggttcacctgcatcattgcgtgtgtcagcgcttggtgcctttctgtcgctgagtagcgtctcgctgtgtgagtgtaccagaat

SEQ ID NO: 252032 - DNA, 88 bp, Homo sapiens
  chr3:11595081-11595169
  hypo
gggacacctggtcactggaccgcagaccggcccatccacagcctggctgggctggcatctagacctcgcttggcagtcccctcccaag

SEQ ID NO: 252033 - DNA, 357 bp, Homo sapiens
  chr3:11600065-11600422
  hypo
catgtgggcagaggggctggcgggctggcccctgcgagaggcggactcagggctgctggatgctccgtccttggccgctttgatctggagccacgtgtcacccagagctttggcaaagtggtcgtccacggagcccgtgatggacacggagttgggtgccggctcgggctccttgtaattcttgcccaggctcctgcggaaatgctcctccaccacggggtcacaggtggtggcagctgcaggcaagcaggaaggcaggcagtcagacacaggtggctgcagacagacaggcacggttgcagcaccctccctcaggcagcccagagccggactggctgccacggtcagcgtgggctc

SEQ ID NO: 252034 - DNA, 38 bp, Homo sapiens; identical to SEQ ID NO: 208750
  chr3:11606285-11606323
  hypo

SEQ ID NO: 252035 - DNA, 32 bp, Homo sapiens
  chr3:11607101-11607133
  hypo
tgctgtagggagccggcgcgcagctctctcgt

SEQ ID NO: 252036 - DNA, 574 bp, Homo sapiens
  chr3:11655424-11655998
  hypo
gtgagtgggtgctccgaatctgctccaccaggagccggcgacgtcatctcagagcagctgcctgactttctatgactgtttccacatgtgtgaaaatggtagtgtgaacccacacacaggctcagagcgatacccggcacggtgccgcctcctccccacacacactctggacttacaggctttcttccatgcacgtttctccctccctagaatgtgttcagaagccctctctgccaatgcatactcatctgcactttcaaaacccgacttgagtgcctcttgtcagcctcagccccaagagcaccccttttggtgccatctacctgggctgagctgcctggcagcgtcccttgtgacgtgctgctggctccaactcaaaaactactcatttctcagcaacaccattgtgtgctaccgccaaacaggcgatcttgctctctgcagtaggttccagtccagaccctgaggagtaagatggtggtcccggaaaccagttcaaatttctcactggcatacagagtgctgaaggaaggctgtgtataggccccccgattctgatcgtgaaatctcatta

SEQ ID NO: 252037 - DNA, 135 bp, Homo sapiens; identical to SEQ ID NO: 208752
  chr3:11707751-11707886
  hypo

SEQ ID NO: 252038 - DNA, 99 bp, Homo sapiens
  chr3:12186545-12186644
  hypo
caaaaaccaaacaaacaaaaaaggagagtaccataatatcccatttcccagtccagaaaggaataataataataaaattacaaccgttgctcatgcatg

SEQ ID NO: 252039 - DNA, 81 bp, Homo sapiens; identical to SEQ ID NO: 208753
  chr3:12204374-12204455
  hypo

SEQ ID NO: 252040 - DNA, 119 bp, Homo sapiens
  chr3:12486439-12486558
  hypo
aatggaaggagaaagtgcttcgcaaacaccacagactagcactcctggggccgccgtgttattagtactgttacctgacctggtgtctctgtacccgcggctcctgagtcagtcctcag

SEQ ID NO: 252041 - DNA, 120 bp, Homo sapiens
  chr3:12486827-12486947
  hypo
ttccatatctgcaccgggagatcactgatagggctaatggcatttgcttgcctccacaccctgggcccagtgctccaggagtcacgcaatcccacaggcccagggcggaaactgttccca

SEQ ID NO: 252042 - DNA, 39 bp, Homo sapiens
  chr3:12558547-12558586
  hypo
agaatttgcagataaggggccgggcccggtggctcacgc

SEQ ID NO: 252043 - DNA, 43 bp, Homo sapiens; identical to SEQ ID NO: 208754
  chr3:12575984-12576027
  hypo

SEQ ID NO: 252044 - DNA, 90 bp, Homo sapiens
  chr3:12586167-12586257
  hypo
aactctgtctcggggaaaaaaaaaaggtataatcctttcttttgctttctaattcatcctttttgtttatgctagcgctctcagcaagag

SEQ ID NO: 252045 - DNA, 149 bp, Homo sapiens
  chr3:12596374-12596523
  hypo
tgctttttgttttgaagaggcgggaactaaattgacaggagactgagacttttcactttacgcttttaaaatatttgaacataataacgttcagatcgtgaatgtattccataaagaatgagataagctgaattttaaaaataagtggc

SEQ ID NO: 252046 - DNA, 101 bp, Homo sapiens; identical to SEQ ID NO: 208757
  chr3:12605273-12605374
  hypo

SEQ ID NO: 252047 - DNA, 122 bp, Homo sapiens
  chr3:12626572-12626694
  hypo
cccaggggctcccacgagttgggtcctttcgcaccagcacagacttacctgatctcggttgttgatgtgagaataaggaagctcccccgtcatcagttcatacaatacgatgccataggagt

SEQ ID NO: 252048 - DNA, 118 bp, Homo sapiens; identical to SEQ ID NO: 208758
  chr3:12660087-12660205
  hypo

SEQ ID NO: 252049 - DNA, 40 bp, Homo sapiens; identical to SEQ ID NO: 208759
  chr3:12743273-12743313
  hypo

SEQ ID NO: 252050 - DNA, 40 bp, Homo sapiens
  chr3:12761057-12761097
  hypo
ggccagcaatcttgaaaacttccaccgcatcccaaatctt

SEQ ID NO: 252051 - DNA, 94 bp, Homo sapiens
  chr3:12820702-12820796
  hypo
aaaaaaaaaaaaacacatagacctaaatgcgaaacataaaactataaaatatgtagaggaaaatataagagaaaatcaacgtgagcttggattt

SEQ ID NO: 252052 - DNA, 78 bp, Homo sapiens; identical to SEQ ID NO: 208760
  chr3:12821389-12821467
  hypo

SEQ ID NO: 252053 - DNA, 125 bp, Homo sapiens
  chr3:12856636-12856761
  hypo
cagagagtgaagacgagtacagcgatgacgatgacatgagctggaaggtgcgccgggcagctgccaagtgcatcgcagccttgatcagctcgcggcctgacctgctgcccgatttccactgcacc

SEQ ID NO: 252054 - DNA, 45 bp, Homo sapiens
  chr3:12867102-12867147
  hypo
caggagacaaagatccggcgggacctcatccgagaggtgtggagc

SEQ ID NO: 252055 - DNA, 43 bp, Homo sapiens; identical to SEQ ID NO: 208761
  chr3:12940404-12940447
  hypo

SEQ ID NO: 252056 - DNA, 102 bp, Homo sapiens; identical to SEQ ID NO: 208762
  chr3:12940862-12940964
  hypo

SEQ ID NO: 252057 - DNA, 215 bp, Homo sapiens; identical to SEQ ID NO: 208763
  chr3:12949721-12949936
  hypo

SEQ ID NO: 252058 - DNA, 75 bp, Homo sapiens; identical to SEQ ID NO: 208764
  chr3:12956289-12956364
  hypo

SEQ ID NO: 252059 - DNA, 397 bp, Homo sapiens
  chr3:12976953-12977350
  hypo
aagaggttcaggccgatgcggtagtgcctcttgcggatgacatcgttgctaaaggcaggcgagtcccagctgttgcgggcctccttgtggtaggtctgcttgctgagcgtctgctcccgcaggctgtcacgggacgatgactcggagctgcagttgatggtatcgttggagttggacgtgctgttgatgctgtcattgtcaccgtctgagtagtccgactcagacttgctctgccggttggctgagccattgatggccaagtggctgtccaggggcctggggggccggggccgcaactcaggctcctcccgggggaggctcttgggggcgccgctgtggggaccatgcttgggactgccctgctgcccgccaaggctgcgctcgtaagcactctgcc

SEQ ID NO: 252060 - DNA, 439 bp, Homo sapiens
  chr3:12984507-12984946
  hypo
ggtgtgtgtcacggcgaatttggaaactcatacattgctgtatatacattttctctaaatcttaaaagcagtctacaaagaggaatcatcgactcccctttttcaggtgaggagactgaggcctacagggggtgccaggatgacccaggtaggaagtaggtgagtcagagttcaagcccaagtggtgggaccctgagacccagtggtcccctccgcctcaccacctcctgtccctgcaatgtgcacacatttctctgacatctccaagcaccatgggggagcagtgcccctggtggggccatgcggggcgggctgacgagctcatcccgactcggaactcgcaagccttttcactgtgtgcagacgctggtttccgctgcaggtggcttctcagtgtaggacgagcagggaagggagcgagttatgtcacagtttccaa

SEQ ID NO: 252061 - DNA, 106 bp, Homo sapiens
  chr3:13020986-13021092
  hypo
acatgcacgcagcacgcgcacacacacactctaagatgtccctggacagcggttgtctctggggaggggaatgggacgtggaagggcgtggcgcatagctcactgt

SEQ ID NO: 252062 - DNA, 57 bp, Homo sapiens
  chr3:13028240-13028297
  hypo
acgaggagctgggacgagaaccaggctggcagggtgcctgtgcgcatatgtgagctc

SEQ ID NO: 252063 - DNA, 148 bp, Homo sapiens
  chr3:13028558-13028706
  hypo
tgagctccctcagccgtcccccatctggtgctgcggccagtgcgggtcataaaccctgagcccctgcttaatccgccagctcccgagtcagcgccagccagacacgtgacactgcagccccacagacctgtttggcaggagcagcagc

SEQ ID NO: 252064 - DNA, 239 bp, Homo sapiens
  chr3:13028736-13028975
  hypo
gccttgccctcgccctgtccctaccacctcccagcccacagcctgcagttgggccactgcctgccttgtagcgagaggtatggtacgtgctgggggcagtgcaggtagggaaaagaacacggttctcaccaaatggtgccgggccacctgggaatgggtatatgtgtgcacctggggccgtgcatgtgcacacatgtgcatgtgtcagagagagagagagagaccgtagatgaaaatct

SEQ ID NO: 252065 - DNA, 228 bp, Homo sapiens
  chr3:13083878-13084106
  hypo
tccagctggaccacggtaacgtctccgcggagacacggagaggggctagtgggaggtggagaaccggctgcttcggcccgccctggtccctgccacggcggcccccactcacatggcccagcccgcccggcgcagcttgtacagtacacgcctccaatacaaagagcagccagcacaaaagcctagcaactcattcacgcagctcgcctggcccggctcatgctgctg

SEQ ID NO: 252066 - DNA, 94 bp, Homo sapiens; identical to SEQ ID NO: 208769
  chr3:13205534-13205628
  hypo

SEQ ID NO: 252067 - DNA, 263 bp, Homo sapiens
  chr3:13367327-13367590
  hypo
atagtaaaccgtcacggatcccacggcccgggccacagccacacccgtcttggggtcgatgtggaggatgctgttggccgaggagctccaggttcctgagaggcctggagaggaagcacaggtgtcagccccctttccatagctggacactccagtcaaagcccagctcacctggatgacaggccagcttcctcgctggctgccgctacccccatgggggctcactcagcagcctcaggagacagccacgctgcctgccccag

SEQ ID NO: 252068 - DNA, 52 bp, Homo sapiens
  chr3:13501985-13502037
  hypo
gaaggctttgccaggcgggacccccatggcctggcgccggaaaaggaggttc

SEQ ID NO: 252069 - DNA, 823 bp, Homo sapiens
  chr3:13611725-13612548
  hypo
gctgggcccctgcccgcgtgcgtgccggtgtgcaccgtgtctgtgtgtgcacacccagtactgacaggcttcctttctgattcccccagggtcttacaggagaggggaccgtcctgggctggcctggaccatggtgctgctctgggagcctgcaggagcctggcttgctctgggcctggccctggccctgggccccagcgtggccgcagctgcccctcggcaggactgcacgggcgtggagtgcccgccgctggagaactgcattgaggaggcgctggagccgggtgcctgctgtgccacgtgtgtgcagcagggctgcgcctgcgagggctaccagtactatgactgcctacagggtggcttcgtgcgcggccgcgtgcccgccggtcagtcctattttgtggacttcgggagcactgagtgctcctgcccaccaggcggcggcaagatcagctgccagttcatgctgtgcccggagctgccgcccaactgcatcgaggctgtagtggtggctgacagctgcccacagtgcggccaggtgggctgcgtccacgcgggccacaagtacgccgctggccacactgttcacctgccgccctgccgggcctgccactgccctgacgccggtggagagctcatctgctaccagctccccggttgccacgggaacttctcagatgccgaggagggtgaccccgagcgacactacgaagacccctacagctatgaccaggaggtggccgaggtggaagcagcaacagccctggggggtgaggtccaggcgggtgcagtccaggcaggcgcagggggccccccagctgct

SEQ ID NO: 252070 - DNA, 206 bp, Homo sapiens
  chr3:13669960-13670166
  hypo
cagttttacagatgccggcctagtccccaagtgggtctgagattctacccgctctgcgccccccatcaactccttccaaaaaagggtttgcttagtctctgtgcctctaaaacttcttgttaatgtgctgtgcttccctggcagctagacccctggcacgtggttggtgtagttatcctagcactcagcctcgatcccgccctgcc

SEQ ID NO: 252071 - DNA, 221 bp, Homo sapiens
  chr3:13679093-13679314
  hypo
tggagtgccagaactcgccagcgcgcatcacgcactaccagctcaacttccagacgggcctcctggtgcctgcgcatatcttccgcattggccccgcgccagccttcacgggggacaccatcgccctgaacatcatcaagggcaatgaggagggctactttggcacgcgcaggctcaatgcctacacgggtgtggtctacctgcagcgggccgtgctggag

SEQ ID NO: 252072 - DNA, 216 bp, Homo sapiens
  chr3:14174613-14174829
  hypo
ctgaccccagacaagctccccgcaaacaagtcacaaatataaggcctgcactaagcgtctaaggggatttgcacacacggggccggggaagcattttgttaatggtttgccatgggtgggaggacaatcaggacaggctttccagaggcagcggcatttgttcaggcttctcaggatttcagcagagggaggttagctccacggcatgccagtggt

SEQ ID NO: 252073 - DNA, 44 bp, Homo sapiens
  chr3:14208688-14208732
  hypo
cccctttattgaaacgtttcatcgccctccgaagatatgtctca

SEQ ID NO: 252074 - DNA, 93 bp, Homo sapiens
  chr3:14291143-14291236
  hypo
tcatcttacagaatccttcttctcacttggaggtgtgggcttgtatatagcacttgtgggcttatgtgtccatctgtccgtgtctctcactag

SEQ ID NO: 252075 - DNA, 35 bp, Homo sapiens
  chr3:14313488-14313523
  hypo
gccttctgtattttcttcctcgcaacgttcagttc

SEQ ID NO: 252076 - DNA, 144 bp, Homo sapiens; identical to SEQ ID NO: 208773
  chr3:14383872-14384016
  hypo

SEQ ID NO: 252077 - DNA, 265 bp, Homo sapiens; identical to SEQ ID NO: 208774
  chr3:14384852-14385117
  hypo

SEQ ID NO: 252078 - DNA, 191 bp, Homo sapiens
  chr3:14386838-14387029
  hypo
actgtcttcaggaaaccctccgaggagctctgaaagagcagcgggtgcagcggagcgcatggaaggcaccactgcaatgttgacacgctgcctccggcctcctccattccacgtacactgaaggcaccgccacgatgctgacacgctgcctccggcctcctccattccacgaactcagactcagctggctc

SEQ ID NO: 252079 - DNA, 91 bp, Homo sapiens
  chr3:14452944-14453035
  hypo
cctcttaacagtgcctggcacgtagtaagcactcaaaaaagatgacgtgagttaaagtggacttcagctcgccctgctctgagccttgtgg

SEQ ID NO: 252080 - DNA, 36 bp, Homo sapiens
  chr3:14508072-14508108
  hypo
tggtccgagggctgacgctgccgggcgcgggcgcag

SEQ ID NO: 252081 - DNA, 226 bp, Homo sapiens
  chr3:14514231-14514457
  hypo
acatggcagatgggcgattcggagaagggacccacatttctgtgtgagctgatcattgtctgggccatcgtaataagttgcaagtgcccaggagaagcctacgccacactcaggattctgtgctccctggagcgtgcgaggggctgggcattggctccctcccgtgctttatacaccgcacaggccgggagcctcgctcaaacccgccctgacctctggctgtcct

SEQ ID NO: 252082 - DNA, 270 bp, Homo sapiens
  chr3:14535135-14535405
  hypo
tgggtggccccttaggagttcggcccacatgctgacttcagagcatccggggactgctggggcctggcgatcggggggcccggctgctgtgtgccgtgtgcggcttgcggctgatgatcagctccaagacatcacccgcctcggccaggagtggcaccgccaggcagcagtcgaagtcccgtgtacggacgtggttgacctgcatggggcacaagcaagggaacagaaccgagatgtcagccctgctgcgctgaagggagcaagaggcat

SEQ ID NO: 252083 - DNA, 112 bp, Homo sapiens
  chr3:14563228-14563340
  hypo
ctggccccgtgcagcgggattccatcgacactgagcagcctgtcgcccaccttcagggagccctccctgtagggaagggccagtcaccagcctggcccggcagcagcactgg

SEQ ID NO: 252084 - DNA, 131 bp, Homo sapiens
  chr3:14564198-14564329
  hypo
ggaccattccacagacgggaaaaccaaggagcaggaaagggaagaacgacaccaaggctgcccctctccaaacaccccaacccctgagacagcagtatgttggggaagaaagggctcgaggtttccctcat

SEQ ID NO: 252085 - DNA, 210 bp, Homo sapiens
  chr3:14565824-14566034
  hypo
ggccctggtggggaggtagccgtgtccacccgcaaccgaggcagtggagaaagttccccgtccaagggcacccaccgggcgggggcagctcatactccacctccagcaccacgcgctcgcccacattcttgagcagggtgatgatctcatcgtggcggagcctggtcaggtggatcccgttcacagaccgaatatagtcaccaatgttca

SEQ ID NO: 252086 - DNA, 40 bp, Homo sapiens
  chr3:15004944-15004984
  hypo
ggagccaaaaggttgagattcgcattttttattttttatt

SEQ ID NO: 252087 - DNA, 39 bp, Homo sapiens
  chr3:15005224-15005263
  hypo
cctctgcctcccaaagtcgcattttttaataatgctcat

SEQ ID NO: 252088 - DNA, 81 bp, Homo sapiens
  chr3:15079928-15080009
  hypo
agtgtgctgccacccgatgtcctttcttttttttccggccctttgccagtttccaagttttgttagcgcatataatccagt

SEQ ID NO: 252089 - DNA, 250 bp, Homo sapiens
  chr3:15105313-15105563
  hypo
agctcgctgcgggccgcaccgagacccccaccccttcccattatctgcctggcagttgcccggggacaaaggtgtgcacagttgtgcagtaggttatgaaggagtatctgggtgcccatacaccctaagaccaagaccaagtcttccaggaagccatcaagccagctgattccaggcaagcaggtccaagttatcagattcacctgcgcagagcaaatggctaggaagcggcttccggatctcttgaagg

SEQ ID NO: 252090 - DNA, 163 bp, Homo sapiens; identical to SEQ ID NO: 208778
  chr3:15116204-15116367
  hypo

SEQ ID NO: 252091 - DNA, 305 bp, Homo sapiens
  chr3:15123750-15124055
  hypo
ggaactacaaataattcaaacgaacaacttcccaaagcattctccagaatctgcaggagtgtacataacaaacagccaaatctgcctaagaaattagacccaagaccagacagcgcgaatcacctcgtagagcttcacgatgtcaggtgtgtgctccttctcatcaatctgctgctctctcttgagcagcgtgtccttgcagtgtgtacagcagcggatccggtcatcgtccttctcatccaggaccgagctgacactgctcatgctgctgatgctgcctcggcgggagccatggacactgttgg

SEQ ID NO: 252092 - DNA, 142 bp, Homo sapiens
  chr3:15349228-15349370
  hypo
actgtgcaggcagccgctctgcaagatgcactcgcatgcatgaccgcatcctcacggtcacctccctggtggtggccagtgccagtgctgtccacattcacaccagtgagaaaacggagggccagatcggttagcgtgtggc

SEQ ID NO: 252093 - DNA, 79 bp, Homo sapiens; identical to SEQ ID NO: 208781
  chr3:15374528-15374607
  hypo

SEQ ID NO: 252094 - DNA, 92 bp, Homo sapiens
  chr3:15432501-15432593
  hypo
gggatgatgcgggaagaaggtgatctttccctgaagccgagcagtctgagggcaggcccctctccaaagccgcatcatctgaagttagccac

SEQ ID NO: 252095 - DNA, 152 bp, Homo sapiens; identical to SEQ ID NO: 208782
  chr3:15540528-15540680
  hypo

SEQ ID NO: 252096 - DNA, 98 bp, Homo sapiens
  chr3:15674931-15675029
  hypo
tagagctctcctaccgggctccttttgtaaaataaattttatcttctccagatagaaagaaatgtgataccttgcggattttgcggtttccttgtttt

SEQ ID NO: 252097 - DNA, 232 bp, Homo sapiens
  chr3:16363981-16364213
  hypo
caggcaggccctgccgagaatgtggcctcagccatcaaaggtgcagtgagctgaatccaggtgatgcctgactcaggctttggtgtgtccactcgactcactggcctcttccccagcaactggtgaaaatgtcctcaggaaaagcaccacaggctgctcagggtggggtgggaagcatcagaatcatctggcacaagggttgccgacacttgcacctcgtacagcccttgtg

SEQ ID NO: 252098 - DNA, 215 bp, Homo sapiens; identical to SEQ ID NO: 208783
  chr3:16439262-16439477
  hypo

SEQ ID NO: 252099 - DNA, 78 bp, Homo sapiens
  chr3:16542424-16542502
  hypo
tatggctgactgttcgggaagtctggacagaatgcgggagcattcggaacaaatcgctgttatataaaacagagatgg

SEQ ID NO: 252100 - DNA, 77 bp, Homo sapiens
  chr3:16542622-16542699
  hypo
gacagagcaagacttgtctgtaacaaaacacacacacgcacacacacacaaacacagcacagcgccaaatacttggc

SEQ ID NO: 252101 - DNA, 120 bp, Homo sapiens
  chr3:17101442-17101562
  hypo
gagcaggaaagtatcgatgtgaaagtggcgatccaaacaaaaatgttctgggtctaacagaactcctctgtgcatgactgtggtgaagaagacctctttatttctcggtgaaatgaagtg

SEQ ID NO: 252102 - DNA, 70 bp, Homo sapiens
  chr3:17560360-17560430
  hypo
aaagtgcttgctctggctcccgcacctgctcacctgcgcgctccctcccgtgaggggtggaaggcagaca

SEQ ID NO: 252103 - DNA, 89 bp, Homo sapiens
  chr3:18427927-18428016
  hypo
gcaggacccatggccgaggcagcattcaagctcctttccctttcgtcctggtatattcggtctctttcagcttccggtaactgcaagaa

SEQ ID NO: 252104 - DNA, 152 bp, Homo sapiens; identical to SEQ ID NO: 208787
  chr3:18452751-18452903
  hypo

SEQ ID NO: 252105 - DNA, 130 bp, Homo sapiens; identical to SEQ ID NO: 208788
  chr3:18462328-18462458
  hypo

SEQ ID NO: 252106 - DNA, 76 bp, Homo sapiens
  chr3:19276255-19276331
  hypo
gcgagagagggccgtgagcactgccagcacgctgtcaccgctgaatttgacctgcgtacatgatcccagtctgagt

SEQ ID NO: 252107 - DNA, 138 bp, Homo sapiens
  chr3:19790879-19791017
  hypo
gcagagccacaattacataacggtgctcaggcgcgggcagggttgctgcggggaagtccaaatctggagcctcccgggctagcagcagcaggggtagaggccgcacgtctgccagtcgggcagtaccctggggaattg

SEQ ID NO: 252108 - DNA, 147 bp, Homo sapiens
  chr3:19992379-19992526
  hypo
caaatttggacatggctagtcgaggcgcaacaagacccaacgggccaaatacgggaaataaaatatgccagttcaaactagtacttctgggagagtccgctgttggcaaatcaagcctagtgcttcgttttgtgaaaggccaatttc

SEQ ID NO: 252109 - DNA, 44 bp, Homo sapiens; identical to SEQ ID NO: 208791
  chr3:20070404-20070448
  hypo

SEQ ID NO: 252110 - DNA, 98 bp, Homo sapiens
  chr3:20070774-20070872
  hypo
taggtttacaaggtcgccctgtctagaactcataccaactgacactaacaccaccacccccatctcacaactcacacacctttttttttgagacggag

SEQ ID NO: 252111 - DNA, 97 bp, Homo sapiens; identical to SEQ ID NO: 208792
  chr3:20071112-20071209
  hypo

SEQ ID NO: 252112 - DNA, 132 bp, Homo sapiens
  chr3:20113812-20113944
  hypo
ttccatttttaggccgaggagtcttgtaaatgtaatggctggaaaaaccctaacccctcacccactccccccagagccgacctgcagcaaataattgtcagtctaacagaatcctgtcggagttgtagccat

SEQ ID NO: 252113 - DNA, 36 bp, Homo sapiens
  chr3:20120131-20120167
  hypo
aagtgctgggattacagctaccgcacccttcatcat

SEQ ID NO: 252114 - DNA, 38 bp, Homo sapiens
  chr3:20630727-20630765
  hypo
ttttgccagtcctgctgaatgtccgaccgcctacacac

SEQ ID NO: 252115 - DNA, 319 bp, Homo sapiens
  chr3:23031955-23032274
  hypo
cactggtgggcctcgcacgccctccactagccggacggggccccgcaaccctgaagaccttgggcggccacgtgtcccacaggtttcagcagcagtggctttgctcagcgggaaagctgggagccaaggtctgtctctggacgctttgaaacaggccaagctacctcacaccgacatcccttctgctgccagctgtctgtccccagggctgacgcccctcatcccactctgcagccggatgggagagggcactcctgaacatcagtctcacctccccagcgctgtgcgtcctcgggtctgggccgggtactctgccagc

SEQ ID NO: 252116 - DNA, 57 bp, Homo sapiens
  chr3:23521987-23522044
  hypo
cctgatcccagccccgaccggttccatggagggtgcagccctcgctgcgcctccccc

SEQ ID NO: 252117 - DNA, 162 bp, Homo sapiens; identical to SEQ ID NO: 208793
  chr3:23750593-23750755
  hypo

SEQ ID NO: 252118 - DNA, 94 bp, Homo sapiens
  chr3:23838424-23838518
  hypo
acgttgaaacaatacgttaggccaggagacatgttagactggactggtaacagctacttttttttttttttgagacggagtctcgccctgttgc

SEQ ID NO: 252119 - DNA, 45 bp, Homo sapiens
  chr3:23848677-23848722
  hypo
cactggctgcatggtttgtgtgtttctgttttgtttctctccccc

SEQ ID NO: 252120 - DNA, 82 bp, Homo sapiens
  chr3:24060721-24060803
  hypo
ggctgcagctcttctctccttctcgttgcccacagcatggtgagcggggttgggtggggatgtttggcggatggcatgtttc

SEQ ID NO: 252121 - DNA, 441 bp, Homo sapiens; identical to SEQ ID NO: 208795
  chr3:24160975-24161416
  hypo

SEQ ID NO: 252122 - DNA, 169 bp, Homo sapiens; identical to SEQ ID NO: 208796
  chr3:24344850-24345019
  hypo

SEQ ID NO: 252123 - DNA, 31 bp, Homo sapiens; identical to SEQ ID NO: 208797
  chr3:24374243-24374274
  hypo

SEQ ID NO: 252124 - DNA, 195 bp, Homo sapiens; identical to SEQ ID NO: 208798
  chr3:24436870-24437065
  hypo

SEQ ID NO: 252125 - DNA, 178 bp, Homo sapiens
  chr3:25619924-25620102
  hypo
gttgatgaaggtttcgttcacacttgctgggtcggggcaatgtctttttttccagatggatactctattgtaaaatgatttccctccataagcttgactctccgtccctctcttccgtgtcatcttcctacgaaccggataaactgcctattaaatttaattacggcccaaatggcca

SEQ ID NO: 252126 - DNA, 303 bp, Homo sapiens
  chr3:25728357-25728660
  hypo
ccgccgccagcaccggacccggagccgccatgcccaagtgccccaagtgcgacaaggaagtttacttcgccgagagggtgacctctctgggcaaggacttgcctcggccctgcctgaagtgcgagaatgtgggaagacgctgacctccgagggccacgctgagcacgaaagcaagccctactgcaaccacttgctatgccgccatgtttgggcaaaaaggctctggccggggtgaagccgacagccacactttcaagtaaatcgggtggtggagacctcatccttggccgctcgctgggccac

SEQ ID NO: 252127 - DNA, 100 bp, Homo sapiens; identical to SEQ ID NO: 208804
  chr3:27519021-27519121
  hypo

SEQ ID NO: 252128 - DNA, 36 bp, Homo sapiens
  chr3:27563872-27563908
  hypo
gaaatcagatctgggccaggcgcagtggctcatgcc

SEQ ID NO: 252129 - DNA, 35 bp, Homo sapiens; identical to SEQ ID NO: 208805
  chr3:27564148-27564183
  hypo

SEQ ID NO: 252130 - DNA, 37 bp, Homo sapiens; identical to SEQ ID NO: 208806
  chr3:27587341-27587378
  hypo

SEQ ID NO: 252131 - DNA, 32 bp, Homo sapiens
  chr3:29664780-29664812
  hypo
cattataaaagtataaaagtcggccgggcgcg

SEQ ID NO: 252132 - DNA, 36 bp, Homo sapiens; identical to SEQ ID NO: 208807
  chr3:30574870-30574906
  hypo

SEQ ID NO: 252133 - DNA, 174 bp, Homo sapiens; identical to SEQ ID NO: 208808
  chr3:30713673-30713847
  hypo

SEQ ID NO: 252134 - DNA, 51 bp, Homo sapiens
  chr3:30885631-30885682
  hypo
ctttcataagcgcgcgggcgtgcgcgcacacacacacgttctctctccctc

SEQ ID NO: 252135 - DNA, 136 bp, Homo sapiens
  chr3:31494141-31494277
  hypo
tggttgtgccgttgcgagctgcagcggtgatcgccgcggcaggcccagaagtgtatcctgactcgtaaattgacgaagccactggtgctgcaagtgttcttttggggtagtgtctgggatccggtgcaagtcgaat

SEQ ID NO: 252136 - DNA, 37 bp, Homo sapiens; identical to SEQ ID NO: 208809
  chr3:31717147-31717184
  hypo

SEQ ID NO: 252137 - DNA, 139 bp, Homo sapiens
  chr3:31786601-31786740
  hypo
ggtagaaaagcaggtttgggcgcccttgctccagcgtgaatacacgcaaatctcctagactggattctgcacccaaattgttttattttgctacaatgggataaccagcaaagaggactatactcgttaatttactgat

SEQ ID NO: 252138 - DNA, 145 bp, Homo sapiens
  chr3:32151266-32151411
  hypo
agctggacacagtcccggtccttaaacaacttaccttcaggtctgagatcagtgaggacatggaagataagaccgaaggaattgccaagtggaatggagtaactgctctgttacactttaaatcgtgtttctttttttgtttgtt

SEQ ID NO: 252139 - DNA, 273 bp, Homo sapiens
  chr3:32663085-32663358
  hypo
agcccgctgcaagacgcttgctagggttgacttgtttcatggtgagggctccttgaagtgctggcaccaacaggtacttcagctcggtgaaagcaatctcttccaaatcttcatttcaattgaacaagtcgagctgcgataacatttcgggaaccttctcaaggaggcccaggcccttgaacaccttctcctggactatctggtaaccggtggtttcagctgctaattctacttcgtccagaagctgtttgcctgtttcgagcagcatgggga

SEQ ID NO: 252140 - DNA, 41 bp, Homo sapiens
  chr3:32886051-32886092
  hypo
ctaactttaaaaaattttgtagagagcgtctcaccagtgac

SEQ ID NO: 252141 - DNA, 145 bp, Homo sapiens; identical to SEQ ID NO: 208814
  chr3:33012238-33012383
  hypo

SEQ ID NO: 252142 - DNA, 284 bp, Homo sapiens
  chr3:33104315-33104599
  hypo
gtctacaaatcccccggttccttcttatcaaagcaatcagcttctattccattccagagccgttcggtgggtatgtgatgtgcacaaatgcatgatgtgccctcatggctaccaggcagaggcgtggaaggccaggagactagagacacagtgtgtcagggatgaaactgctcccacatgtgcttcacaaaaggaggcgacagtgacggttctgaaagtcctacggaagccaatatgtcaactgggatggcttccagacagaaggaacacgtataggaactgtg

SEQ ID NO: 252143 - DNA, 341 bp, Homo sapiens
  chr3:33216332-33216673
  hypo
gcactgcgtgggcacgcgaaggtggcccatccctgggctgcttacctttcccacaggcctgcaccaggccgtaccactccccacagctgttacatagcaaggtgaaggcggtctcccggtggcccatgatgtggcctggggcacacacgtacagcagttcatcccccatttccaagccggtgcggccctgcaggatggtgtgtgggaacgaaggcgggtctccacacggcttctctgaggagaaggaatcacagttagcttttccaaactgtgcggaactttttcagcctatgagaaaacagacttaaaacacaactctcccctgccgcccaccgtaccct

SEQ ID NO: 252144 - DNA, 120 bp, Homo sapiens
  chr3:33437663-33437783
  hypo
cccactgccattctcgcttgcactgcttgcagcttgctgctgcccttgcagcactgtgctgcttggctgctcccggcagacatagatggttaaacggggtctaaccgacctgcaatcaga

SEQ ID NO: 252145 - DNA, 137 bp, Homo sapiens
  chr3:33689109-33689246
  hypo
aatatgtaaacaaacgagtgcagttgtgcttcaataaaattttatatacaaaaacaggagggcagatggttttgatccgcaagcaacagtttgccaatctctgctctaggctaactactaaaagaagagtaagtagg

SEQ ID NO: 252146 - DNA, 180 bp, Homo sapiens
  chr3:33818924-33819104
  hypo
gaggttgcagtgagccaagatcacgccactgcactccggccaaagtgcgactctgtctcaaaagaaaaaacaagtaataactaatatttattgagttatttaatgttccaggtactattataaacactttatgtaaacaattatgtaactttttttttttgagatggagtctcgctctgt

SEQ ID NO: 252147 - DNA, 197 bp, Homo sapiens
  chr3:33841159-33841356
  hypo
taagaacattttttacgattttatagttaaacatttcttttgcataccttgttaatctcgttttctccgtatagtatattctacttgtttcacaggagaatcacaattgtattccaatccaagtagcagaaacccaggctaaactagcttgagctaagaaaagacttattctgccgggcgcggtggctcacgcctgt

SEQ ID NO: 252148 - DNA, 76 bp, Homo sapiens
  chr3:33841656-33841732
  hypo
ctgaaaagtctagggatattccttccttagctttaggtatcactggagatcgtcttgcctccgtgatgcttccctc

SEQ ID NO: 252149 - DNA, 223 bp, Homo sapiens
  chr3:36778835-36779058
  hypo
ggtctcctccctgcacgtactccaggatcaggtagatttccatgtctgtttcgtagacttcatgcaatttcacgatgttggggtgagagaggctctggatgatcaagatctcactgtccaccatgtcctccttgcccttgagtctggacttgtcaatgatcttcatcgcataggcctgcctggtctcgcggtgtctgcactccttcacgacagcaaagttccc

SEQ ID NO: 252150 - DNA, 162 bp, Homo sapiens
  chr3:36984240-36984402
  hypo
actcccctgtgaaatgctgacggtctcctcatactctgggagagcggcggaaacagaacctgcagttgccccataaagctggtcagtcggtcataaagtgaagttaacaatttatgacccgctttaaaaaaaaaaaaaaaacatagaatgggccggcgtggt

SEQ ID NO: 252151 - DNA, 41 bp, Homo sapiens; identical to SEQ ID NO: 208817
  chr3:36984642-36984683
  hypo

SEQ ID NO: 252152 - DNA, 137 bp, Homo sapiens
  chr3:37144393-37144530
  hypo
caccccatgcaatacactcacgctggacaaatctgggatactgatatcatccacctcagagacaacacttcccctacgattggagcgactgaaataatcagcggcagatacctttcggtcagaaaaaaaacaagatg

SEQ ID NO: 252153 - DNA, 38 bp, Homo sapiens
  chr3:37214389-37214427
  hypo
ttgagttttattggccgggcgtggtggctcatccctgt

SEQ ID NO: 252154 - DNA, 135 bp, Homo sapiens
  chr3:37438335-37438470
  hypo
accgtgcccggccttcaaacttattttattagtcccataaactctaccatccctcctgtttctgtagttgaatccaatgctgttatctgaagccagcgcctcacttttctacggagtctgcgttctctcacctat

SEQ ID NO: 252155 - DNA, 146 bp, Homo sapiens
  chr3:37649401-37649547
  hypo
ttttaatttgggggtaactccgtcttcaccattaatggccattcttcaaagctactttcattcctgtgagggatggccagacacgagaaagccaagcagggattttcagttacaggtgagcatccgatctgcagccagggcttttt

SEQ ID NO: 252156 - DNA, 61 bp, Homo sapiens
  chr3:37774454-37774515
  hypo
caccggggtatactccggaggggctgcatcatatggtctttctcttcgattcacatgatgt

SEQ ID NO: 252157 - DNA, 162 bp, Homo sapiens; identical to SEQ ID NO: 208820
  chr3:38017265-38017427
  hypo

SEQ ID NO: 252158 - DNA, 382 bp, Homo sapiens
  chr3:38030490-38030872
  hypo
ggctactgtggtaggatggtcgtagcggccaggcagacccagagacacagagggaggctggctccggagcaggcaggaggcgtgagagggagggccaggcccaggatccaccatgaaccagctgccgacgggccagtggcttgcgggagagagaaatcagggcaactccaggtttggggcctaagcaccctctggatgttcacactgaacgtgttcctggggctcagagagggtagatctgggaggggcctgaggcgatgttaaatgtgagaccaaacgtgctgggagagatgtgacagacggaagatggagacttaggccggggcaaggttcgggggagttgggtcagggagacactggcgtttccatgctatttgcagcc

SEQ ID NO: 252159 - DNA, 320 bp, Homo sapiens
  chr3:38032151-38032471
  hypo
gtgaatgcctagcccgctgagcactgtgtggtggggtgtgtcctgcagggcaggagctaggattgagttacagtggtggggaccaggagtagggaggcagagactggccccgtgccaggcctagcactgcccacaggcagggcgaaggcgcgggagcagtttccagcaggtaggcctgggcagagagttggggggcgggggtttccagggaaccagtggggcagagtgggctattcaagtcaagggcatagagcatagggtcccagggctcagggccacagagcctccgcggcagaattgggaggcggcagcagcccagc

SEQ ID NO: 252160 - DNA, 539 bp, Homo sapiens
  chr3:38033410-38033949
  hypo
gaatgaacacaggtgccatgcgagtgcgacctcagccctggcagctgagggcttggctctacgggctggggctggatatcagacgggctcccggacccctgggggcgatgctgcctctcccagtgacaccagccgagtcccaactttttggctgccagtttgactttccagtcccccatgtgccctggttgacactgttctgaggccatccagtagtctttctggcactctgtcaccatgttgtactcttccatgagctacagctcacagtttctgtctgcacctctggtcactgcctgcctgggcctctggtaactgtcactggtcactatttctgcctattactcagtgtccttctacggggccaccactggtggacatcctgcttgtcacccaatgtcctcacgttttctgttgcttgagatcaccttttcatggccactatgtctgcctgtcactcatgtcattgtcacaccaacaggccatcaactgtggcaacagttcttggggcaattagggtgcacggacggctcccttct

SEQ ID NO: 252161 - DNA, 176 bp, Homo sapiens
  chr3:38051945-38052121
  hypo
ggcccatgtcctggtagacacggcggtgtgccaggctgaaggcgctgccgtcagccgacagtaagtacatgaggaagccgtccttggtcatctgccgctgcgccttggctgggagggaggaggccactgcccgtcagagccagcctccagcaggcgctcctggctgcccacccatc

SEQ ID NO: 252162 - DNA, 123 bp, Homo sapiens
  chr3:38217259-38217382
  hypo
attctgctgtgtgacgtaggctaacgttggttgcagttaaagaactaactaggagaggacagaagaagagtggaagaagtgaggatgtaggatggggcattgaggaggcgtgccaatgtgaag

SEQ ID NO: 252163 - DNA, 143 bp, Homo sapiens
  chr3:38323910-38324053
  hypo
ccctggcaattttgcggccgcgttctcagcacaggtgtggacaggagcctgcctgggcctgtttggctgtggggaatctgtggaaggagcgggctgccctcccagaaagcgtgagttctcaggtgtggcgtctggccatctcc

SEQ ID NO: 252164 - DNA, 100 bp, Homo sapiens
  chr3:38413411-38413511
  hypo
tggtaatccacacacggcttttagttggatgtgaaattcagagcaggctttgtttgccttgtgcgagaacacatgcctccaagaaggagcctgtgcagac

SEQ ID NO: 252165 - DNA, 40 bp, Homo sapiens
  chr3:38413541-38413581
  hypo
tctgaaaaggcattttcatttgtcacgtaggtgtcacatg

SEQ ID NO: 252166 - DNA, 177 bp, Homo sapiens
  chr3:38674620-38674797
  hypo
cctgcaggtccagctggggccggggagcctcctcctcgggcagcccctctcggctctcctgcaaggtggttgagccgcgggcttgcttctctgccatgcgcttctcgatggctgccagggactcccgtgtgaacctgcggaagctgctggtgccccgaggtaataggaagtttgcca

SEQ ID NO: 252167 - DNA, 91 bp, Homo sapiens
  chr3:38755471-38755562
  hypo
gagcccgcagtggccgcagagcgcgaagggttcgaagggctttgatgggagccacttcagaatattccagaatcttcgctgtgagacttat

SEQ ID NO: 252168 - DNA, 57 bp, Homo sapiens
  chr3:38984804-38984861
  hypo
ttgggagtgggaatcggggattaactgcaaagaggcatgagacgttttggggggtaa

SEQ ID NO: 252169 - DNA, 246 bp, Homo sapiens
  chr3:39185651-39185897
  hypo
gcagctgcaggtctcagggtcgcagatcctatcgcagtgacagccacaatcctcccgggattggcgcagtgcctgcagctcccgcttctcctcccgatcgatccttcgcacacctgaagccctcagcagagctcgacgtcgccgggctgggtagggctgtaggaagctcacttcttccaaccggccacctgccacagcgactgccaagtcctcctccacagaggcgtcatcaatggcatccaccac

SEQ ID NO: 252170 - DNA, 106 bp, Homo sapiens; identical to SEQ ID NO: 208830
  chr3:39234910-39235016
  hypo

SEQ ID NO: 252171 - DNA, 45 bp, Homo sapiens; identical to SEQ ID NO: 208831
  chr3:40172135-40172180
  hypo

SEQ ID NO: 252172 - DNA, 68 bp, Homo sapiens; identical to SEQ ID NO: 208832
  chr3:40231758-40231826
  hypo

SEQ ID NO: 252173 - DNA, 104 bp, Homo sapiens
  chr3:40374174-40374278
  hypo
agaaaataatccagccgttggtggtaggagctgcagctgtctgaaaggagggatcatgagggaccctgaggagagcagagcaatgagcacgccagagatttgtt

SEQ ID NO: 252174 - DNA, 381 bp, Homo sapiens
  chr3:40429457-40429838
  hypo
tcttaacctgggctcgttctttaaacttgtgaggccggggcggtggacttactgacatcctgtattctctcacctgcagctaggagaaaagatgttcactgtgctgacccgccaaccatgtgagcaagcaggttagtatctctcagcaggtagcaagcgtggttttgccaaatcgcaagagaaccccagcttcggcctacagtttttcatccatatcccctgcaaatgattgtttaactttattggtttgagactcagtactcagctgggtttcaacaccggcattcctcaaataaaagtaatgcttttcatcaaagccacacaaaacaaggactaacatgcatgtttcacttaaatggtttttccggtttgtataatcca

SEQ ID NO: 252175 - DNA, 153 bp, Homo sapiens; identical to SEQ ID NO: 208834
  chr3:40510132-40510285
  hypo

SEQ ID NO: 252176 - DNA, 190 bp, Homo sapiens; identical to SEQ ID NO: 208835
  chr3:41119485-41119675
  hypo

SEQ ID NO: 252177 - DNA, 171 bp, Homo sapiens
  chr3:41283296-41283467
  hypo
aggtgtgaaacagccgttggaataaaacaatacagaaaaacatccatgacccaacaaaatatcaagattttaaataaaggcagtagtactgatttttcttttgcctcaagcgccagtaaggcttggtagggcacaacgctgacagtctacactggacgcccatgtgtccaa

SEQ ID NO: 252178 - DNA, 202 bp, Homo sapiens
  chr3:41289147-41289349
  hypo
ccatgaccaggagaccgttccatgcattcctgctctgcgcatcaaagcccctgtgtgacagaaggaatgcgtttgaacttggcccacccctggctgagtctaggctagactagtggggccatgctgcgcccccgcacacagcaggcccagtgaggctggaaaggacaaactactggcagagcagcatcggaactgagaacaa

SEQ ID NO: 252179 - DNA, 42 bp, Homo sapiens
  chr3:42159859-42159901
  hypo
aggtgtgagccactgcgccccgctgagatctgtatttacatg

SEQ ID NO: 252180 - DNA, 270 bp, Homo sapiens; identical to SEQ ID NO: 208837
  chr3:42190936-42191206
  hypo

SEQ ID NO: 252181 - DNA, 251 bp, Homo sapiens
  chr3:42207053-42207304
  hypo
aggtggttgtgatgcgtcaggcttttgtgggctgtggagttgggaatgtcagccccagagaaggggcctgagtcctgggcctttgttaatgtagtgtcatcggcagcactcgagggtgccgtgcacaactttcccgatgggtcagtgtcgaaggaggaactgacctggcgcatcagtacctaccgcagcactgttacaaaggtctcttggttcatggttttcattgtccttgtctccgcttgggatttggt

SEQ ID NO: 252182 - DNA, 157 bp, Homo sapiens
  chr3:42222606-42222763
  hypo
ctgttggtttctggccgtttgtgtgctggaagccttccgcatccttcaggtgctctggcagtcccttgccatgcctgagccatcttcattattatgctgtgtgcttgatttgtttgcattgaaatgtgcgtacaaaatgcggctaaaggccgggcgc

SEQ ID NO: 252183 - DNA, 96 bp, Homo sapiens
  chr3:42223003-42223099
  hypo
ccagcctgggcgacagatcgagactccatatcaaaaaccaacaaaaaatgtggcgaaggcatgcaaaatatcagcgcttgttggaacttggcagcc

SEQ ID NO: 252184 - DNA, 133 bp, Homo sapiens
  chr3:42243987-42244120
  hypo
gacggcgctgaggcggctgtccctgcgccgggagaactacctctcggagaggaggttctttgaggaggagcaagagaggaagctccaggagctggcggagaagggcgagctgcgcagcggctccctcacaccc

SEQ ID NO: 252185 - DNA, 62 bp, Homo sapiens
  chr3:42249920-42249982
  hypo
tctgcgcacaccatgcggcctctccctcaccccaccgcctcccacctcggcctgcctgtgtt

SEQ ID NO: 252186 - DNA, 88 bp, Homo sapiens
  chr3:42268588-42268676
  hypo
cactttggtgcgttcgaagaactaagagaaggcctgtgtggtagtgggctggtaggatcgagggagcgtggtggtagcagaaattatg

SEQ ID NO: 252187 - DNA, 37 bp, Homo sapiens
  chr3:42569053-42569090
  hypo
ccagcgtggcccaggcgtgccccgacccctccactgt

SEQ ID NO: 252188 - DNA, 104 bp, Homo sapiens; identical to SEQ ID NO: 208838
  chr3:42577666-42577770
  hypo

SEQ ID NO: 252189 - DNA, 87 bp, Homo sapiens
  chr3:42630386-42630473
  hypo
taaccaggaagccctgagtccgccccagctcaggtgttacctcacttctctcaccgggtttacctctctgtgaaatgggatgaaagc

SEQ ID NO: 252190 - DNA, 120 bp, Homo sapiens
  chr3:42640754-42640874
  hypo
ccatgtaatgtgtattttatagtttaaaaaaaaaacttataaaatagtgtggtactcagacacagatcattggaacaaaaatccagaaacagacccacacatatatggtcacaaggcgaa

SEQ ID NO: 252191 - DNA, 39 bp, Homo sapiens; identical to SEQ ID NO: 208839
  chr3:42659548-42659587
  hypo

SEQ ID NO: 252192 - DNA, 71 bp, Homo sapiens
  chr3:42815889-42815960
  hypo
aatggatctttcccgttggtctccaattgctgcctggtgagctgagggtgggagacgtataatatacaggt

SEQ ID NO: 252193 - DNA, 100 bp, Homo sapiens
  chr3:42851004-42851104
  hypo
gctgctattgaacacggcaggtgagagaatttctttatggccaattcttagacaaaaagtaggggaagcggttgggcacagtggctcacgcctgtaatcc

SEQ ID NO: 252194 - DNA, 45 bp, Homo sapiens
  chr3:42860055-42860100
  hypo
ttggcataatttttttgagacggagtctcactctgtcacccaggc

SEQ ID NO: 252195 - DNA, 283 bp, Homo sapiens
  chr3:42905954-42906237
  hypo
cagcactacaggacgtcgggactgggcatttccttccaacatggccgccactgcctctccgcagccactcgccactgaggatgccgattctgagaatagcagcttctattactatgactacctggatgaagtggccttcatgctctgcaggaaggatgcagtggtgtcctttggcaaagtcttcctcccagtcttctatagcctgatttttgtgttgggcctcagcgggaacctccttcttctcatggtcttgctccgttacgtgcctcgcaggcggatggtt

SEQ ID NO: 252196 - DNA, 73 bp, Homo sapiens; identical to SEQ ID NO: 208841
  chr3:42906566-42906639
  hypo

SEQ ID NO: 252197 - DNA, 44 bp, Homo sapiens; identical to SEQ ID NO: 208842
  chr3:43075000-43075044
  hypo

SEQ ID NO: 252198 - DNA, 99 bp, Homo sapiens
  chr3:43121444-43121543
  hypo
tgacgcctggcaccgtgcctcccgcaccttgcctggatataggccgactgtccacttctgcttccgtggtcctggccggcccttcaccacgcgccgtat

SEQ ID NO: 252199 - DNA, 110 bp, Homo sapiens; identical to SEQ ID NO: 208844
  chr3:43121573-43121683
  hypo

SEQ ID NO: 252200 - DNA, 193 bp, Homo sapiens
  chr3:43655462-43655655
  hypo
atgggagccacacagcgttcaacttagactagatacacagaaaaccccaaggtttccaatcttggatatgggaagaataactatgcgtgaaaaaaatagcaaagttggaaagaatgtctagtttaagggaacaataaagtgttccgcagagtatctggggacacgcatcaaaggtcaacgtttttgaacattt

SEQ ID NO: 252201 - DNA, 34 bp, Homo sapiens
  chr3:44237214-44237248
  hypo
aattataggccgggcgcagtggctcacgactgta

SEQ ID NO: 252202 - DNA, 384 bp, Homo sapiens
  chr3:44283269-44283653
  hypo
cctcggagctccgcgagaggccctccaaaaagacgctggcacggaactcgcggctctcctgcccgttggatcccgaagcaccagtcggggccccagacacgaggccccacttccgcttacgcgccccacttccgcttccggccccgggctgtggtgactggcggtgtggggtgggtcagagggcagtaggtacctccaggcgggagcagcgtttgcaccgcggtgggttcctgcgagctggtgcagaggggccccagcgggccggccccggggcacatgcgacgacctccacccctgggccccacgacggcctcagggcctgaaggcaatgtgcgaaacctgcagaagcggcaggcgccagggccaggcgcggcgggaggctgt

SEQ ID NO: 252203 - DNA, 153 bp, Homo sapiens
  chr3:44461798-44461951
  hypo
acccagcaactcaagctcctcgtggcagggcacagtgctccactggcaaagccgaggatgcactgcaaggctggctaatgctcagcgatgccggccaggctgcacgtccgattctggccacacctacctgccgttgctctgcatgccccactc

SEQ ID NO: 252204 - DNA, 291 bp, Homo sapiens
  chr3:44752300-44752591
  hypo
acagcttcctccttcatgaccgaagagattctgacacctgtacttgaagttattccacattttccccactttatccattgattataaaatcatcgggggcgcacggggcagcctcatccaggacacctaaggccaggcaggacgggcctggacggcgcagtcacctacagggcgagtccacccaccctctggtgcgtcccgtcccctccgactgcccagcgagcgcagcctcgcttcctccggactgagcctggggaccccagctccaccggatgcccccaccaggcccct

SEQ ID NO: 252205 - DNA, 37 bp, Homo sapiens
  chr3:44807340-44807377
  hypo
cccagacggagtctcgctctgtcacctaggctgtacc

SEQ ID NO: 252206 - DNA, 37 bp, Homo sapiens; identical to SEQ ID NO: 208852
  chr3:44808574-44808611
  hypo

SEQ ID NO: 252207 - DNA, 210 bp, Homo sapiens; identical to SEQ ID NO: 208853
  chr3:44816761-44816971
  hypo

SEQ ID NO: 252208 - DNA, 76 bp, Homo sapiens; identical to SEQ ID NO: 208854
  chr3:44882438-44882514
  hypo

SEQ ID NO: 252209 - DNA, 260 bp, Homo sapiens; identical to SEQ ID NO: 208855
  chr3:44945261-44945521
  hypo

SEQ ID NO: 252210 - DNA, 186 bp, Homo sapiens
  chr3:44999995-45000181
  hypo
aacattcaatagccacgtgcgcagcttggcatatttagctaagtcattgagcagaacactactgctttacccacagatattcaccaagaggcacttgctgcggcctgaaacaggcttgtccagcttttcaggaaaagatgcacctcgcccaagcaaagtgaaggccatttccgtgcaggttcctgg

SEQ ID NO: 252211 - DNA, 36 bp, Homo sapiens
  chr3:45541767-45541803
  hypo
acaggcatgagccaccgcgcccggccttctcttata

SEQ ID NO: 252212 - DNA, 91 bp, Homo sapiens
  chr3:45684621-45684712
  hypo
gcatgagaggaggaaaaacacgctgacttgtggggttgagtgaacttctcggcaccttcaagaatagtctgggaggccaggcgtggtggct

SEQ ID NO: 252213 - DNA, 296 bp, Homo sapiens; identical to SEQ ID NO: 208856
  chr3:45719314-45719610
  hypo

SEQ ID NO: 252214 - DNA, 139 bp, Homo sapiens
  chr3:45750558-45750697
  hypo
attattgggcccgtcgtaaatttatgtgttttatttgtcgaagatagctatgctaacttagcagggctgttgtgaagattaaagggaatctttggaaaatacctggcacacagtaggtcataaccgaaggtgatgtttt

SEQ ID NO: 252215 - DNA, 43 bp, Homo sapiens; identical to SEQ ID NO: 208857
  chr3:45968554-45968597
  hypo

SEQ ID NO: 252216 - DNA, 42 bp, Homo sapiens; identical to SEQ ID NO: 208858
  chr3:45968717-45968759
  hypo

SEQ ID NO: 252217 - DNA, 770 bp, Homo sapiens
  chr3:46009336-46010106
  hypo
gctgttttttctcccgcctcaactctgctagctcctcctcccaggagctcgtgtgggccagcaactcctgcagccgtcgccagagctggtctgcctcctgtcccttcccagacaactcctcctggagtggggccatctccttcaccaggcgctccaggctggcccgggcatcctctttcagctgaagctccttgaccagctgttccagttgggcactctgctgtctgttgacctcctcgaccttggttctctccctttctagggcttgaagcttctcccctagctcctgcatctcctgggccgcatcactgggaataggttcttgccggccctttgtgtctgatgccgtatctgccttctgctgagccatggctagccagcctgggaagctggctaaatgctggtttttcttgtccagtgagtcccgtgtggcctcaagctcctgtgccaagggctgcagcatggactccagccgccgcagggctgtgtggtagtcctcctccttctctgctgctcctagctccaggccctgcaggcatgtctgcagctccttcacagtgttctgggtggcctgggtgacctcccactgcttctggagctcagctaccaagcaagtgaggcgaacgttgtcctccgctgcagtgcgccccctctccctctctgtctgcagttgctccccttgctggctgacagctgccctcagctcctggttctctctgtccagctgctgcatgcgctcccgtagctgcttctcccgcacctccaactgg

SEQ ID NO: 252218 - DNA, 86 bp, Homo sapiens
  chr3:46020639-46020725
  hypo
ccgcgcccggcctgttctggagttttgtaaaacagcaaagccatggcattttgctcttgaggggcgcagaatttaaagtagaaagt

SEQ ID NO: 252219 - DNA, 226 bp, Homo sapiens
  chr3:46230413-46230639
  hypo
gtgccagcaggttccggggccctgtggtggcttgtgcacactgcagtctatctgcaggctcactttggcgtaggacggcacctggacccactggattccggctcccatgctcccctctggaagtacaagtcctgggccaggcgcatgtgaacctccatggtgaatgcagcagcttcctctgcagattcctagcgaggtagtggctggatgccgcgagagacagatg

SEQ ID NO: 252220 - DNA, 99 bp, Homo sapiens
  chr3:46245362-46245461
  hypo
tgacggtccgtgcccgcaaggcaaacacggcgtggacgatggccaggtacctgtcaatcgtcagcaggatgatgaaaaagatctcgctgtacaagcctg

SEQ ID NO: 252221 - DNA, 102 bp, Homo sapiens
  chr3:46586214-46586316
  hypo
ttgaatgaaaggcgccgtcacttaaattgatgttttttaaagacaaagaattatgttaagggtctagggcggggaacaggagaggaacgcatcctgaaagac

SEQ ID NO: 252222 - DNA, 36 bp, Homo sapiens
  chr3:46769541-46769577
  hypo
tgttgttgttgtttgagtctcgctctgtcgcccagg

SEQ ID NO: 252223 - DNA, 35 bp, Homo sapiens
  chr3:46769817-46769852
  hypo
gagccactgcgcccggccaagataggaaaaaaaaa

SEQ ID NO: 252224 - DNA, 54 bp, Homo sapiens
  chr3:46775530-46775584
  hypo
agtccccagcccccgctgactgacctctgcaagcagtgcgcagccgtgaggacc

SEQ ID NO: 252225 - DNA, 352 bp, Homo sapiens
  chr3:46874965-46875317
  hypo
gtgcttgagggggccggcccccagccccgcgtgccgctcctcacctggaaatgcagtggcctgccgtcagcacccacgtggcggtgaccagggtgccgccgcagatgtgcctgcctttggtcctcacgctcacctgccagggccacctcccttcctccgcgtccactcctcccacgattctcagaggggttcggccacacactggggtgaggatagtgtaggatgaagaactcactcaaagacacaggagttgactcccccgggcgccccgacgacagccaagaaggaggccatgtcccccggggctcccgagccacgcttcagattccccgggccgcggaccgcaggctcc

SEQ ID NO: 252226 - DNA, 195 bp, Homo sapiens; identical to SEQ ID NO: 208859
  chr3:46943639-46943834
  hypo

SEQ ID NO: 252227 - DNA, 182 bp, Homo sapiens
  chr3:46944572-46944754
  hypo
agattctgggtgtgtcggctgcctgtagccaaacaccctgttgtgaggatgggatttcacttggccttggagtttcccaggagtcccctattcccattttcattccgtgctgggtgtccaggggccgggatggggcatcgctggggttgggagacacacctgactgccgcacccttactgcc

SEQ ID NO: 252228 - DNA, 132 bp, Homo sapiens
  chr3:46948914-46949046
  hypo
ggcccggacactggcgcttgcccggaggccacagtcagacaacctgtccacaacaaactcatatccatacatcagcaagacagtggggcgtgttgggtgtcattctccatgtgcgagcgtttgtatgcgcgt

SEQ ID NO: 252229 - DNA, 220 bp, Homo sapiens
  chr3:46985694-46985914
  hypo
aaagtcacagaacccatcagcggtagctgcaagtctggatccaggtcgtcctgatgcctggccctcagtcttgccaaggagacgagagagaggctatcaagagtggaagagtggcgctgagtttctaaagagctctgattctacccgcctctcctgcgctccccacacagttcagacctggtcccatgtgctcagatgcggccacagccagcccaagtcc

SEQ ID NO: 252230 - DNA, 38 bp, Homo sapiens; identical to SEQ ID NO: 208862
  chr3:47007698-47007736
  hypo

SEQ ID NO: 252231 - DNA, 199 bp, Homo sapiens
  chr3:47043982-47044181
  hypo
gcgcgcccagagtcgtcgggccttccaggtgtgccacccggggtaagggatgggaaactgctccacacatgcacccaggagatgactgacaatgtggagaaacgggtagggcaggcagcagccaggggactgacctattacccccaccccaggagctggtgctggaacctgcgcagaggcgggcgcgcctggaggggct

SEQ ID NO: 252232 - DNA, 36 bp, Homo sapiens
  chr3:47185204-47185240
  hypo
tttttttttttattttgagacggagtctcgctgtcg

SEQ ID NO: 252233 - DNA, 36 bp, Homo sapiens
  chr3:47185480-47185516
  hypo
tgagccactgcgcccggccacattacaccagaactt

SEQ ID NO: 252234 - DNA, 92 bp, Homo sapiens
  chr3:47239322-47239414
  hypo
acagagcgagaccccgtctcaaaaagacaaaacaaaacaggcagggcacggtggctcacgcctgatcttgcggtgagctgagatcgcgccac

SEQ ID NO: 252235 - DNA, 32 bp, Homo sapiens
  chr3:47240137-47240169
  hypo
ttagcctggccgggcgcagtggctcacgcctg

SEQ ID NO: 252236 - DNA, 120 bp, Homo sapiens
  chr3:47370605-47370725
  hypo
gagaccctgtctcaaaaaagaaaaaaaaggaaaaaaaaagacaagtataagagttcccatactaaagaagccatctgtccgtgttgtgttttttttgttgttgttttgtttgttttttgt

SEQ ID NO: 252237 - DNA, 138 bp, Homo sapiens
  chr3:47373436-47373574
  hypo
gagagctggggcacacgcccagggacgggggacaggtagattcttactgaaattctcttctgattttctattttctcacctgagagtgaggatgagggacgaaggttagaaacttaaggaaggccgggagcagtggct

SEQ ID NO: 252238 - DNA, 96 bp, Homo sapiens
  chr3:47677842-47677938
  hypo
ccaaagcacagagtcgctgccctctctgcatactctgctataaagcaagggttaccatgcccagaggaatgtgaagggaattaactgatatttttg

SEQ ID NO: 252239 - DNA, 81 bp, Homo sapiens; identical to SEQ ID NO: 208863
  chr3:47889946-47890027
  hypo

SEQ ID NO: 252240 - DNA, 361 bp, Homo sapiens
  chr3:47890801-47891162
  hypo
gcgtgctgatggccggcctctaccccaacctcatccaggtgctgcctctgggagggaatggagttcaccaggtcccagcctccttccctgtctgcagctccttgctcagccccacccgtcttttcctccatccctgcaggtgaggcagggcaaggtcacccggcaggggaagttcaagcccaacagcgtcacatataggaccaaatcaggcaacatcctgctgcacaagtcgaccattaacaggtgagggcatgcaggcctggatggggcagctgggatggtccaaaagggtggcctcaccagccctgtgttccctagggaggccacacggttacggagccgatggctgacgtatttcatg

SEQ ID NO: 252241 - DNA, 89 bp, Homo sapiens
  chr3:48053067-48053156
  hypo
gtagtagtggcacacctgtgacccatttacaacagacgaatgtgggtgggaagccctattctatgctcgtccagcctactttacatata

SEQ ID NO: 252242 - DNA, 39 bp, Homo sapiens
  chr3:48236530-48236569
  hypo
gtaatggccgggcgcggtggctcacgcctgtaatcccag

SEQ ID NO: 252243 - DNA, 168 bp, Homo sapiens; identical to SEQ ID NO: 208865
  chr3:48263634-48263802
  hypo

SEQ ID NO: 252244 - DNA, 32 bp, Homo sapiens; identical to SEQ ID NO: 208866
  chr3:48275732-48275764
  hypo

SEQ ID NO: 252245 - DNA, 35 bp, Homo sapiens
  chr3:48316727-48316762
  hypo
gagccaccacgcccgacctcttaaagtcacttata

SEQ ID NO: 252246 - DNA, 76 bp, Homo sapiens
  chr3:48456672-48456748
  hypo
attctcgagaccacggtcacccggattcttggcgtctgtaccacgtccagattctggccacggacgcatatctcac

SEQ ID NO: 252247 - DNA, 257 bp, Homo sapiens
  chr3:48459418-48459675
  hypo
cccctgatggtgacacgggtgcctccgtctacaggcccagtcagtggctccacctgttccaggacaaggactgctcacctctactcaactggaaaggcagccccaacctcccacctttgggcccccacaccctccctctaagggcagcactgaggaagggatggccagcctttcaacaaaccgagtggatgaggggcgctgggcactgggtggccacagcctcagcctcaccacaggcctcccgggtcacacaacgt

SEQ ID NO: 252248 - DNA, 70 bp, Homo sapiens
  chr3:48461257-48461327
  hypo
tgggatgaagagcctcggggccagggtctgcagggggcactgctgctacctctgacggtgacagcgggga

SEQ ID NO: 252249 - DNA, 296 bp, Homo sapiens; identical to SEQ ID NO: 208868
  chr3:48474263-48474559
  hypo

SEQ ID NO: 252250 - DNA, 187 bp, Homo sapiens
  chr3:48506154-48506341
  hypo
tggctaggctgagcggattgttagggtgcaggccatggtggcaccaggcctcagtctgcaccccccctctctcaggtggtcagagcgctcacggtgatgttgcacagacagtggctgacagtgcggagggcagggggacccccaaggaccgaccagcagaggcggacagtgcgctgtctgcgggaca

SEQ ID NO: 252251 - DNA, 84 bp, Homo sapiens; identical to SEQ ID NO: 208869
  chr3:48563029-48563113
  hypo

SEQ ID NO: 252252 - DNA, 132 bp, Homo sapiens
  chr3:48575984-48576116
  hypo
ctcatgaagtcctccgtagcctcatcactgtcgcggttgacatagtcagggctgcccagtttcacttgctgccggagccaggcacagagaaaggacatatcagggtcaggagccaggcggggccagagacca

SEQ ID NO: 252253 - DNA, 39 bp, Homo sapiens; identical to SEQ ID NO: 208870
  chr3:48607711-48607750
  hypo

SEQ ID NO: 252254 - DNA, 106 bp, Homo sapiens
  chr3:48636553-48636659
  hypo
ttcccgcctagaagcgcagccagaacatgccgctacggatccggttgtagtctgggagctgctcaatggggcctgtggggatagggtggagcgtcagggtggggta

SEQ ID NO: 252255 - DNA, 76 bp, Homo sapiens
  chr3:48659179-48659255
  hypo
catgcagcatggccgtcgctagtgccagggccggaacccgggcacctggcaacgggcaaacgcccctcccccggga

SEQ ID NO: 252256 - DNA, 212 bp, Homo sapiens
  chr3:48698252-48698464
  hypo
caccacctggatctcgccagtgaggctgtcgatggcaaagtgtccacggctattgccactgatgatgttgtagtgcaccaatccgttggcgtccttgtcccggtcagtggccgtgacgcgcagcacgactgtgtgggggcgcacatcctcgcgcacctgcgccacgtagcgcttctcgctgaactgaggagcattgtcgttctcgtctagca

SEQ ID NO: 252257 - DNA, 40 bp, Homo sapiens
  chr3:48702183-48702223
  hypo
tggttttgacagcaccagcgctttctgtgtccacaatcta

SEQ ID NO: 252258 - DNA, 164 bp, Homo sapiens
  chr3:48703692-48703856
  hypo
tgggattacaggcatgagccattgtgcccggcctgccctgttcttcttagacaaacttgctgggctaaaatctaaccccgttaaaatagactatttacgtattgtttgcctctagcgcagcagaacattgctggagaaaaacaaacaaccgtgctaattggtct

SEQ ID NO: 252259 - DNA, 129 bp, Homo sapiens; identical to SEQ ID NO: 208874
  chr3:48731397-48731526
  hypo

SEQ ID NO: 252260 - DNA, 199 bp, Homo sapiens
  chr3:48732603-48732802
  hypo
acagggttgtctcattgaagcggagcacgcatgagtgccccccgacctggtggacaaagggctccagaaggacgcctttggcgcggggctccacatccatggccctgaaggctgggctcatcctccgggcgcagatggcggggagatgggggaggcagcggagtccagcggccagtacgtcttctgtctgttgtttgtc

SEQ ID NO: 252261 - DNA, 35 bp, Homo sapiens; identical to SEQ ID NO: 208875
  chr3:48733584-48733619
  hypo

SEQ ID NO: 252262 - DNA, 31 bp, Homo sapiens
  chr3:48752182-48752213
  hypo
aggcaggagaatggcgtgaacccggaaggcg

SEQ ID NO: 252263 - DNA, 39 bp, Homo sapiens
  chr3:48797086-48797125
  hypo
tgggattacaggcatgagccactgcgcccggccaagtat

SEQ ID NO: 252264 - DNA, 34 bp, Homo sapiens
  chr3:48948535-48948569
  hypo
atgcagcactcctcacggtgataatttttttttt

SEQ ID NO: 252265 - DNA, 120 bp, Homo sapiens
  chr3:48954852-48954972
  hypo
aggcgtgagccacggtgcccggccacgcggcatgatttttaatggctttctacattgtatggtttgttattgttgttttgagacagggtctccttctatcaccgatgctggactgcagtg

SEQ ID NO: 252266 - DNA, 33 bp, Homo sapiens
  chr3:48978307-48978340
  hypo
atatatttgtgcaggctgggcgcggtggctcac

SEQ ID NO: 252267 - DNA, 31 bp, Homo sapiens; identical to SEQ ID NO: 208876
  chr3:48986829-48986860
  hypo

SEQ ID NO: 252268 - DNA, 120 bp, Homo sapiens
  chr3:49014624-49014744
  hypo
actccgtctcaaaaacaaacaaacaaacaaaaaactgccatctctttctttgctgtatgttttataccacctatatgggcaaccgtagggaatgtggttttttgttttgttttgtttcgt

SEQ ID NO: 252269 - DNA, 85 bp, Homo sapiens; identical to SEQ ID NO: 208877
  chr3:49023684-49023769
  hypo

SEQ ID NO: 252270 - DNA, 144 bp, Homo sapiens
  chr3:49034171-49034315
  hypo
gcaaagctacggaccggtaaaggttaatcaggtataattaagtctgtccggggttcgacaaacagcatcttgtccaaggtgagcatagcccaaggctatgtgcctgcccggagactcagcttggggttccgaggcatgtgggca

SEQ ID NO: 252271 - DNA, 323 bp, Homo sapiens; identical to SEQ ID NO: 208879
  chr3:49035605-49035928
  hypo

SEQ ID NO: 252272 - DNA, 42 bp, Homo sapiens; identical to SEQ ID NO: 208880
  chr3:49080008-49080050
  hypo

SEQ ID NO: 252273 - DNA, 180 bp, Homo sapiens; identical to SEQ ID NO: 208881
  chr3:49095131-49095311
  hypo

SEQ ID NO: 252274 - DNA, 31 bp, Homo sapiens
  chr3:49142764-49142795
  hypo
agggacctcacataagttctatgatgatttg

SEQ ID NO: 252275 - DNA, 32 bp, Homo sapiens; identical to SEQ ID NO: 208882
  chr3:49145906-49145938
  hypo

SEQ ID NO: 252276 - DNA, 31 bp, Homo sapiens; identical to SEQ ID NO: 208883
  chr3:49433706-49433737
  hypo

SEQ ID NO: 252277 - DNA, 32 bp, Homo sapiens
  chr3:49522230-49522262
  hypo
ttttttttttttttttgagacggagtcttgct

SEQ ID NO: 252278 - DNA, 36 bp, Homo sapiens; identical to SEQ ID NO: 208884
  chr3:49532336-49532372
  hypo

SEQ ID NO: 252279 - DNA, 97 bp, Homo sapiens
  chr3:49636112-49636209
  hypo
tacaggcatgagccaccgtgcccggccgccaccattacacttaatggtgaaaaactgaatgctttccccataaaactgtgtacgaagcaaagatata

SEQ ID NO: 252280 - DNA, 126 bp, Homo sapiens
  chr3:49662399-49662525
  hypo
catttcagcacttcccggagactggaccccaaggaacccctgggtaaccagagagcagcttccccaactccgaagcaggcttctgctaccactcctggccatgagagcccccgagagacaagggca

SEQ ID NO: 252281 - DNA, 181 bp, Homo sapiens; identical to SEQ ID NO: 208885
  chr3:49688341-49688522
  hypo

SEQ ID NO: 252282 - DNA, 117 bp, Homo sapiens; identical to SEQ ID NO: 208886
  chr3:49690065-49690182
  hypo

SEQ ID NO: 252283 - DNA, 57 bp, Homo sapiens; identical to SEQ ID NO: 208887
  chr3:49690212-49690269
  hypo

SEQ ID NO: 252284 - DNA, 57 bp, Homo sapiens
  chr3:49698935-49698992
  hypo
tataccagtctggagcagaacgttcctcgaaactacgtaatgattgatgacatcagt

SEQ ID NO: 252285 - DNA, 210 bp, Homo sapiens
  chr3:49699563-49699773
  hypo
acgcagtggaggacgaccgcatttatggcgggagcagccggtcccgggcaccttctgcatacagtggggagaagctgtccagccacgacttcagtggctggggcaaggggtacgaaagggaacgggaggctgtggagcgacttcaaaaagcgggccccaagccctcatccctaagtatggcccacagccgggtacgaccccccatgcgga

SEQ ID NO: 252286 - DNA, 569 bp, Homo sapiens; identical to SEQ ID NO: 208889
  chr3:49720264-49720833
  hypo

SEQ ID NO: 252287 - DNA, 218 bp, Homo sapiens
  chr3:49722992-49723210
  hypo
aggcagggtcatgggggaagcgtcactagtgctcaccgcagcgtcgcagggcacagtagtcgaatggggtccttgggtccatcgtgtagcaccagggcccatggctatccccatctgggttccggcagaagttctcctccagttgtgcatgcggttcggaggtaaacgtgaacctaggcggaagcgggagcaaaatcgtggcagggtagtctcaacca

SEQ ID NO: 252288 - DNA, 338 bp, Homo sapiens
  chr3:49755502-49755840
  hypo
cattgaggcccctccggcctggctccagaaagactacgtgcttgtggacgctggccttgcggctgggtgcgtctggcggtgtggtgctgagtactgaggactgtgcgctcagctcttggagcgggctgggtgtttggggccagcggcggcagcggcaggcacggcggcagcagcggcagggtggggcgaacaggtagagcagcacgagcacaaggcccacggcacagcccagcagtgtggtgaagcctgtgttgaaagcctcgggctctgggcgcggaaagtgcacgctcacgttgtactcgtgcgtctggttgtggtgcaggcggggcccagtggcc

SEQ ID NO: 252289 - DNA, 1138 bp, Homo sapiens
  chr3:49939689-49940827
  hypo
gaatgcttctttccgcctgcccccccaccgcgcccccagatcccctcagtgatggaagggaagcagcctgtgttcagccatgtgcatgcagctcacaagtaagggccccttctttcagcttaccgggttggggcaaaaactgggcgactggaagaagtcgaggcctcgccggaggcctggatggactggggattcacaacagcgctccacaccctcatcaattagtgtgtccagcaggtcaatggggaaggcacagacgacagagttggggcccacgccaggaccaccatccttgccagtcacaaagaccccaaatagtacttcctggccctcggcgatgctcagctcagtggcaagttgggcacccactggagcggagtgggccacccgcagcacagggtagggctgtccgccttctggggccccccggcgcctgcgttttggagcaaatctgcagtcgaggaccagctcccgatagtcacccaactctggctcagtggcgctaagccgtgccaggcgtgtgtgcagggcactaggatcatctgtcacgctggccggctgtacagtcaggaagtatacgaaggctcccgtgtggaagctgtgcacgtattcaatactgtaggagacaagatgcttgggcagcactgacaacgccacaaagcccggtgcgaatcccgaggcgtcagccttgagacgcctgatagacactgagcgtgggctgaagctggcagccacggctgcgtccagtgaggatgccacgtagaaataggaggcctggccttgctcaaccacagttacacgggtgcccaatgggctggccacacagtcggggcagtcatcgggccggttatggtgggctgagaagaggcaggctggcgctgccagatgcacggctgtcccttggggctctaggtcatgcaggaagcagcggccctgcaggctggagccacaactgaccagcgcaggcagcgcgggatccagcaccagcacctttgtgtctgtgtcaccgggagggccgtggggtcctgggccacaggctgcacacgtctggcagccagggtctccagcagggcccgtggccaggctctggacagacttcaggtcaggcccaagcacatgcaggcgattgcgtatggct

SEQ ID NO: 252290 - DNA, 106 bp, Homo sapiens
  chr3:49947779-49947885
  hypo
taagagatgtgtgcgtggaagaagccggctgcgttgaatttgggcaggcacacgggcgtccaggcctcgccctcgcgaaaggacgaggaggaactaatgaggttga

SEQ ID NO: 252291 - DNA, 34 bp, Homo sapiens
  chr3:49947915-49947949
  hypo
attggtcctttcggcgcacgagtgccacgagctg

SEQ ID NO: 252292 - DNA, 226 bp, Homo sapiens; identical to SEQ ID NO: 208891
  chr3:49948218-49948444
  hypo

SEQ ID NO: 252293 - DNA, 100 bp, Homo sapiens
  chr3:50140300-50140400
  hypo
cactccctgactccgtttacctttactccgcatcccattctcttactgcctatctgaaggattggatgggcagagtataggtggcggtggttggtcctcc

SEQ ID NO: 252294 - DNA, 159 bp, Homo sapiens
  chr3:50144933-50145092
  hypo
ggtaaccgcgtcagcgctttctctgtagctagtacggctattgctgctgctcagtggtcatccacccaggtaagatcgaggatctttttgctcaaggtagtgtggtggtggtgcccagattcacagacgtgacctctcctgtggtactcgcagtatgag

SEQ ID NO: 252295 - DNA, 39 bp, Homo sapiens
  chr3:50145392-50145431
  hypo
acagccgtgagccacagcgcccagcatcatgagctcatt

SEQ ID NO: 252296 - DNA, 42 bp, Homo sapiens
  chr3:50210490-50210532
  hypo
gggtttagctttgggtgtggcgccttccctggcctgcctacc

SEQ ID NO: 252297 - DNA, 126 bp, Homo sapiens
  chr3:50214171-50214297
  hypo
acgatgctgagccccgctctgccttacaggattacatcttctacctggagcctgagcgactcgagtcagggaagggcaagtgtccgtacgatcccaagctggacacagcatcggccctcatcagtg

SEQ ID NO: 252298 - DNA, 57 bp, Homo sapiens; identical to SEQ ID NO: 208893
  chr3:50224043-50224100
  hypo

SEQ ID NO: 252299 - DNA, 48 bp, Homo sapiens
  chr3:50225313-50225361
  hypo
accactgtccatgagcgccccgccacccccaggcgcaggccccccaac

SEQ ID NO: 252300 - DNA, 458 bp, Homo sapiens
  chr3:50255800-50256258
  hypo
cagtacggtggcaccggtgggcagaggcctaggctaggctggggggaaggggctggttgtggccatggtgccctccataccgaggcgtgtggtgcctggctgtgccttgccgctgtggaggtgagtctgcatgccaatccccacagtgttggggtcccctaggcagctcagatcccacctccttcctggggccacctactgaccaccctccctgcctgccacagacggggtggagtcggagctgctgcacacctacagcaaggtggacccgtttgacgtcctgatcctgtgtgtgcgcgtggccgtgctgacagcagtcacgctcacagtgcccatcgttctgttcccggtgagctggtgggcaggtggctagactagtggcgggaggggctgatggggccaacaggctgatgattcttctcacctgccccccaggtgcgccgcgccatccagcagat

SEQ ID NO: 252301 - DNA, 57 bp, Homo sapiens
  chr3:50395835-50395892
  hypo
tcagccatgtcccctcggccccggctatggcgctggtagaagcgaagatatacccaa

SEQ ID NO: 252302 - DNA, 133 bp, Homo sapiens
  chr3:50404009-50404142
  hypo
tcattgttaacctcgcagtccatctcacagtggctgttggggccgcactgctgggcagagagtgaggaccgtaagccacccaccagttttcctccctcccatcacctttcatacatccggttccccaggccat

SEQ ID NO: 252303 - DNA, 40 bp, Homo sapiens
  chr3:50420382-50420422
  hypo
ctactcagccccatgcgcacagacccgtacccacctgcac

SEQ ID NO: 252304 - DNA, 356 bp, Homo sapiens
  chr3:50425413-50425769
  hypo
gggaaataatgactcgacgccgcatcttccaatttcttctattaaaaagcctgctcattacgggcatgtacttattaattatctgtgatttgttgtgaaatgcgagggggtttccacaacaggagtgggagaaaacaaagcccagccctggcgcctgcctcccagccctcacccgcctgcgtctgccccgcctgtccctggcccatgtctgcttgccagtcgcctgggttcttggccatctgtgcgtcataatcaccggccgccccggggacccgtaacacaaacgggctaatttcatgtgtaatgatctttaatcagaaccgagcgcggctgacagaggccgccagaaggtgagc

SEQ ID NO: 252305 - DNA, 53 bp, Homo sapiens
  chr3:50523258-50523311
  hypo
ggatatagcaatcagcgagaggcactaacaaacaagcccgggcctcccagggg

SEQ ID NO: 252306 - DNA, 33 bp, Homo sapiens
  chr3:50575571-50575604
  hypo
cggtatgtggtattcggtgcatggtattgttgg

SEQ ID NO: 252307 - DNA, 84 bp, Homo sapiens
  chr3:50605776-50605860
  hypo
tttatgggagtcaccgggtagcctggtacaaatgcaaacgcccctgtgtctcccggtctgggaaggaggcagggaaacagcatg

SEQ ID NO: 252308 - DNA, 38 bp, Homo sapiens
  chr3:51617714-51617752
  hypo
ttacaggcatgagccaccacgcccggccgacaagtggt

SEQ ID NO: 252309 - DNA, 86 bp, Homo sapiens
  chr3:51623969-51624055
  hypo
gcttagagaagttccggggaattcatgttcagcatttttttctttgtttttcttttggagagagtctcacctcgtcgctcaggctg

SEQ ID NO: 252310 - DNA, 37 bp, Homo sapiens
  chr3:51660728-51660765
  hypo
gggattacaggcatgagccaccgcgcccagcccccaa

SEQ ID NO: 252311 - DNA, 119 bp, Homo sapiens
  chr3:51680379-51680498
  hypo
aaagctatgaggaagacaaacgcacatcagtcccctatacccgcccatcgtatgcgcagtattaccctgccagcgatcagagcctgaccagcatccccgccttcagccagagaaactgg

SEQ ID NO: 252312 - DNA, 107 bp, Homo sapiens
  chr3:51737837-51737944
  hypo
cgtggctgggatgacggtgacacccgcagcgagcacagctacagcgagtcaggtgccagcggctcctcttttgaggagctggacttggagggcgaggggcccttagg

SEQ ID NO: 252313 - DNA, 241 bp, Homo sapiens
  chr3:51743195-51743436
  hypo
tttttgcactggaccgcatcaaccgtgacccgcacctgctgcctggcgtgcgcctgggtgcacacatcctcgacagttgctccaaggacacacatgcgctggagcaggcactggactttgtgcgtgcctcactcagccgtggtgctgatggctcacgccacatctgccccgacggctcttatgcgacccatggtgatgctcccactgccatcactggtgttattggcggttcctacagtga

SEQ ID NO: 252314 - DNA, 175 bp, Homo sapiens
  chr3:51749174-51749349
  hypo
cagtgggcgctatcgctaccagaaggtgggctactgggcagaaggcttgactctggacaccagcctcatcccatgggcctcaccctcagccggccccctgcccgcctctcgctgcagtgagccctgcctccagaatgaggtgaagagtgtgcagccgggcgaagtctgctgctgg

SEQ ID NO: 252315 - DNA, 206 bp, Homo sapiens
  chr3:51749768-51749974
  hypo
cttcggtggggcccgggagggtgcccagcggccacgcttcatcagtcctgcctcacaggtggccatctgcctggcacttatctcgggccagctgctcatcgtggtcgcctggctggtggtggaggcaccgggcacaggcaaggagacagcccccgaacggcgggaggtggtgacactgcgctgcaaccaccgcgatgcaagtatgt

SEQ ID NO: 252316 - DNA, 66 bp, Homo sapiens; identical to SEQ ID NO: 208896
  chr3:51996783-51996849
  hypo

SEQ ID NO: 252317 - DNA, 166 bp, Homo sapiens; identical to SEQ ID NO: 208898
  chr3:52088124-52088290
  hypo

SEQ ID NO: 252318 - DNA, 202 bp, Homo sapiens
  chr3:52255938-52256140
  hypo
ccctggagctggcccggactgccacacttcacccggctgggcagaccgggcacggcagcctgcacctccagcaggaagtccataaaggccgccccacaggcgcagtgcagagggttggcgcttacatctagtatttgcagggcactcgccaggggcccaaaccaggagtggtccactgtcttgagggcgttggcgctaaggt

SEQ ID NO: 252319 - DNA, 115 bp, Homo sapiens
  chr3:52256498-52256613
  hypo
gcccagtgcattgccgctgaagtccagggcccgcagcgacgtactgcagagctgctgggacacttggctgtggatgttgttgtgggccaggctgaggtggcgcagggtgcgcagg

SEQ ID NO: 252320 - DNA, 282 bp, Homo sapiens; identical to SEQ ID NO: 208899
  chr3:52257379-52257661
  hypo

SEQ ID NO: 252321 - DNA, 133 bp, Homo sapiens
  chr3:52258190-52258323
  hypo
ccagttgcagttcaccaggccgtggggctggagctcacagggtaggaaggcaggcaaggtacccagggccagggtcatggccagcatgatggcctgcaccaggagagacagcgggtgcagggcgctgcggcag

SEQ ID NO: 252322 - DNA, 159 bp, Homo sapiens
  chr3:52415740-52415899
  hypo
tgagccacatctgtcgcatcagccgcaccctacgccaggcgctgggcaatgcactcctgctgggcgtgggtggcagcggccgcagctccctcacaaggctcgcctcgcacatgtgagcgcctccagggcgtgctgggcagtgggcggccagggctggct

SEQ ID NO: 252323 - DNA, 36 bp, Homo sapiens; identical to SEQ ID NO: 208900
  chr3:52440357-52440393
  hypo

SEQ ID NO: 252324 - DNA, 249 bp, Homo sapiens
  chr3:52440846-52441095
  hypo
tgcagtggcgaggccgatacgctccatgatgacccgccgggccttgtctgtccactcctcgtcctccccccagggccctagtggagaccaagacaaggaatcagcgagaaggaaaccctgagtttgggcaggccaggagtgggaaggaagacagagaagagcagttgagccagggaatcaggagctggtcgggcaatatggtgtagggtgaaaccccagccagagccgggtgtcggtaccgacaacccc

SEQ ID NO: 252325 - DNA, 286 bp, Homo sapiens
  chr3:52526249-52526535
  hypo
taccagacctacccgcaggccctcaccctcgtcttcgatgacgtgcaaggtcatgacctcatgggcagtgtcaccctggaccactttggggaggtgccaggtggcccggctagagccagccagggccgtgaagtccagtggcaggtgtttgtccccagtgctgagagcagagagaagctcatctcgctgttggctcgccagtgggaggccctgtgtggccgtgagctgcctgtcgagctcaccggctagcccaggccacagccagcctgtcgtgtccagcctgacg

SEQ ID NO: 252326 - DNA, 303 bp, Homo sapiens
  chr3:52537789-52538092
  hypo
cttctgcacctgccggccaggcctggtcagcatcaacagcaacgcttctgcgggctgcttcgccttctgctcccccttctcctgcgaccggtctgccacttgccaggtgaccgctgatgggaagaccaggtgagcacaggtgcctgggagcagagacagtgggttgggcaagcgtgccctctgcgggaaggcgtggggggtgcggtggggggggcctcagcctccgccctgactggctctccctgggagcccagctgtgtgtgcagggaaagcgaggtgggggatgggcgtgcctgctacgga

SEQ ID NO: 252327 - DNA, 422 bp, Homo sapiens
  chr3:52540175-52540597
  hypo
cttgccccagctgaccgttgagaagctcatctccaagggtcggatcctcaccatggcgaaccaggtcctggctgtgaacatttctgaggaggtgaggtgcacggacacctgggcggatggtggggctggcggtgaccagctgcccacttggcctctcagccttgtgtgctccgagccccgtggtgggcaggacactgctaggccatggcgggctcatggggaaggaagcaggcagagatcaaattcctctgctggggcccaatgagagttaagggggaggactccaaaaaggagcatggagcacacggtagggctgccccatgtggcagaagccatgtgggtaaggacccgcagcctggagcagtgtcgttggccagagctgaaggagaggtggctggtatggccagcggggccttcagcag

SEQ ID NO: 252328 - DNA, 553 bp, Homo sapiens
  chr3:52552579-52553132
  hypo
ctttcaccatcttcgtgccgcacgcagatctaatgagcaacctgtcgcaggtatgcagcccccagagcgaggctgggcagggctgggtgctctggtggtggccctgcgtgggctgaggcggcagtcagggaccccactcccctcgcgactctgctccaggatgagctggcccggattcgtgcgcatcgccagctggtgtttcgctaccacgtggttggctgtcggcggctgcggagcgaggacctgctggagcaggggtacgccacggccctctcagggcacccactgcgcttcagcgagagggaggtgagccctggccctggcctgccccgctccatcccgccccgccccgcccctgcgcgccattgccccaggccccacggcccacgcagtcaagaaccccacctcccctagccagggggcgcctcctgctgagtccagcccgggactccgcccttgacctgggcctcgcccactgctgtgggcctgtcctgcccagcgcccttgtgtccttccgaggactgagccccgccccctgccctgactccgcccc

SEQ ID NO: 252329 - DNA, 390 bp, Homo sapiens
  chr3:52553162-52553552
  hypo
gaaccgggactgcctgcaccctgacttgcccaacccaggttcaacctccacctcaggccccgatagcttccgagcaccccacctatctgcttcatcagccccgtgccccgcccccagggcagcatatacctcaatgacttcgcgcgcgtggtgagcagcgaccatgaggccgtgaacggcatcctgcacttcattgaccgtgtcctgctgccccccgaggcgctgcactgggagcctgatgatgctcccatcccgagggtatgacaagcacgggcctgggagctggaagacaggcaggtgggggcctgggatcctcccttcccgcctggcctagctgtttatgagagcctttcctcagagaaatgtcaccgccgccgcccagggcttcgg

SEQ ID NO: 252330 - DNA, 113 bp, Homo sapiens
  chr3:52556286-52556399
  hypo
ctggcagaacttccgacctctgaagggtgaagggcgcccactgctctctccaaccccagaacacacggcgctgtgagtgccacgcaggctacgtaggcgatggactgcagtgt

SEQ ID NO: 252331 - DNA, 97 bp, Homo sapiens
  chr3:52558861-52558958
  hypo
agccagcacctgcctcgactccgcgtcctgataggtctggggacacaaagtgtgcattgggtgtgtgcacccaggaggctaccgccctggccctccc

SEQ ID NO: 252332 - DNA, 437 bp, Homo sapiens
  chr3:52568498-52568935
  hypo
acggtcactgcgcccgcttggttcggacctcggcaactggccgcactgacccgtcaactcccggtttcccggcgcacgcccctcgtgagatgctgtggtcttttctagcaacgtcgacaggctttccaacaaaattcctctttcctgcgcagaaccgctctccactcgcatttcttctgctcagatccgtattccgagcccgcacgcataccaggctgtgctcagggtccggaggaggccgacccagtagccgtgggccctgtcggaggggagccagctgggcgcgcgttgttttctgaggtggccgcgctgtctttcagggtgtgtgtacattcgaaactccactgaaccttgattgaagacctacagtgtggcagtccatggcctggggactggtaaggattgaggccgtaggatgggctcgagtgtggcggtgt

SEQ ID NO: 252333 - DNA, 84 bp, Homo sapiens
  chr3:52599732-52599816
  hypo
tttctctaaaaaaagacatacgaatgtccaataggcacatgaaacaatgcttagccaggcgcagtggctcatgtctgtaatccc

SEQ ID NO: 252334 - DNA, 861 bp, Homo sapiens
  chr3:52899903-52900764
  hypo
gtgtgtgtgtaggggcggtggggggacacaaaccgtcacatgctttacacgttgtctaaccttcctgctctcacctactgtacacatggctccattttctttcattagaggctacatggcatcccacagtgtggctgtgccatctcatttactctatgagctgctgccgcgaatgtccctgccatgtgctacctctgcctgtgtgggcccatatctgaggggcagattcctagaggcacacttgctacatcaaaagctatgtgcggcttattctgtggcgccgctctccacagaggctgtgccaactcacactcccactaatagcacgagtacccattcccacattcttgccagcatggtgtactagcaaaccttctcactctgacaatttgatcgctgaagaggctgtctcagcacggctgcggcgtgcacccatcaggccacttgggtgccagggcacctgcggggcttgccaccgtctaccgccttgaggggcctggcagggctcccagtcccaccccatctcacctgctctctcctctcggacatgagcccagagcccctccttttccccatgctcacgccctcccctgaggataccagggtgtggtggtgctcactctcccagaagtttgggcagtgctactggtgccacacaataggacagcaattatggatgactcaactctacctgtcgacttcacacagcacccaggtcaccgactgctcacttaacgctatgttgtttggttttccacacgccactctcacttggcatgtggagggcggggaccaggcacccagctcgactgtcctcctcagagcccgatctgggctggcgctccacgtggacccactgac

SEQ ID NO: 252335 - DNA, 75 bp, Homo sapiens
  chr3:52901657-52901732
  hypo
tcctgcaacacaggcgagtgctgaggcagcggactcttcccctgggcaagtggcaagcagcgccacctccagctg

SEQ ID NO: 252336 - DNA, 32 bp, Homo sapiens
  chr3:53032132-53032164
  hypo
agaaaaaatgtagatcaggtcgggcacggtgg

SEQ ID NO: 252337 - DNA, 1231 bp, Homo sapiens
  chr3:53032404-53033635
  hypo
ctcaaaaaaaagaaaagaaaagaaaaaatgtagatcaataatattattttgctgacgcattggagaaagtaaaggctgggtgcagcttcaagctgaggaccacccaccatgcccccatcatggtggttcccctaggtgctgaagggcccagccatagctctcgccctcgcagggtccctccagggtctctgctgtttcctacctaggggtgactgcagccatggctaagaaagcgccagcgcccacccacctgggccaatggactggttctgctcgtgccacgctggttctgctcctcgccatctcggcagttcagaaagaaccccaacgagcttgtgatctcccgggtcctgtgggcgtatcaacagggggccagccctgtccctcaaccctggggagctggtgctgccgatcgacctgactggcccacaacgtcttcagctaccactgcaagggcctgcggggtgacggctgtgcagcgctgctcgcctagctgttgatcgcctggctgttgatgggctggcacccgcagagctgccctgccggccaccgaccaccatggagggagcattcagctggtgcgcgagctgggtactaaactggctctactgtgagccgccctcggcccctccatctcctcttaccccttgtcatccatgcgtaagccggggacgcccgaggacatgctcttcacccaaggcctgcgccggcgtctgctgatcaagggcccagtacaaaggccgtcatggagatccaggccttcgccaacagcggcctgttctggtgcaagggccagccgggcagcccaaggacctcacgactggctgctgggtcaaggcgttcccggggtgaaggtggataagcagaccaccaagggctcctggaaccctacgtgaaggaggccaagcacagccgtggacaccggcctgaaggctgggaaaggagccgacgccccacctcctctgaccaggcctgcggggaggagccacccacgcgccacagcaagtcctggacctggccctgcattccagggtggggcagggaggctggattctgagagagctgcttccggattgcgttggggtagtcaaggagctcgggacatcgcaggggaggcaaaaagccttggccagtgctcttttggtgtatcccttcagcttccagaggggaagccacaccctgatgctatgttcaaacgctccagaagacaggagttcgtgtccttgcccct

SEQ ID NO: 252338 - DNA, 139 bp, Homo sapiens; identical to SEQ ID NO: 208909
  chr3:53054013-53054152
  hypo

SEQ ID NO: 252339 - DNA, 124 bp, Homo sapiens; identical to SEQ ID NO: 208910
  chr3:53132045-53132169
  hypo

SEQ ID NO: 252340 - DNA, 201 bp, Homo sapiens
  chr3:53216915-53217116
  hypo
gcagattggcctgtcctctccgccccgtcctctccaggctcctccttcgagggctggcaggaggaagactcaagcgctgggcctctgcggggtgagggtgtgggcggtcaggagaacggtggctttgtgtagagggctagactggtcggcaggcaccagctcatagactctgcccctcccggtgctttcccttccccctcc

SEQ ID NO: 252341 - DNA, 111 bp, Homo sapiens; identical to SEQ ID NO: 208912
  chr3:53276152-53276263
  hypo

SEQ ID NO: 252342 - DNA, 98 bp, Homo sapiens
  chr3:53560156-53560254
  hypo
cagattgggtcacgcgcacatccggaaccagttgcaaggccagggacgtgtgcagcactgctgacgtggggccaggtcatgtgcgtcacccctcgacc

SEQ ID NO: 252343 - DNA, 202 bp, Homo sapiens
  chr3:53675067-53675269
  hypo
agcagacgtgaagaccgtaccttccagtgagtatgcagatatgtgggaggctgtgggagctgagggactggaggcacgtggaggaggaaggggcatcaggaggggcaggggcactgtcctcgctggacccatgacagacgtcagttggttgttggtaggttgagtgtagacagattgcagaggtcctcggggatgccagatg

SEQ ID NO: 252344 - DNA, 34 bp, Homo sapiens; identical to SEQ ID NO: 208913
  chr3:53842746-53842780
  hypo

SEQ ID NO: 252345 - DNA, 43 bp, Homo sapiens
  chr3:53844088-53844131
  hypo
gcaacccctccctaccgggactggacaccgtgctacacccccc

SEQ ID NO: 252346 - DNA, 227 bp, Homo sapiens
  chr3:53845189-53845416
  hypo
gtcagcaacaaaacacgaaatcgctgatgcctgtgacctcaccatcgacgagatggagagtgcagccagcaccctgcttaatgggaacgtgcgtccccgagccaacggggatgtgggccccctctcacaccggcaggactatgagctacaggactttggtcctggctacagcgacgaagagccagaccctgggagggatgaggaggacctggcggatgaaatgatat

SEQ ID NO: 252347 - DNA, 59 bp, Homo sapiens; identical to SEQ ID NO: 208914
  chr3:53857419-53857478
  hypo

SEQ ID NO: 252348 - DNA, 79 bp, Homo sapiens
  chr3:53857925-53858004
  hypo
ctctcagagcctgcgctggccagggcccgggcacccagggattgctgctgccccagggctccccgtgccagggctccag

SEQ ID NO: 252349 - DNA, 147 bp, Homo sapiens
  chr3:54067944-54068091
  hypo
gggactgctgggaagctgtgcgggggcgggtccagcaagccctggcaacggagatcttcccagacgagacagagcgaccgttacttcccgggctgctgtgggtctggtgtctggctctgtggccccgggctgcagggacaaaagtgg

SEQ ID NO: 252350 - DNA, 212 bp, Homo sapiens; identical to SEQ ID NO: 208915
  chr3:54237684-54237896
  hypo

SEQ ID NO: 252351 - DNA, 547 bp, Homo sapiens
  chr3:54660169-54660716
  hypo
aaaaagcaaggggagtctcacgataactgcgcaggcgcggaccagagagctcttttctgaggatccggcaagatggcagaagtagagcagaagaagcagaccttccgcaggttcacctaccgtggcgtggacctggaccagctgctggacatgtcctacaagcggctgatgccgctgtacagtgcgcgccagcagcggcggctgaaccggggcctgcggcggaagcagcactccctgctgaagtgcctgcgcaaggccaagaaggaggcgctgcccatggagaagccggaagtggtgaagacgcacctgcgtgacgtgatcatcctgcccgagatggtgggcagcatggtgggcgtctacaacggcaagaccttcaaccaggtggagatcaagcccgagatgatcgaccactacctgggcgagttctccatcacctacaagcccataaagcacggcgggcccggcatcggggccagccactcctcccgcttcatccctctcaagcagtggctcagctaataaaggcgcacatggttccagtcaaaaa

SEQ ID NO: 252352 - DNA, 35 bp, Homo sapiens; identical to SEQ ID NO: 208916
  chr3:56093398-56093433
  hypo

SEQ ID NO: 252353 - DNA, 82 bp, Homo sapiens; identical to SEQ ID NO: 208917
  chr3:56691370-56691452
  hypo

SEQ ID NO: 252354 - DNA, 390 bp, Homo sapiens
  chr3:56718075-56718465
  hypo
cactgtttcttccactggaacgttcatcaacgttttcctatagtaaatgtatattaaagaaaaaataaacttgcggtcacattaaaaaatacacagcaggtcgtcgctctcccataaagggaacaacttcatagttaagagccctttacatagtggtttctaccttatcagtataaactatcacgggttatcgtgagtacagccaatatttactgagtgctttctacgtgctagacacggactggacaagtgatttacgtgcattgtctccatttaatcctcacagcaacagacatgaggtagatactagtttgcagaatttgaaagaagcgttgcaagacactggacaaattatggtaaccgaagatttgaaaccgggtctatttaact

SEQ ID NO: 252355 - DNA, 41 bp, Homo sapiens
  chr3:56792413-56792454
  hypo
tcgagaccactctgggcaacgtagcaagacctcatttcagt

SEQ ID NO: 252356 - DNA, 107 bp, Homo sapiens
  chr3:56840408-56840515
  hypo
tgtgtgtgtgtttacgggcttaggaacaacactgctctaacaggcagcttcactcaaagaaacggcacaaagtgtctttcagaacttgccttcggcatagcccgtta

SEQ ID NO: 252357 - DNA, 97 bp, Homo sapiens; identical to SEQ ID NO: 208920
  chr3:56882998-56883095
  hypo

SEQ ID NO: 252358 - DNA, 507 bp, Homo sapiens
  chr3:57040317-57040824
  hypo
ctgtcgatgccaatgaccagcgtgaggtatctggagaaccactacaccgacaagatagatttcagttgttttcaaacaagccatcaaagtggctaatggcttccctcaaagaaaccccacaccttcagccaacagacaaggaactcattaggcggagctccccgctccgatctccactgtccacaagcttcttccaagccgttaggaaaacagctccccagagcccacatgctgacaggcagcatccggggtgatcagatttctatcagtaaagacacatggcatttctctctggctccagttcagaatctcaccccacccacccccaacaggcagatcgtagcttttcataggtcctaaataatccggcctttaagaaaatgctcgtgtatcagtgacacacacaacatcaccaacacagtcactcgttcaatgtgctgcctgctctcgacacccccccaaacacggtcacactttctcatgcccgcctggaaatccatctccatc

SEQ ID NO: 252359 - DNA, 32 bp, Homo sapiens; identical to SEQ ID NO: 208921
  chr3:57101181-57101213
  hypo

SEQ ID NO: 252360 - DNA, 48 bp, Homo sapiens
  chr3:57117482-57117530
  hypo
ttggcatttgaaaggtgtgccgtgtccggttgcagtcttcacccaggg

SEQ ID NO: 252361 - DNA, 256 bp, Homo sapiens
  chr3:57131629-57131885
  hypo
ctgaagaggaggacacgctctccgtcagggaagacgtttctgtctggtccgtcgagagtccttccatcagtggcagagacagctcggatgagggcacagacgagtcatagatgcctgagtcccgcggcatgtccgaggggctgccggctttcaccgtgtgcagcaggggttgcagggcggcgctaccgtcaagggcaggccgggcctccccgtcttggtccaggcccccatgctgactctcgtgctgggagtcggc

SEQ ID NO: 252362 - DNA, 120 bp, Homo sapiens; identical to SEQ ID NO: 208925
  chr3:57529373-57529493
  hypo

SEQ ID NO: 252363 - DNA, 120 bp, Homo sapiens
  chr3:57536863-57536983
  hypo
attacaggcgtgagccaccgtgcccagccaaaacaaaaatttttaaacaaaagcacatatactcatgacttaacttttcctcactaaaaagatatgttgtttttatcgtactctgtatac

SEQ ID NO: 252364 - DNA, 36 bp, Homo sapiens; identical to SEQ ID NO: 208926
  chr3:57539555-57539591
  hypo

SEQ ID NO: 252365 - DNA, 44 bp, Homo sapiens
  chr3:57544223-57544267
  hypo
ttattattattattttgagacggagtctctgtcacctaggctgg

SEQ ID NO: 252366 - DNA, 180 bp, Homo sapiens
  chr3:57544507-57544687
  hypo
cgcccggcctatattggactattattaaaacatgttacactgaacctagtcatgtagatcctgaaactttaagttggatttcatgactgcagtcctagttcatcaagggaaggagatggaagaaaacgttagttcgccattagtcttagataaaaaacaggccgggcctggtggcttatg

SEQ ID NO: 252367 - DNA, 33 bp, Homo sapiens
  chr3:57600223-57600256
  hypo
gacacggtggctcacgcctgtaatccgtttttt

SEQ ID NO: 252368 - DNA, 39 bp, Homo sapiens
  chr3:57674950-57674989
  hypo
attacaggcatgagccgccatgcccggcctagtgtttat

SEQ ID NO: 252369 - DNA, 283 bp, Homo sapiens; identical to SEQ ID NO: 208927
  chr3:57679350-57679633
  hypo

SEQ ID NO: 252370 - DNA, 144 bp, Homo sapiens; identical to SEQ ID NO: 208928
  chr3:57679967-57680111
  hypo

SEQ ID NO: 252371 - DNA, 93 bp, Homo sapiens; identical to SEQ ID NO: 208929
  chr3:57906367-57906460
  hypo

SEQ ID NO: 252372 - DNA, 144 bp, Homo sapiens
  chr3:58090180-58090324
  hypo
attaagaccgtctacgtgagtgctgtcaggggccaagggacgcagtctacagctttgccttgtgggcattgcacttgcccctctgcgttctgtgttttccagctcccctggaggtgcaactttaaactccgaataaattcagtt

SEQ ID NO: 252373 - DNA, 136 bp, Homo sapiens; identical to SEQ ID NO: 208930
  chr3:58109087-58109223
  hypo

SEQ ID NO: 252374 - DNA, 142 bp, Homo sapiens
  chr3:58136697-58136839
  hypo
ggagctgtcgactccgccttcttggctttagttaacaggttcttcttgtgtagtcacatcaacgtcgggtcacatgggaatgtggtaaagcctcattactgtagagttcagacatgatcacttaaaaagagctttattgggc

SEQ ID NO: 252375 - DNA, 104 bp, Homo sapiens
  chr3:58153498-58153602
  hypo
tgaagcaggaatcacggaaaggattccataccacatgcgtaaatggtgctgtgcacaggacctggagccggagtggggtacgcatgccccgtcagcgggagctg

SEQ ID NO: 252376 - DNA, 84 bp, Homo sapiens
  chr3:58652283-58652367
  hypo
cattcttggggggacgtacccgagggctcgaggctcccacttccctgcttcgatggagaaggcgaggtggtccagcaggtgccg

SEQ ID NO: 252377 - DNA, 37 bp, Homo sapiens
  chr3:59041984-59042021
  hypo
ttttttttttttttttgagacggagtgtggctctgtc

SEQ ID NO: 252378 - DNA, 92 bp, Homo sapiens
  chr3:63082429-63082521
  hypo
tccagctcggacagcttggcgttggcatccttaaccaccaaatccccgtgcagctcggcatctgtgatggcggcctccagggaagccctctg

SEQ ID NO: 252379 - DNA, 123 bp, Homo sapiens
  chr3:64142936-64143059
  hypo
ctcattgcagacagtgcatacgaagcacggcgggtgccagcaaacgccgtggccagcgcgtgacgcaaacacagcgatgtctccaccattgatctggcctccgcactgtgaggcaaacagaaa

SEQ ID NO: 252380 - DNA, 139 bp, Homo sapiens
  chr3:64317485-64317624
  hypo
atcattccaccgcccgtcgattatttacctcatccccaagtgcggaaggtcaaaccgctggtattttgcagtctgcctctgcaggtgaaatttagctttaattgtctaattgctactctggcaacggctgccacagatt

SEQ ID NO: 252381 - DNA, 337 bp, Homo sapiens; identical to SEQ ID NO: 208932
  chr3:64547143-64547480
  hypo

SEQ ID NO: 252382 - DNA, 155 bp, Homo sapiens; identical to SEQ ID NO: 208934
  chr3:65364855-65365010
  hypo

SEQ ID NO: 252383 - DNA, 241 bp, Homo sapiens
  chr3:65368390-65368631
  hypo
ctaagaacatgaactcgagtcagaccttatttgtcagtccctccatttggtagctctgcgatcttgggcaagttagttagcctttcttttccttgatgtgaaaacgggataaactggtgggtttgacggataaatgagagaatgtatgttaagagcctttagcacagaacctggcacatagtaagcgctcgatgaataatggctgttattaccacaaggaaattaacgatacctatttcag

SEQ ID NO: 252384 - DNA, 39 bp, Homo sapiens; identical to SEQ ID NO: 208935
  chr3:65435159-65435198
  hypo

SEQ ID NO: 252385 - DNA, 103 bp, Homo sapiens
  chr3:66053363-66053466
  hypo
tgattttcaggaaaaagaaccgggctataaaatgatttccaggtctgccctgagcacttgcgcaataaagagttagaaacggtgtgcaattggctgggcgcgg

SEQ ID NO: 252386 - DNA, 103 bp, Homo sapiens; identical to SEQ ID NO: 208938
  chr3:66053766-66053869
  hypo

SEQ ID NO: 252387 - DNA, 254 bp, Homo sapiens
  chr3:66423428-66423682
  hypo
agaccttgttctggcgcatatgggagtacacatataaacagaaatatattactaaacaaacaccgcgtgttcattcagccccgtagccaaaggcagatggggagcctgcccaccccggatggcccctttctggttttcttcactcatcagctggctttctgtttttgttgactgtgccctttatgtagtagctgccactgccgcgagcatccctttctgtctggcattgtaagtgcttacgtttgctctcattt

SEQ ID NO: 252388 - DNA, 456 bp, Homo sapiens
  chr3:66452223-66452679
  hypo
cagaaagcgacctgcgggagtcacctgtcaaacctcccatccatctcctggccaacccagccaacagctccaaaggcctggttagcgcttgccaaatcaagtggcaggtactgggggcaatgctcacatgggtccttgtactcatgtccttggaagtagccgcgacatgtgcactagcccccgcttcccacccacacacacaatgagttccactgcaggcccggcccccacataggcagggatggaggctgcgctcacatcagctctgcaagatcccccaaacatgccccttcccatgtgccctgtgtgggactctgcccctccctccgaggaatgccatggagccagctggaaccactgggcaggaagtcgcatacccaggtcactaactgctcctctctgcctgtaatttgggatccagaaattctcccttccctcccgcgtactgactctgtg

SEQ ID NO: 252389 - DNA, 134 bp, Homo sapiens
  chr3:66455988-66456122
  hypo
gtctgtattctgccccgagagagcggacatctggccccagcactgagaatcaacccaaaaggttccttaaggctcccgtctgctctcataccaaccagagtcccttttctggacatgaccgagaaactgcagaa

SEQ ID NO: 252390 - DNA, 51 bp, Homo sapiens
  chr3:66460441-66460492
  hypo
tctctgagccctccccgaggccactgtgtggtggaacgaaccaggcctagc

SEQ ID NO: 252391 - DNA, 96 bp, Homo sapiens
  chr3:66461118-66461214
  hypo
acccaggccaacaaacgggcacaggagttccaggcaagggcaaagcccattaaaggaatagaaaggagagcgaataggaggcggctcttattatca

SEQ ID NO: 252392 - DNA, 196 bp, Homo sapiens; identical to SEQ ID NO: 208940
  chr3:66482908-66483104
  hypo

SEQ ID NO: 252393 - DNA, 178 bp, Homo sapiens
  chr3:66521940-66522118
  hypo
gcctagggccccagccgctgcagggagagcaaaggctcatccatcccaaccagcagggacggagggcatggcggggatgaagggcggccagaggtaaaacccagaggttctctcagttaaaggatggcagagggttctcataaatgaaaaccacgctctactgcggcagaaaacggag

SEQ ID NO: 252394 - DNA, 155 bp, Homo sapiens
  chr3:66852898-66853053
  hypo
agtgtaaaagtaatacgagaacttttagcactacctcttcaatttttatgttaattcaaatctgttctacacaatgtctattaatttttttaaacctggcagcgctgtttcagaaaaagatccatgttagctaacgtctaacagttagataaatt

SEQ ID NO: 252395 - DNA, 43 bp, Homo sapiens
  chr3:67079756-67079799
  hypo
acatgtaagaatgaataggccgggcgcggtggctcatgcctgt

SEQ ID NO: 252396 - DNA, 302 bp, Homo sapiens
  chr3:69230132-69230434
  hypo
tctgagtcaaagctggtctgcgggctgtgtccctgatccttctgcccagaggcccgctggtaccagccacgcaagtgctcggcaactaaggccttgtggatgtttttggtgatgtgctccgattttgcagcagccttccttggcagccggagagttgcatatgggttatggggtacccggtcgacctcatcttcgtgaaaggatctgctgtagtccctctggcgctcatatccatagtgggctgaggaccggtaggaagggttgacactatactgtccctcggtgtcattctcatagacata

SEQ ID NO: 252397 - DNA, 136 bp, Homo sapiens
  chr3:69230707-69230843
  hypo
agaagacccgtcatcgaggatttctgtgctgctgcttctttgggatttggagagggagaaaaatggcttatcgctgtccatctcggagagcaggtgggactgggactccaggcttccactccgctggcggcagtgc

SEQ ID NO: 252398 - DNA, 76 bp, Homo sapiens; identical to SEQ ID NO: 208944
  chr3:69309454-69309530
  hypo

SEQ ID NO: 252399 - DNA, 36 bp, Homo sapiens
  chr3:69585561-69585597
  hypo
gcagatacctgaagcggaggacgtccaccgttgggt

SEQ ID NO: 252400 - DNA, 180 bp, Homo sapiens
  chr3:69589306-69589486
  hypo
gcactccactctgggtgacagagttcgaaggaaaaaaaaaggaagaattgtagaaacaccaatacatccaccacctgtcttgtgacacttaatttagagacaaaaatatatacagagtgcttactgagtgtcaatctctcttaaatatcatctttttaaatttattaaaaatatataggc

SEQ ID NO: 252401 - DNA, 81 bp, Homo sapiens
  chr3:69928166-69928247
  hypo
ttgattatatttgcgcagactcattttatagtttggtgcaatttaggatacccccaaagtgcaaacgaagggtctcattag

SEQ ID NO: 252402 - DNA, 254 bp, Homo sapiens
  chr3:69937601-69937855
  hypo
gtacttctggctgtggagatcggtgccttaattagccacatgttctttttacctcctgggaaataagtacgggataaaattggggatcaagccgtagacgtacattgacttagcacacgccgctaagtaattcatcaaggaatgttggtaattagtcctgcctctttcaactcttggcttattttataaaaccggttgatttaaaataatgcctgctgatttattacccacacgtttcaagactggtacttggc

SEQ ID NO: 252403 - DNA, 86 bp, Homo sapiens
  chr3:69970991-69971077
  hypo
tattaacactgggacgaaagagtctttgttttgaaaggctgtcttgtgcatcgtaggatgtttagcatcaccgctggactctcgca

SEQ ID NO: 252404 - DNA, 368 bp, Homo sapiens
  chr3:69986972-69987340
  hypo
gtgcagacccacctcgaaaaccccaccaagtaccacatacagcaagcccaacggcagcaggtaaagcagtacctttctaccactttagcaaataaacatgccaaccaagtcctgagcttgccatgtccaaaccagcctggcgatcatgtcatgccaccggtgccggggagcagcgcacccaacagccccatggctatgcttacgcttaactccaactgtgaaaaagaggtaattcatgtctcctctcctctcctgttttcttatgctaaataacttgtctgttgaatatgattcccacacttaactgtggactctagtttgtccttgtggccacatttaccagcctttgtccccgattcaccatcgtg

SEQ ID NO: 252405 - DNA, 49 bp, Homo sapiens
  chr3:70008507-70008556
  hypo
agaacttgaaaaccgacagaagaaactggagcacgccaaccggcatttg

SEQ ID NO: 252406 - DNA, 40 bp, Homo sapiens
  chr3:70901512-70901552
  hypo
gaagtgaagacagaccgcacgctcacggaaatagcgtttg

SEQ ID NO: 252407 - DNA, 118 bp, Homo sapiens
  chr3:71019767-71019885
  hypo
agaaaaaagtttaacggaattaaaatttaatatctaattagagcaaggctaatatattttgaaatgagtaggggagacctgtgcctctgctgcatattcgggacggccgttaatctta

SEQ ID NO: 252408 - DNA, 292 bp, Homo sapiens; identical to SEQ ID NO: 208949
  chr3:71036185-71036477
  hypo

SEQ ID NO: 252409 - DNA, 270 bp, Homo sapiens; identical to SEQ ID NO: 208950
  chr3:71049502-71049772
  hypo

SEQ ID NO: 252410 - DNA, 449 bp, Homo sapiens
  chr3:71119374-71119823
  hypo
ttaatgtaaaaatgcacattcgtctactctattgcctcctcgctcacagcaggggagtgccaaactcgatattttagctcacctaagagaacaacctgtattactgttgggcatcttgccttcttttgctcactctccggggagagcatgtcggcgcattttcaataaaacaccttcttagcagtaatgggccactgttcccatttcagtggtccctaaggtttcacgatacagtatatttggctgactcgcagttcgagttttcttctggcattcctaagatccaaaaaacggaagagaaaaagcaaaagaagagtacttgcttatcctttgtttcagtaagaaaacagtcaactttgagactgattagctggtaggacttacacaaaacaagggcactctcgggccctctcccctgctacgggaaccctccgcgcacgtgtgggcca

SEQ ID NO: 252411 - DNA, 77 bp, Homo sapiens
  chr3:71120998-71121075
  hypo
ttacaggcgtgagccactgcgcccagcctctgtagtttaacaacaacaacaacaacgacaacaacaacagctatcat

SEQ ID NO: 252412 - DNA, 454 bp, Homo sapiens
  chr3:71163557-71164011
  hypo
ctcctaaaaggacacgctcactgaactgtgctcataactagagttgtaacaaataatacttttaagacactgcgtaaggttgagtggcgcctttgtgtttaagaggtgcaaaggaaagctaagaaacacaagcaccgatagatgagtgacaaagaaaagaccatgggaaagtggaaccctgctatcccacctgcctactgcatccacccccgtgtcccagggaggccttctgcctactgaactcaccacgaccagcccttcagatgtaatgcacaggctagttcatctgtgaagggagagacagattcgacaaggcctgcctggaagagcctcgagaaaaggggctgtctgagtggggcatctggaagccaagacgcctgggagagttgcctgagactctagcctgctgtctcagggaggattcaccatcactggactccgggtttccttgtct

SEQ ID NO: 252413 - DNA, 244 bp, Homo sapiens
  chr3:71187312-71187556
  hypo
gcgcagaatggtgacgctgtctggagaacacacgtggaggaagaagcgaatgcttctaattgcctcaaaatgggatttttaatatttaggaacgtaatgggatcgggaaataagaacacttccaacatcctttataaataagcctttacaaaatattgttagctgttaataatacatcattatcaaaaatggaaagtcatgaatacagtgcatgtaacctttgtattcacgtgaattaacctat

SEQ ID NO: 252414 - DNA, 109 bp, Homo sapiens
  chr3:71218264-71218373
  hypo
ctcataaactgaggtggtgccgtgactatcaacagctgtatttgactatttcatcgagtcagtttacagtgtctccatcacagtggacgcctgtcagctgcactcttgc

SEQ ID NO: 252415 - DNA, 77 bp, Homo sapiens
  chr3:71247380-71247457
  hypo
aggtcagctgccccgatgtccacggccggcgtctctccgttggaccgcccctcccgaagaccgccgcactctagtaa

SEQ ID NO: 252416 - DNA, 56 bp, Homo sapiens
  chr3:71307162-71307218
  hypo
aattgttattactgcgcttaataacatccacggagcgcctacgaatatctacatag

SEQ ID NO: 252417 - DNA, 185 bp, Homo sapiens; identical to SEQ ID NO: 208953
  chr3:71357101-71357286
  hypo

SEQ ID NO: 252418 - DNA, 152 bp, Homo sapiens; identical to SEQ ID NO: 208954
  chr3:71366445-71366597
  hypo

SEQ ID NO: 252419 - DNA, 80 bp, Homo sapiens
  chr3:71408816-71408896
  hypo
gaactataggtgtgcgccaccatgcccaaataattttggaattgtagtagacaagctaaattttagtaggccggctggtc

SEQ ID NO: 252420 - DNA, 285 bp, Homo sapiens; identical to SEQ ID NO: 208955
  chr3:71410779-71411064
  hypo

SEQ ID NO: 252421 - DNA, 118 bp, Homo sapiens
  chr3:71451127-71451245
  hypo
caccaggctataaacgccatgagagacggaatggcacacaaacatcttcctcactggagttgtggcaggctctgaactggggatcaagaaaccttagtgagtgcggtttattgtccta

SEQ ID NO: 252422 - DNA, 65 bp, Homo sapiens
  chr3:71496761-71496826
  hypo
gtggatgaggttcacgctagcagcatggttctttaaaggaagctcatccacgtccagcgtgccct

SEQ ID NO: 252423 - DNA, 93 bp, Homo sapiens
  chr3:71533900-71533993
  hypo
gtctcagtgtgggcccgaaagtctgtatttaatgcgcttcccaggcagtgctgagatgacactttgaaaaacacaaaacgtggaggtaaagaa

SEQ ID NO: 252424 - DNA, 56 bp, Homo sapiens
  chr3:71563898-71563954
  hypo
cctgcatgtggagccgacccaggtgagcagctcaatgctctcgcccactgggccca

SEQ ID NO: 252425 - DNA, 43 bp, Homo sapiens
  chr3:71581510-71581553
  hypo
gtgctgagattacaggcatgagccaccacggccggcacaaaga

SEQ ID NO: 252426 - DNA, 115 bp, Homo sapiens
  chr3:72192477-72192592
  hypo
ttatccttgcttatgtgagacggttaatggcactcaagaaatcatcacgagtttaaaactcattctagagaaaacacggctctgacatggtagcgcccttgggataagtccaccc

SEQ ID NO: 252427 - DNA, 71 bp, Homo sapiens
  chr3:72420267-72420338
  hypo
gcacaggccacacgcgacaccacgacacgattaatggcattaacagcgccggaggccgctgattgttctaa

SEQ ID NO: 252428 - DNA, 38 bp, Homo sapiens
  chr3:72506011-72506049
  hypo
ttctgcaatgtttattaaagccccgggcccagaaattg

SEQ ID NO: 252429 - DNA, 206 bp, Homo sapiens
  chr3:72618811-72619017
  hypo
ctgtgtatgtataccgcacagcctgccttataagctgctttttaaatttaaaatatcgtgaacatctttccatgtcatagctgtgggatgttgaccaagtcatttcacctctctaaagctccatttcctcctttgcggaatagggggtgtactgtgagaatcaatgaccaggacaagtgttctgtgcttagcgcagactctggcac

SEQ ID NO: 252430 - DNA, 98 bp, Homo sapiens
  chr3:72680453-72680551
  hypo
gtccctgtgacgtgcgaggccccgtgctggctactgggcatacaacggtgcccatgacagcccactcaacgcctacagtctaccgggaacgagagaca

SEQ ID NO: 252431 - DNA, 79 bp, Homo sapiens
  chr3:72703939-72704018
  hypo
accgtaaacactctcggacccatggcaaattcggcttggcccatccctaccacatattttgaagcgtatctcagagatc

SEQ ID NO: 252432 - DNA, 41 bp, Homo sapiens
  chr3:72773317-72773358
  hypo
cattgaaggcctgagccaccgtgcccagcccccatccttac

SEQ ID NO: 252433 - DNA, 241 bp, Homo sapiens
  chr3:72778073-72778314
  hypo
tgttgttggattctcgctgctactgagagcccagatataaaatgttaatgtgcaaggaagccagccgaccaggtgacggtgacaaacctcacgtcccatctgttcttcccctccctccactccaggttgggcacgaaaaacaactccgtgattcctctttgctgagtaaactgatgcgtgaatgaacaaataaacctctgagagattccaatgccaggggaggccccgagcttttatcttg

SEQ ID NO: 252434 - DNA, 84 bp, Homo sapiens
  chr3:72795276-72795360
  hypo
agccatcgcgcccagccccgtttctaagatgaagggaaaggtgtcgtttggagtccccccctcgtgagccagctacagtggagc

SEQ ID NO: 252435 - DNA, 152 bp, Homo sapiens; identical to SEQ ID NO: 208959
  chr3:72877846-72877998
  hypo

SEQ ID NO: 252436 - DNA, 31 bp, Homo sapiens
  chr3:72964698-72964729
  hypo
tgagggagctgggcgcgggtggctcacgcct

SEQ ID NO: 252437 - DNA, 72 bp, Homo sapiens; identical to SEQ ID NO: 226535
  chr3:73045503-73045575
  hypo

SEQ ID NO: 252438 - DNA, 126 bp, Homo sapiens; identical to SEQ ID NO: 208960
  chr3:73045605-73045731
  hypo

SEQ ID NO: 252439 - DNA, 818 bp, Homo sapiens
  chr3:73433224-73434042
  hypo
gggtccagctccttcagggacgggctataggtaggggtgcccacttcgggatcttccgtgatggagagcagattcttggaggctggcccgtaggcttccgtggtccccacagccccttcgctgctcgggcagctgatgccctccgccgctctcctcaaggagttgtcgggggagatctccagggtgagcggggtgctgcggcagctctcgcctgtgttgtaggcgctcgagctgtccttgtcggatttctccgggagctcggtgatatctgagagctcgtgtctgcgcacgtcgatgctggtgttgtagttgcggaagccgctgttgtgcagcatccaggactcgcggtactgctccttgagctgctgcatcttgtgggcgcgcacgatgctcaggcactccagctcgatgctgcgcagctcttcgttcagcagctccagctccttgtccacgctctcagggtcactcttgccggcgtccagggggccgctagggtagtacaggccgtaaggggtggcgctcttcacctggcacttgagctccaggagctcgcggaagcgctcgcactcgtccaccgggatccccaggtagtcggcgtccgtgcagtcggccgaaatgaaagactcgttgctgaagggcaggtcgccgctgcccaaggtgtcctggctgcaggtgagcttcctctgccccgccagcgggttggaggatgcggtggcgtcgtcgccattgttctcttgctccgagctctcgtcattacgggtgctctcgtcggtccgccccacaccgctgtccttctcgtgctggttggacaagatggt

SEQ ID NO: 252440 - DNA, 92 bp, Homo sapiens
  chr3:77427993-77428085
  hypo
aattcgtgtttcttcggtaaagtcttccctggccatgctttccccaacccggcatgcgtaacaagtcaagattatcagtcactccttgatgt

SEQ ID NO: 252441 - DNA, 198 bp, Homo sapiens
  chr3:82247999-82248197
  hypo
aaagtaaatggcttccgaatagtatatatatatatatatatatatctttgaggatgtatttatgcacaactctgccctgaaattctgctggttcatttaaacaggcatatttttgtgtacatcgtgttcaagctttgctcacttaaaaaaaataaacctttacaggtatcgagaaactcacgccgtataacactaatg

SEQ ID NO: 252442 - DNA, 40 bp, Homo sapiens
  chr3:84175659-84175699
  hypo
tgagtgggcaaatctcgggaaaaggcgccaccaccacaga

SEQ ID NO: 252443 - DNA, 44 bp, Homo sapiens
  chr3:87226518-87226562
  hypo
gctttttattcagtgtgtttcacggaatagttttggaactattt

SEQ ID NO: 252444 - DNA, 91 bp, Homo sapiens
  chr3:87297460-87297551
  hypo
gagagagaacgtttcggtatacattttgtttctcagttaccttattctttttgagtgtctgatttttgagacagtctcgctctgttgccca

SEQ ID NO: 252445 - DNA, 42 bp, Homo sapiens
  chr3:87652052-87652094
  hypo
cgtgttagccaggatggtctcgattacaaaaacatttcttat

SEQ ID NO: 252446 - DNA, 36 bp, Homo sapiens; identical to SEQ ID NO: 208963
  chr3:87737840-87737876
  hypo

SEQ ID NO: 252447 - DNA, 53 bp, Homo sapiens
  chr3:88098566-88098619
  hypo
agatgaaaaatacataaaatcgtcattattatcatcattattagtattgaata

SEQ ID NO: 252448 - DNA, 77 bp, Homo sapiens
  chr3:88098649-88098726
  hypo
cattcaaaaaggaaaaagggatataaaaacaaagtctattacacactgattcctgttatgtttaaaaagtttggaga

SEQ ID NO: 252449 - DNA, 38 bp, Homo sapiens; identical to SEQ ID NO: 208964
  chr3:93697929-93697967
  hypo

SEQ ID NO: 252450 - DNA, 38 bp, Homo sapiens
  chr3:93698207-93698245
  hypo
gggattacaggcgtgagccaccgcgcccggccccaaat

SEQ ID NO: 252451 - DNA, 155 bp, Homo sapiens; identical to SEQ ID NO: 208965
  chr3:93707709-93707864
  hypo

SEQ ID NO: 252452 - DNA, 78 bp, Homo sapiens
  chr3:93780314-93780392
  hypo
ttttgggacacagcgacgatgcagtttagcaaaagaaacatgacagcagcggttaacacctccgaacttgctggctac

SEQ ID NO: 252453 - DNA, 84 bp, Homo sapiens
  chr3:94174884-94174968
  hypo
actcataaatagttcacctgcggagaaatggcttcagatgttttcactcattacgcccaggctggagcgcagtggcatgatctc

SEQ ID NO: 252454 - DNA, 112 bp, Homo sapiens; identical to SEQ ID NO: 208966
  chr3:94656925-94657037
  hypo

SEQ ID NO: 252455 - DNA, 108 bp, Homo sapiens
  chr3:96984570-96984678
  hypo
ggtggggttcccaccgctgccactgctgctcctgcagccactcctgccaccaccgcttgtgccttcctgttgcagccggcgcaatggcagcagcggctccagatggcc

SEQ ID NO: 252456 - DNA, 37 bp, Homo sapiens
  chr3:97473826-97473863
  hypo
gtgagccaccgcgcccggccacaaagttttcttttaa

SEQ ID NO: 252457 - DNA, 105 bp, Homo sapiens; identical to SEQ ID NO: 208968
  chr3:97744980-97745085
  hypo

SEQ ID NO: 252458 - DNA, 45 bp, Homo sapiens
  chr3:98290224-98290269
  hypo
tatttaaggctttaagaaaacgctgtggccgggcgcggtggctca

SEQ ID NO: 252459 - DNA, 82 bp, Homo sapiens
  chr3:98304459-98304541
  hypo
cccgccgttctccacgatgggctataaagaagtaatcatcacacctggaaaacacagcggcgccaaaccagggatcaaatgg

SEQ ID NO: 252460 - DNA, 86 bp, Homo sapiens; identical to SEQ ID NO: 208971
  chr3:99944288-99944374
  hypo

SEQ ID NO: 252461 - DNA, 184 bp, Homo sapiens
  chr3:100329428-100329612
  hypo
ctggaaaaggaggacgtgggaggggaagtagtgagtaaaacaatgatgttaaagaaaagcccgctggaactcagaacgcgaaatttcaatgatcctaatgctggatcccttgggctgtagagcttctccgtaaaggaattcaatgttggatgggctacatactccctttcgtgaaaatcagaga

SEQ ID NO: 252462 - DNA, 45 bp, Homo sapiens
  chr3:100796978-100797023
  hypo
atttttttttttttttgagacggagtctggtgatctctgctcact

SEQ ID NO: 252463 - DNA, 32 bp, Homo sapiens
  chr3:100989029-100989061
  hypo
ctcagcctcccgaagtgctaggattacaggcc

SEQ ID NO: 252464 - DNA, 127 bp, Homo sapiens
  chr3:100998459-100998586
  hypo
gaaagcacaacacagcaactcgaataggatgttgcaatgaggtagcagagaaaccggacttcacctggggtgagttaaattgtctccgacgtcaaatcaaatttacgctaattctctaactaagcaa

SEQ ID NO: 252465 - DNA, 188 bp, Homo sapiens
  chr3:101021602-101021790
  hypo
ggcaaaaaacacatgcaatacgtttcattaaaatgtgaggtgccatgattaaaagttgcgttcattttaaaacacacaaaaccctgcacagcttcaaaacatttataccctcgcaaaatttgtctttggtccacccacgtttatcaaaccatccttctctccccaacgtcccccatttaataagatca

SEQ ID NO: 252466 - DNA, 149 bp, Homo sapiens; identical to SEQ ID NO: 208972
  chr3:101157528-101157677
  hypo

SEQ ID NO: 252467 - DNA, 55 bp, Homo sapiens
  chr3:101230981-101231036
  hypo
aactgtctctgcagaaaccaacggtaccatcagaaacagaaaaatgaaatgaaat

SEQ ID NO: 252468 - DNA, 81 bp, Homo sapiens
  chr3:101232951-101233032
  hypo
ctttatacccctaacgcctatccctccaacccccatctcccatcctaacggagtcaataaagggatcggcccaactcgtcc

SEQ ID NO: 252469 - DNA, 120 bp, Homo sapiens
  chr3:101393171-101393291
  hypo
agaagaaaagaaagaaaggaacaatgggttcgagttaaatataactttatcaaaaaagcatttatatgagtgtagatttagagaccaaaagaggttgtattggccgggcgctgtggctta

SEQ ID NO: 252470 - DNA, 39 bp, Homo sapiens
  chr3:101397313-101397352
  hypo
ttaaatattttggccgggcgcggtgactcacgcctgtaa

SEQ ID NO: 252471 - DNA, 37 bp, Homo sapiens
  chr3:101441002-101441039
  hypo
ggattacaggcgtgagccaccgcgcccggccttactt

SEQ ID NO: 252472 - DNA, 43 bp, Homo sapiens; identical to SEQ ID NO: 208976
  chr3:101575167-101575210
  hypo

SEQ ID NO: 252473 - DNA, 262 bp, Homo sapiens
  chr3:101588885-101589147
  hypo
cccatcgctggtaccggttcatggcgctggagttggggaaccctgctgtagggaaagaaccccttagctctgcagcagccacgatttcagatggtacaacttgtttaaaataaatagacacactcacttcagagactggtcaagaaatagttgccgagagctcttggaaccaagatgagaacttacattacagtttcttctgcagcctaggatcacagatgacgggcaggggctttattagtttaaccggcatctatttctc

SEQ ID NO: 252474 - DNA, 196 bp, Homo sapiens
  chr3:105444398-105444594
  hypo
cctttccttttctagtgcatcgctctagttcataatgttactataacgtgtttggacaactctcgcagcttctttattactcccaacgtgaaagggaagctccaacatttaatcactcatttacacaaaagacacaacgggtggttaaagacaaaagtgccaatttaaaacgttcgtaaaggcaagtattattttc

SEQ ID NO: 252475 - DNA, 173 bp, Homo sapiens
  chr3:106350366-106350539
  hypo
tgtttggggatggcctcagccggaatggcctttgcgccacatggtttttcattgtcgggtagctcaactcgtgcttgttcacatagtggctgggcaggtttccaggtgagtgaagagaagtatcaagatcttttatgtctatgttcagaaccggcacctttcttctgccacat

SEQ ID NO: 252476 - DNA, 217 bp, Homo sapiens
  chr3:106362774-106362991
  hypo
agggtgcgctgggtcccccagcactgccggcccaccttcaccatgctcgaaatctccccgggcctcagctgctgcctcgcggggcaggactcgggacctgcagcccgccatgctggacaaccttccctctgccactgtgggcttgcgtgcggcctgagcctctctgacgggtgccaccccctgctcccccgcgcccgctcccatggaccatccaagg

SEQ ID NO: 252477 - DNA, 57 bp, Homo sapiens
  chr3:107505826-107505883
  hypo
aatagatacttctccgaataagatatataacaaatacgtggccgataagtacaagaa

SEQ ID NO: 252478 - DNA, 91 bp, Homo sapiens
  chr3:107520015-107520106
  hypo
cacaacaccgaggtcggggagacgcggagcagtactccagaaatgcctgccgtgtctgcgttctttagcctcgctgcgctggctgaagtgg

SEQ ID NO: 252479 - DNA, 105 bp, Homo sapiens; identical to SEQ ID NO: 208979
  chr3:107530308-107530413
  hypo

SEQ ID NO: 252480 - DNA, 43 bp, Homo sapiens
  chr3:107552852-107552895
  hypo
ccgatgttctccacgtgactcgactctgcgttccatccacgga

SEQ ID NO: 252481 - DNA, 84 bp, Homo sapiens
  chr3:107750328-107750412
  hypo
ttaacattttcctggaactccggtgaggctccccgagcatgggactttttagctccgtctgacgactgatccctgcagttaact

SEQ ID NO: 252482 - DNA, 86 bp, Homo sapiens
  chr3:107771805-107771891
  hypo
ctccatctcaaaaaataaaaaaacccaaaaaaacaaataaatacagaataagaatcctacagatggaaaagcgttgaacagaaaca

SEQ ID NO: 252483 - DNA, 55 bp, Homo sapiens
  chr3:107832937-107832992
  hypo
gctggctctgttatcggcagggagcatccaggacaaggcgcggcctacgcggtgc

SEQ ID NO: 252484 - DNA, 239 bp, Homo sapiens
  chr3:108836864-108837103
  hypo
acgcagctgggcccgctgaagcgcagggtacctgtcgtccatgccctcgaacacgacccgcgcaactcaaggggacaaggacacctgaccggcagccgttcgcctgcgcccgcgcccactcccacgcccacgctcacgcgcagagggcgggttcagcaaacacgtgctcccccttgcggcgggaccgcgaagctcccactgcgtcgtcgactcagttgtctcgcgaggtttgttgcttg

SEQ ID NO: 252485 - DNA, 92 bp, Homo sapiens
  chr3:109035085-109035177
  hypo
gccaccacgccccgctaatatttaaattttttgtagagaggagacctgggatggaaggagattgcggggacggagaggatgtgggtaggggg

SEQ ID NO: 252486 - DNA, 69 bp, Homo sapiens; identical to SEQ ID NO: 208981
  chr3:109035957-109036026
  hypo

SEQ ID NO: 252487 - DNA, 145 bp, Homo sapiens; identical to SEQ ID NO: 208982
  chr3:109061756-109061901
  hypo

SEQ ID NO: 252488 - DNA, 142 bp, Homo sapiens
  chr3:109128854-109128996
  hypo
gtgagcggcttttgtacccagttgcttcctggctgctttacggtcgatttgcaggcagtccgctttgtacaagccatggtatagaggcttccttatttacctcccttatccttcagctggagctctgcgagccagaggcagc

SEQ ID NO: 252489 - DNA, 120 bp, Homo sapiens; identical to SEQ ID NO: 208984
  chr3:112207345-112207465
  hypo

SEQ ID NO: 252490 - DNA, 41 bp, Homo sapiens
  chr3:112249242-112249283
  hypo
tgtctccaaaaaaaaaaggcggggggggtgatataagcaaa

SEQ ID NO: 252491 - DNA, 154 bp, Homo sapiens
  chr3:112357813-112357967
  hypo
ctctttcttcttctcgctgcccaggcttggccttcctgctccccctccaccgtcattcccctccgccaccacctggccctctacaccagaggccttacatttctggacaaagcccttctgcctgatcttctcgatcctacggatggggccttgg

SEQ ID NO: 252492 - DNA, 38 bp, Homo sapiens; identical to SEQ ID NO: 208985
  chr3:112543790-112543828
  hypo

SEQ ID NO: 252493 - DNA, 111 bp, Homo sapiens
  chr3:113159894-113160005
  hypo
ctttctggagatgaggaagccgaagtgcagagggcccagcgtgccaagcgtcgcacccagctgagcgcagggcaggtgtctcactggagcggggagccccagcaccttccc

SEQ ID NO: 252494 - DNA, 252 bp, Homo sapiens
  chr3:113957889-113958141
  hypo
gtttgcatgcccccgtgacgagtggtctgcaggtctctggtgtcacctcccagtacggggtcctctggggctggtccagctgctcccacttcttccaggttaagatcatggacatgtcctgcaccactgcctcggatgtcgctgcaatggagcaagacaaaagccacgcggcacctgcatccgcatatgcagagagtacttccgactacagataccagagagccgcgtgcagcctccgccagccgaactaca

SEQ ID NO: 252495 - DNA, 230 bp, Homo sapiens; identical to SEQ ID NO: 208990
  chr3:114070278-114070508
  hypo

SEQ ID NO: 252496 - DNA, 211 bp, Homo sapiens
  chr3:118864573-118864784
  hypo
gttttgtggtcctcgtgcagctggttgtgtgttcatctgttgacatttggaggtgcggtgggggatgttaatcagaggagcagtacctgagagagggcctctttctcacacactgcggagaacctctgtgaacaaggaagagggtaacactctaggtggcgatgcacggagccccgtggcctggttgctcggcagggtgaggagaagctgt

SEQ ID NO: 252497 - DNA, 38 bp, Homo sapiens; identical to SEQ ID NO: 208993
  chr3:119011022-119011060
  hypo

SEQ ID NO: 252498 - DNA, 96 bp, Homo sapiens
  chr3:119342487-119342583
  hypo
agcctgcttccctgacgctgggtgtgtggagagggagcagggccgttgctgtatttaatgagttaattctctctttcttttttttttttttttttt

SEQ ID NO: 252499 - DNA, 44 bp, Homo sapiens
  chr3:119432910-119432954
  hypo
agtagaaatgctggagcagccgggcgcggtggctcacgcctgta

SEQ ID NO: 252500 - DNA, 42 bp, Homo sapiens; identical to SEQ ID NO: 208994
  chr3:119517358-119517400
  hypo

SEQ ID NO: 252501 - DNA, 158 bp, Homo sapiens
  chr3:119535940-119536098
  hypo
tgctcaccgagctccgcagcatcaatgctcagcacacccagcggctgctgcgcatccaggacatacacccctttgctacgcccctcatgcaggagttgttcggcatcacaggtagctgagcggctgcccttgggtgacacctccgagaggcagccaga

SEQ ID NO: 252502 - DNA, 31 bp, Homo sapiens
  chr3:119827279-119827310
  hypo
caccacgctcggccagtttaagtcttaagtg

SEQ ID NO: 252503 - DNA, 141 bp, Homo sapiens
  chr3:120023463-120023604
  hypo
gctctgcctgttgacgctgcctgaaggcgatttgcgtaggaggcctacctaggcttgggttcagaaaggagcccatttgtctgaaataagttggggaggggaatctggtaatattttatttctattcgagctgttgattag

SEQ ID NO: 252504 - DNA, 158 bp, Homo sapiens
  chr3:120064577-120064735
  hypo
agcatagcctaaacctttaccgattcttagcagtaacgagaaataaggcacgcaagtgaaaaatgaaaacagtgacgttaaagatatcatacattattggtgtcaaagacacaatgaacaataaacacagatagcacggttgttagcccagaaaactg

SEQ ID NO: 252505 - DNA, 41 bp, Homo sapiens
  chr3:120150381-120150422
  hypo
agttatggctggatgcggtggctcacgcctgttatcccagc

SEQ ID NO: 252506 - DNA, 101 bp, Homo sapiens
  chr3:120150482-120150583
  hypo
aatatagcaagatcctgtctcttaaaaaaaaaagaaaaagagaaaaaaggaaataaaaatagttctgagttctgacctcactgcatcggaggaggagggtt

SEQ ID NO: 252507 - DNA, 38 bp, Homo sapiens
  chr3:120313290-120313328
  hypo
cgtgagccaccgcgcccggccaaactgccaaatgtggg

SEQ ID NO: 252508 - DNA, 36 bp, Homo sapiens; identical to SEQ ID NO: 208996
  chr3:121215302-121215338
  hypo

SEQ ID NO: 252509 - DNA, 39 bp, Homo sapiens
  chr3:121265948-121265987
  hypo
gagatctcgccggccgtggtggctcacgcctgtaatccc

SEQ ID NO: 252510 - DNA, 40 bp, Homo sapiens
  chr3:121280185-121280225
  hypo
ccagggttggccgggcgtggtggctcacgcctgtaatccc

SEQ ID NO: 252511 - DNA, 212 bp, Homo sapiens
  chr3:121438459-121438671
  hypo
tgacagtcattctaccgagttttagcaacacacctgttgcatctctgtttccacatctgcctgggttactaactgaagaagctcatcttcatgaagacgaacttgtgtttcaaagcgggcatctttctctcggaccacctgctgcatggaactcaactgaagacacataccagagaaactatgcaagttacactccccgaatattgcacaaa

SEQ ID NO: 252512 - DNA, 94 bp, Homo sapiens; identical to SEQ ID NO: 208998
  chr3:121500624-121500718
  hypo

SEQ ID NO: 252513 - DNA, 101 bp, Homo sapiens
  chr3:121563924-121564025
  hypo
gaaaagctctgatgccgaaagaacaaagagtttgtggaataagtgactttacgtagtaaatcatagtataatgaaaaatgggatgggcgcggtggctcacc

SEQ ID NO: 252514 - DNA, 360 bp, Homo sapiens
  chr3:121637756-121638116
  hypo
gaaatctctgtggccactaccgcctctgtctgggccttgctctggcccactgggctcgctcagcctgcgactggactgggcatgtagcgagcagcttctgtgttgggtgcggcatctagacaaggggaacacggtggcgcccaaaaactcggagatgctagcaattgcagagtcctaagaggtgttatagctcctgctcagggagtcccaaggtctgagcccccagaaatgttacagctgttcactcctgtagttcaacgagcaggagcatgttacaactctctcctgtagtctagcgagcgggagcgtgttacggctcttttattcccgctgcccatagcttggcgagctgcccagggg

SEQ ID NO: 252515 - DNA, 33 bp, Homo sapiens
  chr3:121638472-121638505
  hypo
aggaaccggcaagtcggttttcaggctttaaac

SEQ ID NO: 252516 - DNA, 240 bp, Homo sapiens; identical to SEQ ID NO: 209001
  chr3:122003336-122003576
  hypo

SEQ ID NO: 252517 - DNA, 76 bp, Homo sapiens
  chr3:122231236-122231312
  hypo
gttctgtgaagaaacttctacgagaaccactttataaagtaacataatgcggctgggcgcggtggctcatgcctgt

SEQ ID NO: 252518 - DNA, 32 bp, Homo sapiens
  chr3:122234242-122234274
  hypo
aaaataattaagggccgggcgcggtggctcac

SEQ ID NO: 252519 - DNA, 57 bp, Homo sapiens
  chr3:122355300-122355357
  hypo
acatcgaatggtggcgggttaaactgtactgcttaagtggagcggctaccgttatgc

SEQ ID NO: 252520 - DNA, 180 bp, Homo sapiens; identical to SEQ ID NO: 209003
  chr3:122451547-122451727
  hypo

SEQ ID NO: 252521 - DNA, 91 bp, Homo sapiens
  chr3:122573579-122573670
  hypo
acccaggtagaagaagaaatcgtttggtggacagctggcaatccctgtcacaagtgtaatgaaaaatatgactcaaaggctgggcgcggtg

SEQ ID NO: 252522 - DNA, 31 bp, Homo sapiens
  chr3:122573970-122574001
  hypo
aatatgactcgaaaaacaacaaaaggtagaa

SEQ ID NO: 252523 - DNA, 348 bp, Homo sapiens
  chr3:123049663-123050011
  hypo
gcaggtcagtcagtcgctcgggctgtggacagtcccagggagggagacggtacccggggggtggacacttacgagatggcctcgatcatgtccatgcccatctccacacagcagtgggcgtggtcagcccttgcttcaggcagccccgagacgcagtaataacaatccccaaggatcttaatacgtaaacagtgattctcctggaaagcaaattaattttacaaattaaaaatagtaggaaagagaagtgggagggaaagaaacgagaagcaaaaagattcaccccgtgcctggaataacttgccttttagggcagtgagcgcaggcccacgccggaactcggcatgg

SEQ ID NO: 252524 - DNA, 455 bp, Homo sapiens; identical to SEQ ID NO: 209007
  chr3:123166198-123166653
  hypo

SEQ ID NO: 252525 - DNA, 42 bp, Homo sapiens
  chr3:123200212-123200254
  hypo
gaactctcataattttaaaacgctggtaaccaaaacaattta

SEQ ID NO: 252526 - DNA, 81 bp, Homo sapiens; identical to SEQ ID NO: 209009
  chr3:123340748-123340829
  hypo

SEQ ID NO: 252527 - DNA, 181 bp, Homo sapiens
  chr3:123456130-123456311
  hypo
tacacacacaggtgcgcagtgaacaagcagctcctctaggagggtgcggcaccaggcagggatcgttctgcactagccgtccactggtcgataccttggatggaaagttcagctgacatcgaggccttccccgacccgttcaccaccaggcacgtgtacactcccacgtcatcttggttga

SEQ ID NO: 252528 - DNA, 43 bp, Homo sapiens; identical to SEQ ID NO: 209010
  chr3:123667350-123667393
  hypo

SEQ ID NO: 252529 - DNA, 253 bp, Homo sapiens
  chr3:123813450-123813703
  hypo
gctcggtctgcacacggcgttgttctgcacttgttcctttgttgctgtgaaaccggctcccggcacagtcagcctctgtgtgggaggactggtggctgtctttgcaggcaggcatttgcttagagcaggctgtgtgcgagcccagcgtcaagtgattccggcctcctcgagtcagcggtggtgggatgaggctctgccgaggggactggctgtgaaggatgagttcagggtgggatgacggaccgcttctggg

SEQ ID NO: 252530 - DNA, 345 bp, Homo sapiens
  chr3:124103487-124103832
  hypo
tgaggcacctagctggtgcccgcctgcaggctgctcgcttgctgagaggcggcgtgccagctccgcgcaccgcgcctcagtgccagatcagggagctgtcagctcagcgcccacgcccctccgcttcagctccggggagccccagggtgggctgctggaaggcgcgactgcaacttgactttgcctcactgttgttgctggcagaatacgtacaccaatgcggacaagctcctagaagcagcagagcagttggctcagacgggggaatgtgaccccgaggagatctacaaggcagctcgacacctggaggtgcgcatccaagacttcgtgcgcagggtggagcag

SEQ ID NO: 252531 - DNA, 94 bp, Homo sapiens; identical to SEQ ID NO: 209012
  chr3:124126552-124126646
  hypo

SEQ ID NO: 252532 - DNA, 208 bp, Homo sapiens; identical to SEQ ID NO: 209013
  chr3:124281715-124281923
  hypo

SEQ ID NO: 252533 - DNA, 95 bp, Homo sapiens; identical to SEQ ID NO: 209014
  chr3:124436154-124436249
  hypo

SEQ ID NO: 252534 - DNA, 84 bp, Homo sapiens
  chr3:124465924-124466008
  hypo
aaccttgacttgggctcaagcgatccgctcaagtagctggaactactctcaagtagctctcaagagcctctcgagtggctggaa

SEQ ID NO: 252535 - DNA, 203 bp, Homo sapiens
  chr3:124466068-124466271
  hypo
gaggttctcactgtgactcagtgtgtgcccgacagcagagcccacaccactccagttgcagtggttgccatctgggtcatcagacctggctgtcaggggtgcagccacaggagagccaacagcagagggtgctggccgctgagctagctgctaatgctggcctgggtgcagttctcatccaaagtacccggtgggtgggagtc

SEQ ID NO: 252536 - DNA, 401 bp, Homo sapiens
  chr3:124515256-124515657
  hypo
cctggcacaggagaagttgtcgcactcacagaaaggcccatagatcttgccaaactcgctctcgaagcaggagcactggttgcagctgcagtccccacgcccgctgcacagtggcttgccctctgcctcccggcacaggttctggtacacgctctggttctccccatcctggcactcgcacctggtgcccaggtagccggggctgcactcacacaggccgcagacataggtcccgctcccgttgcacctggcgctgttgggttccagccccacgctgcagccgcacgtgcagttgtaggtgacccccacctccaggctgtcccggaatcccaccggccgcagggcaaacacatgctccgtgtgtctgctgggacagcttcgggcctccaatgatacttcaa

SEQ ID NO: 252537 - DNA, 193 bp, Homo sapiens; identical to SEQ ID NO: 209015
  chr3:124518663-124518856
  hypo

SEQ ID NO: 252538 - DNA, 463 bp, Homo sapiens
  chr3:124716558-124717021
  hypo
aactgaaagtatcccgacttgcactggcacagggcaacgccgtccaggtcagtgcagatggaggtgtctttgtcacattcgggactcttccgcttgcacaagctgcccgctggaatggaaaaacaagacagtgaaacaaaacaaaaccttctccacttcaaaccttaaaatctcctccacttcaaagctcatgtgtctgcatgaactctctatttcaagaggctgagaacagttttccgaaaagtctccacagagcaacactcctctcaggagtccatctgtactgccttctgccactccttctctgatcagccgcaggctgtgcaccagtgttccccgttgaaaacaccctcacagcgtgccacggacccactgagaaacgaaattggaataaacaggccctgttcactcctctggtgctcactgcaaatacagcccttaatggccccgtgtcttccaaagg

SEQ ID NO: 252539 - DNA, 185 bp, Homo sapiens; identical to SEQ ID NO: 209017
  chr3:124885658-124885843
  hypo

SEQ ID NO: 252540 - DNA, 39 bp, Homo sapiens; identical to SEQ ID NO: 209018
  chr3:125026374-125026413
  hypo

SEQ ID NO: 252541 - DNA, 110 bp, Homo sapiens; identical to SEQ ID NO: 209019
  chr3:125078701-125078811
  hypo

SEQ ID NO: 252542 - DNA, 39 bp, Homo sapiens
  chr3:125210665-125210704
  hypo
ccataagccgggcacggtggcttatgcctgtaatcccag

SEQ ID NO: 252543 - DNA, 149 bp, Homo sapiens; identical to SEQ ID NO: 209020
  chr3:125261068-125261217
  hypo

SEQ ID NO: 252544 - DNA, 31 bp, Homo sapiens
  chr3:125321256-125321287
  hypo
ttaaaaaaagaaaacgagaccgggcgttgcg

SEQ ID NO: 252545 - DNA, 43 bp, Homo sapiens
  chr3:125411624-125411667
  hypo
aggactgtttttacccccagcggcattgggtgtagtatcatcc

SEQ ID NO: 252546 - DNA, 32 bp, Homo sapiens
  chr3:125412960-125412992
  hypo
gatagccagggtagacggtgacattacttcat

SEQ ID NO: 252547 - DNA, 120 bp, Homo sapiens
  chr3:125477671-125477791
  hypo
agcccctcactgcccgggctggccaggctggcctgcagatcctagtgcggggctgccaagcccacgcccacccggaactccagccggcagacaagtagcgcgcatagccccggttccggc

SEQ ID NO: 252548 - DNA, 42 bp, Homo sapiens
  chr3:125678379-125678421
  hypo
ggccagccgccccggcggtcgctgctgcgcctcaggtagccc

SEQ ID NO: 252549 - DNA, 170 bp, Homo sapiens
  chr3:125679708-125679878
  hypo
tcaggactctgcctccgccacccccgtgggcacacactgaagggttgcccgcagggtctccagatgagggggagcctgcaggatgggcagcaccttctcctggcttccccacagtcccctgcagcatcctgtctggctgttgacctagatgcagtcgggcagacctcaca

SEQ ID NO: 252550 - DNA, 186 bp, Homo sapiens
  chr3:125774553-125774739
  hypo
tcaatgattccaatacgctgcccaaaccatgctaggggagaaacagactgtgataagcaaatctccctcagcacacgcctccactgcagggagaccgccatggccctcccacctgcacccccagggctgcaaaccttgtccttttttaccaggggccacgccaggatgctgcgggctgggcacact

SEQ ID NO: 252551 - DNA, 34 bp, Homo sapiens
  chr3:125793294-125793328
  hypo
ggaaaagaaatgagacgtatccagcttgaaaagg

SEQ ID NO: 252552 - DNA, 93 bp, Homo sapiens
  chr3:125793388-125793481
  hypo
gatccacatacacacaaactattacagccagtaaacaagttcagcaaggtgtaggactggaggacgcaggtcaatacacgaaagtcagttttt

SEQ ID NO: 252553 - DNA, 114 bp, Homo sapiens
  chr3:125826120-125826234
  hypo
ggagacacggtgcccgatggtccagcctctccgtcagcagggcctgggccacaccagccacctgcggatgacccgacataagcaccgggtcacggcacccgtgtgatgggtgtc

SEQ ID NO: 252554 - DNA, 55 bp, Homo sapiens
  chr3:125875512-125875567
  hypo
tgagccgccctgccgctcaggccatgtgaccacaggtcacggccttcccagcagg

SEQ ID NO: 252555 - DNA, 189 bp, Homo sapiens
  chr3:125977272-125977461
  hypo
catccaggagtcactcgcatggctactgtcacctgtctgctcaatagggctagtggggctgggatggcctctctggcgtgtctggcagttggtgctggcggtcgactggggcaccttagtttctctccacatgacccctgccctctgaaggctggactggtctttcctatagcacggtgggctcagggc

SEQ ID NO: 252556 - DNA, 252 bp, Homo sapiens
  chr3:126090323-126090575
  hypo
agctgtggaagctgcgaggagggcctgggtcgcaacaagcaggacacgccccacagtgagcaatcacctggctcaacctgcgggtgtcttccggcaatgcaagcatcacaccgtcatgctcgccggctcctgcggtggtgtgagccctgggtgcacagcttcttgctccattccatgcacctctgccctccttctatgaagcgagggtgcagccatgcagctaaccatcctgacccacggagtggctgcaac

SEQ ID NO: 252557 - DNA, 36 bp, Homo sapiens
  chr3:126137173-126137209
  hypo
cggtagtcacctgggcgtggacgcaaagcagtggcc

SEQ ID NO: 252558 - DNA, 174 bp, Homo sapiens
  chr3:126157598-126157772
  hypo
ctccgcacttctcacgcggtgagcactctcccaggtattaggtgtccgtccgcctgtgccctcacagctgaccaggatgtggcccagggctatggaggccccatctagcctgtctcctcctgctacaagaagtgttcctgctgttgcaccatttgactccgggctacggtgatt

SEQ ID NO: 252559 - DNA, 38 bp, Homo sapiens
  chr3:126195713-126195751
  hypo
catcggtctccctccgctccactcgctcccatccacgg

SEQ ID NO: 252560 - DNA, 87 bp, Homo sapiens; identical to SEQ ID NO: 209021
  chr3:126218194-126218281
  hypo

SEQ ID NO: 252561 - DNA, 272 bp, Homo sapiens
  chr3:126253863-126254135
  hypo
agccaggagacacacagcatcgctgtcctcagccgggagacagacagacagcatccctgtccccagccgggagacagatagacagcatcactgtcctcagctggagacagacagacagcatccctgtccccagccgggagacagacagcatccctgtccccagccgggagacagacagacagcatcgctgtccccagccggtagacagacagcatccctgtcctcagctgggagacagacagacagcatcactgtcctcagctggagaaaga

SEQ ID NO: 252562 - DNA, 152 bp, Homo sapiens; identical to SEQ ID NO: 209022
  chr3:126254315-126254467
  hypo

SEQ ID NO: 252563 - DNA, 177 bp, Homo sapiens
  chr3:126261823-126262000
  hypo
gtcctccccacctcgcccaccctggcaaggacagctgcggccaaggacgaaagccctcccttggctggcctcacgatggggccgtcccgggagccaggtgggagctgccttccactgccatcgggtctcctctcctctcccacgcggctggccctacccaggcgccaccttcggtct

SEQ ID NO: 252564 - DNA, 158 bp, Homo sapiens
  chr3:126274128-126274286
  hypo
ctgtgccgaagccccgtgtttatgacactgaggaggcatcacctgcccattcagaggagagatgagcagtctttgggggccatcaccctttgaggccaggacggtacagtcgcaggagacctgacacggtgcaggctagaccccgctccagcatggaa

SEQ ID NO: 252565 - DNA, 266 bp, Homo sapiens
  chr3:126439995-126440261
  hypo
cctcccacgcaggccgtggtgatgtttccttgctcacaaactttcagcgtctcctcgggatggttggacctctccctttgcctgacttccaagcttccttctgtgctggcttcatccaagtccttccaccccacgccttccaaagtgaacctatggcggcaggcgcacggtctcttcctgtctgtgcctcttccccggtgccctgccctaggctatgaagcttctgccttctgcagacatcgctgccgtcccgcccatgggatgga

SEQ ID NO: 252566 - DNA, 53 bp, Homo sapiens
  chr3:126465315-126465368
  hypo
atctcccctggcagcagtggcgcttggtgtgcgagtgcatccagggcaggatc

SEQ ID NO: 252567 - DNA, 228 bp, Homo sapiens
  chr3:126472159-126472387
  hypo
tctgtgaagaagtcaaggttcggcagcaggagctgtgccgtccttttgcccacctggaggctgaggaggaggggcactgaggcactcgtagctgggtgcagatcattccaaagacattccaggagcatgctgcagcccgcctgcatgcctgccatagctgcggcttgtagaccggccttggggtggagttctctgtaaacattggacggggcctctgtagaagtggca

SEQ ID NO: 252568 - DNA, 83 bp, Homo sapiens
  chr3:126501195-126501278
  hypo
tctgttctggcctctgactgcgagctgtctgacattacatttcattgacggttgagtaaggcccaggccgatgtcatacgctt

SEQ ID NO: 252569 - DNA, 64 bp, Homo sapiens
  chr3:126516696-126516760
  hypo
gtgtggtgtgtctgcgtgaaaaggaagaagaagagtaacagggcgcctccgtgccagtgtctgg

SEQ ID NO: 252570 - DNA, 422 bp, Homo sapiens; identical to SEQ ID NO: 209025
  chr3:126577518-126577940
  hypo

SEQ ID NO: 252571 - DNA, 164 bp, Homo sapiens; identical to SEQ ID NO: 209026
  chr3:126676242-126676406
  hypo

SEQ ID NO: 252572 - DNA, 117 bp, Homo sapiens
  chr3:126707399-126707516
  hypo
aggaccagagcaccgaggcccaaggccccagcctgccatgccgctgccaccgcggagcctgcaggtgctcctgctgctgctgctgttgctgctgctgctgccgggcatgtgggctga

SEQ ID NO: 252573 - DNA, 402 bp, Homo sapiens; identical to SEQ ID NO: 209027
  chr3:126724696-126725098
  hypo

SEQ ID NO: 252574 - DNA, 328 bp, Homo sapiens
  chr3:126730805-126731133
  hypo
cccacagatcctgccctccacgcagatctacgtgccagtgggagtggtaaaacccatcaccctggccgcacggaacctgccacagccacagtcaggccagcgtggatatgagtgcctcttccacatcccgggcagcccggcccgtgtcaccgccctgcgcttcaacagctccagcctgcagtgccagaattcctcggtgaggtggccagggcaggggctgggggccgtgagccggaatgggccggttatcctcacggccctgggtcctggcgtgtgcttgttcataaagggcagtgcacgtgctcacgtgtatctctgatgagtcaga

SEQ ID NO: 252575 - DNA, 64 bp, Homo sapiens
  chr3:126736637-126736701
  hypo
acacggtgctcatcggctccacaccctgtaccctcaccgtgtcggagacgcaactgctgtgcga

SEQ ID NO: 252576 - DNA, 181 bp, Homo sapiens
  chr3:126747049-126747230
  hypo
tgagaatgcacctgaggtgccggtgaaggggctggactgtgacacggtcacccaggccaaggagaagctgctggacgctgcctacaagggcgtgccctactcccagcggcccaaggccgcggacatggacctgggtgagcgggcggggccacggctgcccggggtgtgtgctggagcagag

SEQ ID NO: 252577 - DNA, 75 bp, Homo sapiens
  chr3:126756349-126756424
  hypo
cacactctgtgagttgggtgcgctcagcccaggtgacacattggagcccttggcggagactaaaacaccagtgcc

SEQ ID NO: 252578 - DNA, 84 bp, Homo sapiens
  chr3:126796239-126796323
  hypo
gagaagggaggggatcccagcgtttgagctgcaggcccacagccccgcacgggctgttcctgcgtgggcagcccaaggattaaa

SEQ ID NO: 252579 - DNA, 168 bp, Homo sapiens; identical to SEQ ID NO: 209029
  chr3:126894145-126894313
  hypo

SEQ ID NO: 252580 - DNA, 158 bp, Homo sapiens
  chr3:127285885-127286043
  hypo
gagcctcccggagccggctttaaacactcttcacagcaggtttttggatcttgatttgaagaatgcattcagctgagtcaccgtccccaaacaatatgagaaataaatcgttgggcacgctcctgatcccagagccaattacacgggccactccccac

SEQ ID NO: 252581 - DNA, 219 bp, Homo sapiens
  chr3:127286318-127286537
  hypo
ataatcaccccaggcgctctcagtcccatcccagcaatcctttcggcattttctctacatcctccagactggttttggagtggctacaggctcctcattttgatgcaatggcccaagaaacaaggctcggggcccttccagtgctgagggtgtttctgtcagatgtgacagtgcggcgcagtggtcagaggcctggactcagcccgattgcctggagtc

SEQ ID NO: 252582 - DNA, 79 bp, Homo sapiens; identical to SEQ ID NO: 209030
  chr3:127292370-127292449
  hypo

SEQ ID NO: 252583 - DNA, 284 bp, Homo sapiens
  chr3:127325614-127325898
  hypo
tcctgagtgccagtcggccggcccctttgaggtcaacatggaggaggtgagagaggacacaaggtctgctgccagctgtccttaggggtgcccagtatgcaggacctgactggcctctcaggctgtggaagaccagtgtgggcagccgcaagaagcaagatagaattgtgtgttggccacaccctggggtggacccagtctgtctggccagtggacttagcttggcccacacgacgtttttaggaattcaagtcaatatttaagtcaggcgatttgtttaaacc

SEQ ID NO: 252584 - DNA, 202 bp, Homo sapiens; identical to SEQ ID NO: 209032
  chr3:127326110-127326312
  hypo

SEQ ID NO: 252585 - DNA, 203 bp, Homo sapiens
  chr3:127349664-127349867
  hypo
tctttggaaaaaggcgacattcaataaataaacatcaattgattggtctgctatttctttgtgtgacagtcataaaccagaactggccagcaacgtcctcatggacccaggcccagctgtaactgcccatgtgcttatgtgaccagctgtgaggactgcaggcagcctgcctcccggctcctctctcccgtgcatgctcttca

SEQ ID NO: 252586 - DNA, 268 bp, Homo sapiens
  chr3:127366356-127366624
  hypo
acccaactcagacaggctcacgggcctgtctgataaaaggggactttattggctgaagaacgggggtccaggaacaggcttccagctccagcactcggcgtgccgccctcaacgtgctggagcctgccctgtcccatcagtcatgctcggctttcccttgctggcttcgttctcaggcaggctggtcctgggcaccggcttggagagcccagtagctccacactgtcgtcccatcactcagcaccccgcagaaagggagctctgcctt

SEQ ID NO: 252587 - DNA, 117 bp, Homo sapiens
  chr3:127390330-127390447
  hypo
gtgcgcagcgactacggcacgctcttcgtggtgctggtggtcattggggccatctgcatcatcatcattgcgcttggcctgctctacaactgctggcagcgccggctgcccaagctc

SEQ ID NO: 252588 - DNA, 809 bp, Homo sapiens
  chr3:127394387-127395196
  hypo
cctggattataggtgtgagctgccacgcccaggcttgtttttcttaatagtccctgccatcgttaggtagtgggttgattgtcctgcctcactagagtataagttcagcaggacagggacctgtgtctcgttcactgctgtgctccagtgtgtgggacaagcccagccaccaagtcagctctccgttctgtgttgtctgtcttccgtgtgagtgagtatgtgcctgtgtgagtgcacacagacgtgcccattcgcctagcccttgactgggagggtgttggggtcagagtgggcccagggtaatttgggaaggcatcgccagagattcggagccccatgtgtgggaaggtggggaggagggacagggagattagaatttcccccaggccccttccctgctaactggtgagccctgcctcccccaggagcccgctgcgaggccaacaccttcgatggtgagcgctgcctctatggggcactgagtgaccccatccgccgggctctacgcgattacaagcaggtcacggcttcctgcaggaggcgggattactatgacgacttcttgcagcggtgagccagggcacacgaggggtgcagcatggggtgcggtggccctggtgggtgtggcgagtctgctctgactgtggcctgcactgggttctgagtgctccgaggaatggggtggggctgtgccaagtatcctccctcctggcttgtccctccccaggcttctagagcagggcatccacagtgacgtggtctttgtagtacacgggaagccattccgggtgcatcgctgcgtcctgggt

SEQ ID NO: 252589 - DNA, 158 bp, Homo sapiens
  chr3:127395763-127395921
  hypo
tgacagctgaggtcccgcaggccctcatcctccccactgcccccaggccgcctggacattggcgtagagcatgtgagtgactgtgagcgcctggccaagcaatgccagctgtgggacctgctcagcgacctggaggccaagtgcgagaaggtgtctga

SEQ ID NO: 252590 - DNA, 56 bp, Homo sapiens
  chr3:127439440-127439496
  hypo
aggtcaaaagtgcccggggcggaggagcgcggcagtggatgcgactccatactgca

SEQ ID NO: 252591 - DNA, 143 bp, Homo sapiens
  chr3:127439917-127440060
  hypo
ggattggcaagaaccagaggcgaaatgagtaccatgccggcgaagtggcccggcctctctgcggccgtgaggatggcgatggcgcctccctgtaatgcagaatgggcagagctgctgtgttcggcttgcaccagtgcacacat

SEQ ID NO: 252592 - DNA, 174 bp, Homo sapiens
  chr3:127505554-127505728
  hypo
tcagttcgctcacccgtgaagtggggataatcctaacaccaccgacctcagagagcaatgtcgcgaggtaaataaggaaatgcggatggggcaggggtcttgcctgggctaatgaaagccccccatcgctgtccactaggaagccatttgctccgatggcgcaggtaagccact

SEQ ID NO: 252593 - DNA, 72 bp, Homo sapiens
  chr3:127515530-127515602
  hypo
gcaatgtttagaatcgtgcactcttctgagcactgaacctcagcaaagctctcccagcgtaaggataattaa

SEQ ID NO: 252594 - DNA, 294 bp, Homo sapiens
  chr3:127534724-127535018
  hypo
ccaccctttccccaccctggcgcccaaggaccatgtagacgtcaataaggaagtatttgctgaatgaatcgctgctttggatcctgggagaggagagcaaggagccgtatggggtagccacagagctgcatgcgaggggcgctgagcaggagccaggccgtcctcacccctgcagagactgacagagtggggttcaaaatggccacttgaagggacaataagctgtgtgatttagctgaccccagggagcatctgcgctaaaccagctggctggtgatgcgggaacacctagtc

SEQ ID NO: 252595 - DNA, 99 bp, Homo sapiens
  chr3:127536745-127536844
  hypo
ccagtctccatcgccgtgctgatagcatcagtggacatttgctcatgatccagtatccccccctttttctttttttgagatggagtcttgctctgtcac

SEQ ID NO: 252596 - DNA, 38 bp, Homo sapiens
  chr3:127537084-127537122
  hypo
cgtgagccactgcacccggccaatatttttaagttcca

SEQ ID NO: 252597 - DNA, 155 bp, Homo sapiens
  chr3:127570889-127571044
  hypo
tcacaggtgggcctcgggctgctcgaggagggaggagccggcagagccaaggaacacagaggcctcacagggggttaatcactccctccacctgccatatggccagggaaatcatccactctcacggagctggatgggagcggaagctgctcctg

SEQ ID NO: 252598 - DNA, 80 bp, Homo sapiens
  chr3:127637229-127637309
  hypo
atttctgacacagatttacacgtgtaaagacagaacagcatgttagccaggcgcggtggctcacgcctgtaatcccagca

SEQ ID NO: 252599 - DNA, 224 bp, Homo sapiens
  chr3:127731014-127731238
  hypo
ggcaacagagtaagcctccgtctcaaaaaaaaaaaaggacctaaaaatccccctcgcctagtgacgtcacatcagctatgacgtcatcgcacacattcctctctgtgtgtggtgatgctggtgtacacaaacccactgcactgccagtcggatgaaagcccagcacatgcaattatgtacagtacataatacttgatcctattaataaacgactgtgttactgt

SEQ ID NO: 252600 - DNA, 81 bp, Homo sapiens
  chr3:127788443-127788524
  hypo
actttgagatcttcgttaaggagcaaagcgaggttggcagcatgggggccctgctcttctgagcccgtctcccggacaggt

SEQ ID NO: 252601 - DNA, 182 bp, Homo sapiens
  chr3:127798795-127798977
  hypo
ctgggaacagcgtccgggtacttagccccacctcaggcaccacggagccagcagggaaggacaggcctggcaagggcaagaacgcagctctcatcctactgggaaggcacattccagtaaggtgcactgcccagtgctgcacttgcccttgctgcttacttagtgggcgaacgcagagattc

SEQ ID NO: 252602 - DNA, 213 bp, Homo sapiens
  chr3:127816140-127816353
  hypo
acctgatgacacagttgcctcggttggatgcaaagatgacgatgggagcgatagaagactccagggcgcggtgcaggtaggtgaagcactcaatgtccagcatgtggacctcatcaacaaacagcacacccgggaccagctcagcaatgccctggtcgatgtacttgttcaccaccttattaatctcccctcgaagtttgtctaggagatgca

SEQ ID NO: 252603 - DNA, 73 bp, Homo sapiens
  chr3:127865562-127865635
  hypo
gccccatctgcctgccgctgtgtgcacgtgtgtgtacgtacatctgtgtgtctctgtgcgtgtgcacgtgtgt

SEQ ID NO: 252604 - DNA, 262 bp, Homo sapiens
  chr3:127937301-127937563
  hypo
ctttctgggccaagcgcagtgtccatgtcttagagtggactactcaagctgctcaaccgtcttgatttatgtttaattcttgctttagatgtgtccattcagacattcctttggtatgtttccagaggcttgggtttggggtttgaaggagtgattccggactggccgttggtttgcttgttcattgtttcggcacttaagtgtgctgcgtgtgtcaggagcagggactcagccctcctggagctgacgggctagtaaagaa

SEQ ID NO: 252605 - DNA, 210 bp, Homo sapiens
  chr3:127993823-127994033
  hypo
agcaaggggtgagatggatgcgggcttgctgggcttaccgaaacttgtatgcctgtaggcctctgggggtgcagtcatttcctccctctagctgtgggctgcggtgcctttggaataggatgcgcatgtcatcgaggggtctagcagtgacctgaggactggcaggacctcgatactggggcccaaagcggtttcctctcctgggaaatg

SEQ ID NO: 252606 - DNA, 83 bp, Homo sapiens
  chr3:128004544-128004627
  hypo
gctcccctcgcccacgctcccttagcccattcctgtccagcgtcaggccagtcccacgttcctggagccgccagcaccctgcc

SEQ ID NO: 252607 - DNA, 253 bp, Homo sapiens
  chr3:128056311-128056564
  hypo
catgaggcccctggccgccctctctcacaggaaggctcataaacacaaggatctcgctcaagccccggcacgtctggaatctcagctcggtgctttgccaggtatgattttgccacaaggggcatttcttttccagaatctgatgcagtcactctcttcagagcggctgggcgtttatctggacctgtcacaaccaggtttctcagcagctcctgtgctgggcactgaggacgcagcatagggagagcacagt

SEQ ID NO: 252608 - DNA, 308 bp, Homo sapiens
  chr3:128070501-128070809
  hypo
agagggacacacacacgtgtaatgacataattatatgcaccggcagccaagtccttgctcaaaggccagggacaatggggacccacctggcgtgtaagcaagcgcctggacttccatgtgcacagtgactgctcctcaggagctcagtccctccagtgactgaaggctaataaatagagcaaattattcatgcaaacagtgagaatccccacttagcgccattgttgtaactgtgctggcctggattcaggactgttccctagaagcaaggcctattgagcagatcccacatgcgttgcctttggttt

SEQ ID NO: 252609 - DNA, 136 bp, Homo sapiens; identical to SEQ ID NO: 209041
  chr3:128080966-128081102
  hypo

SEQ ID NO: 252610 - DNA, 117 bp, Homo sapiens
  chr3:128110728-128110845
  hypo
tgtgccagagggaggcgcccagcaccatggatgccctgtgggggccattggagggagtctgcaagcgcttccagaagggcgagtgcctgagtgtgccccagccgtggcttccctggg

SEQ ID NO: 252611 - DNA, 62 bp, Homo sapiens; identical to SEQ ID NO: 209042
  chr3:128118207-128118269
  hypo

SEQ ID NO: 252612 - DNA, 361 bp, Homo sapiens
  chr3:128123187-128123548
  hypo
ccagatagactttccggctctgcctgctccgggcagtgcgaggtatgcattgtgtgtaacgagagccatcgcgggtgagatggactgccgattgggccacgcctgtctccccagcccagcacagacgccggggagccccacgccttctcagcctccagacctcctggcaccagagggagacgggctgcccatgccatttgtcggggtctgctgccagctacctgctctgtttgcagaaggaaggccaggctctgattcagggagtcagatacctacaggccaggcgctcacttgaggggactggccagggtcctccccatgcccacactctgtgccccatcccaagcggggggcagaccac

SEQ ID NO: 252613 - DNA, 102 bp, Homo sapiens
  chr3:128179465-128179567
  hypo
tcattccagttcctgatagacgtcaccccctcagaaatggaggccactctgttggtttgtttttttgttttgttttgtttttcgtttttgtcgtttttttgt

SEQ ID NO: 252614 - DNA, 205 bp, Homo sapiens; identical to SEQ ID NO: 209043
  chr3:128182027-128182232
  hypo

SEQ ID NO: 252615 - DNA, 39 bp, Homo sapiens; identical to SEQ ID NO: 209044
  chr3:128290742-128290781
  hypo

SEQ ID NO: 252616 - DNA, 188 bp, Homo sapiens
  chr3:128340982-128341170
  hypo
aactctgtgacgcccgacacttactctgtcgcacagatcagagccctctgtcttcagcctggactgcagcagtgcaatctcactggtcaaggccttgtgttcagtctccaggctcttcttgccactgttgagggtggagatgtcccgggattgcttgtacctattgacggtctcgtcaaagtgacggt

SEQ ID NO: 252617 - DNA, 45 bp, Homo sapiens
  chr3:128401972-128402017
  hypo
gggattacaggtgtgagccacttcgccaggccaagagggcattct

SEQ ID NO: 252618 - DNA, 120 bp, Homo sapiens
  chr3:128500450-128500570
  hypo
tcgaggctgcagtgatcatgctctactgcactccagtctgggaaggagggagagaccttgtctgaaaaaacaaaaaacagttcacacagctgaatgtatctgaggtgagattgaaaccca

SEQ ID NO: 252619 - DNA, 120 bp, Homo sapiens
  chr3:128526383-128526503
  hypo
aggtggccacaaagcgggcacaggcctggtgctacagcaaaaacaacattccctactttgagaccagtgccaaggaggccatcaacgtggagcaggcgttccagacgattgcacggaatg

SEQ ID NO: 252620 - DNA, 142 bp, Homo sapiens
  chr3:128581911-128582053
  hypo
caaaaaaaagaaaagaaaaaaaaagaaggtggagaatcagcaaagtgggattccacttctattacagaaggaatatacatctctgtaaacagaagatttacaagaatatgttccaaaggattaacagcgttaatgggtgggc

SEQ ID NO: 252621 - DNA, 35 bp, Homo sapiens
  chr3:128653974-128654009
  hypo
gagcctggaagacccgcctccgctcagtgtctcgc

SEQ ID NO: 252622 - DNA, 226 bp, Homo sapiens; identical to SEQ ID NO: 209045
  chr3:128737541-128737767
  hypo

SEQ ID NO: 252623 - DNA, 271 bp, Homo sapiens
  chr3:128782774-128783045
  hypo
tgcctaagaacaatcgtaaaagctggcatctgctccttgggcaccaggtgtgtccaaggcttgcgtgcagcacctcccatgggtgactctcgggtttccctttggaagactgtaaggagggagctgttctgcaacccgctgcatggaggagggtgcaggcctaggtcacctgcttgttctctctcacacgtgctccctcgaaagcttccaggcccgtgggggaccctggaactaaggcccttcagtccccaacccccgacatagggtgcta

SEQ ID NO: 252624 - DNA, 163 bp, Homo sapiens; identical to SEQ ID NO: 209046
  chr3:128785014-128785177
  hypo

SEQ ID NO: 252625 - DNA, 84 bp, Homo sapiens; identical to SEQ ID NO: 209047
  chr3:128791633-128791717
  hypo

SEQ ID NO: 252626 - DNA, 120 bp, Homo sapiens
  chr3:128908773-128908893
  hypo
cctcatttaactcctaacaaaagcctctgtggcctggcgctgatgactcacacacacacaaaaaagaaatcctgattctagtactttctagccatttgtctagagttggagaccagcctg

SEQ ID NO: 252627 - DNA, 67 bp, Homo sapiens
  chr3:128973540-128973607
  hypo
caactaccggggcccggccgtgcgagccctctgccagatcactgatgtgagtcgtgccggttcctcc

SEQ ID NO: 252628 - DNA, 31 bp, Homo sapiens; identical to SEQ ID NO: 209048
  chr3:129008731-129008762
  hypo

SEQ ID NO: 252629 - DNA, 478 bp, Homo sapiens
  chr3:129045163-129045641
  hypo
agcccagccgaggccggaccagcagcgccctcgcctccctgaggctgcctgctcctgtcccacctccctggcctaccacccagctctggggaacgattctccatgactggtcccttagccctggggaccggacggcaccacgtctcactctccccagatcccagcttggggagatgtcggggacgtggtgtagcatggagtgtgggctgctgggcaggctgacttcagggatccttcccacgcagcctcccacttcagcctgcatttacaaacgagcccactgttcccctgcacaagagcaatctgccgccatgcttccatctccccagcatctgccggtgccgggccacgccgtaatttatttcctcgcctggttactctaggtgtcacatgtcaaattgaccacaaatccaggacaatccagctccaacctgccttggtgtctgggatttctgttatcattcggctcaggtgcaga

SEQ ID NO: 252630 - DNA, 116 bp, Homo sapiens
  chr3:129221882-129221998
  hypo
ctgagccacagaatcgtggagggcctttccacttgtcccttcattcagtcattgagaaaatcgttactgacagccagctctgccagggtggtgacaggcaccggggatgttagtgt

SEQ ID NO: 252631 - DNA, 171 bp, Homo sapiens
  chr3:129231141-129231312
  hypo
tctctcactgcaggaagatccgttcagtgtccatcgtcctgaaactcttttcaacatctccaggttcctgctgcacagcctgcccaaggacaccccctcgggcatctctaaagtgtatcctttctcttatccctcctccgtcccaccaccgttcttgtctaatggccccaa

SEQ ID NO: 252632 - DNA, 223 bp, Homo sapiens
  chr3:129240329-129240552
  hypo
gcccactggagggacgcagacactgagaccccaaggagagtggctgcagaggcccccagtgggaagtgtcggagctagagccccatcccagagcccttgccccaccccagaccgcccctcctccctgcctccctccgcatctctctggagatgatggaggaaaataaagaaagggagccagacagttgtgccaacagaactcctccgtcgagtgtctaattac

SEQ ID NO: 252633 - DNA, 166 bp, Homo sapiens
  chr3:129246205-129246371
  hypo
agcacttgcacaggccgccccagacaccccacttcattcctgggaggtgtcatcatgttgcttggacgacggggagagggggacctgccagtgttggcctccattttcccccagtcatctgcccccaaggctctgactactttctttctcacggtacatcctgcta

SEQ ID NO: 252634 - DNA, 82 bp, Homo sapiens
  chr3:129247538-129247620
  hypo
gtgggagcagccacgggtcagccacaagggccacagccatgaatggcacagaaggccctaacttctacgtgcccttctccaa

SEQ ID NO: 252635 - DNA, 166 bp, Homo sapiens
  chr3:129251136-129251302
  hypo
tacacgctcaagccggaggtcaacaacgagtcttttgtcatctacatgttcgtggtccacttcaccatccccatgattatcatctttttctgctatgggcagctcgtcttcaccgtcaaggaggtacgggccggggggtgggcggcctcacggctctgagggtcca

SEQ ID NO: 252636 - DNA, 111 bp, Homo sapiens
  chr3:129252488-129252599
  hypo
gaacccactgggtgacgatgaggcctctgctaccgtgtccaagacggagacgagccaggtggccccggcctaagacctgcctaggactctgtggccgactataggcgtctc

SEQ ID NO: 252637 - DNA, 181 bp, Homo sapiens
  chr3:129284111-129284292
  hypo
cgtggggtcactgccgctgagtccctgccacgtcccccgcctgggctctgtctgtccccaggcagcctcacccgcagacagctgtacatgcagatggacatccagttggtgagcatcttctccaccacagactctgtgcgccgcagcatgagcttggggttcttggcggccgaggcgtcaa

SEQ ID NO: 252638 - DNA, 138 bp, Homo sapiens
  chr3:129289962-129290100
  hypo
ggaggtagtccaggcggaacctgctgccccgctgtgcctcctcggggtccagtagctcctcagccacagccacctcgtctgcgtaggcccgcccattgatgaagaagtccactggcgctgatgcgttgctcagggccc

SEQ ID NO: 252639 - DNA, 359 bp, Homo sapiens; identical to SEQ ID NO: 209050
  chr3:129290347-129290706
  hypo

SEQ ID NO: 252640 - DNA, 52 bp, Homo sapiens
  chr3:129370402-129370454
  hypo
acaaggaataaagtgctgaacgtcctgttgcgagtcttcatgagggggacca

SEQ ID NO: 252641 - DNA, 86 bp, Homo sapiens; identical to SEQ ID NO: 209054
  chr3:129372595-129372681
  hypo

SEQ ID NO: 252642 - DNA, 52 bp, Homo sapiens
  chr3:129373806-129373858
  hypo
taacctggatgtcccgggcccgttcataggactgatacgcgattttttcttc

SEQ ID NO: 252643 - DNA, 87 bp, Homo sapiens
  chr3:129398051-129398138
  hypo
tcttccctcagacacctgcacggcttgctccgtcacctcctttaagtctttgcttcaatgtcaccttagcagcgaggacttctctga

SEQ ID NO: 252644 - DNA, 33 bp, Homo sapiens
  chr3:129487992-129488025
  hypo
cattgccagcgggccgcacgtggcccaggatgg

SEQ ID NO: 252645 - DNA, 87 bp, Homo sapiens
  chr3:129510237-129510324
  hypo
acacaccagaaatttagggaggcagttggtatggggaaacagaatgggtttgcttgttagacctacgtttgactcggcttcctattg

SEQ ID NO: 252646 - DNA, 39 bp, Homo sapiens
  chr3:129511160-129511199
  hypo
tgaaaagacaaatagaggcacgatgcatttgctgatata

SEQ ID NO: 252647 - DNA, 39 bp, Homo sapiens
  chr3:129511379-129511418
  hypo
gatgaggtttcactatgttggccacgctgatccatttgc

SEQ ID NO: 252648 - DNA, 37 bp, Homo sapiens
  chr3:129597082-129597119
  hypo
aggcgtgagccactgcgcctggccaacatctctaagt

SEQ ID NO: 252649 - DNA, 473 bp, Homo sapiens
  chr3:129982888-129983361
  hypo
gcctccctgtgctcgagggcttccacttgaccacctatggcaaccggaagcagatgcagagacatgtgcgcgaggcttcagcccgccccttacagggaaccgccccccctgggccacgccctggagtggacgctggagaatgtgctcctggcagcccctcggccgcggaaggcacaagtcctcttcgccatcgtggccagcgagacaagtagctgggacagggagaagctatggactctgtccctggaggccaaatgcaagggcattaccctctttgtgctggccttgggtccgggtgtggggacccatgagctagccgagctagccgagctggtcagtgctccctctgagcagcatctactgcgcctacaaggggtctcagagccagaggttaactacgctcagggattcactcgggccttcctgaacctcctaaaaagtgagcagtccccgggaactggggcaccttgggt

SEQ ID NO: 252650 - DNA, 43 bp, Homo sapiens; identical to SEQ ID NO: 209057
  chr3:130237352-130237395
  hypo

SEQ ID NO: 252651 - DNA, 244 bp, Homo sapiens
  chr3:130424515-130424759
  hypo
tacaagttgtaattcgaatctgataggtggatggtaagattgtactacttaaaaccggtattactggttttttattttggacagttgtcacttctggaacctacaaaacaaatagaattctaactatttacgtcgtaagcaaagtatatttgaagacagaagtgtatgcatgtttttatctataaattataacagctttttgtcctcattaatgtaccaattttaaaatcgatataattacaat

SEQ ID NO: 252652 - DNA, 114 bp, Homo sapiens
  chr3:130460753-130460867
  hypo
gtcctcaacggtatcgatgggttcttggaaactgcaactttaagtacaacaacgtacaacaaaaccatttattttctcaccatttcattataatgaaaacgacattatttgatg

SEQ ID NO: 252653 - DNA, 157 bp, Homo sapiens
  chr3:130464453-130464610
  hypo
tgagcctttactatgtgttccgtgctgtgcttggggctatgagaattacaaagttaccatatgacatagttcttgtccaagaatctgtagtttcttggaaataagaaagagacacattaaaagcttaaaactggccgggcgcggtggctcacgcctg

SEQ ID NO: 252654 - DNA, 120 bp, Homo sapiens
  chr3:131595102-131595222
  hypo
taaataaataaataaataaataaatacgaatacaaccaaatgaaaggcatgctctttattttttgtgagaatgttttattattatgagacattctttttctcggccgggcgtggtggctc

SEQ ID NO: 252655 - DNA, 151 bp, Homo sapiens; identical to SEQ ID NO: 209058
  chr3:132034534-132034685
  hypo

SEQ ID NO: 252656 - DNA, 156 bp, Homo sapiens; identical to SEQ ID NO: 209059
  chr3:132398975-132399131
  hypo

SEQ ID NO: 252657 - DNA, 36 bp, Homo sapiens; identical to SEQ ID NO: 209060
  chr3:132399371-132399407
  hypo

SEQ ID NO: 252658 - DNA, 36 bp, Homo sapiens
  chr3:132440042-132440078
  hypo
tgagccaccacgcccggctgctttacatactatttt

SEQ ID NO: 252659 - DNA, 166 bp, Homo sapiens
  chr3:132756207-132756373
  hypo
cttctagactctggaattactgacagaagaatatttggacagtttttaagaccctcaaggcatattattttacaacctctttagcttatgcctgaatttgtgctgtgactgttagcttcccggatgttttctccacatgcttctttctgaactagcctgtatagtt

SEQ ID NO: 252660 - DNA, 138 bp, Homo sapiens
  chr3:133217917-133218055
  hypo
tacaggcatgagccaccgtgcccggcctgttctatgtgttcttatagtgcaaagcatttgtggaaaacgtgcccttgttagagagttatgttcttctgtactggtatctttgtatgccttttgcgttctaatcattta

SEQ ID NO: 252661 - DNA, 98 bp, Homo sapiens
  chr3:133364598-133364696
  hypo
tacagcagttctttccgtttattttagcagtaggatctcttttcaaacagaccgcacccaaaagcctaagagatactacataataaacctatcattca

SEQ ID NO: 252662 - DNA, 108 bp, Homo sapiens; identical to SEQ ID NO: 209062
  chr3:133560513-133560621
  hypo

SEQ ID NO: 252663 - DNA, 227 bp, Homo sapiens; identical to SEQ ID NO: 209063
  chr3:133648404-133648631
  hypo

SEQ ID NO: 252664 - DNA, 93 bp, Homo sapiens; identical to SEQ ID NO: 209065
  chr3:134080496-134080589
  hypo

SEQ ID NO: 252665 - DNA, 174 bp, Homo sapiens
  chr3:134195846-134196020
  hypo
caagccagtcctagacggagatttcgaagccctggttgacaaaatctgactagcccaaattaggtcacctaattcctgatacaatgagctacagttctggcaccataacacaagttacgaacttgcccagaggctattcctgggggtggcggcagttctcggatgagtgtcata

SEQ ID NO: 252666 - DNA, 37 bp, Homo sapiens
  chr3:134202929-134202966
  hypo
aatggctcacagggccgggcgcggtggctcgcgcctg

SEQ ID NO: 252667 - DNA, 157 bp, Homo sapiens; identical to SEQ ID NO: 209069
  chr3:134203266-134203423
  hypo

SEQ ID NO: 252668 - DNA, 85 bp, Homo sapiens
  chr3:135601878-135601963
  hypo
actccaactgcaataatccccgtgaattacagaggagttttaagaaccaataccagccgggcacgctggctcacgcctttaatcc

SEQ ID NO: 252669 - DNA, 172 bp, Homo sapiens
  chr3:135741866-135742038
  hypo
agaagtgtgctggacagttgcgaagtaaacatttacttttcaaagatgatgatcaaggaaacatctctacgaagggacccggatttaaggggagagctagctttcctggcaaggggctgtgattttgttctcccttcacggtttaagaagcggctgaagtcatttcagcaga

SEQ ID NO: 252670 - DNA, 310 bp, Homo sapiens
  chr3:135870037-135870347
  hypo
tgtgtactggcagctaaaaacgtcgttactggggaccctgtgacatttattacactggtgctggtactagcgttacgcacagcaatgctagtcacgttaatgcccaaagtgagcctggtctgctccaaggccttttctggcacggcaaatgcctccagcttcttctccccattggccatataggagttttggcagccacgacatatacaatctaagcaggctttgcggttagagtagcaagggcagcgttggcctcggcatgtaagaacacttggattttgagtagcacgcccacatttacaccctttct

SEQ ID NO: 252671 - DNA, 147 bp, Homo sapiens
  chr3:135900336-135900483
  hypo
agaagtcctttcactaccaccgtggaacaccttcttgggcccgattactaaggtgaagaaattgttctaaaggtctgtaaatggtaagctccaaaaatttgttcacaaccccatccagctcaatgttttaaaatcaaaacttggccg

SEQ ID NO: 252672 - DNA, 135 bp, Homo sapiens
  chr3:136454636-136454771
  hypo
gtgggaggtataaaaatttattatacataaagaatattaccactaacaaatgcagacaagctaggacatggtactgggtggaggacggctagctctttggaaagtgaaaggttggggtggcgtaggcctcatgcc

SEQ ID NO: 252673 - DNA, 37 bp, Homo sapiens; identical to SEQ ID NO: 209072
  chr3:136582612-136582649
  hypo

SEQ ID NO: 252674 - DNA, 120 bp, Homo sapiens
  chr3:136582949-136583069
  hypo
taaataaaatgtgtatttatttttctaggcattatcctttgtccaggtttctgcagtgctttcaggtccatctaaataaaatttgaaacctacgtgtaatgttggccgggctcggtggct

SEQ ID NO: 252675 - DNA, 36 bp, Homo sapiens; identical to SEQ ID NO: 209073
  chr3:136583309-136583345
  hypo

SEQ ID NO: 252676 - DNA, 31 bp, Homo sapiens
  chr3:136593312-136593343
  hypo
cgcccggcccgtttacaggtctttaatgaac

SEQ ID NO: 252677 - DNA, 132 bp, Homo sapiens
  chr3:136678363-136678495
  hypo
aatgttgccaagaaaacatccgtccactaagctgaaacgagaagatgggaggctgaatgagaagaggaaagcccagcatttttcgacttgacattttcttcaatgacgcccgtcttataagtattttcttga

SEQ ID NO: 252678 - DNA, 120 bp, Homo sapiens
  chr3:137433349-137433469
  hypo
gggactgggtgccatgaagcaaggggcagcgctagtccgggaccgggtgccatggagcagggggcagcactagtccgggaggctcaggccgtgcaggagcccacggcagggggtggggga

SEQ ID NO: 252679 - DNA, 32 bp, Homo sapiens
  chr3:137561184-137561216
  hypo
aaaagagtctagctattggccgggcaccgtgg

SEQ ID NO: 252680 - DNA, 32 bp, Homo sapiens
  chr3:137561456-137561488
  hypo
agcaagactccgtctcaagaaaaaaaaaaaaa

SEQ ID NO: 252681 - DNA, 362 bp, Homo sapiens
  chr3:137717559-137717921
  hypo
aggtggcactggtgagtaaccgcctccattacatggtccgttcctgacgtgtacaccagcctctcagagaaaactccatccctacactcggtagtctcagaattgcgctgtccacttgtcgtgtggctctgtgtcgacactgtgcgccaccatggccgtgactgcctgtcagggcttggggttcgtggtttcactgattgggattgcgggcatcattgctgccacctgcatggaccagtggagcacccaagacttgtacaacaaccccgtaacagctgttttcaactaccaggggctgtggcgctcctgtgtccgagagagctctggcttcaccgagtgccggggctacttcaccctgctgg

SEQ ID NO: 252682 - DNA, 253 bp, Homo sapiens
  chr3:137729018-137729271
  hypo
gcaggagggcggcagcttctcgcaggcggcagggcgggcggccaggatcatgtccaccaccacatgccaagtggtggcgttcctcctgtccatcctggggctggccggctgcatcgcggccaccgggatggacatgtggagcacccaggacctgtacgacaaccccgtcacctccgtgttccagtacgaagggctctggaggagctgcgtgaggcagagttcaggcttcaccgaatgcaggccctatttcacc

SEQ ID NO: 252683 - DNA, 195 bp, Homo sapiens
  chr3:137783021-137783216
  hypo
ctctgatgtgctatgcgaggccactccagtaccacccttgggggagtccgctccacacacatattgtgttagggtccatggcagagtgagggactggggaggagcccactgtgggatgagaccgggctggaagagcagctgctgcaggatgccagacacagagtcagctccgaagctctccgagaggcaggagat

SEQ ID NO: 252684 - DNA, 195 bp, Homo sapiens; identical to SEQ ID NO: 209074
  chr3:137822427-137822622
  hypo

SEQ ID NO: 252685 - DNA, 162 bp, Homo sapiens
  chr3:137831298-137831460
  hypo
cagcagggcttgtctgaacccgactcagctccacagcttgcgtcctgattaggataggcggacaaaaagccaaatgagagtgttgcatgttacctggaaaccatacaccccaggggcaaggacatcgtgcttttttcagacgaattgtgagcagactgcttt

SEQ ID NO: 252686 - DNA, 31 bp, Homo sapiens; identical to SEQ ID NO: 209075
  chr3:137891419-137891450
  hypo

SEQ ID NO: 252687 - DNA, 34 bp, Homo sapiens; identical to SEQ ID NO: 209076
  chr3:138001202-138001236
  hypo

SEQ ID NO: 252688 - DNA, 41 bp, Homo sapiens
  chr3:138020318-138020359
  hypo
ttacaggtgtgagtcactgcgcccagccatattattttcat

SEQ ID NO: 252689 - DNA, 58 bp, Homo sapiens
  chr3:138081464-138081522
  hypo
cctacattgtactcccgtatggacttggggctagggcagggtccgggggcctccagca

SEQ ID NO: 252690 - DNA, 201 bp, Homo sapiens; identical to SEQ ID NO: 209079
  chr3:138158923-138159124
  hypo

SEQ ID NO: 252691 - DNA, 146 bp, Homo sapiens
  chr3:138413616-138413762
  hypo
gcagaagatacctcatctgtcgcaggcagcctacagcatattctcgaacgtactggtctggatagttgaaatccagaagctctagggcctcccgggggggcagtttaggccaaatctgaagcagcgcctgaagctgtttaaaaaat

SEQ ID NO: 252692 - DNA, 34 bp, Homo sapiens; identical to SEQ ID NO: 209080
  chr3:138542243-138542277
  hypo

SEQ ID NO: 252693 - DNA, 34 bp, Homo sapiens; identical to SEQ ID NO: 209081
  chr3:138542517-138542551
  hypo

SEQ ID NO: 252694 - DNA, 38 bp, Homo sapiens; identical to SEQ ID NO: 209082
  chr3:138577523-138577561
  hypo

SEQ ID NO: 252695 - DNA, 83 bp, Homo sapiens
  chr3:138635480-138635563
  hypo
ctccagattgagcgataaagtgagaccctgtctcaaaaagcaaaacaatatataaaagagctgagcaccgaccagtccaagca

SEQ ID NO: 252696 - DNA, 36 bp, Homo sapiens; identical to SEQ ID NO: 209083
  chr3:138981444-138981480
  hypo

SEQ ID NO: 252697 - DNA, 212 bp, Homo sapiens
  chr3:139180923-139181135
  hypo
tgaatgaaaaacaccagccccggtcagtaccttaacatgccggttatccaggctctttgtgtactcgtcaaactctactccaacagtgaaatccacatcatagttgcggaatgtgctagtggtttttgtcttgaagttatcaccatcttgatcaataaccttcgtctgagtgagacgtactgcaatcttgcgggtggcaaaatcaatatctg

SEQ ID NO: 252698 - DNA, 107 bp, Homo sapiens; identical to SEQ ID NO: 209085
  chr3:139352980-139353087
  hypo

SEQ ID NO: 252699 - DNA, 498 bp, Homo sapiens
  chr3:140401392-140401890
  hypo
tcaattgccccatgtgcagccggctgcgcctgcactcattcatgctgccctgcaaccacagcctgtgcgagaagtgcctgcggcagctgcagaagcacgccgaggtcaccgagaacttcttcatcctcatctgcccagtgtgcgaccgctcgcactgcatgccctacagcaacaagatgcagctgcccgagaactacctgcacgggcgtctcaccaagcgctacatgcaggagcacggctacctcaagtggcgctttgaccgctcctccgggcccatcctctgccaggtctgccgcaacaagcgcatcgcttacaagcgctgcatcacctgccgcctcaacctgtgcaacgactgcctcaaggccttccactcggatgtggccatgcaagaccacgtctttgtggacaccagcgccgaggaacaggacgagaagatctgcatccaccacccatccagccgcatcatcgagtactgccgcaatgacaacaaattgctct

SEQ ID NO: 252700 - DNA, 152 bp, Homo sapiens
  chr3:140434139-140434291
  hypo
ctcctcaaacctgactataaaatccagcacatctgccgtccaccagccttttccacatggagacccgcttctctatagagagagctatttctctttctcttcttttctgtctattaaacctctgctcctaaattcctcgtgtgtgtctatgt

SEQ ID NO: 252701 - DNA, 38 bp, Homo sapiens
  chr3:141053875-141053913
  hypo
accgcctctgctgccgacactaccgcttctgctgccgt

SEQ ID NO: 252702 - DNA, 232 bp, Homo sapiens; identical to SEQ ID NO: 209087
  chr3:141086062-141086294
  hypo

SEQ ID NO: 252703 - DNA, 313 bp, Homo sapiens; identical to SEQ ID NO: 209088
  chr3:141161722-141162035
  hypo

SEQ ID NO: 252704 - DNA, 519 bp, Homo sapiens
  chr3:141174174-141174693
  hypo
gtgctcgacatctgcgtgagtgtggtgagtggaagagcatcaggccatgtcccaggtctttccaaatcagactccattatttctgacattcctcttcctaaagaccagaggtaggaattcagggccgccattttcgtcgtctcttatcacgatgggaatcagcgttctctgctgctgctcctgctgaacacgacgacattccagccaccgggaactgctcgggactcagtatcattctcagacctaggcaggagcgttccgtgcttgccctcctccacaggtgccccgccgcacggggcaaagagtctgcagggccaacagggatgtgcccccgcaatgtccacgccatccccagagaccgcattctggtacccagaacctgagaattccctgcagactttcaaggcctgttctggccgcttccttgccagtgccacacccctggggcagccaaagggcagctgtttgcaggggttgtggaccgagtttgtgatggagtttcagcgtccacatgtgtgc

SEQ ID NO: 252705 - DNA, 61 bp, Homo sapiens
  chr3:141174927-141174988
  hypo
acacatgatatatacgcctccatctgtacacttgctccccgccttgcgagtgttgaggggg

SEQ ID NO: 252706 - DNA, 33 bp, Homo sapiens
  chr3:141363515-141363548
  hypo
gtgagccaccgcgcctggctgagttttctatca

SEQ ID NO: 252707 - DNA, 138 bp, Homo sapiens
  chr3:141481968-141482106
  hypo
ctattcggccatcttggctcctcctccagatcttcttaaggatgaaaaatatgggcttggattcttcccatacctcatgcttcaaatagccgttgatgaccctgaagccatagtgctgtgtttcggtcaaacaacagc

SEQ ID NO: 252708 - DNA, 110 bp, Homo sapiens
  chr3:141495378-141495488
  hypo
atggttcagagcagcgggcaccggtgcagatcgcccatctccacggcagaggtgatcgtttccagcgcagcggtgcaaagccaaagggcacccacgagttcattacataa

SEQ ID NO: 252709 - DNA, 143 bp, Homo sapiens
  chr3:141495874-141496017
  hypo
ctcgcttggtggggcgcatgggcaaagatgttgaggggccacgtctgaaacttcactgctcttggctccacgcgaaggctccttggcattcagagtctgctcgttagattgtgcccttggaacagtcgcgaccgcatgccgtg

SEQ ID NO: 252710 - DNA, 38 bp, Homo sapiens; identical to SEQ ID NO: 209090
  chr3:141509677-141509715
  hypo

SEQ ID NO: 252711 - DNA, 130 bp, Homo sapiens
  chr3:141523991-141524121
  hypo
cgtgggcccccctgcgcgtgctccacactctattgaatcaaccttctgacctgtctgtctctaccagtctctaaatcctcaagggcaagggccaggccttacaggtctcggtatccctggaactcattgc

SEQ ID NO: 252712 - DNA, 213 bp, Homo sapiens; identical to SEQ ID NO: 209091
  chr3:141622402-141622615
  hypo

SEQ ID NO: 252713 - DNA, 405 bp, Homo sapiens
  chr3:141656809-141657214
  hypo
ttatgtgtagacaagtctcccggtgcgggcccagcaggcaggtgacagccgcccttgcgggagtcatccttaaccaagcagtttcagaaatgtttcttgagaaactgtttccggaagtcccggagcctgtgttgcccattgacaagccttgtcggtctcagaagacagactccgggggtctacatccagagacccggctgaggactgaagcccggggtttccaagcggctgccttctccgtcctgcagcagggtgcgagtcaaccgccctggctaagggagcaaggaacccccgccatgctgtgtcccctccccccattccccgaatgcccgtctgttcaaagagggtgagaggaggggggaataccaactgctccgaggaaaatgcagttcatcatatgcatct

SEQ ID NO: 252714 - DNA, 91 bp, Homo sapiens
  chr3:141664267-141664358
  hypo
gcatacccacctcttttgtccaaaactcaagagtgatggtggtgaaccaagtgcgtgaaggaactcagtactgaaacgtgatccccggagt

SEQ ID NO: 252715 - DNA, 104 bp, Homo sapiens
  chr3:141664566-141664670
  hypo
tgtgacatgaagctcggccatggtgaagtatggtaagtgacaaatggcatgcattgaagcacgacaagggatgagtttttaaatccaaacgtgatctggggaat

SEQ ID NO: 252716 - DNA, 204 bp, Homo sapiens
  chr3:141868982-141869186
  hypo
gtcattctgtcccgcggaaactgcacacaccccaaatacccgtacacttggttccatatgaaaagattttgttcattcgttcgtgccgaagttaaaaaccccgtgtgaacagcgcattaaaacgattagatctttctcattttactccagtcaaatcttatagatcttctatatgccactttgtttgtttttgagacggggtct

SEQ ID NO: 252717 - DNA, 35 bp, Homo sapiens; identical to SEQ ID NO: 209094
  chr3:141954424-141954459
  hypo

SEQ ID NO: 252718 - DNA, 89 bp, Homo sapiens
  chr3:142103578-142103667
  hypo
tctaggacgataatcgtcaactatcgtaaactatcaactcataatcaagtgtgtaaataaactttaaataaatacgctagcagttccag

SEQ ID NO: 252719 - DNA, 102 bp, Homo sapiens; identical to SEQ ID NO: 209095
  chr3:142321774-142321876
  hypo

SEQ ID NO: 252720 - DNA, 40 bp, Homo sapiens
  chr3:142354392-142354432
  hypo
tgagttcgtgccactacacgccagcctgagtgagtgacag

SEQ ID NO: 252721 - DNA, 180 bp, Homo sapiens
  chr3:142499677-142499857
  hypo
atgattatgaggaactagcccggcaatgtaaaatgtttgctaaggatttacttgcacaagcccggaattctcgtgaattggaagttattctaaaccatacgtctagtgacgagcctcttgacaaacggggattattagaagaaagaatgaatttaagtcgtctaaaacttgctatcaaat

SEQ ID NO: 252722 - DNA, 198 bp, Homo sapiens
  chr3:142537575-142537773
  hypo
ttgtgcctggatgataaaatctgttttaagactctcatcggcaaaaagccaaattcaactagtaaggtatttcagctacgctaacaccaggaagctggactgagtggttagatcagccatgtcccgctctgcagtgctgtaggtctgttgtggtttcaaatgcctgctatgaagaatgcaccgcgttaacgtgaaaga

SEQ ID NO: 252723 - DNA, 76 bp, Homo sapiens; identical to SEQ ID NO: 209097
  chr3:142683683-142683759
  hypo

SEQ ID NO: 252724 - DNA, 34 bp, Homo sapiens
  chr3:142718177-142718211
  hypo
cagttaagatctaggctgggcgcggtggctcacg

SEQ ID NO: 252725 - DNA, 33 bp, Homo sapiens
  chr3:142718451-142718484
  hypo
acagagcgagacgtctcaaaacaaacaaaacaa

SEQ ID NO: 252726 - DNA, 33 bp, Homo sapiens
  chr3:142725294-142725327
  hypo
aagaatgtacccatttttagcggccgggcacag

SEQ ID NO: 252727 - DNA, 39 bp, Homo sapiens; identical to SEQ ID NO: 209098
  chr3:142727625-142727664
  hypo

SEQ ID NO: 252728 - DNA, 38 bp, Homo sapiens; identical to SEQ ID NO: 209099
  chr3:142727844-142727882
  hypo

SEQ ID NO: 252729 - DNA, 44 bp, Homo sapiens; identical to SEQ ID NO: 209100
  chr3:142728140-142728184
  hypo

SEQ ID NO: 252730 - DNA, 131 bp, Homo sapiens
  chr3:142775176-142775307
  hypo
ctaaaaggtctaggcgatcacggtctagatctcctaaaaaatcaggaaagaagtccagatcccagtccagatctccacacaggtctcataaaaagtcaaagaaaaacaaacactgacgtaaatttttaaga

SEQ ID NO: 252731 - DNA, 35 bp, Homo sapiens; identical to SEQ ID NO: 209101
  chr3:142788519-142788554
  hypo

SEQ ID NO: 252732 - DNA, 45 bp, Homo sapiens
  chr3:142791153-142791198
  hypo
attaagactgtcacgcgcgttcgtgtgaagagaccaccaaacaga

SEQ ID NO: 252733 - DNA, 158 bp, Homo sapiens
  chr3:142820241-142820399
  hypo
aagagaaacctatagaaggacgaagatatatcgtctgaaaactaatgagatgttacattttgaaccaaaatcgcatctaacttttcagcatgtaattaggcaagatctgagccaaagtataaagagttgacataaaattttgggaatacggctgggtg

SEQ ID NO: 252734 - DNA, 1050 bp, Homo sapiens
  chr3:142895258-142896308
  hypo
cctcctggtggcggagaccccggtgggggtagcggggggttcccgggaggccgagggaagcaagacatcggggacattctgcagcagataatgaccatcaccgaccagagcctggacgaggcccaggccaagaaacacgccctaaactgccaccgaatgaagcctgctctctttagcgtcctgtgtgaaatcaaggagaaaaccggcctcagcattcggagctcccaggaggaggagccggtggacccacagctgatgcgcttggacaacatgcttctggcagagggtgtggctgggcccgagaaagggggcggctcagcagcagcagctgcagccgctgcagcctctggtggtggcgtgtcccctgacaactccatcgaacactcggactatcgcagcaaacttgcccagatccgtcacatataccactcggaactggagaagtatgagcaggcatgtaatgagttcacgacccatgtcatgaacctgctgagggagcagagccgcaccaggcccgtggcccccaaagagatggaacgcatggtgagcatcatccatcgaaagttcagcgccatccagatgcagctgaagcagagcacctgcgaggctatgatgatgctgcgctcccgtttcctggatgccagacgaaagcgccgtaacttcagcagacaggccactgaggtcctaaatgagtatttctactcccacctgagtaacccatatcctagtgaggaggccaaggaggagcttgccaagaagtgtggcatcaccgtgtctcaggtctccaaccggtttggcaacaagaagattcgctataagaaaaacatcggaaagttccaagaggaggcaaacatctatgctgtcaagacagccgtgtcagtcacccaggggggccacagcagcaccagctccccgacacccccttcctctgcaggctctggcggctctttcaatatctcaggatctggagacatgtttctggggatgcctgggctcaacggagattcctattctgcttcccaggtggcatcactccgacgctcgatgggg

SEQ ID NO: 252735 - DNA, 33 bp, Homo sapiens
  chr3:142930276-142930309
  hypo
ggcgtgagccactgcacccggtcaccacactct

SEQ ID NO: 252736 - DNA, 102 bp, Homo sapiens
  chr3:142957648-142957750
  hypo
aatgaacatttttaactggcctctcatttccattttctccatcttccaatccatccctcattccgtggctctattcatcacgatgcttcagacctccagtgg

SEQ ID NO: 252737 - DNA, 98 bp, Homo sapiens; identical to SEQ ID NO: 209105
  chr3:143027449-143027547
  hypo

SEQ ID NO: 252738 - DNA, 357 bp, Homo sapiens
  chr3:143316155-143316512
  hypo
tgacatggtgggcacgctggcgtccagagaaagagagagccaaagctgtccttcttgcagacagacaggagggggccaaaacacagctcaggcttgtttgtgctcaaagagagaaagttaagctgttgaccctgaaggcaagggagaactggcctcgcaaccttgcgtgggggtggccaattcaagcagctgagacagagcggacagcgtaagaaaagctgctcaggagagaggtagtttaagaaagctgttgatgagagctgctgctgaataaaaccatattcacccgcctgtggccccccgagggttctttctgctcatccacccactcccctcggacttcagcatggtgtggac

SEQ ID NO: 252739 - DNA, 78 bp, Homo sapiens
  chr3:143316755-143316833
  hypo
tagagtggcatattcggcactgtggggttaaacataagcagtgggcgctgccttccctagaatcgcagtatcgagagc

SEQ ID NO: 252740 - DNA, 72 bp, Homo sapiens
  chr3:143317071-143317143
  hypo
agctgttgccatggcgattttcatttttaaaaactgtatccatacaaagacaggcaacgcagctgtttccat

SEQ ID NO: 252741 - DNA, 39 bp, Homo sapiens
  chr3:145970678-145970717
  hypo
cccgactgagctggtctcggcatgttacctttgtttaaa

SEQ ID NO: 252742 - DNA, 140 bp, Homo sapiens
  chr3:148394230-148394370
  hypo
ccaatctcccattggccaaacgcaaccagaggacaaccctcagtaggcgttaacctgccaaggaataaataaagcagaacggggaaggatagacaatagtttgggaggtgtcggggtacgaatggtggttaatcagcata

SEQ ID NO: 252743 - DNA, 39 bp, Homo sapiens
  chr3:148472162-148472201
  hypo
aaaatccataaaggtctggccgggcgcggtggctcacac

SEQ ID NO: 252744 - DNA, 203 bp, Homo sapiens
  chr3:148556040-148556243
  hypo
aaacaaattaacaaaaataataatgataatttcaactcaagggttgggtgcaggtaagaggatagcaatatgttctggaagctttgaaatgaaagaggatgtcattttctggtcctcttgggtttttttttttcgttccgagaagctcatccttattaggtaagatttgttctttcacattatgatatcgagacataattgtc

SEQ ID NO: 252745 - DNA, 227 bp, Homo sapiens
  chr3:148705305-148705532
  hypo
cctgctgagccttaaacctccgggagatttcctctttgaactccttgaccgaggctcgatcgcagatcacaatttcctccttgtccttgggggtcttgacggtgacccgaatggggggcctcgtctcggccccgctcggctccgccatgccgccgccgccacccggccgcccgccagcccgcccggctcctcctcctccccgctcgcccggccggcccggctcggct

SEQ ID NO: 252746 - DNA, 33 bp, Homo sapiens; identical to SEQ ID NO: 209110
  chr3:148726132-148726165
  hypo

SEQ ID NO: 252747 - DNA, 54 bp, Homo sapiens
  chr3:148802384-148802438
  hypo
gcacacatcacctgcgaattctcttattttctaggttaacgccagaaatataat

SEQ ID NO: 252748 - DNA, 38 bp, Homo sapiens
  chr3:148802990-148803028
  hypo
ttatgggccggatgcggtggctcacgcctggaatccca

SEQ ID NO: 252749 - DNA, 238 bp, Homo sapiens
  chr3:148804769-148805007
  hypo
tggtgaaccgtggggactttcgctccaaattttcatgttaagcctcagcgtatgcatgagacacaacgagtttggaaaatcttaaatggaacttagagtcccctccccacctctttttgttatttttaaggaaaattttcctttcttggtgcaggaaacccatcacatgtttattacagctatgggggcgtttgcctgaaatggtggacgggaccattttccccgtgggcacttggct

SEQ ID NO: 252750 - DNA, 58 bp, Homo sapiens; identical to SEQ ID NO: 209111
  chr3:148867081-148867139
  hypo

SEQ ID NO: 252751 - DNA, 62 bp, Homo sapiens
  chr3:148904409-148904471
  hypo
tattccatgtacatcggcctcatttccggcgctgaataagtaccacacgaccgaatctcctt

SEQ ID NO: 252752 - DNA, 143 bp, Homo sapiens; identical to SEQ ID NO: 209112
  chr3:149096959-149097102
  hypo

SEQ ID NO: 252753 - DNA, 32 bp, Homo sapiens; identical to SEQ ID NO: 209113
  chr3:149233987-149234019
  hypo

SEQ ID NO: 252754 - DNA, 120 bp, Homo sapiens
  chr3:149360170-149360290
  hypo
cactccagcctaggcgacaagcaaaactctgtcacacacacacacacacacacacgaaagtacgaatacccaaatataagttggatgatataattttgtaagagaaatccggccgggcac

SEQ ID NO: 252755 - DNA, 44 bp, Homo sapiens
  chr3:149470937-149470981
  hypo
aatgatgacaatgaccgatgcttacaggattcagagcaatgttt

SEQ ID NO: 252756 - DNA, 288 bp, Homo sapiens
  chr3:149700884-149701172
  hypo
aaagagattttacttcctgccgaacagcgttggctacggctttcttgactcgtccagacctcacgaccgccagatccgagtcggcgtaatccgccacggtcactcggccggagcaggcgtcgtgggcccggaacttgagtcgctttcctctcttgggcatggcgaccgtatcggggcgaggcctgcctagcgggccgggcccccgggccatgtctccggccagagagccggccccggtagccgcaagccagctccgcccggctccgcggccatcccacaccctatcat

SEQ ID NO: 252757 - DNA, 173 bp, Homo sapiens
  chr3:149931181-149931354
  hypo
agtgagtgggctcagtaactcgcccgagtcacagagtcaaagcaggagctggacccagatagtccagagctcatgctcgtacacacttcacttcgctatcctgaataaaaaaaccaagactccaggagggctgcagcttcgtccaaggtgtcgtgacttgcccacagccaccc

SEQ ID NO: 252758 - DNA, 208 bp, Homo sapiens
  chr3:149956590-149956798
  hypo
cttgtccgaggctccgatgttatccaggtgattcatcatttaatgctgttggcttcaacatggatttaatggtaactaaaccaagtgcacactatgtgaagatctattcacttggaggtccttcatttcaggtcaccaggtatgcccctgggctcctgccgcagctgatcgggtgctaggtgctgaggatacacggtgagttccttct

SEQ ID NO: 252759 - DNA, 189 bp, Homo sapiens
  chr3:150026518-150026707
  hypo
caaggatttggtgaggaggacgtggaagcctcccgtggattgcattcaggccggcatactcaccaaggcagatgacgtgcatgagatcttggtgacatttgctcaggtgaaaagtgcagggtgtggtgttatctacgctttgtttggctgggcagtcataattcttccgacattacaggagcttgagtg

SEQ ID NO: 252760 - DNA, 150 bp, Homo sapiens
  chr3:150086093-150086243
  hypo
gctgactaccacagtcggcactcattcaacatctgaatgagcgaatgaagtgatctcctcaggaccacatcccaaagcacttgtcagtgaagaaccaaagtgaactcatttatcttacagaagtcttgggtataaaaatccatcccggcc

SEQ ID NO: 252761 - DNA, 103 bp, Homo sapiens; identical to SEQ ID NO: 209114
  chr3:150187004-150187107
  hypo

SEQ ID NO: 252762 - DNA, 163 bp, Homo sapiens; identical to SEQ ID NO: 209115
  chr3:150237438-150237601
  hypo

SEQ ID NO: 252763 - DNA, 102 bp, Homo sapiens
  chr3:150237901-150238003
  hypo
tcctgacctcgtgatccgcccgcctcggcatcccaaagtgcactccaggttttaattacctctcgggtgattgtggtgcacgctcaagtttgagaacctcag

SEQ ID NO: 252764 - DNA, 430 bp, Homo sapiens
  chr3:150329378-150329808
  hypo
gtaaagatgcctgcgctcttatccagctcgatcttcaccttctgggatatgctcttctggatcctcttgctgaagctggcgttgcctgctgcccgaccgcaccgctcaccatcctccgcaggcagcacagttgccaggagcccggcctggccgcccccaggggcccagccgctgagaccgcccctgcgcccggcccctcagccccgatttcccggacgaggcactggcgaccacagcggccactgcggctgccgcctccccactgcccaggcgtgaagccgttcatgtctccgagctccggggtaccggcgctgacagaaatccccactctcctggccgctccgtcggcggcagttcactctgcacaccaagttagctgcatggcagaacaccaactgggcctgctgctgctggcgccgaaacagtggac

SEQ ID NO: 252765 - DNA, 159 bp, Homo sapiens
  chr3:150379955-150380114
  hypo
ctaatacactagggcgcgtaatgggaacaactgaagagcgaatgagtgaggggaaagaatgggctggccctggcgaaaggtacaactcacaaagaagagagtcagcatctttaatttcctgatcacagagcttcaaaatatatacggcaaaagttgatt

SEQ ID NO: 252766 - DNA, 41 bp, Homo sapiens
  chr3:150420384-150420425
  hypo
aaggatgtgtgcttctagcacagccacgggtagaggacagg

SEQ ID NO: 252767 - DNA, 196 bp, Homo sapiens
  chr3:150443086-150443282
  hypo
tctgggcagagacacagagtcgtgaaagaactcggtatgtttgtgaactgtgggaagttcagggagactggagcggagggtgccttaggaatgtgctatagaggagtctgtcaagacctgggtgcctgctacactccgagaggtcagcgaacgggccctcactggcttcttttgcgttgatggcctggtctgtatt

SEQ ID NO: 252768 - DNA, 186 bp, Homo sapiens; identical to SEQ ID NO: 209118
  chr3:150497417-150497603
  hypo

SEQ ID NO: 252769 - DNA, 86 bp, Homo sapiens; identical to SEQ ID NO: 209119
  chr3:150670268-150670354
  hypo

SEQ ID NO: 252770 - DNA, 96 bp, Homo sapiens
  chr3:150848438-150848534
  hypo
ctgacctgtgggcgcggctcttccttcacctgtgggtgcacatgggcctgctcccttgctccactgtggtctctgcccagacgcgcttcctaagaa

SEQ ID NO: 252771 - DNA, 156 bp, Homo sapiens; identical to SEQ ID NO: 209122
  chr3:151112506-151112662
  hypo

SEQ ID NO: 252772 - DNA, 56 bp, Homo sapiens
  chr3:152786503-152786559
  hypo
cattcattaattgtatgagccgatggtacaatagttagctcactaaaaagatatgt

SEQ ID NO: 252773 - DNA, 120 bp, Homo sapiens
  chr3:152830629-152830749
  hypo
aggcatgagccaccacgcccggccaaataagcactccatgacctctgtcttttacaagcagcaatttcatagaagccttcaaaggacaatgggattgtgaatagactttcttattatgtg

SEQ ID NO: 252774 - DNA, 149 bp, Homo sapiens; identical to SEQ ID NO: 209123
  chr3:152877717-152877866
  hypo

SEQ ID NO: 252775 - DNA, 39 bp, Homo sapiens
  chr3:152891478-152891517
  hypo
acgtaagccaccacgcccggcctacaacactattgtgct

SEQ ID NO: 252776 - DNA, 45 bp, Homo sapiens; identical to SEQ ID NO: 209124
  chr3:153010523-153010568
  hypo

SEQ ID NO: 252777 - DNA, 45 bp, Homo sapiens; identical to SEQ ID NO: 209125
  chr3:153010748-153010793
  hypo

SEQ ID NO: 252778 - DNA, 37 bp, Homo sapiens
  chr3:153403754-153403791
  hypo
ttttttttttttttttgagacggagtggagtctctgt

SEQ ID NO: 252779 - DNA, 37 bp, Homo sapiens
  chr3:153404031-153404068
  hypo
gccaccgcgcccgggcgagtaatctttagatatttgt

SEQ ID NO: 252780 - DNA, 81 bp, Homo sapiens; identical to SEQ ID NO: 209126
  chr3:153824879-153824960
  hypo

SEQ ID NO: 252781 - DNA, 161 bp, Homo sapiens
  chr3:154907062-154907223
  hypo
tacaggtgtaagccaagcgcccggtccaaaattgaagttttgtgcaagatgataattttggggaaaacagtttatagcattatgcagatatcttcactttgctcagaaaatgtcattggcccggagacctcaggaaagctatttaacgcctctgaaactta

SEQ ID NO: 252782 - DNA, 42 bp, Homo sapiens
  chr3:155315612-155315654
  hypo
agaagatgaagtataggttgcgtttactcattttatctgaca

SEQ ID NO: 252783 - DNA, 39 bp, Homo sapiens; identical to SEQ ID NO: 209127
  chr3:155454719-155454758
  hypo

SEQ ID NO: 252784 - DNA, 38 bp, Homo sapiens; identical to SEQ ID NO: 209128
  chr3:155454998-155455036
  hypo

SEQ ID NO: 252785 - DNA, 158 bp, Homo sapiens
  chr3:155460891-155461049
  hypo
taagcaagaagctaccgctccttctacataccccttaagatgtgtacttttgccaaatgctaggctgtatgtaaacaaacggattttaaaagaggggatagggctgtcaagattcacaattttatgaaaatgaaaatgattctcatctgctgggcgcg

SEQ ID NO: 252786 - DNA, 42 bp, Homo sapiens
  chr3:156002788-156002830
  hypo
tttaaccaatttttttctgtcgtattttctttttatatatgt

SEQ ID NO: 252787 - DNA, 85 bp, Homo sapiens
  chr3:156015533-156015618
  hypo
aaaggcacttagcgcgtgtgtgtgtgtgtgcgcgtgtgctcgtgtgcgtgtgtgtgtgcatgcaagtctccgtatggggaaaagt

SEQ ID NO: 252788 - DNA, 62 bp, Homo sapiens
  chr3:156396587-156396649
  hypo
caatgaaagttttacgatttgaacaattcatatgtcagttcaacgtgcgtgtgactgagaag

SEQ ID NO: 252789 - DNA, 218 bp, Homo sapiens
  chr3:156543100-156543318
  hypo
agtgccaaggaacaaggcactagtgttcagtacttcctggtgtcattaattagtagttatcaataagcagtttggtgtaccgatactgctctgcgtcatttaatcacttctctaaatctataggttcaattaattttctttgtatttacttaatcttattttattcaatagcaaaccagtctctttgcctgctacagagccatcgatgttttctttgg

SEQ ID NO: 252790 - DNA, 163 bp, Homo sapiens
  chr3:156795059-156795222
  hypo
caggttttcccacagcctggcgagaatagctcctgaaatcaaccaacgccctctgtcctgactccacctctgccacagctactgcagttctttggttatcctgataaccgaaggccactctggaaaggtgtccactgggaacgactggcactctgccttggga

SEQ ID NO: 252791 - DNA, 43 bp, Homo sapiens
  chr3:156843278-156843321
  hypo
atatacctttgtaacaaggccgggcgcggtgcaatcccagcac

SEQ ID NO: 252792 - DNA, 32 bp, Homo sapiens
  chr3:156862936-156862968
  hypo
aggattttgccgggcgcggtggctcatgcctg

SEQ ID NO: 252793 - DNA, 42 bp, Homo sapiens; identical to SEQ ID NO: 209133
  chr3:157866879-157866921
  hypo

SEQ ID NO: 252794 - DNA, 97 bp, Homo sapiens
  chr3:158361237-158361334
  hypo
gttccctccagaaacggcagtactgagaggtggggagaagtaagttctggattttctttttttttttttttttttgagactcgctctgtcacccagg

SEQ ID NO: 252795 - DNA, 37 bp, Homo sapiens
  chr3:158434648-158434685
  hypo
aggcgtgactcactgcgcctggttaacaagcactctt

SEQ ID NO: 252796 - DNA, 76 bp, Homo sapiens
  chr3:158448986-158449062
  hypo
gtgtttgcttccaggcgtttggcactgttaaatgaaaatcctgctgctacactttaaaactcgacctatttattaa

SEQ ID NO: 252797 - DNA, 32 bp, Homo sapiens
  chr3:158451330-158451362
  hypo
attacaggcgtgagccacggtacccggcggca

SEQ ID NO: 252798 - DNA, 193 bp, Homo sapiens
  chr3:158690125-158690318
  hypo
tggattttctaaatacgtggagttatctacttattgcatcatataataagacatataatgacctgttattgttataggagcaagaggttcatatgcgcgctctgcagtaacagacttattacactgagactgcagggtttgtaacagagaaagagtttaatgatcgcagggcactgatcgaggagatgggagg

SEQ ID NO: 252799 - DNA, 37 bp, Homo sapiens
  chr3:159001224-159001261
  hypo
gtgaaccatcatgcccggcatattttttactttactt

SEQ ID NO: 252800 - DNA, 170 bp, Homo sapiens
  chr3:159814276-159814446
  hypo
cctagccttccccttaccaccgggtattagcctcctgttattattggctggcttatcgacttggatttaacgctcttggttgtttccctttgattgacaggtctgttgttacccggatagtcttttattcaggtggatacacgcagctcgttttaacaacatggccttac

SEQ ID NO: 252801 - DNA, 38 bp, Homo sapiens
  chr3:160328305-160328343
  hypo
ccaccacgcccggcctcgagtgattatttttcaactca

SEQ ID NO: 252802 - DNA, 31 bp, Homo sapiens
  chr3:160821777-160821808
  hypo
gtgctggaattactggcgtgagccaccgcgc

SEQ ID NO: 252803 - DNA, 35 bp, Homo sapiens
  chr3:160863217-160863252
  hypo
aaaggtttgtgtttgctgggcgcagtggctcacgc

SEQ ID NO: 252804 - DNA, 214 bp, Homo sapiens
  chr3:160879673-160879887
  hypo
gcgcagccaccgccgcccacaaaaggatttttcaaatgtttttttcgcggggaaagaagtttgaagactactgcaataaacaacaacagagaaaaaggaagaggaaagagtataaagatttttgcttatatcatgtgaattattaaaaagaatgaagggaaggggaaattattcaatcttctggccctccgcgtacatacgaggcagaagtctg

SEQ ID NO: 252805 - DNA, 112 bp, Homo sapiens
  chr3:166834368-166834480
  hypo
aaccctccctgttgcggtggtgggtgatagtagtgatgtggattcagggtccggagcaatgaaggctcccggcctgggagcaggctccagcctgctgcggaaggatggacag

SEQ ID NO: 252806 - DNA, 39 bp, Homo sapiens
  chr3:167911807-167911846
  hypo
aagccaccgtgcccggccgacattctgtatttttcttag

SEQ ID NO: 252807 - DNA, 174 bp, Homo sapiens
  chr3:167916939-167917113
  hypo
tacacctgctgtgatatcaccgggagttgtacaccgccggtgatattgggtgtgatattactctctttacccctgcatactaggaacaatatcacgggttgagagtacagcccatgcgatattgggagtaatattctctcccccccccaccccgttaatattaggaacaatatc

SEQ ID NO: 252808 - DNA, 37 bp, Homo sapiens
  chr3:168197107-168197144
  hypo
aaaaatcattgcagccgaaatgtccttttacctgttt

SEQ ID NO: 252809 - DNA, 145 bp, Homo sapiens; identical to SEQ ID NO: 209136
  chr3:168608963-168609108
  hypo

SEQ ID NO: 252810 - DNA, 31 bp, Homo sapiens; identical to SEQ ID NO: 209137
  chr3:169030445-169030476
  hypo

SEQ ID NO: 252811 - DNA, 77 bp, Homo sapiens; identical to SEQ ID NO: 209138
  chr3:169200020-169200097
  hypo

SEQ ID NO: 252812 - DNA, 77 bp, Homo sapiens; identical to SEQ ID NO: 209139
  chr3:169200397-169200474
  hypo

SEQ ID NO: 252813 - DNA, 849 bp, Homo sapiens
  chr3:169539898-169540747
  hypo
ccccaggagattcagcgtttaaagaacatcagggtcctctacctggataagaacaacctgaggagcctgtgcccggcgctggggctgctgagcagcctggagagcctggacctgagctacaaccccatcttctcctcctcccttgtcgttgtcagcttcctccacgccctgcgcgagctccggctctaccagaccgacctgaaggaaattcccgtcgtcatctttaaaaacctccaccatctcgagctgctcggactgaccggaaaccacctgaaatgtctgcccaaggaaatagtgaaccagaccaagctgagggagatctacctgaagcgaaaccagtttgaagttttcccccaggagctctgtgttctctacaccctggaaatcattgacctggacgagaacaaaataggtgccatcccagaagagatcggacacctgacggggctgcagaagttctatatggcttctaacaaccttcccgttctgcccgcgtccttgtgccagtgtagccaactgtcggtgctcgatttatcccacaacctcctccactccatcccgaagagcttcgccgagctcaggaagatgacggaaatcgggctgagcgggaaccgcctggagaaggtgccacgcctcatttgcaggtggacctcgctgcacctgctctacctgggaaacaccggcctgcacaggctgcggggctccttcaggtgcctggtcaacttgcgcttcctggacctaagccagaaccatctgcaccactgcccgctgcagatctgtgcactgaagaaccttgaagtcctgggactggatgacaataaaataggacaggtacggattccttttctg

SEQ ID NO: 252814 - DNA, 110 bp, Homo sapiens; identical to SEQ ID NO: 209142
  chr3:169656714-169656824
  hypo

SEQ ID NO: 252815 - DNA, 42 bp, Homo sapiens
  chr3:169727690-169727732
  hypo
aaaaacccaacctaaacctccgatttggcaatgaattttaga

SEQ ID NO: 252816 - DNA, 79 bp, Homo sapiens
  chr3:169780674-169780753
  hypo
gagggagctctcccggggcgcctttgtggtagaaaagcaccggagcctcacggagatcaccgacgccacgggacccctc

SEQ ID NO: 252817 - DNA, 32 bp, Homo sapiens
  chr3:169795277-169795309
  hypo
gagaataagctgaacgcagctgttctctgacc

SEQ ID NO: 252818 - DNA, 91 bp, Homo sapiens
  chr3:169795489-169795580
  hypo
atgtctgtactgaataaaagcaagcagctccagctgttcgaggctgctctcttcttcagccattagtgccgggcagcccactagctgctgt

SEQ ID NO: 252819 - DNA, 60 bp, Homo sapiens
  chr3:169796500-169796560
  hypo
agcagaccgctttacgcaaagccagaacacgagctgtaactactgcgcctgtcaaacctg

SEQ ID NO: 252820 - DNA, 96 bp, Homo sapiens; identical to SEQ ID NO: 209143
  chr3:169896229-169896325
  hypo

SEQ ID NO: 252821 - DNA, 100 bp, Homo sapiens; identical to SEQ ID NO: 209144
  chr3:169915438-169915538
  hypo

SEQ ID NO: 252822 - DNA, 39 bp, Homo sapiens
  chr3:169916138-169916177
  hypo
gcgacagagtgagactccgtctcaagaaaaaaaaaaaga

SEQ ID NO: 252823 - DNA, 36 bp, Homo sapiens
  chr3:169917047-169917083
  hypo
aaacctgtgcacgacgttttgtacagacatgttttt

SEQ ID NO: 252824 - DNA, 40 bp, Homo sapiens
  chr3:169980659-169980699
  hypo
ataaaaccttcttttgtggccgggcgcggtgactcacgcc

SEQ ID NO: 252825 - DNA, 40 bp, Homo sapiens
  chr3:170154037-170154077
  hypo
gactatgtgactctaaagcccgagttgtccaatttaagaa

SEQ ID NO: 252826 - DNA, 74 bp, Homo sapiens; identical to SEQ ID NO: 209145
  chr3:170179927-170180001
  hypo

SEQ ID NO: 252827 - DNA, 203 bp, Homo sapiens
  chr3:170184923-170185126
  hypo
gctacttgtccggccgtttgccttcgcatctgacatctgttggtaatagaagcctttgtcttcagtgggcccgccccagtcctcctggctctcgccctctgtggcgtaggagaaaccctcctccactgagaaggggtcatccacgtcgtagcgttggtacgtgctttggtgcagggcctcttctcgagcgctgatttccaggg

SEQ ID NO: 252828 - DNA, 42 bp, Homo sapiens
  chr3:170267374-170267416
  hypo
gaggaagtttgtttaaatatcgccagtgtgacacttatgacc

SEQ ID NO: 252829 - DNA, 96 bp, Homo sapiens; identical to SEQ ID NO: 209146
  chr3:170555017-170555113
  hypo

SEQ ID NO: 252830 - DNA, 120 bp, Homo sapiens
  chr3:170588563-170588683
  hypo
aggagttcgagaccacccttggcagcgtaggcatagggagaacccgtctctacaaacaattttaaaaaaaatggcccgcgtggtggtgcgcgtctgtactcccagccactcgggaggctg

SEQ ID NO: 252831 - DNA, 93 bp, Homo sapiens
  chr3:170588743-170588836
  hypo
tgcactccagcctgggtaacagtgagactgtctcaaagggaaaaacacgtagtgcttgcttcttgttcattcgtttggtataatttatcatgg

SEQ ID NO: 252832 - DNA, 87 bp, Homo sapiens
  chr3:170627152-170627239
  hypo
gggaagttgtggaggcgaagggtgtctgactcctacggcattgtgggtccagagaggtgttctgccgactcatccattctttcctcc

SEQ ID NO: 252833 - DNA, 45 bp, Homo sapiens
  chr3:170870834-170870879
  hypo
cagtgggcgtgagccactgcgcccggccaaaactatgttttaaat

SEQ ID NO: 252834 - DNA, 36 bp, Homo sapiens
  chr3:171121104-171121140
  hypo
tagaaaagggggtgaatggccgggcacggtggctca

SEQ ID NO: 252835 - DNA, 110 bp, Homo sapiens
  chr3:171171982-171172092
  hypo
ttgtgctcagctgggcatggcggccatgattcaatcacaggagcgcctggctgggtggactttagaaccactatcactgagagaaggaatggcgtcgaaacaagaagggc

SEQ ID NO: 252836 - DNA, 89 bp, Homo sapiens
  chr3:171243544-171243633
  hypo
gtttcagaaggttacaccatcgatgtacagattaattagaagtgggatagggaggccgaggcgggcggatcacgaggtcaggagatgga

SEQ ID NO: 252837 - DNA, 216 bp, Homo sapiens
  chr3:171362728-171362944
  hypo
agcatttcctccgccggttgaaatgtctccttcgaaccctggcagaagtggtatcacgacatatacccggtatttctggttttccctgcaaaggtcagatgcagagaaattcacccaaaaaataaaaggtagtatcaattttagatgacagccaagcagttcacatggtttttgagattgagtgaatggcttcctacaacacgttctgtcacattt

SEQ ID NO: 252838 - DNA, 163 bp, Homo sapiens; identical to SEQ ID NO: 209150
  chr3:171363249-171363412
  hypo

SEQ ID NO: 252839 - DNA, 78 bp, Homo sapiens; identical to SEQ ID NO: 209151
  chr3:171493948-171494026
  hypo

SEQ ID NO: 252840 - DNA, 45 bp, Homo sapiens; identical to SEQ ID NO: 209152
  chr3:171529766-171529811
  hypo

SEQ ID NO: 252841 - DNA, 33 bp, Homo sapiens
  chr3:171661620-171661653
  hypo
attacaggcgtgagcctccgcgcccagcctgag

SEQ ID NO: 252842 - DNA, 153 bp, Homo sapiens
  chr3:171886950-171887103
  hypo
cccacgtcagcactcggtcatgtctgtccaaaaggtgctttgaacccttggaggatgtggaatgccatgtcgacctcagtgccaccaggggcatactcgagcccaccaaaggagcaagtgaaggggttgcctgagcggcgctccggaatgtgc

SEQ ID NO: 252843 - DNA, 278 bp, Homo sapiens; identical to SEQ ID NO: 209154
  chr3:171965332-171965610
  hypo

SEQ ID NO: 252844 - DNA, 112 bp, Homo sapiens; identical to SEQ ID NO: 209155
  chr3:171976025-171976137
  hypo

SEQ ID NO: 252845 - DNA, 317 bp, Homo sapiens
  chr3:172033195-172033512
  hypo
cattggcttttcagctgtggccttcagtttcgattttcacctgaaacaggtcagtttttattacttgagaaggtgtggccattccttgccaagttcccttgtggtgactcgtgagctttagtgtttagagccatggggtttaataactgaccccgcatttttgtagatttttagccgctttcctccttcaggagacaccccattaggagcagaaaggcagaaggtcattttcaagtctttttcacttgaacgttagatgagtcacatcacatttttatttcagtgtccccgcccccgtgtttacactttaatctaca

SEQ ID NO: 252846 - DNA, 38 bp, Homo sapiens
  chr3:172056805-172056843
  hypo
tgtgagccaccgcgcccggcccaccattaaattttttt

SEQ ID NO: 252847 - DNA, 50 bp, Homo sapiens
  chr3:172341459-172341509
  hypo
aaagatttattgagcgcttataagaggcaccatgtcaggcattggggtca

SEQ ID NO: 252848 - DNA, 421 bp, Homo sapiens
  chr3:172341539-172341960
  hypo
aagggtcctagtcttgtgagggagtcagacctacctgcagacaattaccatgtcatgtgtggagtgcagtgtgagacccgaggaacgacccctaaatcctcctgagaaaggagttaggaaaggctcctggaggaggctggcaaagaaatacaagaacagtgaaaagcactctaaggagaaggaagggtgttcggtaagagaacatggcgcatgtgcggaacacgaacagaaccgcggtaataagttccgggttggctagctgtaccacagcacgatgtgcagggacggccaggagaggatgctacagagcagcagctctcaaacttttcagtctcaggactttacaatcttaaacattattgaggacccttccccctcccccacgaagagcttttgtttatgtgggcttcatttattgatg

SEQ ID NO: 252849 - DNA, 35 bp, Homo sapiens
  chr3:172351503-172351538
  hypo
ctgcaatgagtggggcggagcgggcatccagcaac

SEQ ID NO: 252850 - DNA, 240 bp, Homo sapiens
  chr3:172355750-172355990
  hypo
cacttgaacccaggaagtggaagttgcagtgagctgagatcgaaagaacaagacctgggcgaaagagcaagaccctgtctcaaaataaaatcctgctaggtaattaaacatcttgacattcattgtagataaaatcaaatggacaaatgtttgtgaaatacgttgacaagtagtgaatgtggatctggtcattccggaattaccacattttgaaactaaatgcaataaaaaaactccctt

SEQ ID NO: 252851 - DNA, 141 bp, Homo sapiens
  chr3:172394009-172394150
  hypo
ctgttaataaaagcaaaccccgaaccatttcttttctaacagaaaaaccgcttgaagggccgggccaggaagctttgatacgcaaatgccgcccgttagaaatggtccacccaatatggcgactcctgccttcttcttgtc

SEQ ID NO: 252852 - DNA, 38 bp, Homo sapiens
  chr3:172394537-172394575
  hypo
gtgttccttcagtcatcggagccatgtcatttacacct

SEQ ID NO: 252853 - DNA, 80 bp, Homo sapiens; identical to SEQ ID NO: 209159
  chr3:172395702-172395782
  hypo

SEQ ID NO: 252854 - DNA, 33 bp, Homo sapiens
  chr3:172409440-172409473
  hypo
agaaagaacagggtgctggccgggcgcggtggc

SEQ ID NO: 252855 - DNA, 77 bp, Homo sapiens
  chr3:172424594-172424671
  hypo
ttcgtttaaatggtgctgcaaataaaagaaaaaaagattgctcgattttacttcacgtttattataagtggcagtgc

SEQ ID NO: 252856 - DNA, 41 bp, Homo sapiens
  chr3:172425342-172425383
  hypo
agatcatctggggaacttttcgttttttatttttattatta

SEQ ID NO: 252857 - DNA, 41 bp, Homo sapiens
  chr3:172425683-172425724
  hypo
tcttaaacactgctaagaacgttcatctcccagagattcta

SEQ ID NO: 252858 - DNA, 41 bp, Homo sapiens
  chr3:172426415-172426456
  hypo
ggattacagcgtgagccaccgccccaggccatgacaccagg

SEQ ID NO: 252859 - DNA, 37 bp, Homo sapiens
  chr3:172469920-172469957
  hypo
gttttttttttttttttagacggagtctacctcttgt

SEQ ID NO: 252860 - DNA, 37 bp, Homo sapiens
  chr3:172470197-172470234
  hypo
gtgagccaccgcgtccggcctttcaaatggtattttt

SEQ ID NO: 252861 - DNA, 83 bp, Homo sapiens; identical to SEQ ID NO: 209160
  chr3:172475922-172476005
  hypo

SEQ ID NO: 252862 - DNA, 199 bp, Homo sapiens
  chr3:172727365-172727564
  hypo
caggggaggctaggctctttcgcatgcccttaggatagctgcagcagccgcagtgctcaggagcagactacagaccgcacctctgctgctgctcgccaggcaagtcccaccggcttgggcctccagtgtgcacacctgcctgtgttactggtcataggcagttgtccaggttcttggtgttttgaacaaagaattagag

SEQ ID NO: 252863 - DNA, 138 bp, Homo sapiens
  chr3:172727624-172727762
  hypo
tcacagggcaggagccggctggagcaagcggctcaagagcctcagttacggaatttcttggggcttaaataccctttagacgtttccctttggtttactatatgcaaataaagttccgtgaccagtctgattggttgt

SEQ ID NO: 252864 - DNA, 36 bp, Homo sapiens; identical to SEQ ID NO: 209162
  chr3:173162774-173162810
  hypo

SEQ ID NO: 252865 - DNA, 180 bp, Homo sapiens; identical to SEQ ID NO: 209163
  chr3:173864875-173865055
  hypo

SEQ ID NO: 252866 - DNA, 133 bp, Homo sapiens; identical to SEQ ID NO: 209164
  chr3:174095072-174095205
  hypo

SEQ ID NO: 252867 - DNA, 32 bp, Homo sapiens; identical to SEQ ID NO: 209167
  chr3:175307701-175307733
  hypo

SEQ ID NO: 252868 - DNA, 546 bp, Homo sapiens
  chr3:175338091-175338637
  hypo
ctgccatggctccacgcttagcacgcagctgagctgggtgtgctgcaaccagcatccacgttgggcgccagcgtcaagatgaggggaatgcaatggcacccgaaaactaaaagagatgccagcaatcacagatccctaaggggtgttacagctatagctcggggagtcccggggtctcggcccccagaagttttgctgctctttctcccatagtccactgcttgggagcatattacaagcccatttattcctgccactcacagatcggcaggcagaaaggagtaacactcagtggctttttcactcccgcaattcggcgagcaggagggggtgtgttacagctctcttgttcctgctgcctgcagctcagcgaacaggggcatgtcacagctctcttgttcttaccacctggaacgggtacatgttgccgctctcttcgtgcctgcacatgttgccgctcttttcgtgcctgcaatctggcaggttacaggttcttgtcctgtgaccaagagaaatgaggtatgcggacacaggatagcaaataag

SEQ ID NO: 252869 - DNA, 91 bp, Homo sapiens
  chr3:176545044-176545135
  hypo
ccctgaattttaaaagaggtcgccatatctttctgatgcattctctttttaaaaaaagagaatttttccgacgggtgtttttccaaagggc

SEQ ID NO: 252870 - DNA, 218 bp, Homo sapiens
  chr3:176710430-176710648
  hypo
gtaatgccacgtagaccacataaagagaaaacctatggcctcaaattactggtttaatcatgtgattaggcagaactggcatggaagcacaatgaggaaagagaatcatgatctcagtggttccagcccattagctgctccaccacattcaccaggcactcacgcgctctgccacctcccgggggactcgatgatttaatattcgcctccacacaaac

SEQ ID NO: 252871 - DNA, 87 bp, Homo sapiens
  chr3:176753533-176753620
  hypo
tgacccagcaatggatgaataaagtacactaacacacagatatcctgtttcgccagtccagctgagggtgtccgagccatttacaga

SEQ ID NO: 252872 - DNA, 34 bp, Homo sapiens; identical to SEQ ID NO: 209170
  chr3:176854102-176854136
  hypo

SEQ ID NO: 252873 - DNA, 93 bp, Homo sapiens
  chr3:176869524-176869617
  hypo
ataaaaagaattttcccagacgggcacggtggctcacacctgtaatcccagcccaaggcagcagatcacctgagttcagaagtttgagaccaa

SEQ ID NO: 252874 - DNA, 75 bp, Homo sapiens; identical to SEQ ID NO: 209171
  chr3:176890964-176891039
  hypo

SEQ ID NO: 252875 - DNA, 34 bp, Homo sapiens
  chr3:176893551-176893585
  hypo
aataagttattcaggccaggcgcggtggctcatg

SEQ ID NO: 252876 - DNA, 119 bp, Homo sapiens
  chr3:176897153-176897272
  hypo
tgttgtactgacataattctcgtatttaccaattacatatgagcctattccggatacagacacacgctggagcacaaccaagtattcttttaacttacggtatctgttttattctaact

SEQ ID NO: 252877 - DNA, 210 bp, Homo sapiens
  chr3:176963512-176963722
  hypo
ctccatattgtagtcgggaaaactgaggcacagagaaaacaggaaactgcctaagaataatagctcataaacaatggggcagagtttcaaaaccagagagttgggttccaaagactgagctcgtaaccaccataccatgctatctgtcctcatgtaagcctctccctctcttttgccacgcttgagtttgcactccgggatatcatatac

SEQ ID NO: 252878 - DNA, 36 bp, Homo sapiens
  chr3:176990424-176990460
  hypo
ttaaaagaaggcaggctgggcgtggtggctcatgcc

SEQ ID NO: 252879 - DNA, 35 bp, Homo sapiens
  chr3:176990700-176990735
  hypo
cagtgggacactccgtctcagaaaaaaaaaggaag

SEQ ID NO: 252880 - DNA, 45 bp, Homo sapiens
  chr3:177001716-177001761
  hypo
gggattacaggcgtgagccaccgcgcccagttaggaaaagacttt

SEQ ID NO: 252881 - DNA, 88 bp, Homo sapiens
  chr3:177030449-177030537
  hypo
actaagcatgggcagtgagacgaagtttcctaccctcacgcccacagggctacgtcgatggcaatgcgattttctgagattaggagtc

SEQ ID NO: 252882 - DNA, 103 bp, Homo sapiens
  chr3:177085605-177085708
  hypo
ttacaggagtgagccaccgtgcctggccaacacaaccttttaataaagattgcattgtgttggaggcatatataggtatatatgaagacgggcactgcgtcag

SEQ ID NO: 252883 - DNA, 230 bp, Homo sapiens
  chr3:177094901-177095131
  hypo
caaacaagcccgaacgtaatcgcctaattaaatcattttcatctaatgaatataagcaacaaaataaactggcatagcagcgagtcagggagtgattccaatggaagcaactgcagaggtggtgtggccgtgccgggacttgcagagcttttctgcttattttcaagtgacgcccgtgttggcaccttagctccaggtgagtgggtctgagaaggcggctctgtctggca

SEQ ID NO: 252884 - DNA, 89 bp, Homo sapiens; identical to SEQ ID NO: 209173
  chr3:177158385-177158474
  hypo

SEQ ID NO: 252885 - DNA, 120 bp, Homo sapiens
  chr3:177238533-177238653
  hypo
gccaccgcagcctggccaacaagaatacaagaatttcaataagtggtctgacttgggaggtataaaggtgaagacagcaaacattaaaaagtccttgcggtggggcgtggtggctcatgc

SEQ ID NO: 252886 - DNA, 120 bp, Homo sapiens; identical to SEQ ID NO: 209174
  chr3:177238893-177239013
  hypo

SEQ ID NO: 252887 - DNA, 80 bp, Homo sapiens
  chr3:177239193-177239273
  hypo
ctgacagcaggtggagctcagacagtagagctcgctcaaccgccgctcaccttgtgctgtgcagccggttccttacaggc

SEQ ID NO: 252888 - DNA, 33 bp, Homo sapiens
  chr3:177269266-177269299
  hypo
gaaaaaccttgctaacttcgttttgaactaaga

SEQ ID NO: 252889 - DNA, 31 bp, Homo sapiens
  chr3:177308262-177308293
  hypo
aaacataaaatattagaggccgggcatggtg

SEQ ID NO: 252890 - DNA, 43 bp, Homo sapiens
  chr3:177829173-177829216
  hypo
ttttcagtgtgtgagttacacgtaaatataaatagttagctgg

SEQ ID NO: 252891 - DNA, 32 bp, Homo sapiens
  chr3:178577721-178577753
  hypo
aacaaaataaagttcggaaggggagccaagat

SEQ ID NO: 252892 - DNA, 180 bp, Homo sapiens; identical to SEQ ID NO: 209175
  chr3:178860953-178861133
  hypo

SEQ ID NO: 252893 - DNA, 42 bp, Homo sapiens
  chr3:178978410-178978452
  hypo
tcaaacattactgagagtgtcggaagtctctccattggtaac

SEQ ID NO: 252894 - DNA, 44 bp, Homo sapiens; identical to SEQ ID NO: 209177
  chr3:179085022-179085066
  hypo

SEQ ID NO: 252895 - DNA, 39 bp, Homo sapiens
  chr3:179159869-179159908
  hypo
caggcgtgagccaccaagcccggccgactgaaatatcgt

SEQ ID NO: 252896 - DNA, 36 bp, Homo sapiens; identical to SEQ ID NO: 209178
  chr3:179203080-179203116
  hypo

SEQ ID NO: 252897 - DNA, 88 bp, Homo sapiens
  chr3:179319791-179319879
  hypo
gcattagtacagaacgtattttcacaccctaatgacaaaatactttgtcattataaattaactggggcggtggttcacacctgtattc

SEQ ID NO: 252898 - DNA, 153 bp, Homo sapiens
  chr3:179377824-179377977
  hypo
tgtctcaaaaaacaaacaaacaaaacattttaactcgatttaattgtacaattcagtggcattaaattacattcgcatggaaacattttaactcgttttaattgtacaattcagtggcattaaattacattcgcattgttgtgtaactatcac

SEQ ID NO: 252899 - DNA, 178 bp, Homo sapiens
  chr3:179383082-179383260
  hypo
gtctggcatgaggacataaccgcttgagctaactccaatccgtcaagtgtctattatgagtcaaacactatgccaggcacttttatgtacgtcatctcatttaattatgatagtaattggcttacatgttatagttacgattttgcccctgttttacggatgaggaaatggagagtca

SEQ ID NO: 252900 - DNA, 141 bp, Homo sapiens; identical to SEQ ID NO: 209179
  chr3:179391536-179391677
  hypo

SEQ ID NO: 252901 - DNA, 160 bp, Homo sapiens
  chr3:179398900-179399060
  hypo
gggaaacgattgctcggctgtccataggagcacttggagccagggctggggtgaagccaccgctgtgggtgtctgtggagctgccgaatagtcattgatgatgactacagtgttgtgaccaagcgagttacagagaaacgccacactttgagacaaatta

SEQ ID NO: 252902 - DNA, 373 bp, Homo sapiens
  chr3:179449287-179449660
  hypo
gtttggtaagctgccgggtggttcttaagcaggctcaagtaggagaaactccgtgggccagtcgttactaattaatagaaccactgaaagataggcttgatgttttaatggccagacctgcatttccactggaccctccctatgctgcttgttgtacaactccagagggtactactcataacttggtctttttgagtggtgcccttggaattgtgtagtgcacagcttacgcatctgtgtttggcaccgtcctctcccgttgccacagatgccctgagtggaacgcgtgccccacttccccgccacctgctctggcttcctagtatcctgtcttgacttactgggcaggctcgttcagttctgtgtctcaagt

SEQ ID NO: 252903 - DNA, 34 bp, Homo sapiens
  chr3:180502777-180502811
  hypo
gtacattaagaatttgaggccgggcgcggtggct

SEQ ID NO: 252904 - DNA, 622 bp, Homo sapiens
  chr3:180546429-180547051
  hypo
ggttggcagctcctggtcttcgaccttcgctcgctttctgggccggggcctggtgagagtcagggggccggggcccctgaggcagagaaaactgttcacgccttggaggagagtgtccacttggctcccagggccggcctgcacagcctgcagcgtctccatggccttctcctgctgccgccgggcctccaggccctccacgtcgggcgggtagcagtggccacgcatcacggtcacctgctgtccctgggtgatggcccggctccggcagctgtgcagcgcgtggtcccggcaggtccaatacgccttctcccccacggccttctcccgcttgtagaggaacgactcgtgcaccaggaagctatccccgtagcacgtcctcaggaactcaaggggccgggcctgtcccaggcccaggatcgagcacttcttgggcgtcaggctcagcagctacaggattcggggtccgtcgtcgtcctccgggccggcttgctcagcactagcccaggggtgggctctggctccggctccttggggcactgccacaggccccccctctccagcggctcctccactcggcttccagagccctcaggaccccggggatgtcccaagacctctg

SEQ ID NO: 252905 - DNA, 87 bp, Homo sapiens
  chr3:181466764-181466851
  hypo
agactccgtctcaacaacaacaacaacaaaagactctacgcaaaagaagttattgacattgccttcggtacccacttaaggaccact

SEQ ID NO: 252906 - DNA, 89 bp, Homo sapiens; identical to SEQ ID NO: 209184
  chr3:181521187-181521276
  hypo

SEQ ID NO: 252907 - DNA, 262 bp, Homo sapiens
  chr3:182314908-182315170
  hypo
aagcacggagaacccgagggagtgtgaagatcaaatcaggtgtctttcggtcagtggaggaaacacccggaagcagtgaaacgcactgggcttattgcaacaaccccagctactgaaaatgccaccctctccacgacgaagcaccgccagtcccaaactccaatcagccgctgggctgggaggccgaaaaggcaagaagacacagagcggggttgaaatgaagaaggaactctttttcaacgagactcattacagtatgcaa

SEQ ID NO: 252908 - DNA, 37 bp, Homo sapiens
  chr3:182457889-182457926
  hypo
gcctccgtggctggcgcggtggctcattcctgtaatc

SEQ ID NO: 252909 - DNA, 34 bp, Homo sapiens; identical to SEQ ID NO: 209187
  chr3:182650849-182650883
  hypo

SEQ ID NO: 252910 - DNA, 127 bp, Homo sapiens; identical to SEQ ID NO: 209188
  chr3:182656910-182657037
  hypo

SEQ ID NO: 252911 - DNA, 41 bp, Homo sapiens
  chr3:182704501-182704542
  hypo
aaactagcaaatgggctgggcgcggtggctcacgtctgtaa

SEQ ID NO: 252912 - DNA, 42 bp, Homo sapiens
  chr3:182725059-182725101
  hypo
atttgcatttctaataacttcgcaggtagtgctgctgctgct

SEQ ID NO: 252913 - DNA, 76 bp, Homo sapiens; identical to SEQ ID NO: 209189
  chr3:182778669-182778745
  hypo

SEQ ID NO: 252914 - DNA, 73 bp, Homo sapiens; identical to SEQ ID NO: 209190
  chr3:182788794-182788867
  hypo

SEQ ID NO: 252915 - DNA, 76 bp, Homo sapiens
  chr3:182800449-182800525
  hypo
gactgaagacaactggcaatcgagagaacgagtgtggccagggcggtggctcacgtcggtaacgccaacacgtagg

SEQ ID NO: 252916 - DNA, 39 bp, Homo sapiens
  chr3:182812783-182812822
  hypo
tgccctggccaggcacggtggctcacacctgtaatccca

SEQ ID NO: 252917 - DNA, 45 bp, Homo sapiens
  chr3:182815989-182816034
  hypo
tacaggcgtgagctaccgcgccccgccaacttccaacaactttct

SEQ ID NO: 252918 - DNA, 41 bp, Homo sapiens
  chr3:182882985-182883026
  hypo
ttttaagcacatagccgggcgcagtggctcacgcctgtaat

SEQ ID NO: 252919 - DNA, 37 bp, Homo sapiens
  chr3:182895951-182895988
  hypo
agataattaaaaataaattccggctgggcgcggtggc

SEQ ID NO: 252920 - DNA, 163 bp, Homo sapiens
  chr3:182935983-182936146
  hypo
ggctgatgaatggaatagatcgtgctgctgcctctgaaaaacgtatcatggattcgtagcttctcattcataataaagaagcttcgcttcctggtaaaagaaaacagactctcacctgaatttattttaacaacatcaataagggattaagagttcttggcag

SEQ ID NO: 252921 - DNA, 43 bp, Homo sapiens
  chr3:182976027-182976070
  hypo
acaggcatgagccaccgcacccggcccacttcaccctttaagc

SEQ ID NO: 252922 - DNA, 147 bp, Homo sapiens; identical to SEQ ID NO: 209191
  chr3:182976758-182976905
  hypo

SEQ ID NO: 252923 - DNA, 42 bp, Homo sapiens
  chr3:183014966-183015008
  hypo
aaacagtgccctgtgcacttcgcctgaccacaactcagagcc

SEQ ID NO: 252924 - DNA, 296 bp, Homo sapiens
  chr3:183035119-183035415
  hypo
cttctgtgaaataatgggttcgttctgtttgtgcttctcaaggtagaaaggtgccaacactcatccagggagaagccccgggaagatttccctgtactgcatgagtgaaagaacctgccaagctcccttttctcggcaggttctgacgtgcttttacgaatcatttaataggtgcctgaccttcaactcaggacagggtgccttccgtagtcctttttctcaaattcatccccaaataaaaagatgcactcctgagaaagtgaagcaataagtccgcttattagtctgccccaaaa

SEQ ID NO: 252925 - DNA, 83 bp, Homo sapiens
  chr3:183052206-183052289
  hypo
aataggggacagatgagcaccgtgggcctccaggcgatactccaagaaggacatgtatcacttaagtagcataaaagacaaag

SEQ ID NO: 252926 - DNA, 120 bp, Homo sapiens; identical to SEQ ID NO: 209195
  chr3:183183284-183183404
  hypo

SEQ ID NO: 252927 - DNA, 33 bp, Homo sapiens
  chr3:183183704-183183737
  hypo
tttcagtgttccgatgagttccctgatatgccc

SEQ ID NO: 252928 - DNA, 35 bp, Homo sapiens
  chr3:183199496-183199531
  hypo
agctaagcattccacgtgtacgatctcgtctaatc

SEQ ID NO: 252929 - DNA, 31 bp, Homo sapiens
  chr3:183208295-183208326
  hypo
tcatttaaaaaaaaaaagaccgggcccagtg

SEQ ID NO: 252930 - DNA, 41 bp, Homo sapiens; identical to SEQ ID NO: 209196
  chr3:183209172-183209213
  hypo

SEQ ID NO: 252931 - DNA, 248 bp, Homo sapiens
  chr3:183209979-183210227
  hypo
agcgggctgtaggcgtacagcgctctcatggccccacctgaggagagggaggaaacacggtgggcatcgctccatttttctggtttcttccctcttaaccactaaaattcaacttctgattaggccaagtctaccctcttgccaagagaaacagtcgattgatggctctcctgaaagccagagtgggtcctaggggcagtgagttgccagcgctggagacaccgcgacacaccgtttacgtgctgcag

SEQ ID NO: 252932 - DNA, 246 bp, Homo sapiens; identical to SEQ ID NO: 209197
  chr3:183217392-183217638
  hypo

SEQ ID NO: 252933 - DNA, 57 bp, Homo sapiens
  chr3:183245666-183245723
  hypo
acattctgcttggtgatcagcgccttgctggtgtacgtgtagtccaacagagtgtgc

SEQ ID NO: 252934 - DNA, 150 bp, Homo sapiens; identical to SEQ ID NO: 209198
  chr3:183275004-183275154
  hypo

SEQ ID NO: 252935 - DNA, 120 bp, Homo sapiens; identical to SEQ ID NO: 209199
  chr3:183357000-183357120
  hypo

SEQ ID NO: 252936 - DNA, 171 bp, Homo sapiens; identical to SEQ ID NO: 209200
  chr3:183381135-183381306
  hypo

SEQ ID NO: 252937 - DNA, 156 bp, Homo sapiens; identical to SEQ ID NO: 209201
  chr3:183419805-183419961
  hypo

SEQ ID NO: 252938 - DNA, 220 bp, Homo sapiens; identical to SEQ ID NO: 209202
  chr3:183479752-183479972
  hypo

SEQ ID NO: 252939 - DNA, 55 bp, Homo sapiens; identical to SEQ ID NO: 209203
  chr3:183525222-183525277
  hypo

SEQ ID NO: 252940 - DNA, 168 bp, Homo sapiens; identical to SEQ ID NO: 209204
  chr3:183525714-183525882
  hypo

SEQ ID NO: 252941 - DNA, 48 bp, Homo sapiens
  chr3:183529223-183529271
  hypo
tggggagcggcgcccggcaggctcttctggggtcgtctgtcctatccg

SEQ ID NO: 252942 - DNA, 44 bp, Homo sapiens
  chr3:183529476-183529520
  hypo
cgctgccaggtgcccgggtctattggaggcgccccatctcagac

SEQ ID NO: 252943 - DNA, 144 bp, Homo sapiens
  chr3:183531345-183531489
  hypo
ttccacctgcagagcgtcatagtgcagcccgtggctgcttgaggcagctcccgcagtggcagcttgggttgtgaaataattaaaaagttaacattttcttttgtctggaatttgctaacatgttgaactgctttttatttattt

SEQ ID NO: 252944 - DNA, 84 bp, Homo sapiens
  chr3:183639003-183639087
  hypo
cggtaggaggacgcgatgaggggcccgccccaggcagggaatggcaatgctctaaagaaaagagacttcgtcaacagggaggag

SEQ ID NO: 252945 - DNA, 44 bp, Homo sapiens
  chr3:183642080-183642124
  hypo
tacaggcatgagccaccgtgcccggcctactccacttcctatgg

SEQ ID NO: 252946 - DNA, 66 bp, Homo sapiens; identical to SEQ ID NO: 209206
  chr3:183642828-183642894
  hypo

SEQ ID NO: 252947 - DNA, 337 bp, Homo sapiens
  chr3:183643316-183643653
  hypo
gccaaagttcctgaaggactcggtacctgtccctgggccagcaccataatcctatcggagcctagaaccgtgtgcaggcgatgggcaatggtcagcatggtacagtctgcaaatgcttctcggatggtctcttgaatcaataagtctgtctctgtgtccatggcagctgtggcttcatctaaaatcagaatctgccagagaagcagaggagaaagaaactcgattaaattcctttagcattctggttaatctagattttactaaaatgtatttcatttaagttttacactatctattgttttcttttctttcttttttttttttttttgagacggag

SEQ ID NO: 252948 - DNA, 198 bp, Homo sapiens
  chr3:183647991-183648189
  hypo
caggcatgcaaatacaatcacgtcattatcacagaactctagtgagaggacagcaggccggcaccgcctcattcctgctatctgggcatctctcgatctcctgggagattctgacccgccttgctctccagcgcctcttgccctttgcacggcgtttttcccgcttggaacatgctcgcttctcactacccttggccc

SEQ ID NO: 252949 - DNA, 60 bp, Homo sapiens
  chr3:183652390-183652450
  hypo
tactaaagctacaggcgcacgatgttctacccacaccagctgcacgcgcccatggtcaat

SEQ ID NO: 252950 - DNA, 101 bp, Homo sapiens; identical to SEQ ID NO: 209209
  chr3:183670355-183670456
  hypo

SEQ ID NO: 252951 - DNA, 87 bp, Homo sapiens; identical to SEQ ID NO: 226536
  chr3:183676018-183676105
  hypo

SEQ ID NO: 252952 - DNA, 31 bp, Homo sapiens; identical to SEQ ID NO: 209210
  chr3:183676454-183676485
  hypo

SEQ ID NO: 252953 - DNA, 153 bp, Homo sapiens
  chr3:183684048-183684201
  hypo
cacaggtgtacctacgtacaccacaaactggtagcattctgatgtgcacttcaaagggttcagaagtccccagggggtctactgtggaaagccggcacttctggctgctgcacaaacaccgcacattgcagcgctatcaacagatgtaaacta

SEQ ID NO: 252954 - DNA, 194 bp, Homo sapiens
  chr3:183688726-183688920
  hypo
aatatatacacatccggggccctctaatgacacggacctgtgaatatggtgctggttccgaaatacatagtctgtattttaaaagccttgaacctggcatctctgttccaccattccctataggaggccctctgagactaatcttgtgctacctgggctgtgacatcatctaccgttaacgatccttaacttat

SEQ ID NO: 252955 - DNA, 31 bp, Homo sapiens
  chr3:183698521-183698552
  hypo
agacagtctcgctgcgacacccaggctggag

SEQ ID NO: 252956 - DNA, 210 bp, Homo sapiens
  chr3:183703569-183703779
  hypo
gcggcagtccccaccggcgtcaccaaaaccttggatcatcttggtgtataaatgtcagcatcagctggctggcaggtaaaaacaaacagaacacaacaacttgactgtgtttcatttgttctgattatggctaccaaggttcggtgaaacccgagcagggacaagaaataaaaatgccattttatttggggagcccgtatgtgggcagtc

SEQ ID NO: 252957 - DNA, 40 bp, Homo sapiens; identical to SEQ ID NO: 209211
  chr3:183710273-183710313
  hypo

SEQ ID NO: 252958 - DNA, 199 bp, Homo sapiens
  chr3:183720218-183720417
  hypo
aataacaaaaagcaattcagattctgtcaaggttcaaacaaagatcagggaaacacacattcatagacacctctggtatgaaaaacaggtaacattcgattcataagcagacagatctgctcttgcaaaagacgcttctgcgggcgctaacgccatcctcaggcctcagataatcagcgcacctatcacaccccatggc

SEQ ID NO: 252959 - DNA, 143 bp, Homo sapiens
  chr3:183728816-183728959
  hypo
accgtgcccggcccaaactcattcttaatatctccccaatctccttttcttatgtccacgaataggtttaaatccttaccatcaatcccagacaccccaatgcctccctatcttctagaaacgcctttcctccatcctcactt

SEQ ID NO: 252960 - DNA, 164 bp, Homo sapiens
  chr3:183731933-183732097
  hypo
tataggcgtgagccaccgcgcccggccaaaaaataagtttctaaattacccattatacgaaaaaagatgtgttttagtacaacaagcaggtaagagactcttaggaaaggaaactgaccggtcgagttctcctgaacttggaatcttcacggtctctgtgcgtc

SEQ ID NO: 252961 - DNA, 144 bp, Homo sapiens
  chr3:183775518-183775662
  hypo
tctcaaaacaaaacaaaacaaaacaaaacaaaaaacaaaaacaaaagcctaataagcgcacatcaccccagatgccgattaaattgttccaggtggggcccaggtgatgctaacgtgcagacggggttacgacctgctgcttta

SEQ ID NO: 252962 - DNA, 348 bp, Homo sapiens
  chr3:183801859-183802207
  hypo
aggcccaaaggagccgggggagttagcagggaaggaggtgagacccggagagactgagctagatgggggctcaggatggacaaacgcccagctagtggagctgtgggtgcagttcagccacgcgatggacaccctgctcttccgcctcgggaacacctaggagttgagttctgagtgtgcgcgagcagcagggttcagcttcccttggcctcagcgggccatgccaggcgctgcttctgcactgcagtcggcagacccagccccagccatgccatgatccctgctccagcccttcctgtggttaaatagaaccactgctagcactcccagaaacgagaatgtatttcc

SEQ ID NO: 252963 - DNA, 43 bp, Homo sapiens; identical to SEQ ID NO: 209213
  chr3:183872152-183872195
  hypo

SEQ ID NO: 252964 - DNA, 136 bp, Homo sapiens; identical to SEQ ID NO: 18124
  chr3:183891939-183892075
  hypo

SEQ ID NO: 252965 - DNA, 214 bp, Homo sapiens
  chr3:183898698-183898912
  hypo
gggtatcaagtatcgtcggaatgagctcttcctggatgtgctggagagtgtgaacctgctcatgtccccacaaggtgaggtccctctcacgacaaagttggagggggcccagggcaggatcctgggcctgcctgcctgactccgctgctccccatttatctgttccatcaccagggcaggtgctgagtgcccatgtgtcgggccgggtggtgat

SEQ ID NO: 252966 - DNA, 100 bp, Homo sapiens
  chr3:183921232-183921332
  hypo
acacagtgattggaagaacacgtgaggtatgatcggatcctgcaacggggaagggtgtgacggagcgagctgtggtcacgggatccccagccctgccttg

SEQ ID NO: 252967 - DNA, 142 bp, Homo sapiens
  chr3:184015336-184015478
  hypo
tccttttttctcaccttacacgcacacacacacacacacagctgaagaagaaactctggggtttgcctaaaacagtcaagggctttgaagactgaaagactgagctttaaattttgattccgccgggcgcggtggctcacgc

SEQ ID NO: 252968 - DNA, 263 bp, Homo sapiens
  chr3:184015973-184016236
  hypo
tcctgacataagcgcgtcagtcacacgcctctaaggcttcacagggaaagacgagaagatagaggacgaagaccttgtcttgttctgcttttagctccagaacttggcggggagcacagggctttattgatcgatgtcaactccacctggctccccaaagtatttaaaatggtagccacgggaatagcagagtactctctttcaactggggaggaatatcaaatgaggttaataggccgggcgcggtggttcacacctgtaat

SEQ ID NO: 252969 - DNA, 110 bp, Homo sapiens
  chr3:184018033-184018143
  hypo
cctttttgtctgagccctgtcgtctcttgatcaggagaaggatacatccctgtatcgaccagcgctggaggaattgcgaaggcagattcgttcttctacaacttccatga

SEQ ID NO: 252970 - DNA, 291 bp, Homo sapiens
  chr3:184026067-184026358
  hypo
aagtgaggtgggggcgtctctggttcgtagtagggtgtatgaggggaggagtgtggattcagtcgtatgactgacgggttaaagggtcagcgctgaggtgggctctcaatgtttctggccaggcctgtctttttgtctcttaactttttgtcctgtctgcttccctcagttattctaggcaaatcacactatgtattgtatgggctggtggctgccatgcagccccgaatgctggttacgtttgatgaggagctgcggccattgccagtgtctgtccgtgtgggccaggtg

SEQ ID NO: 252971 - DNA, 72 bp, Homo sapiens
  chr3:184031681-184031753
  hypo
ttttcaaagcctgcataattcgtattgtatcacgatttacttaggcaggacggagtctttaatttctttctt

SEQ ID NO: 252972 - DNA, 73 bp, Homo sapiens; identical to SEQ ID NO: 209217
  chr3:184042661-184042734
  hypo

SEQ ID NO: 252973 - DNA, 143 bp, Homo sapiens
  chr3:184043272-184043415
  hypo
ttgggtgccacgccgaggggatcagggtcccaagaccattgaccagatccataaggaggctgagatggaagaacatcgagagcacatcaaagtgcagcagctcatggccaagggcagtgacaagcgtcggggcggtcctccag

SEQ ID NO: 252974 - DNA, 86 bp, Homo sapiens
  chr3:184045150-184045236
  hypo
gcggagtagagaacggccctcccagcctgaggggctgcgcaaggcagctagcctcacggaggatcgggaccgtgggcgggatgccg

SEQ ID NO: 252975 - DNA, 196 bp, Homo sapiens
  chr3:184057052-184057248
  hypo
aaagaagaggctgtcggctgaaagcattatttgcaggtgacacttgagatgggccttaagtgatggcaagcattttttcacgtaaggatggcattcttggcccagaggaaagctgagttccttttcctggaggcaggcgggctgcttgctgacagggattggtggagaagggtttttgttttttgttatttatttt

SEQ ID NO: 252976 - DNA, 163 bp, Homo sapiens; identical to SEQ ID NO: 209219
  chr3:184059511-184059674
  hypo

SEQ ID NO: 252977 - DNA, 199 bp, Homo sapiens
  chr3:184059878-184060077
  hypo
cgtgaccaagcctaccgccatggcccagggccgagtggctcacctcattgagtggaagggctggagcaagccgagtgactcacctgctgccctggaatcagccttttcctcctattcagacctcagcgagggcgaacaagaggctcgctttgcagcaggtggatggcagaaaggggataagctacactcttggcacagg

SEQ ID NO: 252978 - DNA, 189 bp, Homo sapiens
  chr3:184067618-184067807
  hypo
ggtctggccctagctgtggccgccactctggcctttaccattgcttctccgtgggtggcctctgaatgaattacttattagccggcacagcgatctccagttgcacgggttcctaagtagtctccagtgttttctctctcttatctgaatgttcccctcctgaacttaattgggcgactacctattgat

SEQ ID NO: 252979 - DNA, 107 bp, Homo sapiens
  chr3:184070507-184070614
  hypo
aggctccagccactcacctccgaagcagcctcagggggtggactgccacagaagaggctccggagggcgatgcctgccgactctgcgctccctgtgttcccaaacat

SEQ ID NO: 252980 - DNA, 325 bp, Homo sapiens
  chr3:184071379-184071704
  hypo
ctccctgccccttcccgaagcttcgaccctgggcaatgcccctagcacctgggacccctcctggcctcaccaggggactccactagggccagcattcggcccttggtcctgtgcagtgccaaacgcaggtcccggaaggtgcagctgagggccacatggggaacatcccgcaccatgatgtcctccacacgcacccggtactgcctgggggccgagagaggcgcttggtttgtggtcagcatggggagaggtgcccagagcattgccatcccagggccacaaggagggctccagagcccatccatggggacgggagctaaggacc

SEQ ID NO: 252981 - DNA, 33 bp, Homo sapiens; identical to SEQ ID NO: 209222
  chr3:184072073-184072106
  hypo

SEQ ID NO: 252982 - DNA, 212 bp, Homo sapiens
  chr3:184133791-184134003
  hypo
atgttccgccctgacgtttccgcatggcttgcccttcatttcattcaatctccacatttccactcaaatcctacctctcagccatcactgtcaattgccctccacccgaagaccaccaggatcccacctatagtggagcacttggggtttatggctggttgcagtgaaggggaacgcacgccatggggcactgtgggcgtatcagtgagggg

SEQ ID NO: 252983 - DNA, 146 bp, Homo sapiens
  chr3:184144868-184145014
  hypo
aagggcagaattatcgatctcgtcttcccagcccgctctctgaaactaggtcccagaacgtgtcctgtggggaagtgggcaatgacaagccataggagctgacatagatcagctctaagtagcacggagcctctcatagtcaccca

SEQ ID NO: 252984 - DNA, 86 bp, Homo sapiens; identical to SEQ ID NO: 209225
  chr3:184186552-184186638
  hypo

SEQ ID NO: 252985 - DNA, 43 bp, Homo sapiens
  chr3:184200587-184200630
  hypo
atcattttggtccgcgcacacacacacacgcacgcacatacac

SEQ ID NO: 252986 - DNA, 218 bp, Homo sapiens; identical to SEQ ID NO: 209226
  chr3:184225975-184226193
  hypo

SEQ ID NO: 252987 - DNA, 101 bp, Homo sapiens
  chr3:184257024-184257125
  hypo
tcacagtctccatagaaagacgtgcaggtgcacgctggctcacacacacacacagcacatgcacacacgcagcacataacgagaactaacaactggcaaac

SEQ ID NO: 252988 - DNA, 171 bp, Homo sapiens; identical to SEQ ID NO: 209227
  chr3:184273717-184273888
  hypo

SEQ ID NO: 252989 - DNA, 42 bp, Homo sapiens
  chr3:184282049-184282091
  hypo
gggatgcctctgggaagcagcggtgcctacaagggtggtttc

SEQ ID NO: 252990 - DNA, 31 bp, Homo sapiens
  chr3:184294858-184294889
  hypo
tctgctggcccacacgcgctacacctttgag

SEQ ID NO: 252991 - DNA, 165 bp, Homo sapiens; identical to SEQ ID NO: 209229
  chr3:184295484-184295649
  hypo

SEQ ID NO: 252992 - DNA, 190 bp, Homo sapiens
  chr3:184316126-184316316
  hypo
ctcatctggaagtcagtgaccgtaatttctaccttgcatagttgctgggaagataaggcccacgagcaagcatcatgcgcgcagcacacactccacgaagagtggctgcgatgatcatgaccagacgcccagctaagcagggaaggtgacaaggaactagccgggactcggctcttcctgctgcctcagc

SEQ ID NO: 252993 - DNA, 182 bp, Homo sapiens
  chr3:184331111-184331293
  hypo
gtctggggtcctgcccgctgtgggctcacggggcacatgagccttcttgaatattaggtcaataatggcctggtgcagtgcaccagctagtaatatacacagaaatcaggttaatgacgtagaaggtggtgagtgcaaggcctgtagacagtggtgtgggagcgatgcgctctgccagtcta

SEQ ID NO: 252994 - DNA, 148 bp, Homo sapiens; identical to SEQ ID NO: 209232
  chr3:184340018-184340166
  hypo

SEQ ID NO: 252995 - DNA, 111 bp, Homo sapiens
  chr3:184347419-184347530
  hypo
agcaaggctgagcacgctcagagggaaggcggagaaggcccccgcctcctgctcacggcctactgtctccacaggcccaggctgcacgggcaggaccgcggctacatgtct

SEQ ID NO: 252996 - DNA, 88 bp, Homo sapiens
  chr3:184357510-184357598
  hypo
agcagatgcgctggcggaaggccttgtccaaagccggcactgcagcaccggtgctcgaacgagtgagacagaacgggagaattggaga

SEQ ID NO: 252997 - DNA, 45 bp, Homo sapiens; identical to SEQ ID NO: 209233
  chr3:184378704-184378749
  hypo

SEQ ID NO: 252998 - DNA, 213 bp, Homo sapiens
  chr3:184434953-184435166
  hypo
cccagtgcaaggggcgggcgagagcctggccaggagccagggccctggtctgaatggctgttgccaaggggctgccaacagcccatctcaatccccaagaggctgggcaagggcggggggcccaacccccacctcgaaggcccacctcacgccattcgcaggccgtgatcagaatgtgcaggacgcaggggctttgagcggctgaacagagcc

SEQ ID NO: 252999 - DNA, 221 bp, Homo sapiens
  chr3:184459043-184459264
  hypo
gggaccctgacagctcccatcgggagctgagaaagaagcagaggcctctttggtggaggaatcccggcaggccggcaagtcccaacaggccgatgttgggctgctgcaggcagacagtgagtcacctgggtccccgctgcttacaggacagagccagaataatgacaataataatagaggtccacggtgctgttattaacgcccacctttcctcccaggac

SEQ ID NO: 253000 - DNA, 108 bp, Homo sapiens
  chr3:184580626-184580734
  hypo
cccaaatgatgaagcgggtgtggtctcacttttgttttgttgtgtgcttgaattacagtggataaattcacgcacagttgtgctcttagacagcgtagagaagttgca

SEQ ID NO: 253001 - DNA, 326 bp, Homo sapiens; identical to SEQ ID NO: 209235
  chr3:184626082-184626408
  hypo

SEQ ID NO: 253002 - DNA, 38 bp, Homo sapiens
  chr3:184630019-184630057
  hypo
tggcgtttttctaactcgctcaggtacaacagtaaagt

SEQ ID NO: 253003 - DNA, 99 bp, Homo sapiens; identical to SEQ ID NO: 209236
  chr3:184661515-184661614
  hypo

SEQ ID NO: 253004 - DNA, 297 bp, Homo sapiens
  chr3:184784966-184785263
  hypo
atcttctacactgccggaattttctcactgttaacaagttttgcaaaggtggtttcaaatggatgcgtctatatcacacctgaagatagttacagtcaatttccagcttcacggaattctcccctgcgcctttttcttccctttgagcctccaggattgctcaatcgttcccttgggcaagacactgggctggctgcggtgaacacaaaagggagccgtacacagccctgccctcaggcacctgccggctggggaaggacacgttcagcaggaaacgctcccatagctctttaagca

SEQ ID NO: 253005 - DNA, 341 bp, Homo sapiens
  chr3:184800447-184800788
  hypo
ggctccttccctttcggtacctcctcaatctgatccaagattctctgcgaccatcacttcaccgccttcaaatctcccagtgaaattaaggcggggtcacaattcatgacaccagatgctacatagaaagtaagtcaggatacaaaagaaaactgtttataataaaaagaatgtcttagttgtaagacggagagaagctaatcagcataccactgaactgctacggttgttggttggagcggggcggggtgggtagaaaatatcaacagcattggaaaaaaggatccaccagacaaaggtacaaaagctcggcgtgggtccgaggctgtggcttcctgtct

SEQ ID NO: 253006 - DNA, 63 bp, Homo sapiens; identical to SEQ ID NO: 209239
  chr3:184800818-184800881
  hypo

SEQ ID NO: 253007 - DNA, 93 bp, Homo sapiens; identical to SEQ ID NO: 209240
  chr3:184833596-184833689
  hypo

SEQ ID NO: 253008 - DNA, 92 bp, Homo sapiens; identical to SEQ ID NO: 209241
  chr3:184833749-184833841
  hypo

SEQ ID NO: 253009 - DNA, 130 bp, Homo sapiens
  chr3:184880628-184880758
  hypo
gatagtgatgcaataatggccgtcatctccactgaaggaggcgagactccagcacacagcgaatgtcctcgccattctattcaaagagaagagtcatcctggaacagccgtgctggaactctcagaactc

SEQ ID NO: 253010 - DNA, 87 bp, Homo sapiens
  chr3:185001579-185001666
  hypo
agggaggagttggaccgttgtaaataaactgctgttgtagcactgactgttcttaatgctttcttttaagcaaagtaaacttacttt

SEQ ID NO: 253011 - DNA, 45 bp, Homo sapiens
  chr3:185055821-185055866
  hypo
catgaaaagcaatggccagtcgcagcggctcacacctgtaatccc

SEQ ID NO: 253012 - DNA, 97 bp, Homo sapiens
  chr3:185061154-185061251
  hypo
ttctgtacctaaaaaggcaacggagtgccttgtttttatttttttcctcctctgtgctgcaaacggacgactctcagcagggtatgtttatttattt

SEQ ID NO: 253013 - DNA, 153 bp, Homo sapiens
  chr3:185069789-185069942
  hypo
gcttcatctctaacaagacccggaagttgcaaacatcactcactcactcacatctcattgactagaacttagtcatgtggtcacgtgtacagccaggaaagtacagaactatttagcagagtggccacgtacccacctaaaactttaaaagta

SEQ ID NO: 253014 - DNA, 142 bp, Homo sapiens; identical to SEQ ID NO: 209243
  chr3:185191405-185191547
  hypo

SEQ ID NO: 253015 - DNA, 278 bp, Homo sapiens
  chr3:185245476-185245754
  hypo
ctcaggtgggtgagcgctcacactcccgtcccacttggccaggactcctttccatggctctgcagcttgttcccacagtggagacggttaccctggctgtgcccctgagaatggcatccagactccatcaggggcatgtgtcatgcagagctcaacagtagggaacgtacacgtgtatgaggttcaaggggtggggataaacgggcggtccccaggaaaaaagcaccaaagggcacattaaagagaaaagagcagcctgggcgcagtggctcacacct

SEQ ID NO: 253016 - DNA, 33 bp, Homo sapiens; identical to SEQ ID NO: 209244
  chr3:185266642-185266675
  hypo

SEQ ID NO: 253017 - DNA, 76 bp, Homo sapiens
  chr3:185270832-185270908
  hypo
tgtatttcttcctaccgagaatttctacagctctaataggtcttttttaaaaaagaaaaacaggccggcacggtgg

SEQ ID NO: 253018 - DNA, 90 bp, Homo sapiens
  chr3:185271291-185271381
  hypo
taatttaattccctttctggcgagagtgcttgcaacactaactcaggcttctagtggtctgatgagcttaaaaatcaattaataagccgg

SEQ ID NO: 253019 - DNA, 360 bp, Homo sapiens
  chr3:185277645-185278005
  hypo
cacatgtaacccaaaacttaaagtatagttaaaaaataaataagagctgccccccgccccgctcagctggaattgtctgagaacccatttcgtggcattcattgtaaactataagctctgcaagtggtgtccccgacatgatcgccttaaagttacgtgtgaaggaggagagctcatcaattttcggtgaatctccacctgaaaagaattcagaagatttaaagggagagattcctgactcctatcaggaggacacgacccacacgtaaaatatcaggtgttgagttatcatgggtcaggaaatgaccaaagaacagaaagttttttttgtttgtttgtttgttttgatatggagtctcg

SEQ ID NO: 253020 - DNA, 104 bp, Homo sapiens
  chr3:185303180-185303284
  hypo
ctagaagtgtgacattggaattatagagggagagtaacgagactcattacttactagcccagggtaggagacattagtgggccgcaggtttcatccttaaattt

SEQ ID NO: 253021 - DNA, 342 bp, Homo sapiens
  chr3:185317867-185318209
  hypo
agccactgcgcccagcccaaagatgatattactttgaagccttttatttcatttaaaaagttaatataaattgaatttcatcatctgtttggaatatttgtttagaattgtttaccgttaagattgacacatatgaaggatggtagatttgtgcctgagatgctggcactactgtgtttctgtgagttttgtgtagtctagtcagagaagcccaggtattcctagggcaggtttcttgtgtaaagaggtccataatcggttatctgcaacccctgggagccagatgtgtttaggaattcagaatttttcatattttaggtatgttaccggccaaacatacgg

SEQ ID NO: 253022 - DNA, 80 bp, Homo sapiens; identical to SEQ ID NO: 209249
  chr3:185352337-185352417
  hypo

SEQ ID NO: 253023 - DNA, 403 bp, Homo sapiens; identical to SEQ ID NO: 209250
  chr3:185360805-185361208
  hypo

SEQ ID NO: 253024 - DNA, 115 bp, Homo sapiens
  chr3:185362626-185362741
  hypo
cacaggtgatccagaactgccgtgagtgtccttccgacgagatttccctctgggtgaattttgtgcgggtggcctcaaagctcctctctacaccgtgagacctcccaaagacttt

SEQ ID NO: 253025 - DNA, 284 bp, Homo sapiens
  chr3:185363069-185363353
  hypo
cctgcagaagccctggggggcgggaggcggggctcggtggttctggcaaacctggctgaccttccccgcccctcctcggcccctggggttctcagggcctcggcagagtccctggccgcctccgcagacttctcattcctcagatggtctttggtttgctcccgatctggctggctgcgtttggtctcattctgtcaggtgttggaagggctacattcatccgttgttttgctggtgcctgtgggagcctcacttgctgcgctgtgaggcgactccctgagggt

SEQ ID NO: 253026 - DNA, 104 bp, Homo sapiens; identical to SEQ ID NO: 209253
  chr3:185363652-185363756
  hypo

SEQ ID NO: 253027 - DNA, 196 bp, Homo sapiens; identical to SEQ ID NO: 209254
  chr3:185365780-185365976
  hypo

SEQ ID NO: 253028 - DNA, 73 bp, Homo sapiens
  chr3:185373822-185373895
  hypo
tctgctgaacaagacggggattggatgagatggtccctcaagccccttttagttgaaacggtcctttctcctg

SEQ ID NO: 253029 - DNA, 505 bp, Homo sapiens
  chr3:185374974-185375479
  hypo
tctgcatggtgtggcgctgcctgggactgagagggaacaagggccgtgggatgagaggaggtggtagaagggccacagggccgtcaggagcagcctcaccttgatagaggctccggcgaatctcgccagctgtttgatgtgtgcccccttcttcccgatgatggcgcccacagcctgggttgggatgaagagattcacaatctcctgctctggatactgggagggcgagacaagaaagaagacatcattccaaccaggctttctcctccaggcactcaacaggtaccaagcaccttaccatgaaccccatggtgggaaggccccgccacccaaggaaatggccaaaatggtgcacaggatccttctgcggcctgcggctctgcaggtgtgaagcctgaggaagggacctgagcacaggcagcgctagtgataatcaagggcatcctcctcttgagcttctcaatttgttggattccaaaagctgtctgatcgcaggttttctgtc

SEQ ID NO: 253030 - DNA, 158 bp, Homo sapiens
  chr3:185376173-185376331
  hypo
gctggagaagtatccggagtgggtctgcagcatgagagaaagagtcagtgggcgggtgctctcagggactgtcactggcctcagggaggccagattcccaacatgcgacacaggctctctgtggcatcagctggctccactgtcgtgtctacacgcct

SEQ ID NO: 253031 - DNA, 257 bp, Homo sapiens; identical to SEQ ID NO: 209256
  chr3:185407215-185407472
  hypo

SEQ ID NO: 253032 - DNA, 110 bp, Homo sapiens
  chr3:185441712-185441822
  hypo
ggaggcaaccgaagcgggtaagcaggttcggtctgggcaatcccagggaagccgaaggagacaaatccagcgccagactatgcagagacaaatttcggtaactctacgtg

SEQ ID NO: 253033 - DNA, 266 bp, Homo sapiens
  chr3:185445847-185446113
  hypo
gggaggggcacttccgttacgtatacctgaactatgtttgcgattcacacaaaataaagaattgaccaggaccaaccccagcctatgagaggcaaagttactgctgcccgctttaccccaccctagagcgccctctgatccacactctcacactgccttccagctttcccacggcgccagacccttgctgctcctgggccccttccccttgctcccttcatcaggcgctctccgctcctccagcccatcagcgccttgactcgggt

SEQ ID NO: 253034 - DNA, 34 bp, Homo sapiens; identical to SEQ ID NO: 209258
  chr3:185551485-185551519
  hypo

SEQ ID NO: 253035 - DNA, 180 bp, Homo sapiens
  chr3:185551759-185551939
  hypo
ggacacaagagggaaactatgtctcaaaaaaaaaaaaaaaaagaaagaaagaaaagtctattcccagtacaatgataaaaaccagtaaataaacattgatactgtaatctgcagactcttcaaatttcaaattttatgaattgtgtcaatattattgcaaaagaaaatcccaggctgggt

SEQ ID NO: 253036 - DNA, 32 bp, Homo sapiens
  chr3:185565288-185565320
  hypo
agtgttgggattacaggcgtgagccatggcgc

SEQ ID NO: 253037 - DNA, 38 bp, Homo sapiens
  chr3:185630395-185630433
  hypo
atttttaaaaacaatctcttcggccgggcccagtggct

SEQ ID NO: 253038 - DNA, 37 bp, Homo sapiens; identical to SEQ ID NO: 209260
  chr3:185630673-185630710
  hypo

SEQ ID NO: 253039 - DNA, 180 bp, Homo sapiens
  chr3:185643232-185643412
  hypo
aaccagtttttcatcttacccgattcccaacatgacgcctgcgagtagacatgggagaatggctgtggctgtgccgtctacgataatctcgactgtaagacctgctacgtgatcgtctatgggagcgggagcgagaccgtgaccgggtataatgccttcgggagcttcttctggatctag

SEQ ID NO: 253040 - DNA, 80 bp, Homo sapiens; identical to SEQ ID NO: 209262
  chr3:185656908-185656988
  hypo

SEQ ID NO: 253041 - DNA, 34 bp, Homo sapiens
  chr3:185667605-185667639
  hypo
ctgagcccaagccaagccatcgcatcccccgtga

SEQ ID NO: 253042 - DNA, 95 bp, Homo sapiens; identical to SEQ ID NO: 209263
  chr3:185668397-185668492
  hypo

SEQ ID NO: 253043 - DNA, 80 bp, Homo sapiens; identical to SEQ ID NO: 209264
  chr3:185681620-185681700
  hypo

SEQ ID NO: 253044 - DNA, 43 bp, Homo sapiens; identical to SEQ ID NO: 209268
  chr3:186142830-186142873
  hypo

SEQ ID NO: 253045 - DNA, 36 bp, Homo sapiens; identical to SEQ ID NO: 209269
  chr3:186271905-186271941
  hypo

SEQ ID NO: 253046 - DNA, 34 bp, Homo sapiens
  chr3:186309945-186309979
  hypo
aattaaattatgacaatggccgggcgcggtggct

SEQ ID NO: 253047 - DNA, 191 bp, Homo sapiens; identical to SEQ ID NO: 209270
  chr3:186409540-186409731
  hypo

SEQ ID NO: 253048 - DNA, 99 bp, Homo sapiens; identical to SEQ ID NO: 209271
  chr3:186429029-186429128
  hypo

SEQ ID NO: 253049 - DNA, 109 bp, Homo sapiens
  chr3:186442810-186442919
  hypo
tagggcagtgtatgcgaatgctgattgcgatcattaatgctgtgtttttgtctgctctttgttaagccgagggccctgtggtgacagcccagtacgactgcctcggctg

SEQ ID NO: 253050 - DNA, 224 bp, Homo sapiens
  chr3:186471842-186472066
  hypo
gtctttccattatccgaaattcacaaccatgaacctggctgtttgttgttggtgctgactcgcaggcatggtaagtcgtttccatgtatgtctggagtataagttcatcggtagcagggcttggtttttcctgagagaattcactgtgagaaagagtcttggcacgtctgttctctgttgacacttgccgagagtcttggaacgtcactgggcttgtacacatt

SEQ ID NO: 253051 - DNA, 83 bp, Homo sapiens
  chr3:186530263-186530346
  hypo
agagagagggagagggagcaagaaatctcttttcttaataaattacccggcctgacagtctgttatagcgacaaaatggacaa

SEQ ID NO: 253052 - DNA, 167 bp, Homo sapiens; identical to SEQ ID NO: 209273
  chr3:186697396-186697563
  hypo

SEQ ID NO: 253053 - DNA, 149 bp, Homo sapiens
  chr3:186713655-186713804
  hypo
aaatgcttttaatcaataacttcccacgggcggggacactgatttgaaatataatctttgggtgaggtgtgtggctgccctgtctctgtataggtagacacaggcccacaggtgcagtggccatattatcggtgcgtgtttactcccat

SEQ ID NO: 253054 - DNA, 202 bp, Homo sapiens; identical to SEQ ID NO: 209274
  chr3:186783728-186783930
  hypo

SEQ ID NO: 253055 - DNA, 50 bp, Homo sapiens; identical to SEQ ID NO: 209275
  chr3:186938675-186938725
  hypo

SEQ ID NO: 253056 - DNA, 165 bp, Homo sapiens
  chr3:187242734-187242899
  hypo
acttaataagtgctcgagtaaatacgcgtagaatgtgagtgaacagagatcttttgtataaaagatcttcctagaaactttgaggggtatacaatggaagcaaacatgcctttcaaggagaacatagtctattgacagaaacagaaaccacctggtcttggtgct

SEQ ID NO: 253057 - DNA, 143 bp, Homo sapiens
  chr3:187281941-187282084
  hypo
gaggttgcagtgagacaagatcacaccattccagtccagactaggcaacgaaagtgaaactccatctcgagaagaaaaaatgaacacatgatttggtagcggaaaggacaataagatgatgcgaagactaggaaactagatca

SEQ ID NO: 253058 - DNA, 375 bp, Homo sapiens; identical to SEQ ID NO: 209276
  chr3:187443048-187443423
  hypo

SEQ ID NO: 253059 - DNA, 150 bp, Homo sapiens
  chr3:187870445-187870595
  hypo
gaagatgcaatagccgggtgagagactgctttcattatgtgctaacgtgagggattactttagatattaataggagagaagtgcaaggaaaggaagtctcagggtatggaatgctttcctggccatggctgctgcgcgtcataatcccct

SEQ ID NO: 253060 - DNA, 171 bp, Homo sapiens
  chr3:187930467-187930638
  hypo
ccttgttctggaagctgaggcgagaatgtctcagttctgttcccttcaggcttcgagaccaccgccttgctgtgtcccgtagtggactgagggcctgcaagagggagtgagggctagtggagggccagctgcctgtgggggctggacatcgtgtgagtacatcattactgc

SEQ ID NO: 253061 - DNA, 83 bp, Homo sapiens
  chr3:187984522-187984605
  hypo
gagttattgccatgcgggtggctctccaagcattccagttgcatagctcttccagaaatatttcttgacgcacttatttagca

SEQ ID NO: 253062 - DNA, 164 bp, Homo sapiens; identical to SEQ ID NO: 209280
  chr3:188070251-188070415
  hypo

SEQ ID NO: 253063 - DNA, 38 bp, Homo sapiens
  chr3:188246127-188246165
  hypo
cagctttttttttaaacggagctttcatttaaatcttt

SEQ ID NO: 253064 - DNA, 94 bp, Homo sapiens; identical to SEQ ID NO: 209281
  chr3:188353741-188353835
  hypo

SEQ ID NO: 253065 - DNA, 69 bp, Homo sapiens
  chr3:188365074-188365143
  hypo
ggcctggcttgatccggtaaagagcgtctgctgcggtgcctgatggaaagtgcccgcttaattgggaga

SEQ ID NO: 253066 - DNA, 32 bp, Homo sapiens
  chr3:189160152-189160184
  hypo
ttgacattttaaaaagttcccggctgggcacc

SEQ ID NO: 253067 - DNA, 202 bp, Homo sapiens
  chr3:189557797-189557999
  hypo
gtctacttcacagcttactgcgatgatcatataagacataaagaacttagcgaagtgcctagactgtagatcacagtacgtgttagctttttgtgttttatacatcaagcgtaagtcttattttttacatctgtcatattaccctttccccagtattcagagtatttgagtgtatacgtacgggtggtaagtgttgtttttc

SEQ ID NO: 253068 - DNA, 132 bp, Homo sapiens
  chr3:189612057-189612189
  hypo
caccggcagctccacgaattctcctccccttctcatctcctgcggaccccaagcagtgcctctacagtcagtgtgggctccagtgagacccggggtgagcgtgttattgatgctgtgcgattcaccctccgc

SEQ ID NO: 253069 - DNA, 93 bp, Homo sapiens; identical to SEQ ID NO: 209282
  chr3:189618732-189618825
  hypo

SEQ ID NO: 253070 - DNA, 297 bp, Homo sapiens; identical to SEQ ID NO: 209283
  chr3:189900376-189900673
  hypo

SEQ ID NO: 253071 - DNA, 80 bp, Homo sapiens
  chr3:190105540-190105620
  hypo
cagactcccttgagcgagcacttgtttagcatagtttcaccagtggcctgtctgtctaaagtagtcggcgaatattaaaa

SEQ ID NO: 253072 - DNA, 161 bp, Homo sapiens
  chr3:190278465-190278626
  hypo
tagtttcagcctgtcacctgcgggctaggtgagagaattcagtggtcagagtgatgcagataaggagatgctaatgattaccaagtctagagaatgcagacgataaaaagtttcatatgcggaagtagatgttaaggtgctgagcacgtgaagacccatct

SEQ ID NO: 253073 - DNA, 93 bp, Homo sapiens
  chr3:190595741-190595834
  hypo
tgtggaccaggtgttggcctcgaactcgcactctcgaaccctcgcctccctgaaggcccgagggcaggcgcaaccggccggagccacaatggc

SEQ ID NO: 253074 - DNA, 37 bp, Homo sapiens
  chr3:192595829-192595866
  hypo
aggaacggcccgtacgaaacatcttcaaacaattcct

SEQ ID NO: 253075 - DNA, 31 bp, Homo sapiens
  chr3:192670616-192670647
  hypo
actcaaaaccagcagcaggccgggcgcggtg

SEQ ID NO: 253076 - DNA, 87 bp, Homo sapiens; identical to SEQ ID NO: 209285
  chr3:193235538-193235625
  hypo

SEQ ID NO: 253077 - DNA, 378 bp, Homo sapiens
  chr3:193303430-193303808
  hypo
ctgttagattcattcgtgttgttacatgtatccgcaggtcattctgtttgttgttgaggagtatttcattgtgtaaatttcctttcattttctcactgctgcacgtttcatttggctccagttttcaattaccgtgaaaaagtcgctatgaacatgtttgtacaagactttccatgaacacgtttttacttctcctagataaatccctgagagtggaatggttagaccaaaggggaagtgtatatttaactttataagaaaatgccaaatatttttccaaagtggtcgtgccattttacattcctgccatcggttattgacagttctggttgctccacatcctcgacaaaattttcatttctccgatgactaataaca

SEQ ID NO: 253078 - DNA, 147 bp, Homo sapiens
  chr3:193314534-193314681
  hypo
aatagtccccttggcgctctgtatactctcaagtcttaaatgttttgtatgcagctgtacgttgacagttgaatggtctcgctccaagtggatcagcaagaacataaagaatcatttaactggtacaggctgcggcttgtgaattcc

SEQ ID NO: 253079 - DNA, 175 bp, Homo sapiens; identical to SEQ ID NO: 209286
  chr3:193391748-193391923
  hypo

SEQ ID NO: 253080 - DNA, 219 bp, Homo sapiens; identical to SEQ ID NO: 209287
  chr3:193392562-193392781
  hypo

SEQ ID NO: 253081 - DNA, 413 bp, Homo sapiens
  chr3:193419604-193420017
  hypo
tctgagagtgtaattttgttcgcgtcaaaagcattgttttcttatcctgttggtggagtgaggcatttggacctggatgctctccccattgggcgccccccgttggtacgtttcgccagctgtgtactctatgattggctggccttttgatgtgcaggtactacaagttggtcacaaacttgtgtacaatgggcctgttctggttcatgtgaaaatcaacatccttttttgtgttaccgggtgacaggatgctacaatactattagcatttgcaaagagtgtgctctgtccaagggtgtaaccacaggtcgtgtgctgctcactttgtgtttctctattatgtgagagacacaaagaagctgagggctcgcaaaggcctgtcaaatcttgtaatgtggcgctcgacccccaaa

SEQ ID NO: 253082 - DNA, 87 bp, Homo sapiens; identical to SEQ ID NO: 209290
  chr3:193428478-193428565
  hypo

SEQ ID NO: 253083 - DNA, 67 bp, Homo sapiens; identical to SEQ ID NO: 209291
  chr3:193428950-193429017
  hypo

SEQ ID NO: 253084 - DNA, 45 bp, Homo sapiens; identical to SEQ ID NO: 209292
  chr3:193438390-193438435
  hypo

SEQ ID NO: 253085 - DNA, 374 bp, Homo sapiens; identical to SEQ ID NO: 209293
  chr3:193455063-193455437
  hypo

SEQ ID NO: 253086 - DNA, 99 bp, Homo sapiens
  chr3:193489691-193489790
  hypo
gcatcagaggagaacggctgtgagaagcagtgggcgggaacccatccttggctaggtttacagtgctgttgaaggggctgatggcggctactgtttgtt

SEQ ID NO: 253087 - DNA, 251 bp, Homo sapiens; identical to SEQ ID NO: 209294
  chr3:193490130-193490381
  hypo

SEQ ID NO: 253088 - DNA, 35 bp, Homo sapiens; identical to SEQ ID NO: 209295
  chr3:193503310-193503345
  hypo

SEQ ID NO: 253089 - DNA, 208 bp, Homo sapiens; identical to SEQ ID NO: 209296
  chr3:193505272-193505480
  hypo

SEQ ID NO: 253090 - DNA, 102 bp, Homo sapiens
  chr3:193509945-193510047
  hypo
taggtgtgtgtgtggcggggtgtggtggggggcggtaaccatggaggcattggaccagttgttcaaaagggaccttctcagttctaggtatttgtttggttt

SEQ ID NO: 253091 - DNA, 160 bp, Homo sapiens
  chr3:193513920-193514080
  hypo
ttacaggcatgagccaccccgcccggctgaccctgaccctctttactccagccacgctgctcttcttccatccccccatactcacggggtccctcctctcgtagggcctttgtacattcgactcccgccagcaaatcccgttcttcccctcttcacctgg

SEQ ID NO: 253092 - DNA, 152 bp, Homo sapiens
  chr3:193548632-193548784
  hypo
ctgatgaaagctgctgaaaccggcacggagcacacatgaaaaggacgaaagagaaggcgcaaggctgactgccaggtggcaggcgtgatgggacttgtctcccacttggggagatgaagacaaaaggcagcgtcatcccccagaatgagtga

SEQ ID NO: 253093 - DNA, 390 bp, Homo sapiens; identical to SEQ ID NO: 209297
  chr3:193586965-193587355
  hypo

SEQ ID NO: 253094 - DNA, 202 bp, Homo sapiens
  chr3:193588155-193588357
  hypo
tttatgccaggtcccgcatgaacagtggtagatctagaactcaggtgctacgctgtcggcctgctgttggtctgcggagctactatatagctgttgcgtgactcagggaacacctggggcgtgactgacaggtggagaagggtcaaggtggttggagcccaagcgtggataagacagccccggagggagaggccagcctggg

SEQ ID NO: 253095 - DNA, 105 bp, Homo sapiens
  chr3:193589776-193589881
  hypo
aaagtatatatatatataccagtcacaacaacagcaatgataaaggctaatgattgctgagggtttgctatgtgcaagcgcgttttttcacgtaatcctcacagt

SEQ ID NO: 253096 - DNA, 147 bp, Homo sapiens; identical to SEQ ID NO: 209298
  chr3:193659935-193660082
  hypo

SEQ ID NO: 253097 - DNA, 55 bp, Homo sapiens
  chr3:193696015-193696070
  hypo
aaaacctgcagaaacatgtccgaagccatcccacgccatgaacaggaagcctttg

SEQ ID NO: 253098 - DNA, 169 bp, Homo sapiens; identical to SEQ ID NO: 209299
  chr3:193711554-193711723
  hypo

SEQ ID NO: 253099 - DNA, 94 bp, Homo sapiens
  chr3:193903174-193903268
  hypo
tcaaagcgctgaggcgcgatgaatgagcaaccagccctttccctgcctcttgccccagagatggcactgcaggcggtaccggtttccagcactc

SEQ ID NO: 253100 - DNA, 203 bp, Homo sapiens
  chr3:193922615-193922818
  hypo
cactgtccgaaactcgcctggacaagtccaacttcattcttttcagtacgactagctcctgtgcgctgcagaagactcgggctgatctgaaagcgcctctcctattcgagactctcaggttttaagtaggtcttccgcacctgcagatgaaaaaagatgtggctattattttcctcgattacgttgacattgcctgaaaatga

SEQ ID NO: 253101 - DNA, 111 bp, Homo sapiens
  chr3:193940699-193940810
  hypo
ggcttctgagcatcccgtaccctcttccagacaacctagtgcaatcactgtggatcttaggtagctgaggccgcaggacacagaaggggtgtttgccgctttcactaagct

SEQ ID NO: 253102 - DNA, 331 bp, Homo sapiens; identical to SEQ ID NO: 209307
  chr3:193969963-193970294
  hypo

SEQ ID NO: 253103 - DNA, 92 bp, Homo sapiens; identical to SEQ ID NO: 209308
  chr3:194012769-194012861
  hypo

SEQ ID NO: 253104 - DNA, 167 bp, Homo sapiens
  chr3:194048751-194048918
  hypo
cacacaaccacacaacggtgtggctgaagccagcagaaatgaaaagtcctctggtacctccccttcaaacagctcacactcatgcgggtcactgtggcacggcgccctcacacgcgcatccgcagagcgcacctgtcccagcgtggccaagaccgcctctttcaccc

SEQ ID NO: 253105 - DNA, 392 bp, Homo sapiens
  chr3:194048948-194049340
  hypo
agtcacccctggataactgaggacttgcctgtcaagtatgaaacatttagcacgtacagtcctttgagtggaattagagtggaagagtgtaactcagcgtgtaagagttgcctgctgctgctttgaacagagggtaattgcagcagatgccttcagcccctgctcttttcagcagccactgtacagggcggttccaccccatctcccacctcccggcccagctctctgatgtctctgcccggtggcgttccccgatgcccctttgcctgagcgccgaagcgtggggagtggaagctggcggtgggagccggtggaggcatgcgcgcctcctgtgcttcaggaaggcagccctggagaccttctggatgcttcccaggaaggccccacagcag

SEQ ID NO: 253106 - DNA, 93 bp, Homo sapiens
  chr3:194058380-194058473
  hypo
agtttagcaactgagccgcacgtacacagagaacctgaaagacctgagtgtgaatcacagaaatgccagcgaaaacagcgtaggtgtcattct

SEQ ID NO: 253107 - DNA, 171 bp, Homo sapiens; identical to SEQ ID NO: 209310
  chr3:194061694-194061865
  hypo

SEQ ID NO: 253108 - DNA, 202 bp, Homo sapiens; identical to SEQ ID NO: 209311
  chr3:194066805-194067007
  hypo

SEQ ID NO: 253109 - DNA, 82 bp, Homo sapiens
  chr3:194078512-194078594
  hypo
attagaaagacactagattccgttacacttcgttttcaattaaaggatctcatctctgagcgatttcacttcccctaagtga

SEQ ID NO: 253110 - DNA, 405 bp, Homo sapiens
  chr3:194080454-194080859
  hypo
gcaggagccagttgcggagcggaaggatgtctgagtcacacctccagggattgtcatacagccgcagctcacacagtttccccaggtgatcgaagatgccgaggggcaagttctccagctggttgttctgcagctggatggccatgaggccattgacgttggcgaagatattccctgggagctgtctgaggcggttgttctgcagggagatgttctgcaggttggccaacatgcggaagacgttcccgtccaggtcctgcagtgcgttggtgtggagggacagctcccgaagctccgttagcccgttgaaggcacccggggagatgaagctgatctgattgcggctaagaatcaggacctgcaactggcggaggttgctgaagacattgtcgggtagagaagaga

SEQ ID NO: 253111 - DNA, 148 bp, Homo sapiens
  chr3:194105561-194105709
  hypo
ggccgaccgcagaccgtgtgaggtagaaggagcatttcccagcctcatgcctgtctccatcaaatgctggaaatccttctggctgtggttgctgggtctcggcctgagctcctccccgggtgggagctcatggcgcacatggtgacca

SEQ ID NO: 253112 - DNA, 212 bp, Homo sapiens
  chr3:194128258-194128470
  hypo
ctccctctcctccctggccccgctgagagcacggtaaacgtgactcaccgctctcaatgttaaaggtctgctagcttaagcctgtcaacaaaacacaatcagctgcactgctaccaagaatttaaaggcaaaaaaggtggacaaaagtaagctacgtggcattctggggtggggacggggaaagtctgaagattactcgcctagtagccttt

SEQ ID NO: 253113 - DNA, 111 bp, Homo sapiens
  chr3:194166905-194167016
  hypo
atatagcatgtcctcaaatacgattgttttgtccgtctttttttataacacgatgggtgccagtggtggggagagctgaggcccagccgcgaccactatctacatggagtt

SEQ ID NO: 253114 - DNA, 67 bp, Homo sapiens
  chr3:194208004-194208071
  hypo
catcccctttgggctatgacaacatcatagtccaatctcccattttatgaacagggaaactgaggct

SEQ ID NO: 253115 - DNA, 147 bp, Homo sapiens
  chr3:194228176-194228323
  hypo
cctagttttcagcaccgaagcgaagctctcaagactttgtcaaaggtcaggcagttaacttaatggccgcaggaaaagcaaagtccaggtctcccctctgcttctgcaaagaaccggttctgttggtccagtcgcttgagttcctac

SEQ ID NO: 253116 - DNA, 240 bp, Homo sapiens; identical to SEQ ID NO: 209315
  chr3:194301031-194301271
  hypo

SEQ ID NO: 253117 - DNA, 147 bp, Homo sapiens
  chr3:194316644-194316791
  hypo
cacccggctgatggtctgtatttcttacctgctatatctgacagccctcctcaggatcatgaaaggcttcctggaggaagggggatttagacaggacagcgaaaggtaggagaagacagataggcagagaaacgcagagaagagaaa

SEQ ID NO: 253118 - DNA, 217 bp, Homo sapiens
  chr3:194324945-194325162
  hypo
aaggagcacccagcaagtgtcggcgaacgatggcacccacgcacccgcccagcaggcaacagccgtgtacctccaggtcggagttgatggaggagacctcagaggagctgccggaagacacccgggcccggatgacctgaacgggagggtacgacggggggtcctgcagggacgcatctccggcgctcgtctgcccgtcacctggcagcctggtggc

SEQ ID NO: 253119 - DNA, 36 bp, Homo sapiens
  chr3:194335590-194335626
  hypo
acatttgtataattgcgaaaccggaggatcctatgg

SEQ ID NO: 253120 - DNA, 34 bp, Homo sapiens
  chr3:194341460-194341494
  hypo
ttgaagtccctaggccgggcgtggtggctcaaac

SEQ ID NO: 253121 - DNA, 219 bp, Homo sapiens; identical to SEQ ID NO: 209317
  chr3:194365661-194365880
  hypo

SEQ ID NO: 253122 - DNA, 240 bp, Homo sapiens
  chr3:194374239-194374479
  hypo
ctcacaaaaaaaaaaaaaagatgaacaggggacaagcaaagttcgacggagatggaaaggtgaacacagggaggagacaacgaaagcctttcagttcagtgccgtgacagacaaccatcgagggtggcgccctcctggaggggagaattggaccttcccttcactttttactttatatgtttctgtactatttgaactctgtacaaagaacatgtattacttttgtaatttaaaataact

SEQ ID NO: 253123 - DNA, 76 bp, Homo sapiens
  chr3:194558268-194558344
  hypo
gatgggagcatgccccgccagggcagggggcctgggaatccgtggagtgggagctggtcccgcgtgtaggtggttg

SEQ ID NO: 253124 - DNA, 186 bp, Homo sapiens; identical to SEQ ID NO: 209320
  chr3:194596888-194597074
  hypo

SEQ ID NO: 253125 - DNA, 184 bp, Homo sapiens
  chr3:194669150-194669334
  hypo
atgctctaggagaggcggaaggaaacgagtaaacaagaatattatgctgttttgcttgttgttgctgcattcggcaagatattacaagaaaaacaatgagctcagaaaagaactgctcaattcacaagaagaaatgaaacagaatggagagaatcagaaattcgggacacgcagcaatggggaa

SEQ ID NO: 253126 - DNA, 63 bp, Homo sapiens; identical to SEQ ID NO: 209321
  chr3:194766334-194766397
  hypo

SEQ ID NO: 253127 - DNA, 42 bp, Homo sapiens
  chr3:194778173-194778215
  hypo
tccagcgtttccaccgagccatgttttcgcgtcggcttcagg

SEQ ID NO: 253128 - DNA, 48 bp, Homo sapiens
  chr3:194783225-194783273
  hypo
agcctccttccacagcggcatatgccactcatgcggaggcagctctga

SEQ ID NO: 253129 - DNA, 324 bp, Homo sapiens
  chr3:194786345-194786669
  hypo
gtgtgatctgttggcgggccggggtgtgatctgttggcgggccggggtgtgatctgtcggcgctctgtgatctgtcagcggcctggggtgtgatctctcagcgggctggggtgcctgtgcggtgatctgtttgcgggctggggtgtgagctgtcggcggtctggggtgtgatctgtcggcggtctggggtgtgatctgtcggcggtctggggtgtgatctgtcagcgggctggggtgcctgtgcagtgatctgtcggggggctgaggtgtgatctgtgggcgggctggggtgactctgcagtgatctgtcggcaggctggggtg

SEQ ID NO: 253130 - DNA, 84 bp, Homo sapiens; identical to SEQ ID NO: 209322
  chr3:194790286-194790370
  hypo

SEQ ID NO: 253131 - DNA, 158 bp, Homo sapiens
  chr3:194790635-194790793
  hypo
gtccccgaggtggccgcggaagtggtacttgtcggccagctgctgcacctgcgccggctccagcaggcggctgtagagcggggactggcgcatggcctccaggttcagcaacatcaccccgctgttgaagcccggcagcccctcggggggcgggcccc

SEQ ID NO: 253132 - DNA, 52 bp, Homo sapiens
  chr3:194793570-194793622
  hypo
gtgtctgctggttctcgtagaggaatcgcatcagcctcggggtagaaggaat

SEQ ID NO: 253133 - DNA, 38 bp, Homo sapiens; identical to SEQ ID NO: 209323
  chr3:194799662-194799700
  hypo

SEQ ID NO: 253134 - DNA, 69 bp, Homo sapiens; identical to SEQ ID NO: 209324
  chr3:194818059-194818128
  hypo

SEQ ID NO: 253135 - DNA, 163 bp, Homo sapiens
  chr3:194825299-194825462
  hypo
gcagtggggacgaggcggggacccgggagatccagacagcgtggcacgaccacctgagagaggctgctgctgttcagctgaggccaggggttctggagaaaaggcaggcctagtatcatcctgacttctgagttttaaaggaaagctacggaataccttgatt

SEQ ID NO: 253136 - DNA, 124 bp, Homo sapiens
  chr3:194832848-194832972
  hypo
tattcttaaaacccacgagaccatttctagccgtcaggagggcccatgaactaggaaactgaggcttgctgacatctcagcgacacctgggcaaaagcctactggaatccgggtcaggttctgt

SEQ ID NO: 253137 - DNA, 601 bp, Homo sapiens
  chr3:194835412-194836013
  hypo
gcacttgatgtagaaggcagcgcggctttgcccacattccctgaacctctgtcaagcttgtgacaagctttcgtcaatcagacgaaactaagtgaaaaagcaatcgcttttggagcacgcaggaaggtagcagtcttacaggcttagaaaaccagggaggagtgaagccgctcagtggtctccctgccggtgcaaggaggctgccacctgcagaaggtgctaacgccaagtgtgggaagacaccggggtcggcctgggcgcagtcactcctgggtggaggctgagcttgggagtgtgaatgccgcaggccccacccgttccactcgtcaaaatcgtacctagctgaggttgcacagttggctcctcccaaacctcccgttgatcctcctcctattgagaggttggaacgagggaaactaagcttcccagatgcccaaacggcgagagctcgggacgtgaatcaggtgctgcgactcgggaactagtgtgctcacatgagacgtgcccggtgagaatgtggcttctggctgtcactgctggttagacggtcccagtcaccttgaacccaggtcgtgctgccgcttcctgagtaccagaaaag

SEQ ID NO: 253138 - DNA, 504 bp, Homo sapiens; identical to SEQ ID NO: 209325
  chr3:194851494-194851998
  hypo

SEQ ID NO: 253139 - DNA, 166 bp, Homo sapiens; identical to SEQ ID NO: 209326
  chr3:194866034-194866200
  hypo

SEQ ID NO: 253140 - DNA, 180 bp, Homo sapiens; identical to SEQ ID NO: 209327
  chr3:194927046-194927226
  hypo

SEQ ID NO: 253141 - DNA, 152 bp, Homo sapiens; identical to SEQ ID NO: 209328
  chr3:194935163-194935315
  hypo

SEQ ID NO: 253142 - DNA, 187 bp, Homo sapiens; identical to SEQ ID NO: 209330
  chr3:195012971-195013158
  hypo

SEQ ID NO: 253143 - DNA, 69 bp, Homo sapiens
  chr3:195058610-195058679
  hypo
ccactttctgtactccgacctgagcccggggccactcccacctcaacctgagcccggggccactcccac

SEQ ID NO: 253144 - DNA, 80 bp, Homo sapiens; identical to SEQ ID NO: 209331
  chr3:195093140-195093220
  hypo

SEQ ID NO: 253145 - DNA, 78 bp, Homo sapiens; identical to SEQ ID NO: 209332
  chr3:195134178-195134256
  hypo

SEQ ID NO: 253146 - DNA, 77 bp, Homo sapiens
  chr3:195139467-195139544
  hypo
gctctatcaatttgccattaacttgtttcaggtccttgctcggtctgccttaaaacgcagcttcaagattgtttata

SEQ ID NO: 253147 - DNA, 138 bp, Homo sapiens; identical to SEQ ID NO: 209333
  chr3:195172946-195173084
  hypo

SEQ ID NO: 253148 - DNA, 38 bp, Homo sapiens; identical to SEQ ID NO: 209334
  chr3:195183766-195183804
  hypo

SEQ ID NO: 253149 - DNA, 240 bp, Homo sapiens; identical to SEQ ID NO: 209335
  chr3:195194375-195194615
  hypo

SEQ ID NO: 253150 - DNA, 155 bp, Homo sapiens; identical to SEQ ID NO: 209336
  chr3:195393196-195393351
  hypo

SEQ ID NO: 253151 - DNA, 227 bp, Homo sapiens; identical to SEQ ID NO: 209337
  chr3:195419009-195419236
  hypo

SEQ ID NO: 253152 - DNA, 126 bp, Homo sapiens
  chr3:195448190-195448316
  hypo
tgtaagcgtgcctggcgctgcagtacacgctaatcaaccatgacgctgccatcgtaagggatggctgagagtttgtctttatgaacgtgggacagtaagtggggcacggagcgggggtgcagggag

SEQ ID NO: 253153 - DNA, 560 bp, Homo sapiens
  chr3:195536288-195536848
  hypo
gggggtgggggctgcccacccgcccttggtgactgcttttcctgccaaggccctggtcatgcccggtcagatgtgtgggtgccatctcccagccacgaccatctcctctcctggcccagctccacttggtccccttagcgacgcaaaggactcagcgctccacgacatgcctagcttcttcgggtcgtcatggagacgcccttgcacaccaacagtccttcactccttctccgggtcacgcccccgtgcttttccacgcccaccccaggtcttgcccctctgcgctcctctccacagaccccacttcctggctccacatggagctgagtgtccagctggtacccagcacatttgggctcagctttaaatcacagatttggaaactcaagaacttgggcgtcaggaggtccaaccgttcaccactgctttttacacaggggaccggggccctggggagacacggggcagggcctggtcacaggggccagaacagttcacggcaaagacttggccctggggctcctaaatccaagctgcctccccggcgccccaagccccag

SEQ ID NO: 253154 - DNA, 497 bp, Homo sapiens
  chr3:195537487-195537984
  hypo
gctcagaggtaagaagcccacggccagcacctcccggccctctgcgccctggccgcctcctccgcaccaccctcccggccggcctgcccctctcctccttgtcgcttcccttgcttgctgctgtctcccgatcttctcctctctccattcccagggtcctcagtttgtctgcgtctcacctgtctcgtcctctcaccctgcagctttacatgagttttcttccgtctccatcacccagctttcctggcatcccctctacccccagctctgtacacaagggtgtacatctttctccttgactctgttcctcttgctctggctctgcctgtctttctctctgcgagtaagcctgggctctcaccatggatccttccagacatcgccgggctgctctctggccctctgttctcttttctctctctttcgagcattctccctctgtctttcccctcagatcttgtcccgtatctgccagttcatgcctcctcttccccact

SEQ ID NO: 253155 - DNA, 195 bp, Homo sapiens; identical to SEQ ID NO: 209339
  chr3:195539283-195539478
  hypo

SEQ ID NO: 253156 - DNA, 181 bp, Homo sapiens
  chr3:195573453-195573634
  hypo
gctcttcaagacccacgggcttcctgcaaaccttggcggtggcctccagtggaatatgaagtgaccagcaaagtcccatgcggggggctggtgcatgttttcgaaggaggaatcgtatcagaagctgaaggcagctcacatcacaacttgtttgcagggattttgtcgcatctttcagtaa

SEQ ID NO: 253157 - DNA, 305 bp, Homo sapiens
  chr3:195586972-195587277
  hypo
catgatccaggcctgcctcacgcgccaggatcacgagagccgcctctaacccacccccaaaacaacaaaaggatgcgctctggccttgccaacttcagtgcctgggacaagccggctcgtgcccgccgcctcggctgcagggccctccacctgcagcgctttcgtccctacctggcgttcaccgttctcacccatcacatcagcacaacgtgaccttgtggggagccacctcctctgctcccaagacacctggtgcgtaacgattacagagcacccgtcctgccgtgatgctgtcacagtccccc

SEQ ID NO: 253158 - DNA, 87 bp, Homo sapiens
  chr3:195591689-195591776
  hypo
tgcgtcccaggtgcaaatcagtaagaaacacccgagacagtgacagacaggtgacagcaagtgcctgcgtcccgggtgcaaatcagt

SEQ ID NO: 253159 - DNA, 279 bp, Homo sapiens
  chr3:195592096-195592375
  hypo
tcagtaagaaccacccgagacagtgacagacaggtgacagcgagtgcctgcgtcccaggtgcaaatcagtaagaaccacccgagacagtgacagacaggtgacagcgagtgcctgcgtcccgggtgcaaatcagtaagaaccacccgagacagtgacagacaggtgacacagagtgcctgcgtcccgggtgcaaatcagttaagaatgacccgagacaggatgggacagacaggtgacaccgagtgcctgcatcccaggtgcaaatcagtaagaaccac

SEQ ID NO: 253160 - DNA, 159 bp, Homo sapiens
  chr3:195592435-195592594
  hypo
accacccgagacagtgacagacaggtgacagcgaatgcctgcgtcccaggtgcaaatcagtaagaaccacccgagacaatgacagacaggtgacacagagtgcctgcgtcccaggtgcaaatcagttaagaacgacccgagacagtatgggacagacag

SEQ ID NO: 253161 - DNA, 159 bp, Homo sapiens; identical to SEQ ID NO: 209341
  chr3:195595789-195595948
  hypo

SEQ ID NO: 253162 - DNA, 83 bp, Homo sapiens
  chr3:195597366-195597449
  hypo
gcccacaccaggcagcggccagagggcagacactcctgtcccgcaggccacgatggagggcctaagaacggggcatcccagct

SEQ ID NO: 253163 - DNA, 428 bp, Homo sapiens
  chr3:195597821-195598249
  hypo
ggtgtggggggactcgctgtgtggggttctggtgtgtgggggcccgctgtgtgggttctggtgtgtgggggcccgctgtgtggggttctggtgtgtggggcccggtgggtgaaggcccctgctttccacgcctctcagggcagaccagagtatcagaagtcagcaggagaagggctgcagaggccaggggcctggaatccccctgcggccagcagagaggcttggaggcctggcgcaagaagcttcggggggtggggggtggcatcccggaagtgactgattctgcgtgtccttcccagatgcccctcggtggccttatcctcttacataggagacagggcctctcccaggtatggagtgagctccgtagagtactgtgtggtggggaggcggagctgccacctaacgttccctctgcagtccccaag

SEQ ID NO: 253164 - DNA, 1764 bp, Homo sapiens
  chr3:195599649-195601413
  hypo
agatcccagcagacctgggacccaacgccagctttcaggtctgtggggccagcgccccgcccacacctcctcctcacccctcagttccctggcaaggccggggccccagtcctcttctggccacttgatttcactcctcggctgggttccaggagttctgagaggtgcgggggtgccgggggacacctagggccttgcactaggctgggggccaggcctccagctacaacctgcctcccgaatgcagacgcgggagagtctaggagcactcgggcaactcagtccctccctccaccgcttcacctgcttccggagctttccaccacctcccggaaggcctgcgggagcctccccgtctcctcaggaggggctctacctgtgtccaaaagggaactcagctctcccacagtgaccagacagtagggctgccagtccccctctgacctcagacacgaaacctctgctgatgtggcctaagccggggcctgggcaggggcaggggcaggggcaggggcaggcaggccaggaagcacagggctcccgcaagacactcctgactcccgaaggctctcacaggttgtgaggctcccgcgtctgctgctggacttgtcatacgtgatgccgtgagcagagtctgggcaggcgggggcggtgagagccccgtgggcagtgtctgggcaggcgggggcggtgagagccccgtgggcagtgtctgggcaggcgggggcggtgacagccccgtgggcagagtctgggcacgcgggggcggtgacagcccagagctgctagggtggacacgtgtggcaccacactgcacgccctccccaccaacccccacttctcctgtcccagggccaaagcgtgaagaagggctcctctgaaacccagccaggccggggagagaggacggaggaggtggcgacgcctgggcacccagacccacagccttgtaaggtgacgaggcctggctggagcggggtgactccggaacagcccatcccagagaccaaagtcaaacccgagagcaccacggtcggcggggaggcggggggcgcggggcgcggggagacggggctgtgctccccctgcccagcctcctcatacacagggccactggcctggccccaccacacacagccaccctgtgattcccaccctgcctgcagggagggaaggaaggagagaggacagtaccccgagacgagacgagtcccatctgaaaaatagcagggccactcgaaggagcagagccccggctccccagcacgcacacagcctcccacggcggcccgtagaggaggaaccccggcaccggctgggctgcggctctcccgctacacccacgggctccccggtggctgccgcgggccagacgccggactctgctctccacacctcttcagaggcgctcagtaactgggtgagaatgccgctgaggccgagaccttgctcagagcagcgtgactcgtgcccaaggcaggtcactccgtctggcctctcccttccgccaacactgcccagctccaggcacagaagcctcctttgggacccacttctgagagggaaaggagacatcaagcccacctcccttagtgcaggtatggccgaggcaagagcccccatggctgctgggagtcctgacaccactcgagaaaacatgcttgctcctgggggaaggagagtaagagtgcggaggacgtgtgcaagaagctcccctcgggatggcgcccacgcacactccgaggcacaagaaactccccctcg

SEQ ID NO: 253165 - DNA, 927 bp, Homo sapiens
  chr3:195602336-195603263
  hypo
gctccccctcgggatggcgcccacgcacactccaaggcagcttcatcccaaggctccagtgggacttccaagaggaccgtgtcacttctcgcagcccacacgcacccgtgtgaggctcagtgtggccgaggcaccagcagtccagaggggactgaggccagcccttccttccaggcccgccctgtccgcgccctctctctcccgccatgaacaggccggagtccccgtggccatgggagggccagggctgctacccggccgtgactgaagcaggggcggatgaggacttcctgggggagcaggaaaagggcccaacacctccgcatgaaccttctacctcctgctgcccccgggcctctggtcaacatctctggggtagacaagatggaaaacagaggccggtgctgagaactgcctaaggctgccccagctctggaaatctcagcaccacgttcccgtccgggccgaaggtagtccagaaatggctcaactaatgccggacattctgttcaaaacgcccgcccgctcttctccctaggggtcccaggcgcccaggcctggagggataacccggatgcctggctcccacccaccacaggaagccgaggctccagggccagaccaggccaaggacccgcaatggattccaacacccgctctgtatgcggaacaaaagtgctgccagccaccccttcctccaaacgagcccctgggaaagaccagtcatcatttgtgtctccaaatctagacacagcacgaaacatctaggtgtctcccctctgcccacagcctggtaccctgagaaggactgagcctagactcagtcagagctgcggcaggtggcctcccagactccgcaccaggaaacaaatactggacacagcttcgcaagtgggaagccacggcgaagagaaggccaggctagga

SEQ ID NO: 253166 - DNA, 714 bp, Homo sapiens
  chr3:195603847-195604561
  hypo
gaggggccaggcccacggctttccagctcgtggaggtggacacggtcatgaggctggacttcgggctggaggccctgccaggtacttccaggggacccccccacccttaatcttcctatttccagaatgctccccggagcgccacgcttgcaatcccatccctggcccctcagctccaaacctgcagactgtttgcctcctgtccccaggcctctctttctagaaccttctgcattcttccccagcataacacccctaaccacaggccctgcagtctcagtatgtcattcctattcccagaccctgggcccaagggtgagggagccgggcctgggaaggctcggggtgtcggggccacagcggtgcaggtcacactccacacagccccccaggtctcctccacccacccccaagaggcacaggattgcaccgaaggccgcagactccaaaagctgcagtgcaggtggaagaggctccctgggaagcagccctagccccatccttgcctggcctgagtcaggagctgcgagcacaggggatttcctccacttcactcttcttcctggtcctcaatactgcccctgcctcaaaggtacctgaaacctgccctgccccagccagttgctcagacaccctggggatcagccagcacaaggcagggccagcagtggtggggcctcagggcaggcgctagaactgcgggggctcaggtgg

SEQ ID NO: 253167 - DNA, 115 bp, Homo sapiens; identical to SEQ ID NO: 209347
  chr3:195604987-195605102
  hypo

SEQ ID NO: 253168 - DNA, 204 bp, Homo sapiens
  chr3:195605370-195605574
  hypo
agcccagcactggaccatgacgttgtagatgtcctggggacagtcctcgggccggggcagccgctccccctccttgtcgatcttatgcaggatctgaaggtgaggaggtgcagagtttgacgacaaacagagcgcccagcccttcacttcccgccttccctccagcccatccacagctgcagcggctgctgccatgcctggcct

SEQ ID NO: 253169 - DNA, 37 bp, Homo sapiens
  chr3:195610106-195610143
  hypo
tcccggatgaagtcgtccatggcttctggctggctca

SEQ ID NO: 253170 - DNA, 306 bp, Homo sapiens
  chr3:195637216-195637522
  hypo
aaggagaaaacccagcgctcggattcccagcggcggggcagcctgcaggccctgttcccagcccacagacccatgtcccagcccaaacggaggcagccctgggcagcgggcgcgtggagcccaagggctcagggccactcagcccttgttactgtccctcatctagaaaatggatgtaataacaaaacagttcacggtaggtggcaagatcagacacatcggaaactgtgtagggctggctctttctgcgctcacactgtccagcaatgggccccagggacttggccagagcgcagtagggcaatg

SEQ ID NO: 253171 - DNA, 180 bp, Homo sapiens; identical to SEQ ID NO: 209350
  chr3:195639452-195639632
  hypo

SEQ ID NO: 253172 - DNA, 267 bp, Homo sapiens
  chr3:195640366-195640633
  hypo
tcacagtcaaaacacggagagccatggctacaacttgagcaagtcaaacacgctgtgattcaggccagggagatgagcgtgggtaaagaacactgtacgaactagctcagggcttctggaactgtgtgcggctgaatcaccggggcatcttggtgaactgtaaattctgattcagcaaactgggaggagggcgctgagatccagcatttccatcaagcttcccatggaccacactctgactatcagggccttcgatgcagacagtct

SEQ ID NO: 253173 - DNA, 99 bp, Homo sapiens
  chr3:195643956-195644055
  hypo
tcttcctaaaacatcgatttcatcatgtctctcccttactcaagaactccacattgctccccagttccacgcagcatcgctccccggttccactcagca

SEQ ID NO: 253174 - DNA, 223 bp, Homo sapiens
  chr3:195648722-195648945
  hypo
acagaggagcacttccgtcacccaggaacacggctctgatcaaggaattcaagaacccaacagaaaaatacagaacagaaactactgcgataaagctctaataccttgattggagtgacagttactcttacatttttcaaaattcataaagtttacatttaagatctgttgcggggcgagggggcgaagcgggggagagcatcgggacaaatagctaaggcat

SEQ ID NO: 253175 - DNA, 80 bp, Homo sapiens
  chr3:195691554-195691634
  hypo
gcggaaatgccacacgggtgaactgtgcttgtgtggaacaagctgcaacccccctaccacaccctcggctggctgttccc

SEQ ID NO: 253176 - DNA, 342 bp, Homo sapiens
  chr3:195735474-195735816
  hypo
cagctcttaagccacgtggttcctcagcaccacctgagctgacccgtcccagctcgtgatcacacagacaaagacataactgtagaagcgtcggtatttcatatgtatcaaatttcatttttaaaagacatttttaggggacagaaatgttatagaacaacttttaacgttccacaaaagtataaatagtagaaaaggaaactagtgcgtgtgaactaggactccatgaaaagtacccagtagttgaagctccacgactccatggacagaagtttgcataaatatttaagcgatgttagttcctgaacatataagcaagccgtggcaggtctgtggccagag

SEQ ID NO: 253177 - DNA, 488 bp, Homo sapiens
  chr3:195750600-195751088
  hypo
acgcacctgccaaacgcaacagcctctttcagcgtcattaaaatatttcaacaggaggactgagtttagactcaacctgtgttttctcccctggaaaacgaaggtttcatgaagcaaggaaggtctttactgtcctcatccgaaacgctgaggcatctgtgatgtctgctgtaagtgccaccaggctctccgctgaaatctcgcaacgggaaaatagagaccgtagattctgcttttagaaaggggagaatcagaagtaatgtggaaatgccatgtcctcgttcataaacatcttcttttacaaattccacaagtttagttactttgggattaatatgggcttatcttaaagtgcgtttattaacttagcgtgagttgttcaaatgcattctggatcctgagccgacatccagcaatgctgagtgtgcgcctgtgtgagtcaccagccctgatgagcctcaggttattgtgttcgtaaaatgaagggg

SEQ ID NO: 253178 - DNA, 71 bp, Homo sapiens; identical to SEQ ID NO: 209351
  chr3:195752039-195752110
  hypo

SEQ ID NO: 253179 - DNA, 259 bp, Homo sapiens
  chr3:195763583-195763842
  hypo
agccactgcacccagccagaattgttttcttaatatcctctcggaatgttcattgctagtggataacaatgcagctgattttcgtgtgttgattttgtatcttgccatgtctctgaattctggagtgagatgtaaccattttattgtggattctttagaatttgctacatgtaagagcgtgtcttctgtgaacagaggtgattttacttcttcctttccagttcagatgcgatttatttttggccgagttgctgtgact

SEQ ID NO: 253180 - DNA, 94 bp, Homo sapiens
  chr3:195770516-195770610
  hypo
gcgcccggcgtcgttacggttttgaattacacctatgtacacctgtcttactgaacacaggaaagagatattcgtcacagatctatgatggtca

SEQ ID NO: 253181 - DNA, 344 bp, Homo sapiens
  chr3:195778818-195779162
  hypo
ctcattgtcaatgtcccaaacgtcaccagagagggcatttgcagctccctgaatagtccaagtagctagagccaactggtttctgaacagcgtttcattaaaagcaccgttattttgtttacgcagtttcaagttctccagtaaagctggcagcgtgtgagagccggagccccagaagacatgtcggaaaggagactcttttggagatacgtagggagagaggaagtgatactccacctacgaaaacaacacacaaggcaatttacacagccctgtgacttttgtagtaaaacaacagttcacttcaaatgtaaaatgtcccaaatttaagaatgccgatcaga

SEQ ID NO: 253182 - DNA, 100 bp, Homo sapiens
  chr3:195855353-195855453
  hypo
cctgtcattagcgcggtggctcacgcctgccattgcctgttgtccccgtcctctgtggccctcttggcttctgtatcactgtcacgcgtagcagggccag

SEQ ID NO: 253183 - DNA, 36 bp, Homo sapiens; identical to SEQ ID NO: 209354
  chr3:195863857-195863893
  hypo

SEQ ID NO: 253184 - DNA, 37 bp, Homo sapiens; identical to SEQ ID NO: 209355
  chr3:195866855-195866892
  hypo

SEQ ID NO: 253185 - DNA, 197 bp, Homo sapiens
  chr3:195867976-195868173
  hypo
gcagcactgcactccagcctcggtgacagagtgtgactccaagtcacaggaaaacccaacaaaacacagacgccgcccccacctgctttgcccgactctgcagagtcccacccggatgatctgggggagggaaggagtttgtctttttcgaagccctctgtggttttcggatgagcggatttagggacagtctgcac

SEQ ID NO: 253186 - DNA, 35 bp, Homo sapiens; identical to SEQ ID NO: 209356
  chr3:195901887-195901922
  hypo

SEQ ID NO: 253187 - DNA, 97 bp, Homo sapiens
  chr3:195910787-195910884
  hypo
cgaaagatccaacacgcagcccttctcgttcctttgagtggatccatttgaaaagctcctgtctcctggctgggtgtggtggctcacgcctgtaatc

SEQ ID NO: 253188 - DNA, 169 bp, Homo sapiens
  chr3:195923150-195923319
  hypo
tggtgtgtcagctgcgtggtggagaaaatcatcatgatgacactgaccgcgctcactgtgtgcctaccgtgtacctgtgtcccgatgttttgcatgaaacacctcattccggcctctgccagccttccagaaagatgcattattcccagtcccacggtcacattctggc

SEQ ID NO: 253189 - DNA, 32 bp, Homo sapiens
  chr3:195960904-195960936
  hypo
aggacacggccgggcgcgggggctcacgcctg

SEQ ID NO: 253190 - DNA, 32 bp, Homo sapiens
  chr3:195961176-195961208
  hypo
agcaaaactccgtctcaaaaaaaataaaaata

SEQ ID NO: 253191 - DNA, 44 bp, Homo sapiens; identical to SEQ ID NO: 209357
  chr3:195990771-195990815
  hypo

SEQ ID NO: 253192 - DNA, 39 bp, Homo sapiens
  chr3:196039339-196039378
  hypo
aggggcgggggatggagtctcgctctgtcgcccaggctg

SEQ ID NO: 253193 - DNA, 98 bp, Homo sapiens; identical to SEQ ID NO: 209358
  chr3:196039618-196039716
  hypo

SEQ ID NO: 253194 - DNA, 37 bp, Homo sapiens
  chr3:196046697-196046734
  hypo
tttcattagttggccaggcacggtgactcgcacctgt

SEQ ID NO: 253195 - DNA, 360 bp, Homo sapiens
  chr3:196069871-196070231
  hypo
caagacacttctttaagaaatcatgtacttgagataaacgggtctcgtaaggctagcgttgggactatctcttcatttccatgtggcgagcctcctagggcaacagaggcacggtcgctgccatgaaagcactgaagcttcacctctttgagacgtgttaataaccgcggagtgtggctctactggagatggagctacttgctgttactttgtcggtgatgctcctagggaggagcaaatgggagtctgaggacataaatgacgaacagggcctgggctgagaaaaccagtcatgccacaaaaggcttcctgaggctgaaagatttgggagacggccaggtgccagtgacccacacctgt

SEQ ID NO: 253196 - DNA, 180 bp, Homo sapiens
  chr3:196099465-196099645
  hypo
gcctcccaaagtgctggaattacaggtgtgactcatcatgaccggtaatggctgaatttttaatgtatgtttaaacatctttacctgaaaaggattcaacaaacttaagatcaacaagtcacgtaattttattctcttgcaacctccatcaacaattttttttttttttgagacgagctt

SEQ ID NO: 253197 - DNA, 38 bp, Homo sapiens; identical to SEQ ID NO: 209359
  chr3:196138792-196138830
  hypo

SEQ ID NO: 253198 - DNA, 138 bp, Homo sapiens; identical to SEQ ID NO: 209360
  chr3:196143804-196143942
  hypo

SEQ ID NO: 253199 - DNA, 77 bp, Homo sapiens; identical to SEQ ID NO: 209361
  chr3:196144182-196144259
  hypo

SEQ ID NO: 253200 - DNA, 242 bp, Homo sapiens; identical to SEQ ID NO: 209362
  chr3:196199259-196199501
  hypo

SEQ ID NO: 253201 - DNA, 146 bp, Homo sapiens
  chr3:196226289-196226435
  hypo
gaataaatttctgctaagttcgtggtactttgttacagtagccctaggaaataaaaagaattccatttatatgaagttccagaacagaaaaaactcatctatggtggataaaaactaaaacagcccggacgcggtggctcacgctt

SEQ ID NO: 253202 - DNA, 81 bp, Homo sapiens
  chr3:196245241-196245322
  hypo
ccactccttaatccactctacgtgtgtctatgttgctaattttctcggcatgtgacaaaggaccctggatgtttccccaga

SEQ ID NO: 253203 - DNA, 120 bp, Homo sapiens; identical to SEQ ID NO: 209363
  chr3:196263349-196263469
  hypo

SEQ ID NO: 253204 - DNA, 44 bp, Homo sapiens
  chr3:196263529-196263573
  hypo
tccgtcagtacgcgaaggatgtcggtttcattaagttggactaa

SEQ ID NO: 253205 - DNA, 240 bp, Homo sapiens
  chr3:196297367-196297607
  hypo
agagtgctgggattagaggcgtgagccaccgcgcgataacaccccctttttaatgctagcttgccaacaggggtcggagtaagaagtaaaaatttttttttcatgtgaagcatgtaaaatttatacttatgtagtaaaaccggttttagttatagaagatagggaacattgccattaaatatgtaaactatcaagttgtttctcttttcttttttctttttttttttttttttgagacgg

SEQ ID NO: 253206 - DNA, 149 bp, Homo sapiens
  chr3:196302878-196303027
  hypo
agtgccttaaagtattttataatacgagcagataggaaaaacattgggaatgcctcagttttattgtgaatgcatgggatactggaaacaaatagttctctgtttttaaatctgcgctctgcagctcactgaaacggtagagtgccagc

SEQ ID NO: 253207 - DNA, 331 bp, Homo sapiens
  chr3:196318576-196318907
  hypo
gagggtaacgagtgcggttttgaacatgttaaatcggaggtggaaatacagaaaaggcagttggaactagtgagcctggagttaaggagatcggcagccagctggatgagagagctgctggtgtgccgcgttcctcactggccgtacgggctccacagcccagcgggtagagcgagggaggcgggcctgcaatacccccaaaggacaaccaactgccttctaaaccgtgactctgccaactaaaggctgcgggggtgttttgttgtttcgggatttttcttttccttacataccccacacctctgaataacaatcctagcagttcaatttt

SEQ ID NO: 253208 - DNA, 197 bp, Homo sapiens
  chr3:196376654-196376851
  hypo
tagcacagagtgccccgagagctgcccactttctccaggagacctctttccgtaaagctttttcagcttctctgattactttgaggagaaaattcttaactacgtggtaacatacgtatggcacttgctcagagcccctttagcggagagggtccggtcccagctctggcagcagctgctcacgtagtagcagtcag

SEQ ID NO: 253209 - DNA, 224 bp, Homo sapiens
  chr3:196382389-196382613
  hypo
agtgagactctctcaaaaaaagaaaaaaacaaaacaaaacaaaaaactggatgactgagctgcaccgatggtatgagaatctccgggtgaggtgcttgagagctggagaagcctgcctcggagtttgtggacgagttgaccgctaaggcttacacagctgcggggaggacttgctgccatgccactctgcagagcggcagcccggaccacgctcaggctaagaa

SEQ ID NO: 253210 - DNA, 1097 bp, Homo sapiens
  chr3:196386776-196387873
  hypo
tgcacagctgccacctggagcgcatcagccgcggcgccttccaggagcaaggtcacctgcgcagcctggtcctgggggacaactgcctctcagagaactacgaagagacggcagccgccctccacgccctgccgggcctgcggaggctggacttgtcaggaaacgccctgacggaggacatggcagccctcatgctccagaacctctcctcgctgcggtccgtgtccctggcggggaacaccatcatgcggctggacgactccgtcttcgagggcctggagcgtctccgggagctggatctgcagaggaactacatcttcgagatcgagggcggcgctttcgacggcctggctgagctgaggcacctcaacctggccttcaacaacctcccctgcatcgtggacttcgggctcacgcggctgcgggtcctcaacgtcagctacaacgtcctggagtggttcctcgcgaccgggggagaggctgccttcgagctggagacgctggacctgtctcacaaccagctgctgttcttcccgctgctgccccagtacagcaagttgcggaccctcctgctgcgcgacaacaacatgggcttctaccgggacctgtacaacacctcgtcgccgagggagatggtggcccagttcctcctcgtggacggcaacgtgaccaacatcaccaccgtcagcctctgggaagaattctcctccagcgacctcgcagatctccgcttcctggacatgagccagaaccagttccagtacctgccagacggcttcctgaggaaaatgccttccctctcccacctgaacctccaccagaattgcctgatgacgcttcacattcgggagcacgagccccccggagcgctcaccgagctggacctgagccacaaccagctgtcggagctgcacctggctccggggctggccagctgcctgggcagcctgcgcttgttcaacctgagctccaaccagctcctgggcgtcccccctggcctcttcgccaatgctaggaacatcactacacttgacatgagccacaatcagatctcactttgtcccctgccagctgcctcggaccgggtgggcccccct

SEQ ID NO: 253211 - DNA, 317 bp, Homo sapiens
  chr3:196388384-196388701
  hypo
cctccaagatcatccgcgtgacggagctgcccggaggtgtgcctcgggactgcaagtgggagcggctggacctgggcctgctctacctcgtgctcatcctccccagctgcctcaccctgctggtggcctgcactgtcatcgtcctcacttttaagaagcctctgcttcaggtcatcaagagccgctgccactggtcctccgtttactgacctggctgtgtgccaagactcgaaattcggtccgcacacaacaggacactttctctgccagctttcaagatgtgatgcagaggccaagtctgacgaattgaagtttca

SEQ ID NO: 253212 - DNA, 129 bp, Homo sapiens
  chr3:196389083-196389212
  hypo
atttcatagcaggacgacgacaacaaagcatttcaaagcacagctggagggtctgacataagatcataagatgaggcctctcacctgctgcgtgactggccaccgccgtcagaacggtcctgtgatcct

SEQ ID NO: 253213 - DNA, 209 bp, Homo sapiens; identical to SEQ ID NO: 209365
  chr3:196402791-196403000
  hypo

SEQ ID NO: 253214 - DNA, 88 bp, Homo sapiens
  chr3:196412488-196412576
  hypo
agccatgggagatgcggaattcagctgaagatcacttaaacatccagcaccgctgtagcactagtcatagaaagaatatgaagagaat

SEQ ID NO: 253215 - DNA, 126 bp, Homo sapiens; identical to SEQ ID NO: 209366
  chr3:196434731-196434857
  hypo

SEQ ID NO: 253216 - DNA, 120 bp, Homo sapiens
  chr3:196440474-196440594
  hypo
gccagaagaatttttaaacagttggatttggtaatctgtagaggcttccaacgttagcattttataattgaaaaggggtcaaaattagcggggcgtgatggcgtgcccctgtagtcccag

SEQ ID NO: 253217 - DNA, 42 bp, Homo sapiens
  chr3:196469496-196469538
  hypo
tcttcttcgccgggcgcggtggctcacgcctgtaatcccagc

SEQ ID NO: 253218 - DNA, 163 bp, Homo sapiens
  chr3:196477978-196478141
  hypo
atatttcttataactggaatcgtgcaatgtttgtccttttgtgtctcgctcattatttcatgtagcgcagtattttcagggtttatccattttgtagcatatagtataggttgagcatcgctaatctgaaaatccaaaatccgaaatgctccaaattccagca

SEQ ID NO: 253219 - DNA, 202 bp, Homo sapiens; identical to SEQ ID NO: 209367
  chr3:196530355-196530557
  hypo

SEQ ID NO: 253220 - DNA, 245 bp, Homo sapiens
  chr3:196674980-196675225
  hypo
ggagcagcaccagggcctcccgggtcagagacttcaaaccagggtttgtggctccacgagtgccccagaggtagagggggaccacagcaaaggccagaaaggtgggccggttgaagaagccagcagccacaatgcctccaagaagccagctgcgccaccgtggacccggcgccggctccttgcgtgtagggccccacgttacatgggaggataccagcaccagcagccacgtgaagaggagtccc

SEQ ID NO: 253221 - DNA, 89 bp, Homo sapiens
  chr3:196700062-196700151
  hypo
ctcattgtctccctctccctcgccctcgccctcgccctcgccctcgccctctccctctccccacggtctccctctgatgccgagctgaa

SEQ ID NO: 253222 - DNA, 291 bp, Homo sapiens; identical to SEQ ID NO: 209368
  chr3:196723696-196723987
  hypo

SEQ ID NO: 253223 - DNA, 333 bp, Homo sapiens
  chr3:196728413-196728746
  hypo
gctggaatgtgccagggcagcggaggccctgcaagagccagagaaccagtccaggtcgaagaagggcgcggggggcctcactgactagaggatgagagtggtccctgactggctcttggagaatggaatctgcccttctcggtggagcaggtaggcctttgagtgcctaacaaaacgaaagaaatcggcagcagaagtttctatcagggtccaagcctctgcatgtgctggcttgtttggctttattttagaaaccaaccaacatgtttcattagcactgacacagcaggggtcccctgctgccacctgacaatccagcgtcacttacactgc

SEQ ID NO: 253224 - DNA, 613 bp, Homo sapiens
  chr3:196752264-196752877
  hypo
gcctgagatggttgcggggctcagcttacccatcacctctgcagagcaccgtcctgcctgctctatttcagtggatttccccgcaaccctcgttttctctgtcctgcccttcccttttcctcacagcaccccaacatgtgtcactgtattgttttgggtgtgtttatttactctctgctctgtgggggcaggaaggtctcttcgtttactgctgcatgcttatgaccagcgggtagcaggtgctcagtagaggtgtcgagttaattaaagaggaagaggtgcgtggggcctcggaggcagagctgtttctggctgatgggtgtgcagggttggactgtgccgtgtgtcatttgatggccattaattcaacaaggaaccagccagtgctttctccaagcgagatgctgtgtggagttccagagggtagacacaggggaagactggaccctcctctgaggactaacgagactgagcaggcagaggcttgcagaggccatgtgggtgcgggcaagagaggccctgctccagagagggaggggctcagggagcaccttggaggaggtgacagttgcgctggactgtgatggaggccaggcaccggccaagcagaggt

SEQ ID NO: 253225 - DNA, 505 bp, Homo sapiens
  chr3:196754392-196754897
  hypo
caggtgcctttctttgctggcgccctctgagcagcgggtcctcctgaggctcccacctcctggcctgggcccggcgggaggcaagctggcctcgtggccagggagactcgggagatcctatcggccgggcctggcagggcgaggtcggctcctttcctggtgaatggggctgttgtgtgctccctcctgagtcacagccctcttgtctggcagggtggaagggagaggactcaccgcgatgagctggacgcagtggtcggcggaggtgccccggacgcagaggagggagggctggatgcccgcttcccggaaggcctcgctcatgttgccgcacttgtgctgctctgggtccgaggtggcgcaccaccgcacctccatgccaccgagcactgcgggcaggggaccgtgaggcccggctcccccgccctgcccagccccggcccaccatggagggtggctccagcagttctgtgtgagcccattcgcctggacagccagtcctcta

SEQ ID NO: 253226 - DNA, 274 bp, Homo sapiens
  chr3:196766007-196766281
  hypo
agcagtgaatgaataggctgcggtgagtgcatccacacaatggaatactgctcagcaatgaaaaccatgcattcctacccaatacattttgctaagccacaccccaaacgctacattacactccatacgacattccgggaaaggcaaaactacaggcactgcgaacagatcggcggttgtcacagactggggctgagaggaggtctggattacacagggaaaagcatcagagaatttctttgggacagtgggactgtttcgcagtcttgattgt

SEQ ID NO: 253227 - DNA, 90 bp, Homo sapiens
  chr3:196784240-196784330
  hypo
ccgcacctgacagtcgttgactatttgaacagtactgtcatcacgcttgtacctgtctttgtaaacacaggtaagcgtttctgtggagtg

SEQ ID NO: 253228 - DNA, 192 bp, Homo sapiens; identical to SEQ ID NO: 209375
  chr3:196817782-196817974
  hypo

SEQ ID NO: 253229 - DNA, 147 bp, Homo sapiens
  chr3:196907217-196907364
  hypo
actgtgtatgctaagtaggacggggccgattattgagtgaccctcaacacaagaataggagggacgctgagggtgcggaaccaaggagggcttcgcaatgcatagagaactttttctatactaatcgtttgaaattaaggacaaaaa

SEQ ID NO: 253230 - DNA, 99 bp, Homo sapiens
  chr3:196910545-196910644
  hypo
tgcagttcatctgacgagcccttttttgcccagtgtttctgctttgggcctgctgagccatggctagagctagtattgcctcctcgactgccgcgagag

SEQ ID NO: 253231 - DNA, 156 bp, Homo sapiens
  chr3:197027476-197027632
  hypo
tgaaggcttcagggggactacgggaggctctttcagcatggatcattcacatagctagtaagttgatgctggctattgggcggaggcttcaatttctcaccatgaagacctttctatagggctgcttgagtgtcttcatgacgtagcggctgacgt

SEQ ID NO: 253232 - DNA, 158 bp, Homo sapiens
  chr3:197094180-197094338
  hypo
ccactgtgaccacatagctgcgggcttctctgccttgtagacacgggcaaccatcaaggccaaggcatttggcgggaagctccagagctggggtcggggcagggaggggccacgctgggactctgctggcccagtacgggggcagatgctgtcttaag

SEQ ID NO: 253233 - DNA, 380 bp, Homo sapiens
  chr3:197121210-197121590
  hypo
caagagtgaaactccgtctcaaagaaaaaaggtctatttttaaaaactactaactgagaaagaagtaagagccttgaagaaacagaaagaaggaacctgagcatgccacggcaggagaggatgagaacggcatggagaagggggaggcgcaagcagctggaagcccacggcggaatgggccggtgctcggagagctgttcggatggcacgggagctgattgtcttgacgttaagttcctcggtgaggagagaacagaagttaatggcacccaccgggcctgggtggagcctcagcaccaccaaagaaagcagattctgcatttggaaagcctaggccctctccttgaacctggttctcaaggtttcggtgatgagtcacc

SEQ ID NO: 253234 - DNA, 283 bp, Homo sapiens
  chr3:197124819-197125102
  hypo
ctgtaccctgctggcgagaggacagattgagaggagtcggcattggcagtgttccggggcacacacaggcattgttagtcacattcggtataacatgctagcaatgcctccacgaggtatacatcccaggccgctcttatgcaattctgtaaggagaggtgtatgcaaatgttgcctgcacaggaattagtggtgggagctggagactccctgagtttccatcactgagatggagaaataaaatacagtgaatgcacgccagggagtacgatgaaacaggact

SEQ ID NO: 253235 - DNA, 86 bp, Homo sapiens
  chr3:197127430-197127516
  hypo
tatttggggttcacagatggaaacagaaagtcaagtggtcataatagtgctgcgaaccccctggccagcaccgggccctgactccc

SEQ ID NO: 253236 - DNA, 251 bp, Homo sapiens; identical to SEQ ID NO: 209376
  chr3:197133872-197134123
  hypo

SEQ ID NO: 253237 - DNA, 31 bp, Homo sapiens
  chr3:197136800-197136831
  hypo
tggctgaataggaacagctccggtctacagc

SEQ ID NO: 253238 - DNA, 74 bp, Homo sapiens; identical to SEQ ID NO: 209377
  chr3:197152285-197152359
  hypo

SEQ ID NO: 253239 - DNA, 160 bp, Homo sapiens
  chr3:197170406-197170566
  hypo
aaaatctaagagagagagagcgctttgtgagttttcagactcaaaagttagagactgcacggaccaacctgagagcaggtgagtccggttaggagggagcagaagtgcttttggagggtgctcattgccgtgttgttactcgtggcggggaaactgaaag

SEQ ID NO: 253240 - DNA, 94 bp, Homo sapiens
  chr3:197216365-197216459
  hypo
tgcccagggattccccgactggacccctgaccttcccatactctgactgggaagacacagtgcaatcttttcttcgagacagagtctcgctctg

SEQ ID NO: 253241 - DNA, 34 bp, Homo sapiens
  chr3:197216699-197216733
  hypo
tgagcctccgcgcccagcccgacacaactcaatc

SEQ ID NO: 253242 - DNA, 141 bp, Homo sapiens
  chr3:197231739-197231880
  hypo
ctgttttctttcgtcgtacacttaaccgcacagaaaataagccctagggctgaaaactccagcttgtcgtggtgctggcagtggtgtgcgctcttccacatctgggtgcagcctaagcctcttgtccggttctgccctcag

SEQ ID NO: 253243 - DNA, 300 bp, Homo sapiens
  chr3:197238899-197239199
  hypo
cgatgacaggggacgtgtctgtggagccactgctgcagtaggtctccatcttggcgatcttttcatcaaagtacttcttgccgtagtccttgcgcacgacctcaggcagctcctcccacatcttcttggcgatggcctgaatgctctcagggctgtaaaggctggtggcagcgatgaagttgccgggctccaccacgctgaccttcacgcccagggggtacatctcatagcgcaggcagtccgagaaagcctctaccccgaacttggtgatgcagtacggggagcgggccgggttggcca

SEQ ID NO: 253244 - DNA, 360 bp, Homo sapiens
  chr3:197241231-197241591
  hypo
gaactccacctccccgaacgttgagatgccggcattgttaacgaggccccacatgcctggacaggagagggatagatgtgcatttaccacatgggcttggcccagacattgcccatcagcctgcaggccagcctcctctctgcttctttcctgtgacttcccagcctctcgcccagtgctctcaagaaactttctagagtcactcaggaacgacaggaggtaaagaggcctaaagtgctgactgcagccctcccttgcgtctagaatgtccagtcctcacgtcacatctgcctggctcgagtctctgggcccatcatgacccagcctgccgtgtcccccggccttcagtctcacctcacc

SEQ ID NO: 253245 - DNA, 223 bp, Homo sapiens; identical to SEQ ID NO: 209380
  chr3:197243349-197243572
  hypo

SEQ ID NO: 253246 - DNA, 100 bp, Homo sapiens; identical to SEQ ID NO: 209381
  chr3:197246890-197246990
  hypo

SEQ ID NO: 253247 - DNA, 211 bp, Homo sapiens; identical to SEQ ID NO: 209382
  chr3:197250416-197250627
  hypo

SEQ ID NO: 253248 - DNA, 300 bp, Homo sapiens
  chr3:197327055-197327355
  hypo
tagtcataacctattttcagctggaaaccagaaaggctggttctatgtgcagatggcaatgctgaggtttagaggtaaaacacccacctgaagtgaatagaggctggactggaacccaggatggctcacctggaggcggcgctcccatacggcacccggcagcctgttttgtacaggaacaatacttgccttcctccgcaaaaaacaaacaaacaaacaaaaaatgcaggggttgaaaagaaaactgcctgagctgaaaagttttgttgttgttgttctgagacagggtttccctgtcgc

SEQ ID NO: 253249 - DNA, 242 bp, Homo sapiens
  chr3:197327641-197327883
  hypo
ttgcctctgagccccatgtgcgatccctcagatgccgaggcaggttgcactatcacccaccatgagccctccgaccctggcctgtggagtggagaaaagacgccaactgctcccctgcagcaccctgcgcttttcttcctccaggcccgatggtgggtctcagccagctggttacacacgagcgcgcgacatgtccaaagcgaagcacagccctttgtgtcgtcagcaggggaagagatagc

SEQ ID NO: 253250 - DNA, 146 bp, Homo sapiens
  chr3:197330095-197330241
  hypo
gagggagagggactctcagataactttctaaaacctccgaagatcttttttcatgtgtgagataataatagaagatattcctgagagttttgtgtatttttgtgtattttccttgcttgtggatggaagcgcgatgtcttctatta

SEQ ID NO: 253251 - DNA, 180 bp, Homo sapiens; identical to SEQ ID NO: 209386
  chr3:197330487-197330667
  hypo

SEQ ID NO: 253252 - DNA, 99 bp, Homo sapiens
  chr3:197401910-197402009
  hypo
gcttccagggccagcgcttccgcgggctcctcctcgtagtctgacaggtaagactccaggctctgcctggccagtgcctcccgccgggcctgcagccgc

SEQ ID NO: 253253 - DNA, 324 bp, Homo sapiens
  chr3:197582090-197582414
  hypo
ttccgtggtctgttcgcattgctgtgtattccacaaccttcatttcctttgagatggataaagcaccttttaactgggcggtcttataggtgaatacaatcatcacactctagagttttagtttaagtgaattggcctaagaagcgaataataagttaaaaatgtagacaaatattgagagcctccgacgatccaaacacttaccaaaattatctcatttactcctcgcagcaaccttaagagtgaaggttaaacttatcacctttttacaaatgattactgaggcccagaatgtgacttgtccaatgtcgcatagacagtaag

SEQ ID NO: 253254 - DNA, 221 bp, Homo sapiens
  chr3:197582614-197582835
  hypo
cttgaaattcccttcggccgtttgtcaaaacacactcacttaagtcttagttctcagtattcatatctgatcctccaaattagacggcctttaaaacacatctcacatttctttgtctgccaaatagtgtccaaccaacactgtgcaaaaagagtcgtattttaaataaaacctcatattatcaaaactgtgcttcagaaggctcccgttgcttagagtga

SEQ ID NO: 253255 - DNA, 164 bp, Homo sapiens
  chr3:197608011-197608175
  hypo
gcagcagctgctcacgaggagaaccgtcgtgccttttctggttttggccgcacccggttacttagatttctgctttgaactgtgtcctgagatcctgaatccccgctttgtcggtaggcacaggtccatataagcatttgcggtctggacgtttcaaaggtatt

SEQ ID NO: 253256 - DNA, 97 bp, Homo sapiens; identical to SEQ ID NO: 209387
  chr3:197612489-197612586
  hypo

SEQ ID NO: 253257 - DNA, 190 bp, Homo sapiens
  chr3:197616593-197616783
  hypo
gaaaaggggagtgagtacgacgtatgctatgcctgacaagctgcattctttccacataaagggactgttgaataaagtaacttctgtctgacaaacagtctctctccaggacatggaagtagccaggcacgtaatcacttcagcgatgctctcctgtcgtgcaggacccggagcttaagccatggactca

SEQ ID NO: 253258 - DNA, 155 bp, Homo sapiens
  chr3:197640193-197640348
  hypo
tgtgtgcgtgcgtgcgtgcgtgcgtgtgtgcgtgcgtgcgtgtgtgccatttagcattcccctcaaagaagatctaccacttctttcttcctcctggcatttttcaccgtgacttctcatcctataaactcaggtttgaacgaagttcagcgctc

SEQ ID NO: 253259 - DNA, 76 bp, Homo sapiens; identical to SEQ ID NO: 209389
  chr3:197663680-197663756
  hypo

SEQ ID NO: 253260 - DNA, 282 bp, Homo sapiens
  chr3:197685522-197685804
  hypo
cgggggaaaacaaacggttgagactttaactcgagtaacttacatgtgcaatggcaaatgagactcaaaagcaaatacatgctcttccttactgagatgatgcagcatttgtaaataataaatgtatgtttttatgtttttctcctcccatatggaaattaagtcaaaagtactcaagtcaccgttgccaaaggaggagtcctgtggtttacaggaaagggcttgcgtggctggtaacttgtccactacaccattgaaacagctttgcctcctggctgggcg

SEQ ID NO: 253261 - DNA, 35 bp, Homo sapiens
  chr3:197714311-197714346
  hypo
gagccaccgcgcccggccaaaatttttacaaaaca

SEQ ID NO: 253262 - DNA, 87 bp, Homo sapiens
  chr3:197726426-197726513
  hypo
gtctcactccttctgcgcaggctggagtgcagtggcaatctggactcactaatcctggacttcccgggctcaagcagtcctctcacc

SEQ ID NO: 253263 - DNA, 183 bp, Homo sapiens; identical to SEQ ID NO: 209391
  chr3:197764838-197765021
  hypo

SEQ ID NO: 253264 - DNA, 230 bp, Homo sapiens; identical to SEQ ID NO: 209392
  chr4:503184-503414
  hypo

SEQ ID NO: 253265 - DNA, 1441 bp, Homo sapiens
  chr4:512572-514013
  hypo
cccattgtctacaccgtcggggatcctttttcctaaaacaaaatggggtatgtgttctgacactgaaatacgttttagaacccacagccaggcccgtgcagtccctcggtggcgtccagtctgttggaggctttgtgcccacccggctctctcagtgtagtgggaccggctttttctcacctctggacttttgcacatgctgttcccatcagcttgatgctcttcctgcagttttttgcctggcgaattcctgggtaccgtttacatttcagcgtaaacatcagaccttcctggtccagcgcccactcccaatccaaaatcagttcctccccattaccaaaaatccctcattgataccctctacttttccttcctgggaaacttgtaattacagctgtaatgcagtcacagtttgtaattacgcttgtgtgcgtgcgtgcgtgtctgtgagccctactggatccaagccccagcaggcaaggattgcacctgcttgctcgccatgctgtgtctcccctggcacagcgcctggcacagtgcctggcacgtcgtccacgctccatggatatttgtttcgatgcatgcacaggtgcacccccatagctttgtgactctctgataggcggtggggtgtggacacaggcgtccccccatccagggtggtaggtgtagcaatgaaggatgccagccctggaaccagactgcctgagtttcatttgcagcttttacccactggcactgtggcccaggtgcgtgactcaccctctgtgtctcagttgcctcctctggataacagttctgatgctcatccctgcctcatagggtcattagggaggtgaaacgagcgagccgcctagtgttgctggctactggcacttagtgcagagcacctggtgccggcagcagtggggtgggcctgcaggcgtgtgggttcatgcttagggacttggtgcctgcagcagtggggtgggcctgcaggcgtgtgggttcacgctcagggacctggtgccggcagcagtggggtgggcctgcaggcgtgtgggttcatgcttagggacttggtgcctgcagcagtggggtgggcctgcaggcgtgtgggttcacgctcagggacctggtgccggcagcagtggggtgggcctgcaggcgtgtgggttcatgcttagggacttggtgcctgcagcagtcgggtgtgcttgcaggcgtgtgggttcacgctcagggacctggtgccggcagcagtggggcgggcctgcaggcgtatgagttcatgctcagggacttgtgccacagcaccctggacctcagtggcttgagcgcctgtggcagctctttcactgctgtgatagcaggcctggggcatgcagagccacagggtggggcgagcctgccaagaggcacagctgagacccttcttggcatggctcttctggagtaggaa

SEQ ID NO: 253266 - DNA, 100 bp, Homo sapiens
  chr4:529357-529457
  hypo
gccccagggagcgcgctgtggcctctccgctgagcagtgaggctggagggctcctacgtcctcccatgactgaaccgtcgctctcgcggtgctgactgct

SEQ ID NO: 253267 - DNA, 135 bp, Homo sapiens
  chr4:530423-530558
  hypo
ttgaggccagccgcgtgctcacactggccttacagaaacaggagacgccgtcctcggccgtctggggtgggctgtcagcacgtcgtgtggtcaggtgtcaggacaagcgggcgtgagcgcgtggaggtgcatctg

SEQ ID NO: 253268 - DNA, 111 bp, Homo sapiens
  chr4:610967-611078
  hypo
agttcgggtttccccgccctggaacaggctcctgaggtggtttccacggatgcgtctctgctccggcaaaccatggccccgtcattgacaggccagcgcccgtcagcccct

SEQ ID NO: 253269 - DNA, 253 bp, Homo sapiens; identical to SEQ ID NO: 209396
  chr4:616352-616605
  hypo

SEQ ID NO: 253270 - DNA, 242 bp, Homo sapiens
  chr4:617078-617320
  hypo
agaggctgtggactccttgccgccctgaacctactcacctacaatcacgacgggctcctggggcaggacaaagccacaggtgaggaacgcggtgctgcgggtggaagctgctgtcacagtcgtgttagggtgagtggactatggccgcagactgtgggctcctcccagccaaccctcactcccgctagcgccccaaatcttcagtccagcaccccttccccgtcccacccactctccacact

SEQ ID NO: 253271 - DNA, 153 bp, Homo sapiens
  chr4:618645-618798
  hypo
aaggcttgctgaggtgacagcggagaggagaggtcgggctttgttgccaggcagccccccaacattcaggtcctttttccactgaaagccatgtggcctcagagcggcgtcaccccgaagcttgtcccagccggggcctgacagcaggtaaag

SEQ ID NO: 253272 - DNA, 439 bp, Homo sapiens
  chr4:619493-619932
  hypo
ctgagccctgagaatgtggccgcggcctgcgaggacgggtgcccgccggactgcgacagcctccgggacctctgccaggtggaggagagcacggcgctgctggagctggtgcaggatatgcaggagagcatcaacatggagcgcgtggtcttcaaggtcctgcggcgcctctgcaccctcctgcaggccgaccgctgcagcctcttcatgtaccgccagcgcaacggcgtggccgagctggccaccaggcttttcagcgtgcagccggacagcgtcctggaggactgcctggtgccccccgactccgagatcgtcttcccactggacatcggggtcgtgggccacgtggctcagaccaaaaagatggtgaacgtcgaggacgtggccgaggtgggtctgtgcggagcctcagggaggcggctgtgtgcatctcttgcac

SEQ ID NO: 253273 - DNA, 241 bp, Homo sapiens
  chr4:628235-628476
  hypo
tggggggcaccagcatcctccgcacaggggtgcatggagccaggctggagccacagggacaggcccagctttcaccgcccggtggccacatcccagtgcccagcagggcccctgggcacctcacacctggagggcagcagcccccacagagcttgacgacaaccccagtggtgcgggctccaggcccacggtgcgacagcctctttagcctctttcctctcttgcggcagtgccctcactt

SEQ ID NO: 253274 - DNA, 889 bp, Homo sapiens
  chr4:628566-629455
  hypo
catggcagtgaacaagctcaacggcccattcttcaccagcgaagacgaagatgtgagtgtggggggcacctgggcagccgcgcgtctgcctccctgcctgcctgcccgcccgcctgttctgtgctgcgcatccacctctttacctgcctgcccgcctgcccgtgtgttctctgctgcgtgtctgcctccttacctgcctgcccgcgtgttctgtgctgcgtgtctgcctccttacctgcctgcccgcgtgttctgtgctgcgcgtccacctccttacctgcctgcccgcctgcccgtgtgttctctgctgcgtgtctgcctccttacctgcctgcccgcgtgttctgtgctgcgtgtctgcctccttacctgcctgcccgcgtgttctgtgctgcgcgtccacctccttacctgcctgcccgcctgcccgcgtgttctgtgctgcgtgtccacctccttacctgcctgcccgcctgcctgcgtgttctgtgctgcgcgtctgcctccctgcctgcctccctgcccgcctgcccgcgtgttctgtgctgtgcgtccacctccttacctgcctgcctgcctgcccgcgtgttctgtgccacgcgtctgcctccctgcctgcctgcccgtgtgttctgtgctgtgcgtccacctccttacctgcctgcctgcctgcctgcgtgttctgtgccacgcgtctgcctccctgcctgcctgcccgtgtgttctgtgctgtgcgtccacctccttacctgcctgcctgcctgcccgcgtgttctgtgccacgcgtctgcctccctgcctgcctgcccgcgtgttctgtgctgcgcgtctgctgggctgctgggctccacgtgctcatctgcacatcgctgtgctcctgtgtgtctgt

SEQ ID NO: 253275 - DNA, 517 bp, Homo sapiens
  chr4:650874-651391
  hypo
tgtgggggcctccccgccaagcattcggctgtgtgcgtgtgctcatgtgtgtgcggtatgcatgcggccagggagaggacgacaaagggcccccccgggagcaggagcctctgcagagcacccgggagaccccacacagaagcactgcgacaccatggtggcagccccaggacctgcccgccgagccacggggcctggcacacaggcacatgggagggggcgcgccgggagcgctgagcgccagtgacactgccatcccctccagtccctgacacagttcctgggctggtcagtgatgaacaccgacacctacgacaagatgaacaagctggagaaccgcaaggacatcgcacaggacatggtcctttaccacgtgaagtgcgacagggacgagatccagctcatcctggtgcggcggggcaggacgtccaggggtcacccaggggtcacggctgtgtggcaggggcaggtcgtccaggggtcacccaggggtctcggctgtgtggtgggggcaggt

SEQ ID NO: 253276 - DNA, 236 bp, Homo sapiens; identical to SEQ ID NO: 209403
  chr4:655879-656115
  hypo

SEQ ID NO: 253277 - DNA, 254 bp, Homo sapiens; identical to SEQ ID NO: 209406
  chr4:679512-679766
  hypo

SEQ ID NO: 253278 - DNA, 44 bp, Homo sapiens
  chr4:708090-708134
  hypo
ctgcccagacccactcgtggccgttcggccgcatttgcttcctc

SEQ ID NO: 253279 - DNA, 440 bp, Homo sapiens
  chr4:717887-718327
  hypo
caatggcagagccccggcagaaagactcagggcagatggtggttgtcagccgggagggggcacggagccctgggggtggtcaggcccacgtggccttgggacgagagcgaagaggtgggatcggctgcgggagacagggaagtgggtgacaaggaggctcaggggctacagcaaaggccccggaggcttttccacacccgagtccgtcctcggccatgccagccaggtcaggggctcagtcctgtgggccaccacagccggccgcacaggcagggaaggtgaagctccacggagcaccctggtggacagcggtgctgtgggggccatggaccagaaggcggagcccatgctgtgggctgggtggggtggcagctgccagttcaaagtctgtcttttgtttatttacttcataaaatactccaggtgttttgttagaaatt

SEQ ID NO: 253280 - DNA, 187 bp, Homo sapiens; identical to SEQ ID NO: 209407
  chr4:722182-722369
  hypo

SEQ ID NO: 253281 - DNA, 334 bp, Homo sapiens
  chr4:738133-738467
  hypo
ggctccggctgccccgtctctgtctcctgtgctccccacgcctgcaccccacaggcccacacgcccgttctgcatcctggggagacccctgcagacactttgcggacggctttcctttgacgcttactccgctccgggggtccagagtctcttaatggagtgaatttttgacggcatttggagtacagtgtagttttttaaatggcttgacagtttggatttcatggtgcgctatgttctgtttgtgctaaaaggtgaaaccaaagcagacgacagttcaaacaaagaggccgcggaggagaagccggaggaggacaacgactaccaccgcagc

SEQ ID NO: 253282 - DNA, 177 bp, Homo sapiens
  chr4:741777-741954
  hypo
tgtgccttttcctccgggcgcgtctctgtgctccgtgaatgttacgtgaaagaaagtaaagcctggcagtgtgttgaaaggaaagtgagagtgaacgtcgagggcctcttcgtgtgtcatttactgtattaccagatgaagacagaaaaactacacggtcacagagatgcagtaaaa

SEQ ID NO: 253283 - DNA, 275 bp, Homo sapiens
  chr4:744982-745257
  hypo
cgcgtctataacttcgtgatgagttcctgatctccgtcttccaaaacttgggaagtcatccgagggtttgttccagattgttttgggtaattttaaaattttatttcacactaattttattctaggaatcgcttcttcatcttactgaagttttgatgcgacgttatagttatttaggcttaacgggaggttgcatgggttttgtggccgtttctggtgtcttcctggtgtgtttggatttgtgcttcgccacgtccgcacgtcacttctgagcc

SEQ ID NO: 253284 - DNA, 185 bp, Homo sapiens
  chr4:745651-745836
  hypo
tctccatcatctgacgggcgcaggccccctcgctgccacccccactggtgggcactcagcctcaaggcacaggcctcctgggactggtggctcctctgaatcttcctgagagaggcaagtttagtcatcgctgagcaacgcaaaagcgtgtcgggtttatttactcacaacgatgtcttctaaac

SEQ ID NO: 253285 - DNA, 687 bp, Homo sapiens
  chr4:756822-757509
  hypo
tgagtgtcccacaggttggccggggatacggacagcacaccggggttggggagactcactgagcacgggctgcctggagatcatggagaaaccaagtcaggacacggggggaagggagagaaggaaatggggcaacgctttttgctaagtttctatcgttttgtttgcttttctgtgtagcgaaacagaaaagatggatggtagctggggacagagcaggccgaggaagtccttggattttcatgtggaggtgtagcgggaagctgccggacagtggggctgcagggggtggggaagaggttggccatttcccagcgcagggctggttcctccagggaagagtgtgaggtttgcgctgctgctgcgttaaccgtgcctctgagcccccaacccagccactcaggcaggtggggctgcttcaattcatgccttccccagggaggaatctgaagaactgtctacatgatcagggaaacgcaaggaaaactgcgtggcaccacgcgtaccccatagaagggccagaatcccaagcactgacaacacattcgggaaacgccgggagcgcaggttcattcctgtgggaagtggaacccgcaggccctgtggagaacagcttggcagctgctgacaacacgaaacacactctcggcaaaccacccagcagccacacctcgtcatttacccact

SEQ ID NO: 253286 - DNA, 216 bp, Homo sapiens; identical to SEQ ID NO: 209410
  chr4:757737-757953
  hypo

SEQ ID NO: 253287 - DNA, 478 bp, Homo sapiens
  chr4:759705-760183
  hypo
tgcatgtggactgtgcctcacgggacgtgattcctcagcacccttcccgatgaagtaggtccttctcgcctccacccctgctaagcaggcactgtgcgttcttgtgtcttccagaaggcgccgctcctgctgcactacagacccaagatggacttgctgtgaatggtgccacacagcgcccacagactgggccctcgcacccttgggtgctcccggccgccgcgcttaagaacattgcctctgggtgtcatgtggaccagacttctgaatagagaatatttataacttttgtatgagagagaattcacactcaacaagacactaccagcaccacgtttacagaggatgaaaacacttcacagtctcccagagccgatcgtcctctcccccgccccaccccgtgcttcagccttgcagggagagtgatgctccaggcaacacggttctgagtcaccttctgacacgagctccctctgct

SEQ ID NO: 253288 - DNA, 210 bp, Homo sapiens; identical to SEQ ID NO: 209411
  chr4:765529-765739
  hypo

SEQ ID NO: 253289 - DNA, 34 bp, Homo sapiens
  chr4:793059-793093
  hypo
tcacacccttttcatcggtcgcatttctacgggg

SEQ ID NO: 253290 - DNA, 139 bp, Homo sapiens
  chr4:793648-793787
  hypo
tcaaaaaataaaaaataaaaagatcctctgtaataaaccataggcatatgtttccctgaattctgtgagttgctctaggaattaaacccaagaggggtcgcatgaaccccaactcgaagccggtcgttcagacattcta

SEQ ID NO: 253291 - DNA, 458 bp, Homo sapiens
  chr4:812189-812647
  hypo
gcctcacaggtccccgggcccagcgtctgatgcacgtcctgcaatgctccctctgttttgcgcccacgctgaagtgccacaaacacctcttctctcctcagcaactctggtggctttgcagatcttcattagctcacctgggatgagacgctgacctgagctggagctggggtcctgcaaccatggccaaggccccccgtccacaccgccgaggccaggaaagccgcgccatgtgagtgacgggaagaggccgaatgagggccaaggattacaactgtcctggaaaccggcggctgcgccatctgccgccgagcttggcactgtttgggtcacttattggcacgtccacctcgcctgtctccacgcatcctctcctgaaagcgaggaccaggtgctgtattgaagagctgggcgctcggtccgcaggcaaggacagcagtgcccgcggccaaggacgg

SEQ ID NO: 253292 - DNA, 97 bp, Homo sapiens
  chr4:815186-815283
  hypo
cccacctgaagccccggcccgcctgccccacacattcccgaggacctgagcgtgtttaaacagggcgtgtgtcacatcaaggcggaggatgggagag

SEQ ID NO: 253293 - DNA, 387 bp, Homo sapiens
  chr4:829599-829986
  hypo
ggcctctgggctcagacacccggactgcgtcctcaggagtggagctccccgaggaaagagtgcctttgcttcccttgacgtgtcctgcactttgtgtcagccagcgcggcagcaagaacgagcacacggggacagaagctcatctgaacctgccggcccgtgtcggtgtccagcgcggaggcgctgtgtccgcagggcacctgcatcctcataagctggactgactgccgtggggcccggtgccccatgtccagtgcatcccagactagaacaaagacttgcacacggcgtccaccacagcacaagccacagcagccacgggggaggcagccacgggggaggccgcccagcgccatcggcagagcacagacacgcaaactgtggtcc

SEQ ID NO: 253294 - DNA, 219 bp, Homo sapiens
  chr4:841555-841774
  hypo
gacccggctcccacgtgcagaatggagcctcagtgactgtgggtagcactcaggccagtggccggctgggaagatggtgcatcctgggcctttcacgtgtgggtgtccgggtggcgccgtgcgtgaccctgtgcagccgtgtctgcgtgtgcgcaggtgtccgggtggcgccatgcgtgaccctgtgcagccgtctgcatgtgcgcaggtgtccgggta

SEQ ID NO: 253295 - DNA, 726 bp, Homo sapiens
  chr4:843330-844056
  hypo
gtgacccggggctcggagccccaccctggccacacctgctgtcgcccacggggtcctcacggtggggacccaggtcccacgacggctcccaacctgtggagctgtgtgcgcagccaccaccactgcggcctcagaagaggggccgggagccctggttctcaaactccgaccaggcgtcattcagctccatgaagatcatcttggcgtgctgctcgtacggctgccccgcagcctatgggtgacaggcggtgtaagcgcctcttataagcatgcgggggcgggcggggcaggaccccccccccgccccgcccctgaaggcctcaagcggccgcctggcagctctgctcaccttgtcggggtgcacagccagcaccgcgcggcgatagtgcttcttcacttgctccggagccaccaggtcggccatgcccacgggcgtccagcggctctccccgtcccacagcactgtgtgcagcgtggacagcagggcccggatgttccgctccttgccctcaatccagtccaggagctgcgggagacacggagcttgccgagccctgggcacctgcctgccctcctcctctgcaccgcggaaactgaggcacgacgctgaggaagtgcctggtcacgtggggtgggctcagcccggctcacagacactgtcccactgcacgccctgccctcaactatatagagcccactccggacgacacagggccaggtggtctt

SEQ ID NO: 253296 - DNA, 121 bp, Homo sapiens; identical to SEQ ID NO: 209413
  chr4:854460-854581
  hypo

SEQ ID NO: 253297 - DNA, 128 bp, Homo sapiens
  chr4:859215-859343
  hypo
ctgagcgagtggacgtaggggcaccagcaggcggagcagctcgcaggccaggctgagaacaagcatctgcgcattcccatccaaaagggtttgtcaggaccccactttctgccgccatccccacagcc

SEQ ID NO: 253298 - DNA, 378 bp, Homo sapiens
  chr4:860587-860965
  hypo
ccctgacatgaccccgaggctgctcctgggggaggtgggggaagggcacgttcccttcctgcaagcaccttcgaaacacgcccatgcagtgagaatgactcagcctcatcactcatctactgtgaagccactcgccttcagaacagaaacacgtaccagcggcagggggccctcctcttggggtgctctgcacgctcaggggaggggccgggcttgccaggagcagcgggtcctcgctgagcagatcctccgggggcccctgggaggcggcctcagggggcccaaggaggcagctgagcaggtcggtgttgctggagggggccttgcaggcctgcgggggtacagctggccctgcgcccacctcggagtgcaggccca

SEQ ID NO: 253299 - DNA, 114 bp, Homo sapiens
  chr4:864981-865095
  hypo
ggcagaggggcaccgggcggggccgccatgtttcctgcaactccaggggaggccacgtgctcagagcagacgggacaacatcccacagctggagactccggcacccaggcaggc

SEQ ID NO: 253300 - DNA, 177 bp, Homo sapiens
  chr4:866140-866317
  hypo
gccggggccaacacgagcttccccctgcgcccgagcctctttgcgtgccgctgtctgtcgtcaggggtggcagggactgcacagcggtggcacagctggcgtggagatgtggaggaggcaacgtctgcagaggagcctgcaggcaccagcagagaatccgacggccaccgcagcgga

SEQ ID NO: 253301 - DNA, 247 bp, Homo sapiens
  chr4:872637-872884
  hypo
tcccggagcttgtgcgggccaggcaggtgacaccacttctatggtgacggtgcagaccccatcttcccagccacaggacactgtggcccagctcagtcagcagggagccaggacagccggtccttcagccacaacaaataaatcctgccaacagcccgagtggccaaggaagcagattcagaaatgaaagagaaatcggctttctcagagtcagtgcggccaacaccttgaacggaggagagggccc

SEQ ID NO: 253302 - DNA, 149 bp, Homo sapiens
  chr4:873652-873801
  hypo
gtttcagtatctctcgacctggctccaaaggccactgactcagcctcagcgatgtcgaaggcgttctcatttcggggatttccatttgcttatttcctggcatttccacggctctgaagagtggcccactggaccgcgcacctgcctga

SEQ ID NO: 253303 - DNA, 111 bp, Homo sapiens
  chr4:877548-877659
  hypo
ggccctggttttccacggacacggccttgtgttgttcctggcatgacctcagggagccatgggaggccaggctggcgctgaccctgtccactgctgcgcctggaggtgctg

SEQ ID NO: 253304 - DNA, 38 bp, Homo sapiens; identical to SEQ ID NO: 209415
  chr4:881388-881426
  hypo

SEQ ID NO: 253305 - DNA, 135 bp, Homo sapiens; identical to SEQ ID NO: 209416
  chr4:882583-882718
  hypo

SEQ ID NO: 253306 - DNA, 123 bp, Homo sapiens
  chr4:887622-887745
  hypo
cagggtcctgccccacgcacgcattccaccgggacttacggatgaggctgtggaagaccgtgtactgcgtgtcgtgcggggggatcgagtacttcccattgactattcgaagtttcgctccat

SEQ ID NO: 253307 - DNA, 113 bp, Homo sapiens; identical to SEQ ID NO: 209417
  chr4:891957-892070
  hypo

SEQ ID NO: 253308 - DNA, 224 bp, Homo sapiens
  chr4:899761-899985
  hypo
ccagggggcaagacgcccaagcgtcaccgaagcaacaaccgcgtcagcatcccagcagctgagctggcatgccgttaacgtgagaaccacatcggcatcccagcagttgagctggcgtgccgttaacatgagaactacattggcgtcccagcagccgaggtggcaagccattaacgtgagaaccacactggcatctcagcagccgagccggcgagccgttaacg

SEQ ID NO: 253309 - DNA, 309 bp, Homo sapiens
  chr4:905662-905971
  hypo
tgaagtcagaatacttgaatcgaacccttacaattttagacgtcagagcggaagatgagggagagagcagtggacgaccgagagaaaggcagacagaggcaggaggagctgcaggagagggcggggacaaaggcaggcacaccggccacacacacctgaccacagcgacaccaaagtccatcccgcgcgtggcaggaggaggcagggccctcagggggctgtgcgcagggaggctgcggcgtggctgtgtccacccgaacccacactcaggcagccggcgggctctccgagtgaacagagctaggagag

SEQ ID NO: 253310 - DNA, 36 bp, Homo sapiens
  chr4:907579-907615
  hypo
acataatggccccagcgtacacgccccccgcaaaca

SEQ ID NO: 253311 - DNA, 92 bp, Homo sapiens
  chr4:937313-937405
  hypo
acaggcatgagccaccgcgcccagctaaattatttctctaagctgtgccaaactgagtaccagaggagatgagcaagcgcaggtctcatgcc

SEQ ID NO: 253312 - DNA, 89 bp, Homo sapiens
  chr4:937752-937841
  hypo
ggagggtgcgattccgtttataccacattctaaaaaaggcaaaattggctgggtgcagtggctcacgcatgcaatcccagcatttcggg

SEQ ID NO: 253313 - DNA, 41 bp, Homo sapiens; identical to SEQ ID NO: 209421
  chr4:949385-949426
  hypo

SEQ ID NO: 253314 - DNA, 2519 bp, Homo sapiens
  chr4:955057-957576
  hypo
cgggagaggccagccgagcagggaccagggacgcccaccctggacctggccctggggcgggagaggccagccgggctcagcggggaccggggacgcccaccctggacctggccctggggcgggagaggccagctgggctcagcggggaccggggacgcccaccctgggctcgcccgcccactcggccggcggctcaccatgtgcacgacgcccgtcacgcccacaacctccagcagcccgtcgtccatgcgtggcttctcaaacctggtgtcgctgtcggagccccacaggtcggcccccgagccccagctgccgcataagagagcgggcacagaggtgtaggtgcaggcaggacgagggctgagcctgcccatggccccgccgggcagagcctctggggagccccgcccgcgagcacctggggatgttgatgaagatgaggccttcaatactgggcagctccacctcctgccgctccacctgcagccggatctgcttgtgcaggctccgagagtgactgatcttctgcagccccacccgcacgtacacacccttgttgtgcagcctgcaggacggggcaggtcacccatcaccaggggaagccctaccccgccttaggcagcctccgggttccggcccctctgcctgttcctgctgggggacctgagggaggtatgccgttgacaggtggtagcccctgcggctccggtacctgcttgtgaacttgccaggctcctcttcccgtgcctggtggaagtccaggctcagctccgcgtcgatgccaatgccacagtagttactcatctgcacgatctggggacagggcgttcatctcccaggacccggccgccctcaccaggccccctgagctccccaacagctctgccggcaggcagagacaagagcaaggaccaccctggcaccaagccgagcacccaggagagggcagcatgggcaggtcctggccaggctctgtcgccagctggctcagcacaatccccagcagtggctactttctgtgtctccctcaactgcccgctttgcagaggggatgatgcgggcgcgtacacccgagtgtggctgggaagaggacgcccgttgtgacgcgtgtagcggggtcatatgcaggagcctggaaggcaccccacgccgggctgccctgtaccttggggggctctgcgtctgccgtgtcgttctctgcactgccagcctcgtgggcatccagcaggatggtccagcggtccatgagcacggcgtcggcctcgtccacagacagcagtacggagaacgggtcctcgccgctgtagcccgccccccagcggaggactcgaccaaggtcattccctgggacacaagcagacacagagcatctgtccacacccacccgcccatcagctgggtgcagaccccaccacgaggacagccagcccaggcctcggcaaaagctgcacaggaaggggtagaccctgaggccccctcctcggctgcacggctgagcccacctgtgcccaggggcaggatggccacagaaggctccgggcaggccagtcggtaccgtgtctcctccagggcgccaagcacccagcccacagtgccatcgccaccacacaccagcacccggaagcagggcacctgggagaacaggtggagcctagcgggagacaggaagtgtcctctaccagctgcgggcgcagcccatcccccacccaggctgcctcttccaagtgcccgtcctggccgtgtggaggacttcaaggtcccagcacgggatccccgtggagctcctgccggccgagacagctgtggcagcctcctggggcccttcccgcccctgctgctgccctggaccaggggtcctgctggactcacccgggaagaggacctccgttggtcaggtcgaagacctgatgagggttcagtagcttccggaagctgcagagcaggtctcggcccttgaggcctccactcttggggttcacgaacacaaggaggggacagctgtctgggggcagcttcgcgtgctgacagacagggggctgggttaggatggggacccaaggtggggtgtccccactgctggggttgccaggcagtgcccagcccccaaccctgagcccacctggcttggaccagccccctccccaggaaggcgtggccagcaccctcacatctgaggcctcacacatgagctgcgtggtcaccccatctcgctgctggccagcagggcggcactgaggacagccggctggctgcctggcactcccagcacaaaggcctcagacctgcccactgagctgcgtgtgaacagaccacacccgcctgggccatgcagcgcgagtccaggctggaaatccacgtgggactctgcgtggcactctgtgccagcgagaccaaggcctgtcccctggggggcctctggtgcacacctttggaggatggcggctcccaggccaccgcccacctacacagcagccgagaaaagctcttaactcacagggtggcacgcggcgtccctcgac

SEQ ID NO: 253315 - DNA, 178 bp, Homo sapiens
  chr4:965203-965381
  hypo
tggcaggggcttctcggccttcggcagattggctttaccaaggacatctgtgtctcactcccccgaaactacgcatacccctaattgtccctgctacgtgctgtgcaccgtgcctgagaccgagagccacccaaggcaggtgagggctctgggaggcaggagccgctggggagtggac

SEQ ID NO: 253316 - DNA, 333 bp, Homo sapiens
  chr4:968831-969164
  hypo
catggcagtgaaccacggtgcaaactgcagctggcttctgaggaaaaactgtttaaggacatacctttctccatttaggagacagtggagagcatcaaaaacatcttaaaaaggaaaaccctcatctaccatttctgccagaactttctgctttctgacgcacacgttaattaaaatggcgggcaaagcatccttccagcaaacactccacggacttcctagaacgtcctccaaagccaccagcagcttctcgctgaaggggccttaaaactttgaatccgctctccctctccctctccctctccctctccctccacggtctccttccacggt

SEQ ID NO: 253317 - DNA, 32 bp, Homo sapiens; identical to SEQ ID NO: 209424
  chr4:982809-982841
  hypo

SEQ ID NO: 253318 - DNA, 38 bp, Homo sapiens; identical to SEQ ID NO: 209425
  chr4:995247-995285
  hypo

SEQ ID NO: 253319 - DNA, 250 bp, Homo sapiens; identical to SEQ ID NO: 209427
  chr4:1007048-1007298
  hypo

SEQ ID NO: 253320 - DNA, 367 bp, Homo sapiens
  chr4:1008574-1008941
  hypo
gcaaggtggggaatcgggccagccgccccgtttccatctcggggccccactcctggaagggaaaataaatcactgtccccttggggggagggagggagccgtgaacaaagtcgcctttggctgggcctggaaacgccgaccgcagactcctttatccattgtgcgggaatcaatgggcctccgggctccctttcagccgcaggccccgcgctgcggccctgtcaggggaaatgttggtttttccccagtcgtggcctccagcccctggcttgcccagccctggcttgcccagccctggctcaggaactgcggccgtgctgggagaggcgggctgtgcccgcagactggaccccggctgctgcatgct

SEQ ID NO: 253321 - DNA, 133 bp, Homo sapiens
  chr4:1012455-1012588
  hypo
agtgcgaggcagccggtcttcccaccaggtgcctgtgccctcaggtcctgactcagtttccccataggctgcgtgggttggacgcccgtccaggtggcgtggtgccctggccgctgtcctggtgtgatcattc

SEQ ID NO: 253322 - DNA, 923 bp, Homo sapiens
  chr4:1015873-1016796
  hypo
acccaggtggagctcaggcccgaggtctgtgctgggccgtgggtccccttttgaccgcccccccggctccggaccccaagcccctcctcgctgactgttcctcggtcccacccgcaggccccccaaagatggcggacaaggtggtcccacggcaggtggcccggctgggccgcactgtgcggctgcagtgcccagtggagggggacccgccgccgctgaccatgtggaccaaggatggccgcaccatccacagcggctggagccgcttccgcgtgctgccgcaggggctgaaggtgaagcaggtggagcgggaggatgccggcgtgtacgtgtgcaaggccaccaacggcttcggcagcctgagcgtcaactacaccctcgtcgtgctgggttagtcgctgctgcggtcagaggtcatgggctgggttggagccaggcaggggtgtgcaggagggcggacggggacacacctggggcccgagagtcagccagcccccggcagaaagccttccttcggtgccctgccccacctcagctggctgcacctctgccaccatcccccaggtatcctgtcccgttcctgtccccgtcaggctccagcctcggagccttcctcccagcggagggcggagggtggagggcgggagccgaaggcagtggtcccacagaagggctggggcccgaggccttggcagggtgtgccggccgtcggctgtgactttgaggctcgggtttcggagttcagaggagccgccgggatgcgtggcctttctgttctcttctgcgcctggggcccgggcgctgggcttggacaggtgtccagagagacacgccctccatacctagggacccggcaccccgcctgctccgctgggctcctgggtgtggggccctcgggtggagctcctgggagctgggctggc

SEQ ID NO: 253323 - DNA, 67 bp, Homo sapiens
  chr4:1022505-1022572
  hypo
gcgtctgtgccctgcgccggctccctcgtcacatctgcacgtccacactcccaagaacaaaattgcg

SEQ ID NO: 253324 - DNA, 244 bp, Homo sapiens
  chr4:1022602-1022846
  hypo
ggagcacagaggccccgtgtgcttcgaggacttgaggcaggaggcgggcagaggcgcccagggcgtgagtgtggccagcaggacagagggcaggactgcgcttctgacagtggtctgctccggccaagcacctgaaagatggggagcccttcaccccaggctcactggccaggaggctcgaagggccgggtggggcttgtgggaggtgggggtgccgctctgtgggccccgtctcacctgtcct

SEQ ID NO: 253325 - DNA, 146 bp, Homo sapiens
  chr4:1025836-1025982
  hypo
gagccaggggctgccgcagggcagccctggatgtgccctcctgggcacgcaggccgacatggattctgtggctgaggccgtcagcgtgtgaaagccacagacacaggcgggcccggagtgcctgtccaccccgaggcgcctgccct

SEQ ID NO: 253326 - DNA, 272 bp, Homo sapiens
  chr4:1036245-1036517
  hypo
cacccacacacacaccgacacacacaccgacacacacacctccacatacacccccgcacactgacacacccacacacacaccgacacacacacctccacaaacacaccccccgcacactgacacacacccacccccacacactgacacatccaccccccacaccgacacacacctacagtgacacccgcacactgacacacacccactcctgcacactgacacccactcctgcacactgacacacacccccgcacagacacacacccacccc

SEQ ID NO: 253327 - DNA, 181 bp, Homo sapiens
  chr4:1044472-1044653
  hypo
gcctccgcctctgcgtgctttcctcgcatgctgagtgtctaacctcggcttctgggtttgctgctgctgtttcacagacagcaccccacacagggcagcttgaggatgccccgctgcttccctggttgtggataagccaggcagctggcggatggcgcggcacgagcgctggctgtgcctg

SEQ ID NO: 253328 - DNA, 97 bp, Homo sapiens
  chr4:1077032-1077129
  hypo
tgactacataaaagacgaagatgcaacaatgagcaaggactattttccaaatggtgaaatgagcaggaatgttctcaaaatgttaactgtaatggac

SEQ ID NO: 253329 - DNA, 283 bp, Homo sapiens
  chr4:1093369-1093652
  hypo
ttttaaaagtcaagattgctcgcacaatccccaggaaaatcacaaacgaatgttttcttttcgtatttaatttttaaaaggggggtgtgtgcgccacaatggtacagtaacgaggatacatagttaaatctcacagcgtgactgaaggcctttgctgcgtctgacgtcatcatggcagagggcgtaaggaatggaggaaatcaaccctggtgcagagcaatcgagtccacaaggtccgacggcgcaagcggacacgggtacccctgtgcgggatccacggggc

SEQ ID NO: 253330 - DNA, 207 bp, Homo sapiens
  chr4:1189021-1189228
  hypo
tcaatgtcccactcccgcatctcctgcggtcccagggcgggtcccgctggtgtgtggccggcctcgcaggaaccacttcgctctcccccatccactactcccacaggcaacaggaccggccccctggcccgtcggtgggcgcatcagcttggtggccctggccccctgcgcctcaggggtccctcacaggccggccagcttccagca

SEQ ID NO: 253331 - DNA, 42 bp, Homo sapiens
  chr4:1201010-1201052
  hypo
agagggggtggaggccggaggcctagacgcctgtaggggctg

SEQ ID NO: 253332 - DNA, 240 bp, Homo sapiens
  chr4:1201278-1201518
  hypo
gagaggccacccagaagagccgctgtttccatgtgccgcgcttacacatgctccagagggtccggctgcctaaccatgcgccgcgcttacacatgctccagagggtccggctgcctaaccatgcgccgcgcttacacatgctccagagggtccggctgcctaaccatgcgccgcgcttacacatgctccagagggtccggctgcctaaccatgcgccgcgcttacagatgcacctaacct

SEQ ID NO: 253333 - DNA, 333 bp, Homo sapiens
  chr4:1202638-1202971
  hypo
gcacacgcacacgccgcccgcccaccaggcagacacccacacacctgtgcacgcacgcgcacgccaagccagcgggccctgcccctgccccggagccctcagtgtcagaaccaggctgctgtggctgtttcctctttaattcgcctgagttttatgagcccaaattcatagacctttgttgctgcatataaacttgaggataaacttgttgaatttgttcaacgtaagcagctgaaattctgcgtggggtggtgatgaacggctctagcactcggtaaaaggtatttaaagcgcatgtagtttacaacactaacagcccgccgcccgcgagca

SEQ ID NO: 253334 - DNA, 520 bp, Homo sapiens; identical to SEQ ID NO: 209433
  chr4:1204211-1204731
  hypo

SEQ ID NO: 253335 - DNA, 63 bp, Homo sapiens; identical to SEQ ID NO: 209434
  chr4:1204981-1205044
  hypo

SEQ ID NO: 253336 - DNA, 477 bp, Homo sapiens
  chr4:1205831-1206308
  hypo
gacacagggcagagcgcccacaggacggacgacgacaagcgacacgaggcccagcgctgccccctcccgcctcctgacagcccggaccagtctctgcagtgccagggccaccacacagatgcctcctccacacactctggtccgagggtttccgggccctctgcccaggcgccgaggctggagagctcctcccgggctacaactggtcactggcgtggtctctatccgcctcgggcttgacggtttggccaggagaaggggcgtggggcgggtgggccacagggggcaggccgtgggacagggacatggcgctggggacgataccttccacagcagctgggatgccagtgggggccacgcccaccacgcccggagggtacctgctgggagagggtccatccgtgaggcccacctgtaggcggcctggccaggccccacctgccctcctagcatcggcagcaccgagggggcctctcc

SEQ ID NO: 253337 - DNA, 396 bp, Homo sapiens
  chr4:1208723-1209119
  hypo
ttcggaacaggctcgcttttcatgcacttttgcaaaaagccctgcgggtggctctccctcggcttcgtggccagggctttcctgcagcccccccatttcattccaagaagtccacccagccacggtgcttggctgacagctgggcaggtcacggtggcttttctttggtgcactgctgcccattaaagcctcacacccaaggtcctcagggacggcagggctctgaccagcatccacgtgccacaccctgtcccctagaaggctccaaacccactgactctgtgaacaaaggaaggggcagcgggaacctggcctcatcctccttgtggctacaggctgctggggcagctagagtgggcgggtggcctctgacacgtgtgtacacacatgcacata

SEQ ID NO: 253338 - DNA, 135 bp, Homo sapiens; identical to SEQ ID NO: 209437
  chr4:1212170-1212305
  hypo

SEQ ID NO: 253339 - DNA, 276 bp, Homo sapiens
  chr4:1214807-1215083
  hypo
gaaaagtcaagccacggcctgagatattcgtaaacaagaaaaaacaaaaattttgaaattatgaaaatatccacaatgcatgtcgatctgacaagaacctgacgcagaccacgtgagggcttcgtaaccaacacgaaaaagacggccggaggtgctccgagtggccaagggcacaaagaggtgctcagcctcctcacttatcaggaaactataggttaaaattaaaatatcacaaaatacctgctggaagggctagaattacacagagtgctggca

SEQ ID NO: 253340 - DNA, 420 bp, Homo sapiens
  chr4:1215113-1215533
  hypo
cgcccctgcctgaagaacagcgactccttccaggcgaaacaatgtcctgctctgggactcagaaattccactcctaggtacaaacccaagagacgtgagtctatgtgcacaaaaaagacgggcagaaatgtgttcacacaagttttgtttgtaatattagccaaaaacttacaaaatgcatcaccaagagtctggagaagcaaatcgtgctgtgttcacgtgatggaaccgttatcagaaactgctgggtcgtatgaaaacacaggtgagacccagaggcatcaccccgactgacgggaggcggacacagaaggctgcgtgcccgtgatcccacctcggcacagctggggaaggccctctgctctaggaagcgggacccgggtcctcgcagggtcgtcgcggggccgccacgggagaagg

SEQ ID NO: 253341 - DNA, 415 bp, Homo sapiens
  chr4:1215813-1216228
  hypo
agccaccacacacgcggattccacgctaagaacaacccagacagtgtgtgcacagcagagggcagatggggacatgcacaccctgggagagcctgagtggctggtgcccagcaccggccccgcctggagcatgaggctcttccacagagggtgggatggggctcagggacaagggcgaggggcggggcgggggacgggacgcaggtgttctgcagtcaagggtgccaggtgggcagccggggtggggtaggggtcccgtccacaaggtagaggctgcagcgtcagggggctcgtgtccctaaggacagaactgctctcctcagctcccgaggccgagggagcgctgacctggcctggttcatcacaagatcaccacagacagaggggcccgcgccgagagcgagggaagcagctg

SEQ ID NO: 253342 - DNA, 200 bp, Homo sapiens
  chr4:1217207-1217407
  hypo
acctaggtgtggccgcctcaccgagaccacccgaaacgtccgattccccaaacgctggcgggacaaggacagcggtcagcaggagtgggctgcctggatgtttgggaagcggggggccggccggtcaaggggagtccctggcatggcaaggcccttgcatccccatggggcctcctgaggaacccgcgatctggggagac

SEQ ID NO: 253343 - DNA, 175 bp, Homo sapiens; identical to SEQ ID NO: 209442
  chr4:1222481-1222656
  hypo

SEQ ID NO: 253344 - DNA, 365 bp, Homo sapiens; identical to SEQ ID NO: 209443
  chr4:1222883-1223248
  hypo

SEQ ID NO: 253345 - DNA, 40 bp, Homo sapiens; identical to SEQ ID NO: 209444
  chr4:1224485-1224525
  hypo

SEQ ID NO: 253346 - DNA, 76 bp, Homo sapiens; identical to SEQ ID NO: 209445
  chr4:1224555-1224631
  hypo

SEQ ID NO: 253347 - DNA, 38 bp, Homo sapiens
  chr4:1224661-1224699
  hypo
ggccctcctttgggctccgggcgcgcccacccagctga

SEQ ID NO: 253348 - DNA, 493 bp, Homo sapiens; identical to SEQ ID NO: 209446
  chr4:1225295-1225788
  hypo

SEQ ID NO: 253349 - DNA, 552 bp, Homo sapiens
  chr4:1228596-1229148
  hypo
tcaggtgtgcaccacgggcagttcacccacagccccttgcatgcgtgtggacatgcccacgtgacgtgccaacgtgcccatgtgccgattccagacaccggcctgccggcggcccccccacctacaccccgggccactgtttccgtcacgctaatcctatcacctggggatgaagagatcatacagtgtgcaccccttgaaaccagcttcttcactcgccatcatgctgccgagatcacccagggtgtggcagggacccagcgttcatgcctgttgctgaggaggacaccgagggaggtggccagcatttgcctggccactcacccactgaaggacagccggtggggggcgtccttctggtttgggctatggtgagttaagctgctagggagcatgacgtgcaggtctgtgtgtggacgcgcattccgagtctccgggataaaggagtgtggccactgggctgcattacaagcacgcatctacccgtgtgagaaaccatgaagaatcttccagagcgaacgccccagcagacgctcccggcagaccacgcgc

SEQ ID NO: 253350 - DNA, 77 bp, Homo sapiens
  chr4:1232725-1232802
  hypo
gcctgggctaccgcgtggctgcccggaatccctgatggggtcaccagtgtttcacgtaggacgcccccaaccctctg

SEQ ID NO: 253351 - DNA, 166 bp, Homo sapiens
  chr4:1238879-1239045
  hypo
aacagctcctccgacgacagcaccccagacagacactgcccaagtcatccacgagccgatacggcaccttggacggcagcatccctgtgagccagggagccaccgcactccacggggcctgcagggccgcatcacagctcagaggacacagcgcaggggctgtgat

SEQ ID NO: 253352 - DNA, 334 bp, Homo sapiens
  chr4:1254351-1254685
  hypo
cagcacagactgcccgccctacatgcctcttacccaactacgtgtccaactctgctgaaacccgagctaacacagcacaggctgcccgccgctgccctacacgcctctcacccagctagactcgcatccaactctgctgaaccaccagctaacacagcacaggctgcccgccgctgccctacacgcctctcacccagctagactcactgtccaactctgctgaaccaccagctaacacagcacagactgctcgccgctgccctacgcgcttctcacccggctagactcgtgtcaaactccaagcagactggtgagacagcgctgctacaataca

SEQ ID NO: 253353 - DNA, 140 bp, Homo sapiens
  chr4:1282405-1282545
  hypo
gagagtggcagacacgatgcgaaccgtgaaaggacgcaaagagtacagagtgcatgcttccatctctataggaaggtcaggaacgctgttacggggagcagggttagaatgatggggatatagcccgggaaggggcagag

SEQ ID NO: 253354 - DNA, 444 bp, Homo sapiens
  chr4:1290582-1291026
  hypo
ggaccccactgcctcgagacgctcccatcactcggctcccgtgacaccatcctctgggctctccccacccctcgctgcatgtcctcacttgcctatgctgtcttctctagtcttggaggccttttgttttatgtcaccagccagccctccagaggttgtgtggcttcacagacggtctccaagctcctgtccccacactgctgccctccccaggcctctctccctgaggccatcccgtgtagtcacctcccggagctctcttcgcatgtctggaaggcagttcaaagatacgataccaggcgcaaaaccaaatgccgcatctcggccttggggccccagacgagccccagacctgccttactaagccacccttcccaagtcagttgacagcgatgtcccccggcacttgttcagtgacagccgagaactcggaggttttctcga

SEQ ID NO: 253355 - DNA, 584 bp, Homo sapiens
  chr4:1299051-1299635
  hypo
aagtggtccctgtggaaagccgctgcactaggtgagcccggccctggtgagggtgccttgtgagtggagcctgcttgtgctgctgtgccccgctgcttccaggcggcgcggccctccgtctgattgctggaggactcttcggtgtggacacaccgtggtttgtttacccatcctggtcaatggacaattggaactgtggtgaacaagcattcctgcacctgtatgtggatattgtatgtccatttttcttgggagtggaatggctgagtcatctggtaggtgtctttaccttttaaagaactaagcgctttttccagaaggatcatcagaactgctgccagcaagagtccaggtatcccggctccaccagcatgtggtggcggcctcttgacttggaactgttcttctgggtgccggggttctccagagaaacagagccagtggcacccacatgtgtgtgtgcgcacgcgtgtgtgggagtgtgcgtgcgtgcacgtgcgcacgcgtgcgtgtaaggagctgtgtcacaaagaattggctggtgcagttatcaaagctaagtcccgagccggagacccaggaga

SEQ ID NO: 253356 - DNA, 70 bp, Homo sapiens
  chr4:1304008-1304078
  hypo
tggtgtcagggcctcgggggggccttccccagtgggtctcgttgagctcgcttgcactggtcaggtattt

SEQ ID NO: 253357 - DNA, 135 bp, Homo sapiens
  chr4:1305766-1305901
  hypo
gtgccctacgagacgctgaacaaacgctttcgcgccgctcagaagaacattgaccgggagaccagccacgtcaccatggtggtggccgagctggagaagacgttgagcggctgccccgccgtggactccgtggtc

SEQ ID NO: 253358 - DNA, 369 bp, Homo sapiens
  chr4:1309326-1309695
  hypo
acctgctgcgttgcggctactacaacacggctgtcaagctggcgcgccagagcggcatcgaggtgggtgcccgccagacgcaggcacagcgccccagctggccccaggcctatggccagccgccctgtggcatgtcccccggcatgcctgtgtccctacatgcttgtgttcccctccccccacccccgtatgcttgtgttcccctccccccacccccgtgtgcgtgtgtcccccctccagtgtgtgtgtgtgtccccctccccgtgtgcgtgtccccctccccccatgtgcatgtccccacccctgtgtgcgtgtgtccccttcccgtgtgtgtgcccccccccccccaatgtgcgtgtttctccccca

SEQ ID NO: 253359 - DNA, 110 bp, Homo sapiens; identical to SEQ ID NO: 209451
  chr4:1309945-1310055
  hypo

SEQ ID NO: 253360 - DNA, 684 bp, Homo sapiens
  chr4:1317015-1317699
  hypo
agccaccgtgcccggccgagtaccgacttttgtagagaccaaaagaagcttaagaaatggactcctaaaggacaaaatttaaacctgcttattaaaaggcattgtcaccctaggggcttgcagaaatgttttaacttatgttaacacttctgcctccattagcaaaacttttctgtcttctaaactgagcgctgctttaacctcaccctggctgagtttggcagggtgcacgcagttaccagccaggagtgacacactgccactcagggccgccaaaacaagcacgaagcaaagacgggacgaaaaagtagagcggctagtagctcccctaaagagagtttggaccttggtatggaaaccctaaaaggaaagccagaattggtatgtaacctgcggccccactacacagtgccagccccacactccctcccagagagccggcacacacctcacagtgggaactctgccagggctgtttcctgtggatgtcagagggaagataggttcttggtgctgccaggatattcctgcaagccctaattacctgccggacagtgttgctggagggtgttggaggcttgccacgagcacacgacctgtctgaagctgctgtggggacaggcagggccaggactcggggccctgaatgcatgcctgggggacgagtgtgcctggtgttggatg

SEQ ID NO: 253361 - DNA, 91 bp, Homo sapiens; identical to SEQ ID NO: 209453
  chr4:1322319-1322410
  hypo

SEQ ID NO: 253362 - DNA, 223 bp, Homo sapiens; identical to SEQ ID NO: 209454
  chr4:1323177-1323400
  hypo

SEQ ID NO: 253363 - DNA, 96 bp, Homo sapiens; identical to SEQ ID NO: 209455
  chr4:1323654-1323750
  hypo

SEQ ID NO: 253364 - DNA, 157 bp, Homo sapiens
  chr4:1324018-1324175
  hypo
gagcagctccgtgccgtctgtcgcacacccacacctcagcctggccaggcacagtttaggaattttgtcttctgggtgtttctctctctctctctttccgtgtgtgtgtgtgtgtgttttgaggttgagttttgctctgttgcctggcacaatctca

SEQ ID NO: 253365 - DNA, 56 bp, Homo sapiens
  chr4:1324514-1324570
  hypo
cgtgctgttctccccggacctgctctgagggccccacatctcggctgcagttctct

SEQ ID NO: 253366 - DNA, 256 bp, Homo sapiens
  chr4:1324847-1325103
  hypo
ccgtgttctgtgcacgtcttggcgtgtgacgaagggtgacttgtctccagagatggaatgagggggttgggtggggctcctcctggactcagacccacgcccacccacacgctccaaggagggggatgcatgggcactggaatctcggatggccgtccccagcccctgcacacgcaccctgcggggtcagccgtgtggactcacccccgactcccagtccctgtatgcaccctgcggggtcggccgtgtggattca

SEQ ID NO: 253367 - DNA, 150 bp, Homo sapiens
  chr4:1326090-1326240
  hypo
agcctctggtgagccgcacctcccgccatcccagccccacccagcaggtcggcttggagtgaggcgattactttgtacctagactctgacataaaagctgttagctcagatttttcaacttaaaaatgcaggccgggtgcagcggctcat

SEQ ID NO: 253368 - DNA, 210 bp, Homo sapiens
  chr4:1326480-1326690
  hypo
aaccctgtctctaaaagttaaaattaaaacgcaaacttaaatgtgccaaaatgttgttttttagacatgcaagaaagcacttcagccaagcagaagggagccagctggacgaggtgcgccaggccatgggcatgctggccttcccgcccgacacgcacatctccccgtacaaggtagggcgtgcgtccctggggtcggtgtcatgctggg

SEQ ID NO: 253369 - DNA, 290 bp, Homo sapiens
  chr4:1330875-1331165
  hypo
cctcccaccacagacagccccgagctcccgtgtgctgcacttgcgtggtgtctggatggtcggggtggggccgtgttgaggggcctcggatgcgtcgtgcagccttcactctgggaagtggcgcgcttcctctctcatcatctcagaggccgccatgggcattgatctaaaagcccgattttgatgtgttctggcagccggcagattaccattcagaatagttttcccgtgtgattaccaagaaccttgcctgtgactgactctgtcccgcctgtgactgactctgtccc

SEQ ID NO: 253370 - DNA, 750 bp, Homo sapiens
  chr4:1331675-1332425
  hypo
aactgactctgtccccgcctatgaatgtctttcatgtgacctgcctcaggcccagagggcagtgagtgtttcgcgattgctgctggtacctggctgtgccggggtatgaatgagactcaggccccctcccttgtcccctctttgtggaactctgggcgagagggctggcgtgcttgcccactgcctgttcctaggtgccagcagaacgtccctgctgggtggctcttgtcctgcctggagaggttgcgtggccggggagagggcggcgggcgacggagccactctgtgcctgtggtcctggtgctggaggccggggtgagaaggcgcaggcttcttgtctccaccgaggcctcagtggggctgtttagctgtcgagtgcagcacttcctgtgcctcgaaagacagccccgtgtagtcagcatggcgcccacatagccagaagggcacgcagcccagggcagagtggccacagggggctgggctcaccccggctgccctgagtggcccccaacccttccttgacccgatgctcagacagtgctacaaggaggacggcagctccaagagccctgactgccctgtgtgcagccgctccctgaacaagctggcgcagcccctgcccatggcccactgtgccaactcccgcctggtctgcaagatttctggcgacgtgatgaacgagaacaatccgcccatgatgctgcccaacggctacgtctacggctacaatgtgaggggggcagggcaggg

SEQ ID NO: 253371 - DNA, 1059 bp, Homo sapiens
  chr4:1332665-1333724
  hypo
tcgttcgaaatggatgaaggggtgggaaggacaggcgaggtggccccgggatttctttggcaggtgtgccttcgggaaggaactttgcctgagaggatgagtcattccctggtggttcattgtggggattttccatggaaatccgtgtgtacgttgtagtcgcttgccttaatgcattcccggttttatttttcagtctctgctttctatccgtcaagatgataaagtcgtgtgcccgagaaccaaagaagtcttccacttctcacaagccgagaaggtgtacatcatgtaggccccacgtcgtgaagcgcacgcctcggggacgggctgcagtgggcggggaggccacgccttcctcctgtcccacgctccagcctgccgcggcgtttctgtttcttgcgaccaaagatccgtgagcaacgataaatactcttaggaagagagaaaataaggtttcataagtttgtacttgaaaacatttggattggtaggattttgtaacacgtcaaccatttgatgcttctgaaaagtactttcaacttgcgaaggaaactcttctttaaagactgacctaaacaccgagggaaacttaagaacgtttaaaatataggagtccgtgatttccctgtgttttcagtttctttccttctgtgaacgatgagacttggagaacgggctggtccttcaccacttcctgttggccctggcctggccggggaaggtggcagcggcaccggactgacctgcagtgacccgcgatgccgcgccacgagggacacttatggcttcattcgagagctgctgccaaaacgcctggcgccgccaccgtcgggggctggcttcgaggacgcccgcctgcctcgcgggtcgtgtccgcgggactgtgttcgtacgtgcatagtttcgatatcacatcgcggggctgtgttcgtagctgcgtcgtttcgatatcacaccctctgtgtgccgccttacttcctgcttcgagaatgtataacgtggaaatccacgggaccaaatttctgcagaggccttgccggatggttccataactgtaga

SEQ ID NO: 253372 - DNA, 220 bp, Homo sapiens
  chr4:1333934-1334154
  hypo
gagccgaggctgccgtgcgtttctaacaccgaggttgtgttctgctcctccccggggcccgggcagcatggcgggcatatgcgtagcttctggcaccacggccaccgggagttgagaagccggctggaggccactcctgcccggaccgcagtcctcctctcgggcgctgccctgaggcgtgatggccccagcgtcttgaggccccggcttgcagctgggt

SEQ ID NO: 253373 - DNA, 68 bp, Homo sapiens
  chr4:1334471-1334539
  hypo
aggtcccctcggccgaagcagaccctgtggccccactgccacgcagccgccccggcctccaccgtcct

SEQ ID NO: 253374 - DNA, 293 bp, Homo sapiens
  chr4:1336759-1337052
  hypo
ttgcatttccacgcacgttgtaaaatcaactcatcagtgtctgctgaacactgtaaaaagtgtgctgggattgtcactggaactgcagtgaacctatcatccctatttggggacggtattagtttgctcggctgccgtaacagaagaccacggactagcgggtttaaacaatggacatttatttcttcacggttctagaggagatgctggcagggttggctcccggtgaggcctctcttcccggcttgcagacggcccccttctcactgtgtacctctcgtggtggacttcct

SEQ ID NO: 253375 - DNA, 320 bp, Homo sapiens
  chr4:1338566-1338886
  hypo
agcacggcaggtttagaaaacggatggggggtgttgagccagggaggtgagcgggtgcagaagtatttgctcagggtgagacatgagcagtggctggaaggaggcaaggaactctgtggatactggcagaagcttcccggcagagggatccgctccccagaggccgtgtggcagcaagagcaggctggagaagtcaaccggtgggatgcagggggcagcaaacacaggccacgacaggttttgccttgccctgggatgggagccgtcggaggattttgtgtagaggaatcctgtgatccgaccttagactttcaaaggtc

SEQ ID NO: 253376 - DNA, 77 bp, Homo sapiens
  chr4:1339094-1339171
  hypo
agtcagataattggtccaagcgaacagaaggatgcagggcaggcccaggcacggtggcccaggcacggtggctcacg

SEQ ID NO: 253377 - DNA, 33 bp, Homo sapiens; identical to SEQ ID NO: 209466
  chr4:1348027-1348060
  hypo

SEQ ID NO: 253378 - DNA, 248 bp, Homo sapiens
  chr4:1354334-1354582
  hypo
cccgtgctatggccgcgcccagaggctggcgcctgcttcccagaggctggcgttctggcccctgtgggccctggctgcactctccttccctgagaaggtcaggctgaagcagggtcctttcccgcccccgtgagccgagtgtgtgtgtgactcaccagagcccgggagcaaggacacaggcagctttcattttcccgagcccagagttagctttctccgcagagctcgggggcaggagctactaggtt

SEQ ID NO: 253379 - DNA, 132 bp, Homo sapiens
  chr4:1355307-1355439
  hypo
agcaggttctgctcggccccgacagtgctgcccgccaggtgcccttcccgcacgcttgctgcagtcagccctgcaccgctccgccctccgtcctctcaaggtgcgtccctggcagccggagatgcacatgag

SEQ ID NO: 253380 - DNA, 101 bp, Homo sapiens
  chr4:1411588-1411689
  hypo
tgcttgtggcctgccgatgcggccacacgcgtccattttgagaggaggcctgtggtttgggagcgcggttcaatttcaagctcagctcctgtccccacccc

SEQ ID NO: 253381 - DNA, 137 bp, Homo sapiens
  chr4:1411719-1411856
  hypo
acagtaggttcaaaataaacagatggcacagtggccgcagagaccaagctgcagaacttggtgcctcccaccctgttcttccaggcgcaggctgcccgcacgcctcgcggcacttactccctcggacatgtttcttc

SEQ ID NO: 253382 - DNA, 283 bp, Homo sapiens
  chr4:1491943-1492226
  hypo
agctggagctgttccggggccctggacctgccgggctggggacagcctctgtgggtgccgggggtgctttggcggctgagcgggtctcttggtgcgacgccgcctcccgcctcccggagccccggcccccaccccggcacacacacaactatttaattttgctctggcaaggaataatagagtcctgtgtatctattacagatgcggggagattgggccgccacaggctgcacagcacattcagaggcctcacaaagccggctgcaatcgactcggcctgcca

SEQ ID NO: 253383 - DNA, 120 bp, Homo sapiens
  chr4:1537043-1537163
  hypo
tgtgtgcgtgtgtgcgcacacaccatgtgaacatgcaagtgggtcatgcgtgtgactgtgtgcatgtgtgtctgagcgcatggtcaggtgcatgtgtgtccgtgtacatgtgtgcacgtg

SEQ ID NO: 253384 - DNA, 94 bp, Homo sapiens
  chr4:1537283-1537377
  hypo
tgtgtgctcagagaagtcacctggagccgaggagatcccaggaggctgaggctgccccacaggcacggtaggctttgccgtgggtgttcagctt

SEQ ID NO: 253385 - DNA, 477 bp, Homo sapiens
  chr4:1537790-1538267
  hypo
cccagcgccggttacgatccagacaagattctgaagtggggctgctgccagcagggcccggcctctcctgcccctcgggtcacgcctgcccagagcgggggctccccagggcgcagcagaatccgggaaaggggcaaaagaggggaagccatgagggaggtagtgaggggcaggagagcccggcagcctccaccccgcgcccccatggctcccccagagtgttacagcaagcaggcgcccgagagcccggtgcagctccaagttgctcgaatggggaccagcgcagacctcggctccagggtggccccggcactccgtcctcttacttgacaggacccccagcctcctgcacactcccggggtgaggcagccccacatgggtgctgggctgcagggacccaggtcttgcctttgcagatgggagacgcggccagcacacaggcaggtgctatggggtggcagcgggcggggggggcg

SEQ ID NO: 253386 - DNA, 300 bp, Homo sapiens
  chr4:1541582-1541882
  hypo
ggtcctcagcgggcggcagccgtggtggccctaggaggccaccctgcccgagcacccgcttggccctgcggccgccgtcaggcctcagatgtcttacatattaatttcccgctgcagaacatttgccgagcgcagctcaaacccagttagctggattgatgaaggtggcaaaaggatacgacacacgctgattccaccttttcagcttcgattagctccggccgggagtctgtccccgtcagagctccatcacgcggccggcggagaactggggagggaccggccgcaacagtgcccagg

SEQ ID NO: 253387 - DNA, 174 bp, Homo sapiens
  chr4:1556436-1556610
  hypo
gcccccaccagcctcgacctgcccgtcccgtcatccatttatttatgccccgcttgccgatgcctgcggctgaataacaactctgtgggtcccagcatagggtctgcggcatggagcctgcctggcatggcccaggcagccgccatcctcaccagccccggcccagccttgctc

SEQ ID NO: 253388 - DNA, 513 bp, Homo sapiens
  chr4:1556818-1557331
  hypo
acagagtcaacaagcgtggaccgcctgcgggctccgagctgagggagaagcacacgccgcccctgccctgtgagctggcgttccaggacagaatcggatatcaaacgagcacacggataccaagtaaaggccccaccgtcacacagcagccgccgctggaaactgagtttggtgggggaggggcctctctgcccagggactgagaccctgggatggtgacaaaggccagcaccgggtcccacacggagatgacgccatttaaccctccccaagacgccagggaagaggcgtccttgttcgtccattttacagaagagtacactgaggcctccagacgctggtggggacctcccaagccaggctccccatgtctctttctgggcctccgaccaccgttgatcagagaagcaaatctgttgggagaaatctcggagccacagagccctggcagggtgctcctggtggggaccagtccgggctggcccgacacttcctgcacgccggcctccctgt

SEQ ID NO: 253389 - DNA, 575 bp, Homo sapiens
  chr4:1563631-1564206
  hypo
cggcctgggagtgtcgattctgcgccactaactcattgatcgccttgcccgggttaattaattaattaggggcagccatggagcacagtgggctggggccaaggagggaccccagcgccgggagctttattagtacataaaatgggtgtttaaaacacacacggccacgagcgtgcagttgaggcttttcattaaacaaacctataacattacgtgcctcattatgtatttcgagacttcccctgccttccgcgctccctctccacctgcctccccgcgcactccaagtgcctatttgaaatcaatttctctaataatggacttaatgagctcatcaattagagctgccataaccgagtgtcgtgggctctgcggttatcagttaaactctggaactaatttccatgcttcatctatcacggggcgcccgcgacgtggggctgctgctctgggacgatagggagaccccaggcccttcccgcaggtctcggggccatccctggaagaggacaatgaggacagagtggcccacctggccgagagcggccgaggcgcgaggccggtgtcattagtgg

SEQ ID NO: 253390 - DNA, 827 bp, Homo sapiens
  chr4:1577791-1578618
  hypo
gggtttgatcggcccgtgcactggtgagagcatgctaatattggctccaataaagagcaaatcagggccctagtcgacgcgtcttatcacacagtcagaactgatggctgcagaagtcataaagatcccatttaatctcgcgcctatctatcacgcggctgccttcatcctctttgtgccggggtaatatgtgctcattacaaaagcaaaacagatctggcatgaataaacgcaggatgaagtgctcactcggaaagtgacagcatgatcagtggcggcagtaatcgcagagaatcgcgggctaaattattccataaccgtgatttgaggggacagcccagagcaccccacagctgcctgcagcacagcgacgtgtcctgataaaacatccttcccaatttacggggccgcgcttgactaatctgcctccgcgcgcacactgtctaatcatgccatcagcaccgcgagaaggggctcaattgggactccaatgaaaggagattggaaaactaccctcaattgaaattacatttgtaaatgaggcagagttttctgttcagagtgtgaacgttacggtaaatctgctccagaaagtcgaagaggcggcagcggtgggcaggccggggacgccgcaggggcgactgggactgtgccccggctggggccagggtccacattctggagaggtgcccggcaccatgctggcccctggggacagccccaggagaggagaggggctgtggcggaagcccggagagttgggcctagtttgtcagacatcagacttcacttcccactctgtaaaatggggcgcagggcggcctcct

SEQ ID NO: 253391 - DNA, 62 bp, Homo sapiens
  chr4:1585407-1585469
  hypo
cctgtccctcctcccggggcttgtgcgaggattgaagcgttagtgtcgttcttgccggctca

SEQ ID NO: 253392 - DNA, 524 bp, Homo sapiens
  chr4:1600696-1601220
  hypo
ctcctctctgtagcgtgcgcaggggtgcgtgcgggtgcagcaccgcgttccttccccggcccgcttccctcctggcctggcagacccttcgtcaccgaggccaggggatccagggtgccggagcgcagggccgtcggctccaaccccgcctggtacttcaccgaggccaggggatccagggtgctggagctcagggccgtcggctccaaccccgcccgggacttcgccgaggccaggggatccagggtgccggagcgcagggccgtcagctccaaccctgcctggtacttcaccgaggccaggggatccagggtgccggagctcagggccgtcagctccaacaactccgcccggtacttggccggagcagaagcacagtgggactcgggccagccaggagcccatcgggggcagggcatggcacctggacctgagggacatctcgagtgtttcgcagacaaggagacaaggcacagaggccaaatgagtggccccaggccccacagccacgggagcagcactgg

SEQ ID NO: 253393 - DNA, 470 bp, Homo sapiens
  chr4:1616406-1616876
  hypo
agcccaggggaggttcctgccgcctccggtcacaacagctccgtccgccaatcaatacccggccctgctttatgtgtggccctattcacagacaccgcactgagcgtgtatattgatcccttaacatcaagctcacagccagcggtgccacagctcccacccagaggcaggtcgccccacacgcatttctccacggggtgccccatggccgtcctatgctgacggacaccagatggcatttcagcaccgggcacaggggccgctttaaacagcaaaatcaccaaagggacacgagagcaaaaacatggcacacgcaaaccacaaaaaaggacatttacagatgagcagagacagaaggcaggatgcggccacgcccaccccacctgggcacacagaaggcaggacacgaccacgcccacctcacctggggacacaagggaggcaggatgcagccacgcccaccccacctg

SEQ ID NO: 253394 - DNA, 471 bp, Homo sapiens
  chr4:1621151-1621622
  hypo
cccttgcccagctcggcgtctctggggttggcccacttcaggactggccggccttcccgccctgttcccagactcatgcacctgtggacatgggcactttcctccaagccgcatctccctcccgcaccaggtgctggcctatctctgggtctataccctgcaatcggcttctcaggtcttcaccccccggcctcccgtgaccacccccgcccttcatctccagcgtctctgactcacgcaccgggcaccggccttgcgctttgtcttttactacagatcccagttctgctgtgcattggagctccatttgtaccactcagggccctggcaggaatgggggttcacggcgtccacacgcaaagccctgtcctgggcatgtcaggtccctttcgcccacactggcacctggatctgcttcacttcatctgccctgcgatcatctaagctgtcctctctcgcctcatggtctcc

SEQ ID NO: 253395 - DNA, 265 bp, Homo sapiens
  chr4:1626395-1626660
  hypo
accacgccaggtaccgccacgctgcgggtctggctgagaaggcacctggaattctgtcccagatgctgtgtttcacgccagatgacagcaaagctctcccctgacatgcgggcacactccagactcccccagaggccctcctggaagaaccactcaaggacccaagggcccaaaaggcatcagaaggtcctatgtcccggcccacgtggtcaggggtcacaccaggtgatcagaagcccccacgtcccggcccacgtggtcaggg

SEQ ID NO: 253396 - DNA, 39 bp, Homo sapiens
  chr4:1638196-1638235
  hypo
gttgccccgttcacgggagatcccgtccgtcctcgcgct

SEQ ID NO: 253397 - DNA, 45 bp, Homo sapiens
  chr4:1642970-1643015
  hypo
cagggcaggtgcaggcggcagccatggccccgaccagcccccacc

SEQ ID NO: 253398 - DNA, 478 bp, Homo sapiens
  chr4:1645866-1646344
  hypo
ccaccaggctgcactacacacgcaccggggtggcggggacgctacgcaccttcaggggccaggtttccttccatttcaaaccacggcgttttgttttcattcagagtcgaccctctggactgactgctcggacccgacagatgctgtaagctcacgccgaggcctcggacgcgggactcgcactcgcgggcacagctgtgcggctagagcgtgaaaacagcaggctctgaacgcctctggacgacacagtcggtgcaggagaaaaaacttctgcccacagacacggcagctgtacagctcagcgcccaacagcgctagcgaaggccacacggaactgaaggggccacccacgctgtagagacggtggaaaccgaggcccacggggccgatgctggcctggactgcgccacccatccgcctcgcgccccctgtccctgggcgccagccccggggctccgtcccagctcctgctaccatc

SEQ ID NO: 253399 - DNA, 374 bp, Homo sapiens
  chr4:1651637-1652011
  hypo
tgaggtggcacaggcgtggcgtttgactgtgaggtggcacaggcgtggcgtttgactgtgaggtggcacaggcgtggcgtttgactgtgaggtggcacaggcgtggcgtttgactgtgaggtggcacaggcgtggcgtttgactgtgaggtggcacaggcgtggtgtttgtgaggtggcacaggcgtggcgtttgactgtgaggtggcacagtcatggtgtttgactgtgaggtggcacaggcgtggtgtttgtgaggtggcacaggcgtggcgtttgactgtgaggtggcacaggcgtgacatttgactgtgaggtggcacaggcgtggcgtttgactgtgaggtggcaaaggcgtggcgtttgactgtgagg

SEQ ID NO: 253400 - DNA, 162 bp, Homo sapiens; identical to SEQ ID NO: 209471
  chr4:1656589-1656751
  hypo

SEQ ID NO: 253401 - DNA, 99 bp, Homo sapiens; identical to SEQ ID NO: 209472
  chr4:1658844-1658943
  hypo

SEQ ID NO: 253402 - DNA, 312 bp, Homo sapiens
  chr4:1672854-1673166
  hypo
gccacagccatggcccggactcacctctgtcccagcgtcagagccaccagctcacagccacagcccggactcacctctgtcccaccgtcagagcccccagctcacagccacagccacagcccggactcacctctgtcccagcgtcagagccaccagctcacagccacagccacggcccggactcacctctgtcccagcgtcagagcccccagctcacagccacggcccggactcacctctgtcccagcgtcagagccaccagctcacagccacggcccggactcacctctgtcccagcgtcagagccaccag

SEQ ID NO: 253403 - DNA, 115 bp, Homo sapiens
  chr4:1684725-1684840
  hypo
tcacgggacagcacggggaatcaactatcaagccacagaaggggatcaggactgccagtacccagcgcacaaggaggactcaaggaggcgggacaatggcgccggacgagggaaa

SEQ ID NO: 253404 - DNA, 354 bp, Homo sapiens
  chr4:1687132-1687486
  hypo
gggctcggtggccacgtcccacagtggacactgtgggcagacagatgcatggaggccggctggttccgggaataggctatgggtgaggccatgcagcacccctggggctggatgctgggggaggcatcggggctcccaggggtcaggctggggcctcccaacaggttctgggcctggtaaggctagtccggtgcaggctgcgaagccaggccagctgacaccaggactggctggagtcagcctcacctgtctggaagagtgggagtcccagcggggctggggaggggagaagggctggagcaggcgtccaggccattctcttcgctggggtccggtaatcccccacctgcaaca

SEQ ID NO: 253405 - DNA, 386 bp, Homo sapiens; identical to SEQ ID NO: 209475
  chr4:1738656-1739042
  hypo

SEQ ID NO: 253406 - DNA, 42 bp, Homo sapiens
  chr4:1753594-1753636
  hypo
cagctctccaggttaaggtgcgcctgccaagcagggagctgc

SEQ ID NO: 253407 - DNA, 681 bp, Homo sapiens
  chr4:1760184-1760865
  hypo
ggtaaggcaggccccggctggaacggggcggggaggggagcggcacagccccaggtgcctcagcctcagcctagggctctggggacgcccaacccggacaggcctgggcaggtggatggaggtgggctgatatcttcatgacaccagcaactgcccggctgatgcccgccactacctggtggcatctggccacagtgagcaccgcagagctccagccatcctgcatagctgcctcagccctgagtccagagccaccatcagggaggcctctcctgtctcgtggtgaagggagactcagtgtgacctcggtacgccagccccttccctgcacgtcccaaagccactggctcagaaagaccctcccttcggctgccagggccctgcccgagtgtggggcactcccaggccctgggccagcggaagcagttccgggagactgcgcaggccaggaaagcccaggtggcctgggaggtcagcagccactggcagggtccaccccagtccaccccaggccagccctgtgccctcctttgctggggtctgggccgcaggatacacggtggggtgtgaggcggcggcaggtgaggagggtctctttcttggcctccctgtagccccggtcagctgaaatagaactggagaaacaagaagcttggccggggcccccggcaagcaaggggg

SEQ ID NO: 253408 - DNA, 148 bp, Homo sapiens
  chr4:1763039-1763187
  hypo
actgcccatgcaacccggtgcgccttgtccaccctgtccgccctgcctgccctgcctgccccgtgtgccccacccaccccgtgcaccctgtgcaccccgtccacctcatctaccccgtgcaccccgaccaccccgtccaccccgccca

SEQ ID NO: 253409 - DNA, 129 bp, Homo sapiens
  chr4:1768300-1768429
  hypo
agaggcaggggccctgtgggcggctgcgaaagcagggttcacccacccagttcgggccttagtgacccgcgctcagccacagccacagggcccttcagcaggtcgcccgaggcccctcccccacctcct

SEQ ID NO: 253410 - DNA, 368 bp, Homo sapiens; identical to SEQ ID NO: 209476
  chr4:1778329-1778697
  hypo

SEQ ID NO: 253411 - DNA, 475 bp, Homo sapiens
  chr4:1781228-1781703
  hypo
tggagggttccctggcgtggggagaagggggcatccatggctgtaatgggtggtctgccaggcctgccacctcccctggcgagtggcaggaccccagacaggcccagcgatgggccgaggggcaggtcctgggcttccgagtgctcccagggaatgggggccggggctccaggcagcatcagcccctgggctcagcctgaccaccctcatgctcaggacctggcccaagcgctgctcggagatccctggggcagggccccatgcagggctgacgcaccagcctccctgcacaaagtgcccaagggccccacctccagcctgggccaccatgtggccttcgagggcagggccatggcctatggcccagatgagcccccagggctgggagcagccccagacacccaggaggtgctcgctgggtggctgggattgaatgaattagtgaagagcgaagggccaacgcctgattcacaag

SEQ ID NO: 253412 - DNA, 97 bp, Homo sapiens; identical to SEQ ID NO: 209478
  chr4:1782913-1783010
  hypo

SEQ ID NO: 253413 - DNA, 474 bp, Homo sapiens
  chr4:1784388-1784862
  hypo
caatagcggcccagcgccttccagaagtctccagacactgaggcctctccttgcaggcctggtcgcagctttattgcccccactctatggatgactgcatgggtgagcccacggccatgcagggagcccggtcctccgggctgggaccggccttgagatgggatgcatggccaggaggcgggcgatggccgaggtgaggggctcagggagggggctggtcatggcattcagagccaggttatgatggggcctggccattgacgacagacggggtgatgacagcggggccccaggatggagcctgcagtccacgacattcagagcagagcatggggcatgcaggaaagggggccagaggacctgctgggtctttccgggtgtatggtgccagcaggtgtccagcgcctccagccccttgtctgagagcaatggagacaggtggggggggggggtgcagggcgtctgggtagaacc

SEQ ID NO: 253414 - DNA, 73 bp, Homo sapiens
  chr4:1785062-1785135
  hypo
agggtgtgtggggccgccctgggggtcctgccatgctgtggtggggtcacaatgtcaacgttgcagcgggggg

SEQ ID NO: 253415 - DNA, 58 bp, Homo sapiens; identical to SEQ ID NO: 209479
  chr4:1787676-1787734
  hypo

SEQ ID NO: 253416 - DNA, 283 bp, Homo sapiens
  chr4:1791209-1791492
  hypo
ggaggctctctctggcagctcgcctgccctgggttccaggtctccaagcctcggcctccctgcccacctccctgtcgggaaaggcggcagctgcctgcccggagtgctgtggggaacaggcggtgtggatctgagactgtgctgggaatgtcctctctgccgaaggcgcctctgccattttccgagtacctgcaagggagacgcaggagacgcgggtgtgagcggggccatgggcaacctgcggaggccctgcacccaggatgggcctccctcccaggcaccc

SEQ ID NO: 253417 - DNA, 250 bp, Homo sapiens; identical to SEQ ID NO: 209482
  chr4:1791522-1791772
  hypo

SEQ ID NO: 253418 - DNA, 79 bp, Homo sapiens
  chr4:1798718-1798797
  hypo
gtgtggggttggggcgccggcaggagcacgtgttgtgggatccatagaagggtgggaggtgggacgcgttgcctcctac

SEQ ID NO: 253419 - DNA, 61 bp, Homo sapiens
  chr4:1801892-1801953
  hypo
cactcaggtggctgccgtggggtggatggacccggggtgagggcgccggggcacctgccac

SEQ ID NO: 253420 - DNA, 368 bp, Homo sapiens
  chr4:1803383-1803751
  hypo
tggtgccctcggaccgcggcaactacacctgcgtcgtggagaacaagtttggcagcatccggcagacgtacacgctggacgtgctgggtgagggccctggggcggcgcgggggtgggggcggcagtggcggtggtggtgagggagggggtggcccctgagcgtcatctgcccccacagagcgctccccgcaccggcccatcctgcaggcggggctgccggccaaccagacggcggtgctgggcagcgacgtggagttccactgcaaggtgtacagtgacgcacagccccacatccagtggctcaagcacgtggaggtgaatggcagcaaggtgggcccggacggcacaccctacgttaccgtgctcaa

SEQ ID NO: 253421 - DNA, 1046 bp, Homo sapiens
  chr4:1804646-1805692
  hypo
atcagtgagagtgtggaggccgacgtgcgcctccgcctggccaatgtgtcggagcgggacgggggcgagtacctctgtcgagccaccaatttcataggcgtggccgagaaggccttttggctgagcgttcacgggccccgagcaggtaacgactctgtcccatgccggccggcacaagagctccagctccaaggccctggccgcgcgccctgcacgccccgcacgcccagccctgctcgctcccgccccggctcgcgctccactcggggccgcctcggcaaggctggcagctccagcctccacggtgaccgcccgcttcgagccctgtggcctgcgccgacccttcccgcacgcctgcgacccccacaggaggtgcccggtgcccaccgggccggctccgtgccgtctgtgagcacccctttgcgcctctctccacccctgcccgctgcctgctcgcttccgcagcctgtgtgtccctgtgtccatcctccacctgcacccgcccggctctgcgctaacccgcatgctgcctgcccgcctgccgctcacctgggacagaggactcgccggtggaggggcctggcttcgggctcagtaccggtgtaccaggcggagggccctcagccgcgtggcggtgaccaagttggcggtggctgaggagttggtggtggcggcgttttccttgcagcggctggatcctgccgtgtggactctgtgcggtgcccgcagggcggtgctggcgctcgcctatcgctctgctctctctttgtagacggcgggcgctaacaccaccgacaaggagctagaggttctctccttgcacaacgtcacctttgaggacgccggggagtacacctgcctggcgggcaattctattgggttttctcatcactctgcgtggctggtggtgctgccaggtaccggcttctgctgctgctgctgctccgcactgtctgggggacgctggctcgggacacgccaaagctgccaggacggacgggaatcctgtgacttacggccgtcccgcttcttgagccctcactcct

SEQ ID NO: 253422 - DNA, 256 bp, Homo sapiens
  chr4:1805921-1806177
  hypo
tccagacaaggcgcgtgctgaggttctgagcccccttccgctcccagtggtgcctgcggctctgggccaggggcatccatgggagccccgtgggggggggggccaggccaggcctcaacgcccatgtctttgcagccgaggaggagctggtggaggctgacgaggcgggcagtgtgtatgcaggcatcctcagctacggggtgggcttcttcctgttcatcctggtggtggcggctgtgacgctctgccgcctgcg

SEQ ID NO: 253423 - DNA, 510 bp, Homo sapiens
  chr4:1807097-1807607
  hypo
ccccttggggagggctgcttcggccaggtggtcatggcggaggccatcggcattgacaaggaccgggccgccaagcctgtcaccgtagccgtgaagatgctgaaaggtgaggagggggcggccaggggtgcagagcagggctgggggcgccgccgccgcctgacacaggccccccgctccgtgcacagacgatgccactgacaaggacctgtcggacctggtgtctgagatggagatgatgaagatgatcgggaaacacaaaaacatcatcaacctgctgggcgcctgcacgcagggcggtaggtgcggtagcggcggtggtgccggctgggcggccctcctgggcctggcagcccgtctgaggagcccgtgtccccagggcccctgtacgtgctggtggagtacgcggccaagggtaacctgcgggagtttctgcgggcgcggcggcccccgggcctggactactccttcgacacctgcaagccgcccgaggagcagctcaccttcaag

SEQ ID NO: 253424 - DNA, 239 bp, Homo sapiens
  chr4:1808362-1808601
  hypo
gaaggagggccaccgcatggacaagcccgccaactgcacacacgacctgtgagtggcatccctggccctccactgggtcctcaggggtgggggtccctccggggctgggcgggggagggactggcagcccttcaggctgttcccgaataaggcgggaagcggcggggctcactcctgagcgccctgcccgcaggtacatgatcatgcgggagtgctggcatgccgcgccctcccagagg

SEQ ID NO: 253425 - DNA, 327 bp, Homo sapiens
  chr4:1814434-1814761
  hypo
cacggctgatgtcacggaagccaccaaaggcacccaccagagccttccccacctgcaaagcccctgcagcacccggagggcaagctggcttttggaggccatgcggagtccagggcagaggggacagtgggatgggctgcctgttgcagtggctgttcacgtcaacagtgctcagccaaggcagtgaggacgaggatgagagccggggcagctgactgggcccgcgatgccgctcacaggagaggcgtctgcacacacctggcaactgcaagacttgttctcaagggtaagtacacttggacaaacgaacaccaggctacttacaca

SEQ ID NO: 253426 - DNA, 135 bp, Homo sapiens
  chr4:1827205-1827340
  hypo
ttgggaagagcctccgagtggcctttcgaggctgatgtttcccttgagcccgtgccggcctggcaccaggccaatattcacgcacctgcttcagctgacccctcaggcggtcttccgtgacgcccagggcccgca

SEQ ID NO: 253427 - DNA, 404 bp, Homo sapiens
  chr4:1828221-1828625
  hypo
accttccccagctcccggtgctgcccgttcacagacgcgcttgtctccatgtctgctgctgtcacctggagtgctctctgaacaggatcatgcaggagtcacctctggggttccctgaggacccactgggggtgctatgggtgtgccgggttaggcctctcactgccatgcggcattctgcagcatgcgtgccctccttagccgaacccttcgcccactaagctgggctccgccagttgatcaggaatgaagatgctttctgtctgctttcttctccctgtcctcctgggggctggctggcctccgtttgatttcgctctggtggtctggagtctgtgcagcattttcagtgttgctctggggatcacgatacacaatccacggacgcagctcactgtagtgca

SEQ ID NO: 253428 - DNA, 140 bp, Homo sapiens; identical to SEQ ID NO: 209491
  chr4:1835054-1835194
  hypo

SEQ ID NO: 253429 - DNA, 141 bp, Homo sapiens; identical to SEQ ID NO: 209492
  chr4:1844710-1844851
  hypo

SEQ ID NO: 253430 - DNA, 246 bp, Homo sapiens
  chr4:1902451-1902697
  hypo
caccagaaatcctcggcagtgccaacgggaagactccgagctgcgaggtgaaccgcgagtgttctgtgttcctcagcaaagcccagctctccagtagcctgcaggagggggtcatgcagaagtttaacggccacgacgccctgccctttattccagccgacaagctgaaagatcttacttcccgggtgtttaatggagaacccggcgcacacgatgccaaactgcgttttgagtcccaggaaatga

SEQ ID NO: 253431 - DNA, 79 bp, Homo sapiens
  chr4:1911667-1911746
  hypo
cgttaaaaaaaaaaaaaattatttatcatgcttgggatttatggaccagtttgaatccgtgtatcttagtaatatactt

SEQ ID NO: 253432 - DNA, 285 bp, Homo sapiens; identical to SEQ ID NO: 209493
  chr4:1955051-1955336
  hypo

SEQ ID NO: 253433 - DNA, 297 bp, Homo sapiens
  chr4:1960082-1960379
  hypo
tgctgggagtcagtcacatacggccagggctcagtgactgagccccaaacacgtagatcctgtacctcagagagcaagatggcggggcggcaggggagcttgccagttctgtgtttattccagtgagctcgagagccccagcaggaggaagtgcagccagggcagggctctgtgagagctccaggcccctcagggctgcctgcgctcagagctggtgcggcaagccgcatccccaggagcctcgtggccgttcctgacgagtgtttgtgataagtgtgtgccggaggtcaggtgctc

SEQ ID NO: 253434 - DNA, 91 bp, Homo sapiens; identical to SEQ ID NO: 209494
  chr4:1960866-1960957
  hypo

SEQ ID NO: 253435 - DNA, 33 bp, Homo sapiens
  chr4:1961340-1961373
  hypo
gcaggtgtgtcccgcgggcgagttctgccagaa

SEQ ID NO: 253436 - DNA, 376 bp, Homo sapiens
  chr4:1962689-1963065
  hypo
ggagtcttgagccccgacactgaggattggtcagcacgctttttgtcatggccacatgcttgtgatttccagggagaatttgttaacgagtacgttggggagctgatcgacgaggaggagtgcatggcgagaatcaagcacgcacacgagaacgacatcacccacttctacatgctcactatagacaaggtaatgcggaactccactgtgagcttctgcagtgtgctggacctggagccctgatggtcacctgtagaactggactttgccctgtggcagcgccagcatttgtctccttagctgcttattttcaaacatctgcacattttcttctgaggtgcagcgtgtctttcagctgcgccggagggctagagct

SEQ ID NO: 253437 - DNA, 77 bp, Homo sapiens
  chr4:1973281-1973358
  hypo
taaatctcttcttacgagcccacaatagtgccgtgtacttttcagaggcacatgtactgaggcgtgaggtccgagcc

SEQ ID NO: 253438 - DNA, 67 bp, Homo sapiens
  chr4:1976551-1976618
  hypo
tgctaacacttgaccgaatatatcacttgaccttacaggaccgtataatagacgctggccccaaagg

SEQ ID NO: 253439 - DNA, 593 bp, Homo sapiens
  chr4:1977009-1977602
  hypo
tcttctcccagggacggagctgacttttaactacaacctcgattgtctgggcaatgaaaaaacggtctgccggtgtggagcctccaattgcagtggattcctcggggatagaccaaaggtaaggctgtggcgccctccttccccccaggctctgtgttggcattttgcactcctggagacctgtgtcccccgtgaacagcggcttcctccaggctggcttgttgccgggacaggtgggagcaagttccctgctgtgggctggggaggatggctctcaacaaaggccagtggttaagagttcctcactgaacgtgtttcctggggctgccagaacaatgcctcacagacgcgtggtttcgcagttctgggtgtgggcagggccgtgcgccctctgaaggttccttgggaggctctttcccaggcctgtctcccgttcctggtggcggccacagtccttgctgctccttggcttgtagcagcaccgcccaaccattctccctgcgaacatgactgttgacttgcccttcttataagagcactggtcctgttgacttagcgcctgccctgctaccgtgtgaccccatcttaacaga

SEQ ID NO: 253440 - DNA, 424 bp, Homo sapiens
  chr4:1980623-1981047
  hypo
agagggcaaatagcgccaggcggccgcttggccggatccaggggcggtgcagggcggccggccctgcctgcgggagagggcgagcatgaactggcccggaggacccagctcgagccgccaggacacagacgtacaggcctcctcgggagggagcgcctccccaccactgagccatcctcagcagcgtccgctgcgtctgcactgatgaccgtctgagcccagctcagcgttcctggacaaacagcctcactcctcagcgttaccgccacacttgaatttctccgaatgtcaaggttccctcccactctatttttttaggttaaagttaattggcatatggaatgttttaatctcctctgaaatgtgtagcgtaggcttttcccaagggtcgctagaaactcgtcttcgcgttgccccctttctg

SEQ ID NO: 253441 - DNA, 418 bp, Homo sapiens
  chr4:1986315-1986733
  hypo
gtctgtgcccaggacgggcagggtggggcaaagcagctggtttatgtcttggagctcaagctgaacagcggggcatctgcccccagcagattctggctgaggcagaagggggacaacagagatgcaggagtgagaaccgcagccctggcagcgcccgtgggcaaggtcatgtcctggcaggcagcttggctggttccaggctggggccagcagactcacctgggggcgtctcggagctggggatgtaggaggaggcgggaaccacgctgggcgtggagggaaggtagctcgtggagggcagcgcaggctcattgttcagggacccaagtttctggaacacagagtttaaggttccttccagaagaggccatgcttccggcatgtgctaacacatggcccgacccggagctccactgcc

SEQ ID NO: 253442 - DNA, 1400 bp, Homo sapiens
  chr4:1993651-1995051
  hypo
caaggccccggcatccggtgccctcccagcagcctcccacctcccagcagcacccagtccactgggcctactcttccaccggtgcgcagatgcaagaaaacctgaagggtgagaagccggggccaccactgctcccgcagaaagcctgcgggtgggaaatcctggggatgaggggcgtagagcaggcaggtgcccggcacagcagagcgcaggagcagggtggagtcacctgccgcgggggtgtgtgcctgggcagcagggggtggggcctgggacctggggcagcacccgtgacagctgagctggtgcctagtcaccatctaggcagggacggctgcctctgggtctggacggcgctgggagttggcgctcgtggagcctggaggtggccccgggatctggagtgaggccagggccttggggaggccatgggcgacgtgcgtggaggaagcaggcgcaccccgtgctccctcaatacctgggaggccagatccatccacaccagggcctgcttcggccacataaaccccctcccacgaggaaacgcagagagccaggccatggcgtgcctgtgcctctgccatgcgcccactgggctgctcacagtgtgagacagctgggctggctggcgctgggggtgaacaacagcgccctgccctgtccagacgccggggctgaaaccccagccccaggccttcctgacacccactccctgcgtcaggcgccagagacccgtcctacgagggctgcggccatcacgtccccgcgagcgccgcctcctggtggcctctgagtgggaggaccttccagcgcttccctcactgtcctcatgggcttcctgccctgagggaagttggctcgaagggcagagatcagaggtcgtgccaggggagcctgcctgctgccaagcccctctgcatctgccctgcaggacacccagctgccctcaggagtcaagaaccccccgcgtggcccagccccttctgttccttgggcaaccagggagggtgtcgccccggccgctgaccctgcgccccgggccctcactcccgacgcccgcccgagctgagtgcgcgatgcggcagaagatgctacgtggctgcaggaagcgctgcgcacacgctgcctctggcagccgcacagcccggctgtttccagccagtgcggcctctccacagcagccccagggaaaccctacgcctgccaagaggcaagcgcgcggcattttataaaaatggtaaggataaaaaaagtcggggatgttaatttaaaacaaaaaggaccactgttgtggagtcaatgttttctctccagaacgcgcatgttgaagcctggctcgctctactggggcttcttgtaggaaaacgcttggctttcccgggcgcggtagctcatgtctg

SEQ ID NO: 253443 - DNA, 94 bp, Homo sapiens
  chr4:1999769-1999863
  hypo
agagggacatgactacggcaaggaaaacaaacgagcagaaaacgacaacagcatcaacaacaacaacaacaaccacaacaaaagcccccatcca

SEQ ID NO: 253444 - DNA, 229 bp, Homo sapiens
  chr4:2038292-2038521
  hypo
tggttcagtgttgacggaagctgaagacagacggaagctccactacaacatgttcagggcggccctcgaggacagcgtggagaagaaatcctccctgtgggtataactcggatcagttagcttgcttgtctgcttcacgtagaggcagaagagtcatgaaataagaatatatatggagtcgtgggtggggctgtttggctggttgatgagaacccggaaggagcaagtt

SEQ ID NO: 253445 - DNA, 188 bp, Homo sapiens; identical to SEQ ID NO: 209499
  chr4:2045628-2045816
  hypo

SEQ ID NO: 253446 - DNA, 254 bp, Homo sapiens
  chr4:2066058-2066312
  hypo
tcgccatagcccctcgcccttccccacctgcctgggcggcttgccacctgaagagtggcatcttggaccaccgcggctgtccatgacgctgccctgcccgccgccactggggaaggcccagccttgctcaccaagcacagaacctctgcagcagatcccggggccaggctccggccccgcctgcggccccagcgccactgcctgtggaggccccagctggccacggcgctgctttgctccgcgcatgccgaggg

SEQ ID NO: 253447 - DNA, 177 bp, Homo sapiens
  chr4:2128212-2128389
  hypo
cccctgggcgctgtcgctgcagcaggatggacagtagagcaatacatgggaatgtgcatcggaccagagaggagcagagaccagagaggagcggagaccagagagaagcggagaccagagaggagtggagaccagagaggagtggagaccagagaggagcggcgccgtgcccagcat

SEQ ID NO: 253448 - DNA, 213 bp, Homo sapiens
  chr4:2165234-2165447
  hypo
tctgcgccggctgcagacaccacattcgtctgacctcccttctcactcatttcccgctggtgcctcttctctcactgacctttaaagatcagtttctcggagtttaactctgtggttatctatgctggctgcgtatcgcaatcaacagggagcttcaaaagcaggcccatgactaggctcccccgcccaattctgactcgtgggatcagctgt

SEQ ID NO: 253449 - DNA, 77 bp, Homo sapiens
  chr4:2251591-2251668
  hypo
tgtctaggtgcgtgcgcgtgtgcgtctgacagtcctaccagagcagacgctgcccagctcggcgtgggctgggctgg

SEQ ID NO: 253450 - DNA, 695 bp, Homo sapiens
  chr4:2278257-2278952
  hypo
tagcggccaagagacggcagcaactcaggtgtctgttggcagaggcgtggataaaccaaatgtggtccacccatacaacagaatattattcagccttaaaaaggaaggaaattcggatctaggctacagccacggatgaatgttggcaagatcatgctgagtgaaacaacccagctaccaaaggatgcgtcctgcttgagtctccgacacgaggtcctgagagccgtcacgttcatacagatggaaggtagaacggtgggcgccagggtgggcagagggcggggagtcggggggagtgagtgatggggaaacagtttcagtttgggaagatgaggacgttgcggagatgatgttggtgacagttgcacggcactgagtgtgttcaatgccacgaaattgtacgcttaggaagggctaaatagtaaactttatgctacatatattttacaaaaattaaaaatataaaaaaaaaagaattggggcagggagagagcagaggcaagggaacggaggcggcaagtacatggcagaaggccggattggcgtggcgcccgacacagaaggctcaggggtattattgcccaaaaccactgaactgtgtgatttagaaaggtgaattttgtggtatgtatgttacatatcaataaaggcttttttttaaagatcacgccgggcgtggtggctcatgcctgtaa

SEQ ID NO: 253451 - DNA, 186 bp, Homo sapiens
  chr4:2303623-2303809
  hypo
ggagaggctgttcgcgcgaggctgttcatcgtggcacgtctgtgacaggaaaagcctggaaacaagcccaagccagcacttgggcccgagtgcacgccaggccagcctcgcatgaggccctgccccgcagtgaagggaagcaggacatctctagcaagcactggagcggctcgggcagaaggccag

SEQ ID NO: 253452 - DNA, 213 bp, Homo sapiens
  chr4:2305614-2305827
  hypo
tcagggcaaggggcccggcgctggcacagcccgctcccactgccccgcacaggcacgcggctcacaccaggggcgggatgggccggggctgcggcaggtgagctgagggcttggcactgcgcccatgtcacctgacaggcacccggaacatcagaaacagggaagcgggcccgctggcgcacattttctggtgcatgacgccccacagggcag

SEQ ID NO: 253453 - DNA, 51 bp, Homo sapiens
  chr4:2306804-2306855
  hypo
ccagctggggactcgggcctggccagggcttctgccgtcccctccacgtca

SEQ ID NO: 253454 - DNA, 51 bp, Homo sapiens
  chr4:2337323-2337374
  hypo
accgtgaggtggagacgccatggaccggcacccgcacgggacctggcacca

SEQ ID NO: 253455 - DNA, 246 bp, Homo sapiens
  chr4:2362985-2363231
  hypo
aacaaagcagctctcggttcaaaaaatacaaggatggactgactctgggctaattttgtaaagctgattaaactgttaattcattcgagcccctggtccctaatgtgagctgtggctgcaggtgggaggtgcgggttggaggcacgtgcagggagagagacgcggtgcgcacgtgtgagctcagcccgtctgacccacgtgtgatgaccctgcagtgtttcccagcagttacgagggctggccacc

SEQ ID NO: 253456 - DNA, 277 bp, Homo sapiens
  chr4:2396220-2396497
  hypo
cctaggctggctgcgtttctcttcacggggtggttgaccgcatgagaagggtcatgaaccacaagttatgatggctccagctgtgtgcacataaggtcctaaaacatcaacgcctcctttctaacaaggcacatgcttccagctgctcgggctgctcggtcacaggcaggggcctgggtgtcgtgtcacacaggtctgcgatccgatcctgtgaacaggcaccactctgcgcagctgcatcgatgcctgactgcacgtgtgcgtgcttccattacac

SEQ ID NO: 253457 - DNA, 44 bp, Homo sapiens; identical to SEQ ID NO: 209501
  chr4:2427613-2427657
  hypo

SEQ ID NO: 253458 - DNA, 34 bp, Homo sapiens
  chr4:2459493-2459527
  hypo
ccgactccctattccgtgccgaggctggtgctgt

SEQ ID NO: 253459 - DNA, 243 bp, Homo sapiens
  chr4:2459752-2459995
  hypo
cctccctgattccacgttcccaaagagccaggaggcaccgccgccctcttctgcactcccggcctgaggcgcccagccgtctccctgtgccatggtctgacgctgtggctgcgcggggagggccggtgtggacgcctcttttctctctttgctcattgtctggttgactgagacgggaatcttggtattttttggtgcccactttcttcacctcatatttctacacaacgtattaccaagttt

SEQ ID NO: 253460 - DNA, 210 bp, Homo sapiens
  chr4:2460373-2460583
  hypo
gccctgggctggggcgggaccaggcagggaagccggagcagccccactcaccgtggcaggtccgctgtctgggcagatggccaagctgatgctgcagcgtgcagagagacggctccgggaggacaggtccaggaaggagctggtggagcaggtgatagaggggcagaagaacgccaaggcggcccagacgaagctcgcgaagggccgaca

SEQ ID NO: 253461 - DNA, 116 bp, Homo sapiens
  chr4:2514669-2514785
  hypo
gtctctcggatgcccgcgctaaggcagagtcaggaggccagggacgggactcttgtaggggataggggccactcacgtgacagggtataataaaatgtttgcgttgactgagaaac

SEQ ID NO: 253462 - DNA, 81 bp, Homo sapiens; identical to SEQ ID NO: 209503
  chr4:2524117-2524198
  hypo

SEQ ID NO: 253463 - DNA, 120 bp, Homo sapiens
  chr4:2524746-2524866
  hypo
tcaaaaaaaaaaactcaaaccaatacataattgtataccttaagaaacaaacaaacaaaaaactaaataaaaagttagcagaaggaaggccataataaagattagagtcaagataggccc

SEQ ID NO: 253464 - DNA, 180 bp, Homo sapiens
  chr4:2527844-2528024
  hypo
ctgggcgacagggcgagactccgtctcaacaacaacaaaaaaaagactaatctttctcaaacttcattgtaaaatgaacgggaaagaaaactttctcactcattttgtgaggtcaatagtaccctaatactgaagccacctaaagacgttgcaagaaaataaaactgcagaactggccag

SEQ ID NO: 253465 - DNA, 34 bp, Homo sapiens
  chr4:2540191-2540225
  hypo
ttacaggtgtgagccaccgcgcccggccgttttt

SEQ ID NO: 253466 - DNA, 31 bp, Homo sapiens; identical to SEQ ID NO: 209504
  chr4:2559965-2559996
  hypo

SEQ ID NO: 253467 - DNA, 36 bp, Homo sapiens
  chr4:2567250-2567286
  hypo
gggattacaggcgtgagccaccgtgctcagccagag

SEQ ID NO: 253468 - DNA, 120 bp, Homo sapiens; identical to SEQ ID NO: 209505
  chr4:2568040-2568160
  hypo

SEQ ID NO: 253469 - DNA, 42 bp, Homo sapiens
  chr4:2592459-2592501
  hypo
aagtgtagaagttggccaggcgcagtggctcacacctgtaat

SEQ ID NO: 253470 - DNA, 78 bp, Homo sapiens; identical to SEQ ID NO: 209506
  chr4:2622586-2622664
  hypo

SEQ ID NO: 253471 - DNA, 78 bp, Homo sapiens; identical to SEQ ID NO: 209507
  chr4:2626193-2626271
  hypo

SEQ ID NO: 253472 - DNA, 120 bp, Homo sapiens
  chr4:2626554-2626674
  hypo
cgccatgcccagccgaattgtttcctttttgtatgtatgtgtgtgtctgtgtgacaatgtctctgtcacccagacaggagtgcagtggggcatgatcacggctgactatagcctcaactt

SEQ ID NO: 253473 - DNA, 268 bp, Homo sapiens; identical to SEQ ID NO: 209508
  chr4:2626993-2627261
  hypo

SEQ ID NO: 253474 - DNA, 86 bp, Homo sapiens
  chr4:2638080-2638166
  hypo
tgccctgccaggaagaatattttaatagcctcttcaaatcctgatagatcttctctgagagtacaccaacgcgggagagtttctta

SEQ ID NO: 253475 - DNA, 240 bp, Homo sapiens; identical to SEQ ID NO: 209509
  chr4:2639921-2640161
  hypo

SEQ ID NO: 253476 - DNA, 146 bp, Homo sapiens; identical to SEQ ID NO: 209510
  chr4:2640600-2640746
  hypo

SEQ ID NO: 253477 - DNA, 116 bp, Homo sapiens
  chr4:2672877-2672993
  hypo
cccttcctccagcccgtgaggtgtcctcagtgcatgcactgtgctctcctggtcagccagcgagttgtggacagcttaagaagcccttccgtggcgctctcatttccagggttctc

SEQ ID NO: 253478 - DNA, 220 bp, Homo sapiens
  chr4:2687342-2687562
  hypo
catcttaaccttttcgttactggggatacaactggaactcatttttgctcggatgcttagtgttgggaacctctcacgtgtgggcctcatgactcagtctgcggctcttgctcctcatgtcttgcacccatgttccatgtccgagtgggtgtgggtggtagaggacaggcgagtcacctagctcctggataaactcagtgtgtgcgcagtggaaagcagt

SEQ ID NO: 253479 - DNA, 437 bp, Homo sapiens
  chr4:2688475-2688912
  hypo
tttaccagctgggccggcacaatgggactgctgctcaaagctagcagtttggcatctgtcacgggcttctgccttttacaagaaggtcctcaagaccaagaagtcttctacttgttactttttgtcaattacttctcagcaaagcagctcttagcttatcgctgctttgtagaaatgggtatctattgaaatacgtttttttattttcctggctcttgtcccatggggctcccttaccaaaacaatgacttcaggccctttactgtatcctgggtggcccgtctggacctgtttattcctgctgttgagtcctgagtgtctgctctaccctcctctccccctttgccttcctgggcctgttccaggtcagtggactcgctgagctgtccagcagcccagaggggagtgcttcctctctgctccgaagcactgtggaa

SEQ ID NO: 253480 - DNA, 194 bp, Homo sapiens
  chr4:2698197-2698391
  hypo
gaaagggaaagcgtcgttgaccatcggagggtggaggatttgttgcagtttataaatagctccgaaaccaaaccagtgagcagcacgcgtgcagcgaagcgagcaaggcataagcaaaggaaggcaagtgacagttctcagcacctggaggcgccaggtctgagggcatttgaaggtgccgtgccacgccagtc

SEQ ID NO: 253481 - DNA, 938 bp, Homo sapiens
  chr4:2704073-2705011
  hypo
ctttgtgtcatggttcgatgctccgggctcatctcgtgtcttctctctcccagccctgaaccagccatttctccaaggagccctcctctttcttcaacagtggtgttcagaaacccagacctggacactgccatatggcattgcttttaggccctctcagtcagcagagcaggaggagtgggggtgtgagcatgtgcacacgagcgcctgccacctacacacactaattgctatgtacaagccgtgagttcccacagatatcccagccccactcctgtgctacagtgagcgttctcccttccccgtccacctttgtaactccttagacagtaagaacctggaccccatcatccatggtgcctttactgacttgctgagtcctacaacacaggtaaagggttcagaagtccctgcccttacccgatggaaaactccgggcatgctttcggtatttgttcagttctttttgtctttagcctcagggtgtggtgattacactgaatttacaaatgacttaaattagttcttttcacctttagtacaattacgttattgattgaaaacacacctgattgcgtttttccatttgtgttccatttgttttctcccctacccagttcctctttttttttaatctgttcccacccactccctgtaggtaactaatcagtttcttatttgcttttcttttttacataaaaggtagtgtattatagacataatagtgacttctgggttcttttctacttcatatattctgggaatcactgcacatcagttcgtagagattgtcctcattctttctgcagcgacacggtactccatttaaagtgtacgatgatttctgcagtcactcttctttgtgcgagcgtttaggttgtttctaatgctttggttttttgtttttgtttctgttttaaggtggagtctcactctgt

SEQ ID NO: 253482 - DNA, 54 bp, Homo sapiens
  chr4:2745778-2745832
  hypo
gacaggtcaggacacgtagggagctcacactttgaggcccgagatatgctctct

SEQ ID NO: 253483 - DNA, 102 bp, Homo sapiens
  chr4:2746455-2746557
  hypo
cagcatcccgggccgtcctggaggccgccagctcctgcttcacttcggcacagtcatttattttctcttccaactgtctgttgagccgggagatctccttcc

SEQ ID NO: 253484 - DNA, 104 bp, Homo sapiens
  chr4:2806952-2807056
  hypo
caggctggtgtgggcgtggggtgtcccggccacagctgatctgctcagtgactgctgctgcccttgcctatcgatgaggatgctggggccgggaggtcaccctg

SEQ ID NO: 253485 - DNA, 123 bp, Homo sapiens
  chr4:2907412-2907535
  hypo
gacggccatagtggcgagtcaccttctgactcctgttgggtgcggcatgacccaagtgcagcgcaggccatctgcaggcaccagcgacagacgctgcaaggggtgcttcgtttcagcgttaat

SEQ ID NO: 253486 - DNA, 91 bp, Homo sapiens
  chr4:2925310-2925401
  hypo
gccatgttgcctgtcaccctgacatttgtctctttacgaacacagtatttctgtctgttgaagcttcaccggggagagacctcctttactc

SEQ ID NO: 253487 - DNA, 195 bp, Homo sapiens
  chr4:2926277-2926472
  hypo
tgactgttgctctcctgggccgtcgtcatcctgggagctaggcactcctcctaagaggacctcttcaccggtttttgtctcgttctagaccagccactgcattacgtagttgtgactgaaatttgagttgctgaattgtttttcagtgtcacaccgctatttactattcaggccgccacacacaccaggccctgc

SEQ ID NO: 253488 - DNA, 109 bp, Homo sapiens; identical to SEQ ID NO: 209514
  chr4:2926880-2926989
  hypo

SEQ ID NO: 253489 - DNA, 232 bp, Homo sapiens
  chr4:2932817-2933049
  hypo
tggccagagcacctaggctgcgcagtgtacccatgaccgtgcccttctgccctggtgagcctgtgggaagaggcacagtcaggcaccactgcccttctcccgctcaggtggcttcggccgagggaagggggctcaccatagccagcgaccacggaggacaggcagggcaccacaacggcggcggctggtgggagacatcgaggaggtgcccgtcagcccaggggagggtgca

SEQ ID NO: 253490 - DNA, 38 bp, Homo sapiens; identical to SEQ ID NO: 209515
  chr4:2957244-2957282
  hypo

SEQ ID NO: 253491 - DNA, 167 bp, Homo sapiens
  chr4:3120141-3120308
  hypo
gttcagtcatgagccgtcacttatgggcacgtggaatctgacccggcacagagttgggagaagacaggagctttatagacagaaaatgtggtctttgctaagtcccaggagtgaaagggtgagacagtgctcacagcacacgagtgtgggtgcgtagacagagcaag

SEQ ID NO: 253492 - DNA, 142 bp, Homo sapiens; identical to SEQ ID NO: 209516
  chr4:3208227-3208369
  hypo

SEQ ID NO: 253493 - DNA, 246 bp, Homo sapiens
  chr4:3216985-3217231
  hypo
ttaaaaatcattcacagagacgtgcaccgcggtgagtgtggactcctggaagcgcaccgtagctccgctgtgtcctgctgctcctccctagctgtcagggaggctgtagtccattgctttgccagctcttttgtttccgagtgaacaccttatccgtacacatgcggctgtctctgaccctacagaccagctgggatgccactgggggagcgctcccttccccccgcacttcccacactctgcagt

SEQ ID NO: 253494 - DNA, 183 bp, Homo sapiens
  chr4:3220630-3220813
  hypo
gtggctgcctgagaagggtgcgtgcctgcctgtgtgtgtgtgtgcacgtgtgtgtatgtatgctggagagtctagggaggcttgctccaaggacgcagtattgtttgatcctgagagataaggattctgccgcagggaatgaaggtattccagatggcgggcttattccgaagaagaggccag

SEQ ID NO: 253495 - DNA, 155 bp, Homo sapiens; identical to SEQ ID NO: 209519
  chr4:3240561-3240716
  hypo

SEQ ID NO: 253496 - DNA, 146 bp, Homo sapiens
  chr4:3241773-3241919
  hypo
caccacctgctgagcgccatggtgggagagactgtgaggcggcagctggggccggagcctttggaagtctgcgcccttgtgccctgcctccaccgagccagcttggtccctatgggcttccgcacatgccgcgggcggccaggcaa

SEQ ID NO: 253497 - DNA, 267 bp, Homo sapiens; identical to SEQ ID NO: 209520
  chr4:3245188-3245455
  hypo

SEQ ID NO: 253498 - DNA, 81 bp, Homo sapiens
  chr4:3249855-3249936
  hypo
catgtgttacgtttcgggtgccgatgcccttgggcggcacttctccgggcagaacccccaggccaccgctccggttccggt

SEQ ID NO: 253499 - DNA, 149 bp, Homo sapiens
  chr4:3251091-3251240
  hypo
acgccgagatgcgcggcctcatgctggtctgggaggagttcttcgacgagctcaagcagaccaagcgcaacgccaaggtgtacgagaagatggccagcaagctcttcgagatgaccggcgagcgcaggctgggcgaggagatcaagatc

SEQ ID NO: 253500 - DNA, 822 bp, Homo sapiens
  chr4:3252197-3253019
  hypo
cacaggcaaggtcacaggtgcggtgagggtcttgcagggtgtgaaggtcataggtgtgcggtgaaggtcacaggtgtggggtgatggttttgggtgtggggagggtcttgcacggagcgagggtggcagcaagagctggaagctgcagggggagaatggcagcagagagcacccggccctgtgggcggcctggacagggctgggcctggggctgccggagagcctgtcagcttccaggatgggagtggcctcactcagctgctccacctccgggtcaggcaggtgagcctggggcagagaggctgagagcacctgagccacttgtgggagaggccacccccactgcccccctcaggcgaggagccggcctccagcacagcagaagggaacccccagtccccagccctagtgggagtggggaagaggcccagcaaggccccggacagaccgccagcctgtgaggtctccgctttcagttgcgttgatttgattttttctgagccttgaaggaggggtccggggcctggccctgcccaaaggcccctaggcaggccccaaagccgggacctagggtgctgagcatgacggatgttgggtttgagcggctggcttgcgacgtgagggctgaggtgtgagcctgggtatcttcagaggttcggtggacacaggcagctgcccgcggccccactgttcccgtggcctcctagtcctgctcaggcacctggtgaggaagggacgcagagggcagtgggaggtggccacgactgttccagcaggctcccctctgactcaggaattcacgggcaccacctccctggctgg

SEQ ID NO: 253501 - DNA, 119 bp, Homo sapiens
  chr4:3265175-3265294
  hypo
cctgcctgatctgccgctaagaaccagcgctggcacagtgtgcgtctgtcccctgcccaggcttttctcgcacaagtacctgctgctctgaaccttgccattttcggcaatatacctgc

SEQ ID NO: 253502 - DNA, 38 bp, Homo sapiens
  chr4:3267992-3268030
  hypo
agtgtggggcacgcgcggccacacggggacagcccagc

SEQ ID NO: 253503 - DNA, 370 bp, Homo sapiens
  chr4:3288566-3288936
  hypo
gcgctgctaggcaccgaatgggagcccggtcagcagtgcctgcgggagccgacgctgctccggcaggattgagtggaattccgcccaggccgggagctccctcgggctggggaggcctcggggacctggctatgatggtgatctgggacttgatgggtgaatgggttggggccagcatcagctttgggcatatattagggagttactgaggaagacagagaaaaaggggcacctagttcttttataatcctccgggaaaaggtgagctctgagcgctacctgctcactgaacagcggaagagcgagcagcgcccaggccccgacgctgtgcagagccccgggagggcggcgtttgcgtgattgttcaagg

SEQ ID NO: 253504 - DNA, 121 bp, Homo sapiens; identical to SEQ ID NO: 209523
  chr4:3292280-3292401
  hypo

SEQ ID NO: 253505 - DNA, 203 bp, Homo sapiens
  chr4:3310030-3310233
  hypo
gaggctgtgtcctcgacgcgagggattctgttcactgtcacaggactcagggcaggtttagatgtgaagcgtgttggctcggcgctcctcttgctgcaggcgggccgtggcactgaaatggcgaggcaccctccccgtttgcagattgtaagtcttggagcggggctagcgattcgtacttatttccgcgggcggctggggtg

SEQ ID NO: 253506 - DNA, 144 bp, Homo sapiens
  chr4:3310675-3310819
  hypo
acgcggtcggcactcgcagcactgctgaatggcaggtgtccgctgaggggaaccgggcaggggaggagctgggacctgggaatggcaggtgtcctctgaggagagctgagcaggagaggagctgggactcgggaatggcaggtg

SEQ ID NO: 253507 - DNA, 31 bp, Homo sapiens
  chr4:3311032-3311063
  hypo
ctgctgaggagaaccgggtgggagaggagct

SEQ ID NO: 253508 - DNA, 83 bp, Homo sapiens
  chr4:3311956-3312039
  hypo
gaggagctgggacccgggaaatggcaggtgtcctctgaggggaaccgtgtcggggaggagctgggacccgggaaatggcaggt

SEQ ID NO: 253509 - DNA, 155 bp, Homo sapiens
  chr4:3313496-3313651
  hypo
atatacagatgttccgaatcagaaaaaatccacagcccttctggtcccaaaaatctcttctaagggacactcagcctgtgtgacgtggtcggtgactcctgatgggaggtggcagtgctgtgcggcgagtggggaccttcgtgtcacatcccatc

SEQ ID NO: 253510 - DNA, 193 bp, Homo sapiens; identical to SEQ ID NO: 209524
  chr4:3324703-3324896
  hypo

SEQ ID NO: 253511 - DNA, 198 bp, Homo sapiens; identical to SEQ ID NO: 209525
  chr4:3345083-3345281
  hypo

SEQ ID NO: 253512 - DNA, 34 bp, Homo sapiens
  chr4:3368270-3368304
  hypo
aggcagcagggcttgcggccgggatccaccaggg

SEQ ID NO: 253513 - DNA, 99 bp, Homo sapiens
  chr4:3375344-3375443
  hypo
gactggtgctgggatcgcagggcgtgcacaccctgtgtgctgtggccgtgtgcctggcctctgcccgcctgtgtcctgctgtatcggtcagcttacctt

SEQ ID NO: 253514 - DNA, 285 bp, Homo sapiens
  chr4:3403232-3403517
  hypo
aaagttaagtaactcgtaagttacttggtgaggaggggagttctcacgctgtccctgtgaagtccgagcacggtttttactgcggttttacagcggggggagtgtcttgcccagtgaggaaggagcggagctctgagtcagatccaaacagtgtgactctggaaccacgccgtgaaccggcacactgtggactaggtaacaccaggctgaggatccacctcctagaatacagcttgccatagagcagacatcccgtcagcacctgtgaatcgtgagaaggaggcg

SEQ ID NO: 253515 - DNA, 108 bp, Homo sapiens; identical to SEQ ID NO: 209526
  chr4:3413102-3413210
  hypo

SEQ ID NO: 253516 - DNA, 246 bp, Homo sapiens
  chr4:3415121-3415367
  hypo
tgagccgccgagccgacatgcgtggctgagggcttagctctggacactgtgcctgagagtttcgtgttgagaaggagcccacatgcagagcagtgtgcagtcacgggtgtgtgggcttcgcatccggaaggtgagcctcgtgcccccttcgactgagcacgctcccgagggcaccgtgggtcaggacgtaactcacgtggcatacgcggcgccccgcgcccagctgctttcgctctagcaagcctg

SEQ ID NO: 253517 - DNA, 147 bp, Homo sapiens; identical to SEQ ID NO: 209527
  chr4:3415798-3415945
  hypo

SEQ ID NO: 253518 - DNA, 242 bp, Homo sapiens
  chr4:3416700-3416942
  hypo
cgtgtgagaggttgcgtgtgaggggcgtgtgaggggcgtgtgtgagaggggcgtgtgagagggacgtgtgagagggccacctgtgtgtgaggggcgtgtgaggtcgcgtgtgtgaggggcgtgtgagaggtcgcgtgtgagagggccgcgtgtgtgtgaggggcgtgtgtgagagggccgcgtgtgtgtgaggggcgtgtgtgatagggccgcgtgtgagagggccgcgtgtgtgtgagagg

SEQ ID NO: 253519 - DNA, 755 bp, Homo sapiens
  chr4:3417330-3418085
  hypo
gtggcctggcttccaggcttcggggctgctttcgtctgctcgcaatgctcagagggcgctgctctcctgcactcccaccttgccaagaccaggtgtgtggcgacacacggcagtattgcccctgcgcagctgctgctgggctagcatcgcccgggtctttgggacactttaagtatccgtttaaacaatcgtagaggagcccgcgcagtgctgctgcattctggccacacttttatttatttattcaagcaagaggtatttactggggcccgtgagaacacatctgtagagcccgggggtgtcgggccttggcaggcagcaggagtgcggggagaggaagccttgccgggctgctcaggtgcctttcctgtcagctttcctacagggcccgggagattttcagtaagtttctctgcagcaaagccaccaccccggtcaacatcgacagccaggcccagctagcagacgacgtcctccgcgcacctcacccagacatgttcaaggagcagcagctgcaggtaaccgcaggctgtgggagcttgtggggagtccaggctagggctcggggtatagggtccaccttcaaagaacacgtgctatcaggcaggccagtggatcgagagcatcacagacgcaggtagagaaacgcagacagaaagtggggctttcagtagggtagagaaacgcagacagaaagtggggctttcagtagggccatgaaataagtcccgaaccactgcgtgtctgtctgcaat

SEQ ID NO: 253520 - DNA, 269 bp, Homo sapiens
  chr4:3418657-3418926
  hypo
tttgatagctacactcgctttctgaagtccccgctgtaccaggaatgcatcctggcggaagtggagggccgtgcactcccggactcgcagcaggtccccagcagcccggcttccaagcacagcctcggttcagaccactccagtgtgtccacgccaaaaaaggtgacctccccgaggctggcctcacgcccctgtgggttgtgtgtcatcagctgagagctgttctgtggggagtgaaaagaggccctgtcggcgtcttcaccagtggt

SEQ ID NO: 253521 - DNA, 199 bp, Homo sapiens; identical to SEQ ID NO: 209531
  chr4:3425119-3425318
  hypo

SEQ ID NO: 253522 - DNA, 66 bp, Homo sapiens
  chr4:3425859-3425925
  hypo
gaaagaaaacaccgcgtggggtggtgaccgcaggtgctgggcaggccacgcgagatggcgagagct

SEQ ID NO: 253523 - DNA, 274 bp, Homo sapiens
  chr4:3426136-3426410
  hypo
gaagcctcttccccgcgctgcaggctccatcctggagtccagaaatctgcaggtgggagacagacctggcctggctcccaggtgtgcccctctggccgactctggggagacgctgcgcaattgtttagcccctgtgtgtcacagtttccctgactgtaaaatggggttggtcgtggcagcgtgctcgtggcatggttggggggcaccagggtggaagggctggctgcggtcaggctcgttccctgtgagctgcggccctcggctgccgaggctg

SEQ ID NO: 253524 - DNA, 165 bp, Homo sapiens
  chr4:3439563-3439728
  hypo
gaacgggctgggcacgctcaagaggggagtcacaccttccgcccgcagcccggacttgttcacagatgcctcatggaggctgcttccggaagcttggactgagggtgaggaggggcacgctgggattggggaccttggtggccacggagccgctggggcagcaag

SEQ ID NO: 253525 - DNA, 1084 bp, Homo sapiens
  chr4:3446158-3447242
  hypo
ccgacatacaggtgcgccacggggtgtgagccgtgccactgacccctgacgggtgtccctgtccacacccgagtgggaggaatggcctgaggtcacccagaaacaagggacaaggggtggaccccggccccgactccgctgtcgtggggcactgcgcggcccctggcccagctcctcggccctgcccccagcttgtctgagcagcccttgcctgaacgggggcacctgccacctgatcgtggccaccgggaccaccgtgtgtgcctgcccaccaggcttcgctggacggctctgcaacatcggtgagtgggtcagccccccggggtgccctggggcagtgccgggtggacccaccgtgggccggcctcactgcccctctgcccgcagagcctgatgagcgctgcttcttggggaacggcactgggtaccgtggcgtggccagcacctcagcctcgggcctcagctgcctggcctggaactccgatctgctctaccaggagctgcacgtggactccgtgggcgccgcggccctgctgggcctgggcccccatgcctactgccggtcagcaccacgccgctccaggccgccgcatgcggggcaggcaggatttgtcctggggagaggccccccggctccctaggacccaggcggggccagctccgtccagacaggccccggaacctctgcctgggaggctgcccgagggagggccactctcttcccactgctccaggtgcggggaaccgccctgctgggggttccgatgccccctccccatgccctcttcgaggggcagtgtgactccctgccagcccccacttatgcaccgcaggaatccggacaatgacgagaggccctggtgctacgtggtgaaggacagcgcgctctcctgggagtactgccgcctggaggcctgcggtgcgcggctggcggggggtgctgccttgggccccaccgaggtcacagcagttttccccgtgatcctcctagcccctccgcacacctggctactgcatctctgacaaatggggaaactggagctcacgggatcaggctggtccaaggtcacgcagtgggtcggta

SEQ ID NO: 253526 - DNA, 233 bp, Homo sapiens
  chr4:3447782-3448015
  hypo
gtccaactgtcaccggatctcctggcgaccctgcctgagccagcctccccggggcgccaggcctgcggcaggaggcacaagaagaggacgttcctgcggccacgtatcatcggcggctcctcctcgctgcccggctcgcacccctggctggccgccatctacatcggggacagcttctgcgccgggagcctggtccacacctgctgggtggtgtcggccgcccactgcttctc

SEQ ID NO: 253527 - DNA, 49 bp, Homo sapiens; identical to SEQ ID NO: 209535
  chr4:3448500-3448549
  hypo

SEQ ID NO: 253528 - DNA, 99 bp, Homo sapiens
  chr4:3449286-3449385
  hypo
agaccttcggcatcgagaagtacatcccgtacaccctgtactcggtgttcaaccccagcgaccacgacctcggtgagctccggcgtgtcgtggctgcac

SEQ ID NO: 253529 - DNA, 77 bp, Homo sapiens; identical to SEQ ID NO: 209536
  chr4:3449842-3449919
  hypo

SEQ ID NO: 253530 - DNA, 149 bp, Homo sapiens; identical to SEQ ID NO: 209537
  chr4:3452962-3453111
  hypo

SEQ ID NO: 253531 - DNA, 241 bp, Homo sapiens
  chr4:3467305-3467546
  hypo
ctttctcctccttgcgtttttctcaatcgtgagcacgtctttctgttatgacaaggtttagcgaatgaaagggaaacccttttatcaaagggctgctcagccacagcgcctggcatggccagtggacgtcgggccgtctgcctcggtgtgggactgcagggtgccctgcagtgggaccacgttcctcaatgtctccaccgcgtcctcactgcggaatgcgtgtctgcgtcccctctctggg

SEQ ID NO: 253532 - DNA, 355 bp, Homo sapiens
  chr4:3475059-3475414
  hypo
ggcctccccggggacgccaagggtgcgggcaggcggtgttggctggcgtccctgacggccacgctccttgcagactgcctgctgatgctggtctacaaggacaagtcggagcgtatcaagggcctgcgggagcgcagcagcctgacgctagaggacatctgcgggctggagcccggcctgccctacgagggcttggtccacacgctggccattgtctgcctgtcccaggccatcatgctgggctttgacagccacgaggccatgtgtgcgtgggatgcccggatccgctatgcgctcggcgagggtgagtgacgggggccggggccgggcgggggctccccgttcaggtgtgccg

SEQ ID NO: 253533 - DNA, 380 bp, Homo sapiens
  chr4:3478050-3478430
  hypo
tgccccgcctgcccgcagtgcataggttccatgtgacagtggctccaggcaccaagttggagagcggcccggctaccctgcacctctgcaatgatgtcctcgtcttggccagggacatccccccggctgtcacggggcagtggaagctgtctgacctccggcgctacggggccgtgccaagcggattcatctttgaaggcgggaccaggtgtgggtactgtaagtacggatgtgtggggtcactgggcagcagcagcaccccccacttcccctgagaactgctggcttcgggccggccgaccccacttgcaggctggcctgctggcatttccagaatgcgccggcaggtggacggagtctccccacgctcgatgtccaag

SEQ ID NO: 253534 - DNA, 367 bp, Homo sapiens; identical to SEQ ID NO: 209539
  chr4:3480304-3480671
  hypo

SEQ ID NO: 253535 - DNA, 96 bp, Homo sapiens
  chr4:3512378-3512474
  hypo
ccacacaacaggccgccacgcggcaatcaggagtctgccgctgatccacgcaaaagcctgggtgaatctcagatgctgagcgaatgtaagcagata

SEQ ID NO: 253536 - DNA, 111 bp, Homo sapiens; identical to SEQ ID NO: 209540
  chr4:3514613-3514724
  hypo

SEQ ID NO: 253537 - DNA, 252 bp, Homo sapiens
  chr4:3515543-3515795
  hypo
gattctcacaaaaccctgctcgtgggcgccacctccctctccacatagaagcccgtggctcagggtgaataactcaccgaaggtcccttctctcagcggccctgacctctgccccaacggtgcgggtgcctcaggcagtgccacacggctttcttaaccaacaccgagctttgccgtggtcaggtgaagctaggtgcacgctagcattccatccccgcgtctcgcgggagcgccctgcaaaccccacatggt

SEQ ID NO: 253538 - DNA, 71 bp, Homo sapiens
  chr4:3528239-3528310
  hypo
catccccacgaagcgtcaagagccggctgccttcccagtgtcccgcagcccgcgccgccttgtggcccaca

SEQ ID NO: 253539 - DNA, 92 bp, Homo sapiens
  chr4:3576258-3576350
  hypo
gggccacaggagcccgcaccgggtccgcggaaggaactcacactcctgcttcaaggtgtggaaggcgacccaagaggcggtacacagaccgc

SEQ ID NO: 253540 - DNA, 150 bp, Homo sapiens; identical to SEQ ID NO: 209541
  chr4:3588428-3588578
  hypo

SEQ ID NO: 253541 - DNA, 215 bp, Homo sapiens
  chr4:3616196-3616411
  hypo
agagtgtgcaggcccggggcctgggcctacagaggtggagggttttctactctccccagcaccttcgccattgctgagggaagcagctcgtccccaccagcccccagtccacgaaggagaagcaacaaggggacaccccagacccaacggctccagccagccagcctcccggcgcagcccagataaattactgcattgcgcgccgtcgagatttc

SEQ ID NO: 253542 - DNA, 376 bp, Homo sapiens
  chr4:3671151-3671527
  hypo
cttcatcgttgctccgggaggctcacggttcattctgcagctgtctgcgcggccgccccccaactgcagctccatcggtttaaaatgggggccactttatcgcccagcttcctggcagctgctgcagcggcggggaccgaaattggctatttgtgctgctggcccaaacactggctgggccacgccaccagcagtcggggcaccttccacgacacagcgtcatcgagacgtggtttcatcttagcgaacgctgtctgtccccgtggactgaattcagaagccaaactgcagagccccggcccatggcaaaactttccatcttcaaagccgagttgctggcaaccaaggaggcggcccacgccggcgggggtgctgg

SEQ ID NO: 253543 - DNA, 32 bp, Homo sapiens
  chr4:3681906-3681938
  hypo
cacacctgtgactgcgccggtgccccgtgcct

SEQ ID NO: 253544 - DNA, 99 bp, Homo sapiens
  chr4:3682490-3682589
  hypo
ctagagagtttgcccgcgccccacccagtttccccgttattagcgtgtgccgtttgcatggggcatgtgtcacagctactaacccgatacgcatgcatc

SEQ ID NO: 253545 - DNA, 137 bp, Homo sapiens
  chr4:3685351-3685488
  hypo
atcttcgtgttggccgcgcctgtgcttctcatcctctctccactgccctcgctcctccatctcctcgccgccccacctcctccacccgccccgatcaccgttcaccccaacagccccagcggcgcctcgagctccag

SEQ ID NO: 253546 - DNA, 161 bp, Homo sapiens
  chr4:3729125-3729286
  hypo
ccatgtggacagcgcggggaccttcagttcctgtgttctataagcagcactgacggaaggcgccatgaccctgcggttcaggccccaggcccctgagacccctgatctctgctgcgcccctataattactcagcaggggtggggtgatccgcagcaaatga

SEQ ID NO: 253547 - DNA, 161 bp, Homo sapiens
  chr4:3729586-3729747
  hypo
aaatgatttttatttgctttgccttttcttacattctcccaaatgtccatggtggaaatggtcaaattctgtcatcagaaaagcaagaagcaacacgaagaggtctccctgcagatggcccccgcacagcccagcggggagccccacgtcccccagcctct

SEQ ID NO: 253548 - DNA, 261 bp, Homo sapiens; identical to SEQ ID NO: 209542
  chr4:3748239-3748500
  hypo

SEQ ID NO: 253549 - DNA, 208 bp, Homo sapiens
  chr4:3776159-3776367
  hypo
ataattctgccaggcaggatcgatgcacccattttacagatgagaaaactgagctccagaaaggggctgccatagagagatgctgtctgagagccagacgctggaatgtgctccatactcaccccaccacaggggatccctcggcgagccgtcaccgtccacgatattagcttcattctacagatgagaaaaccggctcagagtgtgc

SEQ ID NO: 253550 - DNA, 36 bp, Homo sapiens
  chr4:4251228-4251264
  hypo
aagagtgccagccgcgcgcggtggctcacgcctgta

SEQ ID NO: 253551 - DNA, 298 bp, Homo sapiens
  chr4:4417394-4417692
  hypo
ctgtagggcagggccgtttctgagccatctcgtatgccagccctgagcggggccgccactccacaggtgttggccgcatcaggtcttgcaggactctgctgggtgccgaggtgggagggaagaggggaacccttggtccgtttccctgagggatgacgagcagcagatggagaggacagcgtgaaggggcgtggcggtgaggctggaggggagtttgtctggcctgcagagcctccttcctgatgcacgcgctgctggtctgaatgggctgtttgttctgtagcgtgtcaggtgcttc

SEQ ID NO: 253552 - DNA, 348 bp, Homo sapiens
  chr4:4487391-4487739
  hypo
ccagagctcacacacgctgggtggacggcaggcactgctgaaacaggcatttcttttctgccaagcacacatagataacctcctaccattaggtttctgtgggatgcacctacagcgtgcagcctgtccctgccctgtcccctatgcgctctcctccgtatcttttctcctgctcccaaagctctcctttttctcgatgctactggtactttcctgcacggaacagtctttgactcaccacacactttttctgggatcactgcttatactagaattccatgagcagcctatatcctttgctctcttagaagtacgagtggtggatggtcagcacgcaggcagagggcg

SEQ ID NO: 253553 - DNA, 65 bp, Homo sapiens
  chr4:4498752-4498817
  hypo
ccccacaaagccagcgtttcaaccagagcagtttgtgaggatgatggctccgaatctaggccctg

SEQ ID NO: 253554 - DNA, 455 bp, Homo sapiens
  chr4:4509156-4509611
  hypo
gtccggctagtatgcgaactggagaaaaagttcagtggaaagcatattatctttatcgctcagaggagaattctgcctaagccaattcgaaaaagccgcacaaaaaataagcaaaagcgtcccaggagtgcactctgacagctgtgcacgacgcaagccttgaggacttgatcttcccaagcgaaattgtgggcaagagaattcacgtgaactggatggcagccggctcataaaggttcgtttggacaaagcccagcagaacaacgtggaacacagactgaaactttttctggtgtctctaagaagctcacgggcaaggatgttaattttgaattcccagagtttcaattgtaaacaaaaatgactaaataaaatatattcacagtaaaaaaaaaaaaaaaaaaaaaagttaaaaagcggcagctagctagaaaaatatacgagtttcctagtcc

SEQ ID NO: 253555 - DNA, 345 bp, Homo sapiens
  chr4:4614145-4614490
  hypo
cgcagctcatgtagcgccaggtggcctggagtggcttaaaggtacagcctccgcagccctccagagcagctggatcaggaagcccagtgtcggtggggtctttacttaagcagacagaatagttatcctcaacacgtgacatgtgtctagcccccactgtgtctgctcgctccagccaagtgcttgcaaagtaattttattccaggtttgggtccttttatgaatgagtaaacgagcttggcaaggttgaatgacctgcccacgggcacttagccaagacgcaagccccatctgcttgcttccacaccgtctggaagcctcactggctgggttcaaaaagggagg

SEQ ID NO: 253556 - DNA, 56 bp, Homo sapiens
  chr4:4921831-4921887
  hypo
catgtgaatcatggcgccgctggttgcccaggccaggcccccggccaacctctgca

SEQ ID NO: 253557 - DNA, 312 bp, Homo sapiens; identical to SEQ ID NO: 209545
  chr4:5024029-5024341
  hypo

SEQ ID NO: 253558 - DNA, 236 bp, Homo sapiens; identical to SEQ ID NO: 209549
  chr4:5970096-5970332
  hypo

SEQ ID NO: 253559 - DNA, 258 bp, Homo sapiens
  chr4:6058775-6059033
  hypo
tggcagaccctccacgcatgcggaaggctgacctcataccccgcagactggccagagccacactgacatgcttttgttcattccactctctctgcctgcgatgcccttcccacgtttctttgcctggtcgtatcctcttgcataagtcctgtgagcacacggcaccaagtccgtcttgtcgctgtggcaccctgagcctggcacagtgcctgtcacatggggacagggggactctgtgaatcccggaatggatggatg

SEQ ID NO: 253560 - DNA, 106 bp, Homo sapiens
  chr4:6064892-6064998
  hypo
agtgtgtaaagacacaaatacgaaggagctccatgcatggttcacaggtgtggaaaacgacacagcataaatccctcatcagtgcgtgctgctcatccatgggaaa

SEQ ID NO: 253561 - DNA, 205 bp, Homo sapiens
  chr4:6176208-6176413
  hypo
cgggccctcaggcccgatggttccctcttgtccttgggagctggccacatgcaccagagcgaaccagggtgcagaagaacaggcctgggctcgcagctctcaacctgctgggtcctgtggagaggtcgcaacactgctgcagccctcagtttccccatctctagagccttaagtcttccccgaaaccccccggagcagctaaaac

SEQ ID NO: 253562 - DNA, 222 bp, Homo sapiens
  chr4:6330984-6331206
  hypo
ttacctgtcgctcccgttccaggcacattcaaacttgtcgaaaatgcagtcgttctcgtacagggaacagagcttgctccgaaggtagtcatggacctggtgggataagggatgaggtgagtggacggggcgtcccgaccatcctggcccttccacaagaagggtctcaaagagcagcgagggtctgcatgccctgacatggcccagcgcagacctgctcat

SEQ ID NO: 253563 - DNA, 160 bp, Homo sapiens
  chr4:6525352-6525512
  hypo
agcggcagggccaccgcaaaaaaagcttggtaccgccgcaacaaattaaacctggaattatcctgtgacctaccaattccactcctgggtgtctatcacggaacactgaaaacacacatccacatgaacactggaacgcgaatgttcccagcagccttat

SEQ ID NO: 253564 - DNA, 92 bp, Homo sapiens
  chr4:6540026-6540118
  hypo
ccccaccccacggacgcttcctcggggtacagatatcggcatggagaggtgcccgccgcccatctgccaagttccaccgacacacaggtgca

SEQ ID NO: 253565 - DNA, 140 bp, Homo sapiens
  chr4:6580067-6580207
  hypo
ccatgctcaggagccgtaactggcttttttctctctgcctgcccatgtcaaggtccgccagctcctggaggaaggacgcctggaatttgtcatcggaggccaggtcatgcatgacgaggctgtgacgcaccttgatgacc

SEQ ID NO: 253566 - DNA, 182 bp, Homo sapiens; identical to SEQ ID NO: 209551
  chr4:6586518-6586700
  hypo

SEQ ID NO: 253567 - DNA, 94 bp, Homo sapiens; identical to SEQ ID NO: 209552
  chr4:6588779-6588873
  hypo

SEQ ID NO: 253568 - DNA, 40 bp, Homo sapiens; identical to SEQ ID NO: 209553
  chr4:6590875-6590915
  hypo

SEQ ID NO: 253569 - DNA, 304 bp, Homo sapiens; identical to SEQ ID NO: 209554
  chr4:6600488-6600792
  hypo

SEQ ID NO: 253570 - DNA, 136 bp, Homo sapiens
  chr4:6616021-6616157
  hypo
agcatccctggctggcgctacagctccaaccacacggagcactctcagaatctccggaaaggtgaggcaggtgccctggcgtctcagacctgctcctccctccctgagtcaaacaggccaccgggcccaccaccag

SEQ ID NO: 253571 - DNA, 41 bp, Homo sapiens
  chr4:6658784-6658825
  hypo
gaccaggaatataaacgtatctttttttttttttttttaga

SEQ ID NO: 253572 - DNA, 379 bp, Homo sapiens
  chr4:6669888-6670267
  hypo
gagatctttttacatagtctccacagcatggcaatttcaggggagccagacttcgtatatggtggctttggcgtccaaatgtacaaaacccaggagagtaagcatcggaagtcccatagcatctctttgccatatcaccttcacaaagtcccgccagggtcaaagggaggagacacagactccacctcttgatgggcatggcaaggttctggaagagcaggtgcaactgttagcaattgcattgtggccgtttcttgaaaatacaacgtgcaagacaccacgttttactgccccgcccggctagcagtggacgtggagacagctttgttgttgtggccgtgatgcgtcccacactccagtggctcgcgcttcctgtacc

SEQ ID NO: 253573 - DNA, 111 bp, Homo sapiens
  chr4:6686433-6686544
  hypo
ccaacccagctttcccgtgaacaggatggccaggctgtggctctgcggtcttcccaagggaaggaggaggcagggggcttgcacacccccaggcttcgccctactcctccc

SEQ ID NO: 253574 - DNA, 189 bp, Homo sapiens
  chr4:6695028-6695217
  hypo
ctattcatctgccttctgcccgttgattttcagcaaactcccagaggatgaaggggagttttctgtttggccccacaggggaggagcgagcgagattgacgtggaagctgggcctctgaaggacacagagtgctctaagaaagggacgatggggcagatccatgttcacaaacacgcccatgtgaattc

SEQ ID NO: 253575 - DNA, 101 bp, Homo sapiens
  chr4:6699159-6699260
  hypo
ttattcatctacttcgtaattcatttagtcggtcacgtagccactcattgaacctgggcccctccatctctccaaacagcatgttttcttcaagtaacata

SEQ ID NO: 253576 - DNA, 57 bp, Homo sapiens
  chr4:6726065-6726122
  hypo
tcacatgcccttgagcgacaaatccctatgtcctctgcacagcgtgacttggacact

SEQ ID NO: 253577 - DNA, 519 bp, Homo sapiens
  chr4:6733153-6733672
  hypo
gcctgtagccgccccgtcccacagacagaagcacacacaggcgcctctcctcatgtgcagctggctctgagattcatggaacaagaagagccaactcctaggaggaggccagttcaaattctgcctttttccggctgtgtactcttggagaagttacacacctctctgaaaaattgttgaaagtaaacttactgcacaggacactttctgtgctcagttatgtctgccgagttcagctggcgtgcaggcactgccacaggccccgagaaaagaacggggtgcagagcaggggctgctttcagggacccgccgtgctagtgaaggtggaacggtaaagagggtcccgggtttaagggcgcgggcagtgatgggagcacagacccagtgaggcaggggagggtgagggaggccttctgcagagggggtaccctgcagacagagtcagggagagatcaagagacggggatggccaggagggcacagggctcactggccaggcaacatcgccattatttctgt

SEQ ID NO: 253578 - DNA, 41 bp, Homo sapiens
  chr4:6735826-6735867
  hypo
taacagcagctccagcgagcaaaggacggaaggaggggatg

SEQ ID NO: 253579 - DNA, 96 bp, Homo sapiens; identical to SEQ ID NO: 209556
  chr4:6738169-6738265
  hypo

SEQ ID NO: 253580 - DNA, 253 bp, Homo sapiens
  chr4:6748304-6748557
  hypo
agatctggggagttctgggccgtccaccggcaaaggacaatggatctccaaggggtgcggccagcggatgggtgatggcatggatggagggtgggtgcatcaatgctggagcatcaactctgtgtgcccctgcggggagaatcgcccctgccgaagccccggctggtccaaaaccacgccagccgctttaggggtgtctgtggacccaggaccacacagcctcaagagccaagagtcccgagtgtgtgcacct

SEQ ID NO: 253581 - DNA, 99 bp, Homo sapiens
  chr4:6765324-6765423
  hypo
cgtgctggggcaagcgacgcctgggaatatgaagcgaacgccacacactagaacgcgccctgggagctggcctccggtgggggacgcaggtgttgaaga

SEQ ID NO: 253582 - DNA, 170 bp, Homo sapiens
  chr4:6769434-6769604
  hypo
ctccccagagctaagtccaccgtctttggaatgagtgtttgggggtggcctgtccccctgccgcccgcccgggccagggagatggccaatgcacggcgggcgcacccctattccctcctcactcatgagtctggtgggacaactcatccggtcagtcatgatgagttgtc

SEQ ID NO: 253583 - DNA, 34 bp, Homo sapiens; identical to SEQ ID NO: 209557
  chr4:6786668-6786702
  hypo

SEQ ID NO: 253584 - DNA, 34 bp, Homo sapiens; identical to SEQ ID NO: 209558
  chr4:6786942-6786976
  hypo

SEQ ID NO: 253585 - DNA, 93 bp, Homo sapiens; identical to SEQ ID NO: 209559
  chr4:6883785-6883878
  hypo

SEQ ID NO: 253586 - DNA, 35 bp, Homo sapiens; identical to SEQ ID NO: 209560
  chr4:6902912-6902947
  hypo

SEQ ID NO: 253587 - DNA, 211 bp, Homo sapiens
  chr4:6925274-6925485
  hypo
ggctttagaagaccggcacagcctccagtccgtggactcggggattcctaccctggagatcgggaacccggagcctgtaccctgcagcgcggtccacgtgaggaggaagcagtccgactccgacctcatccccgagcgggccttccagagcgcctgcgcgctgccatcctgtgcgccaccagctcctagcagcaccgagcgggaacagagc

SEQ ID NO: 253588 - DNA, 156 bp, Homo sapiens
  chr4:6946476-6946632
  hypo
tcatccctgcactggttccacgggactggctggacacagcgtcactggttcccagcacagctgacaccccttccaggaaccttctcactatccccggggcagaggtggccttccgggcatgcgtgctcctctcccgtctcctctgcagcttccttt

SEQ ID NO: 253589 - DNA, 178 bp, Homo sapiens; identical to SEQ ID NO: 209561
  chr4:6950156-6950334
  hypo

SEQ ID NO: 253590 - DNA, 172 bp, Homo sapiens
  chr4:6956967-6957139
  hypo
gagatctggaaagtatacctcggaagtgggatttagaggaagcatttaggttttgccttctctacctttggtgaataacaggattgctatgtcccttcaggaggaagcgtcttagcctcgctgggcctcggtgtcctgtccgtacggtggcggctgtaatacctttcttgta

SEQ ID NO: 253591 - DNA, 37 bp, Homo sapiens
  chr4:6957578-6957615
  hypo
agcagcctcggacacgtaagtccgagtcgcagctctg

SEQ ID NO: 253592 - DNA, 114 bp, Homo sapiens
  chr4:6958171-6958285
  hypo
acaggctcccaacacgccatccccgctgatggctcctgcgcacgcgcctacacagacctgccattgagcgcctagagtgtgtgggatgactgacacgcccggtcccccttcact

SEQ ID NO: 253593 - DNA, 104 bp, Homo sapiens
  chr4:6964580-6964684
  hypo
tgtcagtcctgcctcctcatcgccctatacttgcctcccctgcacacacacacacacggtggctgctccatttgccagcagacgtgtgtagaacctactgcatg

SEQ ID NO: 253594 - DNA, 161 bp, Homo sapiens
  chr4:6974648-6974809
  hypo
ctttacaacagactcggtaactctttccgacataacactgtgtacataggctgtagggattgacgtcgttgttggaaatgaggttgagcggaaagttaatgtcctggttggactctgagggtgctgctgattgttggaaagatagccgcagggaggatagg

SEQ ID NO: 253595 - DNA, 282 bp, Homo sapiens
  chr4:6995747-6996029
  hypo
ctttagtcagcggcttttcattctgaatagcaggaaaggtttttggcgaattgtcctcgaaattggcttaaaagagtttcatgacaaaacaactttcttactttccgaaggacttcatcctatctgaaaggacctggagtcatccctggtttctttgtcctaggaatatgaagacaaggctggaagacctagcaagccaccctctccaaagcagaatgtgaggaagaatcttgactttgaaccactttccaccaccgcactcatcctcgaggacagaccagc

SEQ ID NO: 253596 - DNA, 218 bp, Homo sapiens
  chr4:7000531-7000749
  hypo
ctgggattacaggcgtgagccaccgcgcctggccaactgaatcgtattcttctttgtgtactttcctgtctagatgttagactttgcaagcttactaaagggtggataatgcctgagccttctggagtccgtcaggtgtgaagtgagcgctggagctgatgctcgctctgcttcagggcggttttcctggtgtgttcgcagtgtgacaggaaaatcac

SEQ ID NO: 253597 - DNA, 83 bp, Homo sapiens
  chr4:7003855-7003938
  hypo
acgccctcacggagcgtcagccagctggctggtgactggcttctgtgcggtgtggtcctacagaggaacgtgggggcccggaa

SEQ ID NO: 253598 - DNA, 190 bp, Homo sapiens; identical to SEQ ID NO: 209562
  chr4:7004175-7004365
  hypo

SEQ ID NO: 253599 - DNA, 319 bp, Homo sapiens
  chr4:7006525-7006844
  hypo
aaaatacatgtgcacgtaatacttacccagaggcttttcttccagagctctttgacatctgtcttgcccgagccaaggagaggtggcggtcccttagcacaggaggctctgaagtggagaacgaaggtagaatgtcttctaaaaccagcggactgctgtggtcaattatgtttgtcattctttattacatagtgaagaaagttgacgttaactacagtagagattgttgtggagtcataaaaagctccacgagaaaagggttttttttgttttgttttttttagcaaaaattaaaggtaaaaactttttataagaaatt

SEQ ID NO: 253600 - DNA, 104 bp, Homo sapiens
  chr4:7015398-7015502
  hypo
actcagacatgagtcgtgtagccccctggaagtgccaggggttggacgaggcatgcctgcttttccagatacttttttttttttttttatgagatggagtctcg

SEQ ID NO: 253601 - DNA, 134 bp, Homo sapiens; identical to SEQ ID NO: 209563
  chr4:7033374-7033508
  hypo

SEQ ID NO: 253602 - DNA, 108 bp, Homo sapiens; identical to SEQ ID NO: 209564
  chr4:7035497-7035605
  hypo

SEQ ID NO: 253603 - DNA, 153 bp, Homo sapiens
  chr4:7035948-7036101
  hypo
aaaaaaaatatgagacgcagggaaggatgtgcgtagacgcggacagtggtcagaactgggtttcagactccagccttgtgaatgactcccaagcccttgtcagaaacaccctctaggggagggggcctttgcgagccttgttcttgtagggct

SEQ ID NO: 253604 - DNA, 477 bp, Homo sapiens
  chr4:7047026-7047503
  hypo
aacaaaccacttcttacagccgtagtcccggctgatgtttacgtttacttcttgccttgaccactttgggagcctccttgttcgttattccccctccaccccattcccctattccacacaccataaccggagcgagctttggaagcacaaagcgcctcacaccggcctcagtggcttttacttcaattaaggcagctttagaagtgttgagcaatgagatctcatctgttacctcccttgatcgttttatatttcttctacctagagtgctctccctgtaaatcatggcccaggattgagctttccacttaaatatcagtgcctcagagggcccttcccttcaccatcccagcacttacctctacgttagctgctaaggaggcgcagagccttggtggcatatctgtgcgtatctcaggacattttcccgacagcccttggcagttggctttggacggaccagtttgacttcagagc

SEQ ID NO: 253605 - DNA, 119 bp, Homo sapiens; identical to SEQ ID NO: 209567
  chr4:7167402-7167521
  hypo

SEQ ID NO: 253606 - DNA, 109 bp, Homo sapiens
  chr4:7218650-7218759
  hypo
tccaattctccgtccgcactgcgtggcggttcccgtggctcttctgatcccccatccgcactgtgtggcggttcccgtggctcttccaatcctccgaccgcactacagc

SEQ ID NO: 253607 - DNA, 210 bp, Homo sapiens
  chr4:7395597-7395807
  hypo
agtgcagagccaagcgtggaacccgggtggtctgacctcacttcagggtccttctccttgatgactgccgagtcaggtccttctccttgatgactgccgagtcagggcgtggtggggctgccttgctgtctggcttctccagcactggcccttcctgggcgacctccttgtttcagccctgggcaaagccaacgccgcaggaacccaaag

SEQ ID NO: 253608 - DNA, 217 bp, Homo sapiens; identical to SEQ ID NO: 209568
  chr4:7432357-7432574
  hypo

SEQ ID NO: 253609 - DNA, 118 bp, Homo sapiens
  chr4:7472895-7473013
  hypo
cacccgcccgctatcggggccagcatcctgcatccttccccgccggccccgcttccccgctccgctcagctcctgcctcgcgcaatgccatcttcagatttcacggaacacatttctg

SEQ ID NO: 253610 - DNA, 482 bp, Homo sapiens
  chr4:7600670-7601152
  hypo
ggctgttgttttccattgcacggtgccgatgcccttgcaggcggcagggttgaagcaagggctcttgaggaggcagccgggagaagtgggccgatgagaggttgcttgcctgagtggagccttgttgagacccatcctccaagaacacaagggctgttaagtcaagagggaacaagtccttccttccgcaggcttctcatggccgccctgcaagacggcggccccagctcacccgagatctccacagctcttgagttcctgagtgaagtcagcctgaccccagaaggccccttctgcccttcagcctctgctcccctgccagccaggactgggagccaactggtgtggtctcccctagagcacgggtgaggactgaagtggcggtgatccacgtgccaggcacttggcacgggtgcttctctgcagcctcagaaacagcaccgtcccccgccaagcccggtgtgctccgtgcagatgttgat

SEQ ID NO: 253611 - DNA, 194 bp, Homo sapiens
  chr4:7647751-7647945
  hypo
caaacgtgttcattcggtcagcaaatgggccttgcgcacccggcagccacggattccgggctaccgctggtgccgcaggtgagcgaggcaggtgtgtgcccccgggctgtgagcggcttagccgaggagcaggagataaactcccaggacgcaaggaagtcagcaaacagctgtgcaggcgtgagctccgcaca

SEQ ID NO: 253612 - DNA, 280 bp, Homo sapiens
  chr4:7666010-7666290
  hypo
cacatgtctcgggccgtctctggctccggctggagtctgaccgcctgggtcggcgcctctctcctgtagattttcggtacgtcacctgcgcaatccacaattgctccgagaagatgctgacagccccattcgcaggccccattgaccacgggtctctgaccgtgcaggacgattacatcttctttaaggtaaggttgcttctggggcttttggaaattggcaacaggtgacgtggcggatgacccgttcgcggcaaaaatggcatcgctcagaaaagagg

SEQ ID NO: 253613 - DNA, 536 bp, Homo sapiens
  chr4:7741249-7741785
  hypo
ccccgtctgacccacgccagtcctttgaggggtgcggttgaccctcacgttagagatgaagaagccaaggcccagccaggtgaaggatgggcgaggactcaggcaaggactcaggtgtgtctgggctgtgccgcgggtgctcccagccgtgtctcccggtgcccttgaggcggggcagctctgggtcctgggtcctcgacctgtctccttgactcctaaccagcccccacccgggacacccggctcaccccttggcactgacatccctatgcccccctctctcccactctcgcctcccggggcctcgccactctacgccctgcagcgcccactgccaggagggggcggagcctcagcccctctcgcacccccttgctgccgatgccgggggcgatccccacgcaggtcagtggctgtggcgggttggggccggcctgggcctcacctctcaggccctctggggcccactgcttgtgatggcaccgggagagcccactcctcaggcacccacctaggaaccgcggagaccccctgca

SEQ ID NO: 253614 - DNA, 69 bp, Homo sapiens
  chr4:7755968-7756037
  hypo
aattgggccaagcagctgtgcggcacacttgggaagcagggctgtcccggctgattcttggtaaaagca

SEQ ID NO: 253615 - DNA, 42 bp, Homo sapiens
  chr4:7756596-7756638
  hypo
aactgccaagggcttccctgcgaggctgggtcaccctggaga

SEQ ID NO: 253616 - DNA, 1058 bp, Homo sapiens
  chr4:7757467-7758525
  hypo
ggggttggaggagccatgctcggggcgtcagagggtaggggctgggagagcggggactctgcctgggggggatgcccgggtcccgctgacttcccggcgcctcctctggggagtcgccagagcgctgttttacacgtgtgaaggtcacacagaacgttctcagcacagagaaggtgctccgtcaatgtttgctgagtgaataaatgtgctctcttgctctaaatggtcattgcttggctgtgaactcgagggcagagcaggtggaattcatttttgtgctccggggcctgacagctagaaggggcttgggaatcatttgtgtagtgattttcagaataatgtcagggcctaaaactgtaacagcaaaatgcagcacctgctcccccagctcctccttctggggttggcgggtcaggacccgtggagggagggagcccagtgaccccaggggccacggcacccacggcagccacggcacccgtgctttccacagcaggccccagcagctttcggcctgcgctttgctgtcaaacttgtctgtcgcagttgtcccgggcagtaggtcctgcacaaagctgccccaggaggagtggagcagcaggaagaggcaattgtgcttgctcttggtcttgctctgaggcacttacttcccctgggggcagtcggctgcgtgctgccctcctgctgcgacttaggatctcacccgagggccaggagattggcttggtctgtgcaccatcgacccgagggccagaaggttggcttggtctgtgcacaattgacccgagggccagaaggtgggcttggtctgtgcaccatcgacccgagggccagaaggtgggcttggtctgtgcaccatcgacccgagggccagaaggtgggcttggtctgtgcacaatcgacctgagggcgagaaggttggcttggtctgtgcacaatcaggacggccctgagagcagagtggcggcagggctgtcatcccagtgccttcggggactgcgccgaggagccgggccgcatcccacgtggggtgactcgcacctgcccgtcggggccag

SEQ ID NO: 253617 - DNA, 74 bp, Homo sapiens; identical to SEQ ID NO: 209571
  chr4:7789549-7789623
  hypo

SEQ ID NO: 253618 - DNA, 44 bp, Homo sapiens
  chr4:7791292-7791336
  hypo
ccgtgcatctccccacgctccgcaccagccgctgctttccatcc

SEQ ID NO: 253619 - DNA, 34 bp, Homo sapiens
  chr4:7812695-7812729
  hypo
ggcaagaaatcagaacgtgcgtgtgagacagcac

SEQ ID NO: 253620 - DNA, 306 bp, Homo sapiens; identical to SEQ ID NO: 209572
  chr4:7813251-7813557
  hypo

SEQ ID NO: 253621 - DNA, 219 bp, Homo sapiens
  chr4:7844868-7845087
  hypo
cagtttggtgtctttgatgacgcagagcaacttggtccactggccgaaccgcttcttccgcagcaggaaggcgcagattttggcgtccttgaccaggtccatggaggcctcctcggagggccactggtgccgggttttcttccccttcccatcctcctcctcttcatcatacgactcataagagctgctcatcgcatcggaatcataatctgtaaaaaa

SEQ ID NO: 253622 - DNA, 78 bp, Homo sapiens
  chr4:7896170-7896248
  hypo
ttagcacagaggagcgtgaattctgaggcagaagagacgtacatgtcaagacaagcctggtgacggcggcaaccccgg

SEQ ID NO: 253623 - DNA, 49 bp, Homo sapiens; identical to SEQ ID NO: 209573
  chr4:7967943-7967992
  hypo

SEQ ID NO: 253624 - DNA, 211 bp, Homo sapiens
  chr4:7992552-7992763
  hypo
acagtacataaaagtcgtagaaagagtgaaacaataggaaagaacattagcagggaaaagagaatcccaaagcaaagtcattaataatattcaccaatctcccccagaagcaatgtgaaaagctaagaatctccacgtgatgatgagttctgcgcatatcagctctccaagcacatgcagagagcacgccagctaacgctctccttcccac

SEQ ID NO: 253625 - DNA, 190 bp, Homo sapiens; identical to SEQ ID NO: 209574
  chr4:8001655-8001845
  hypo

SEQ ID NO: 253626 - DNA, 92 bp, Homo sapiens
  chr4:8005614-8005706
  hypo
gcatattccatacctagggggtctcacgtctctaagcctgaggccaggtgccctgcccgtcccaccagatatcctcacgagattgacagtag

SEQ ID NO: 253627 - DNA, 149 bp, Homo sapiens; identical to SEQ ID NO: 209575
  chr4:8012068-8012217
  hypo

SEQ ID NO: 253628 - DNA, 261 bp, Homo sapiens; identical to SEQ ID NO: 209576
  chr4:8032213-8032474
  hypo

SEQ ID NO: 253629 - DNA, 356 bp, Homo sapiens
  chr4:8062502-8062858
  hypo
acaaggcaggctgacgaggctggcctggcacgtgccaccgccctgccctgccggctccccgctgtggctgggctgctcgtgacctagcgagatgacactgtcaccaacctgttcacacccagcatgtgtgtggacatcgaagagggtagttccttgctctaggggaccaaacaacacattttaatttgtaccttgaagatacatctcttcgccttctgcaaacatctggccgcacctgacacatagcgcgcaggaagggtggtagtgcttctctccggcctgtaagaaaagcacaaagcagaatgtttctactaaagccagaaaggtcggctgggtcccagcgcccggcatggata

SEQ ID NO: 253630 - DNA, 301 bp, Homo sapiens
  chr4:8070951-8071252
  hypo
gtggcactggcagacgagccgtccagtggggacgttctgaacaaggcaacacggtgcccaggaggccagcctgagcggccctagaggaccagagaacttgactaagtttgggaaaggctagggcagaatcccgcctgtggatgttcacacgcactgcagcgtgtccaggctcggagggtcccaccacgaagacagtgatgagcacattgcccggggaccaggggacgcaagggaggacacgacaggccagcgtggaagggtaggaccaggggctctgatgcgctgccggcatgaggcaagg

SEQ ID NO: 253631 - DNA, 152 bp, Homo sapiens
  chr4:8087174-8087326
  hypo
ccacgctgcagccccgtccactcacacgggtctgggggtgcccacgctgcagtcccgtccactcacacggctctgggggtgcccacgctgcagccccgtccactcacatggctctgggggtgcccacgctgcagccccgtccactcacgcgg

SEQ ID NO: 253632 - DNA, 114 bp, Homo sapiens
  chr4:8090830-8090944
  hypo
tttggcaccaccttaaagtccgcctccgcagcaagtgcctggagtgaggccaggtgagggaccgcagagagctggcccatcctcctgcagtccggggatgtctttggaaactga

SEQ ID NO: 253633 - DNA, 389 bp, Homo sapiens
  chr4:8153834-8154223
  hypo
accctcaccaagaagcgccatcatgatgcccccaaacgggccaggctttatccacaccaacactcagccacgcgttatgaggcagcaaccaatcccccacagccaccggctaaagcacgcaggcaggggataggcagacagcgcccgcctagccagggatacgcgtgttgcggctgagtcgggcacactggggttcaaatcccagcgctgccatttacaaatcacgtgacaccaggcaccagacgggactcgcaggcatttcttcctccgtaggtagagatgccaccggccgctccgagcagcgctgcgaggaccccgggaggaaacctatacgagcatctggcccagggccccagggcggcacttgatgagccgcagtctctgcgaca

SEQ ID NO: 253634 - DNA, 216 bp, Homo sapiens
  chr4:8172088-8172304
  hypo
tcttccatgcccagcgataatggtaaataggcaattgcaacactactgaccggcagacacaaaggactcagggctcggataccttagagctgagggtgtgggtcaccaagcctgactgacaggctgtccagggtgcacggcgggagtggctggtggaggagatggtggcgtccaccatagccccgggatcacccgcagccacggggccgggacttg

SEQ ID NO: 253635 - DNA, 188 bp, Homo sapiens
  chr4:8220507-8220695
  hypo
cagaggaccgtgaccgcgtcctctttatgaaaagctggcactgccagcagcccttctccttggatgccgggtccagcgctttgtgctctgtggcaagctgccggtgtctggatggcctgtgcacctgtcagagctgccggtgtctgggtggcctgtgcacctgtcagagctgccggtgtctgggtggc

SEQ ID NO: 253636 - DNA, 399 bp, Homo sapiens
  chr4:8237001-8237400
  hypo
gccagcggtgggggcggccctaatgcacagggtctgaaaaaggctcagttgcacctgcagtgtgtgagaggaaggaggctgggcgggggagtccgacctgggtgggcgtggccacctcaccaggtgtgggtcttgagggaacttctgcctcctttcaggtggcacagaacgtggccctgtacacaggcgaccccaacctggggctggagctgtttgaggcggctggagacatcttcttcgacggggcctgggagcgggagaaagctgtgtccttctaccgggtgagctggcctgtgggctgatgtgggtgggccccagggggggcaccttgagggctgaggcacaggtgtggcagggcagagccctcgcacctggaggcagggccgcccatgcacatgc

SEQ ID NO: 253637 - DNA, 125 bp, Homo sapiens
  chr4:8270688-8270813
  hypo
ttaaatctacttgacgacatcgttctgaaaaggacacccaggcttcgccaggcagcccagggtactaggaacacacacagtgtgaagaccgcagctccaggctgtgcgcgcggcgttatctcctg

SEQ ID NO: 253638 - DNA, 271 bp, Homo sapiens
  chr4:8285419-8285690
  hypo
ggtccaggcggacacggagccggcaatgagcagtcaccagaggccgcaggccagggctccagggacttgcttgttttcacggtactttccctgaggcctccagcctccctgtgacgaggctccactgccctaggcccggccctggggactgagcatctggtggctcatggggagatcccaggagtgattcctgctccagcaccgcctccctgctggctggctcggcgcttgtctggtccaagcccctgtcactaggcgtcacggcccctct

SEQ ID NO: 253639 - DNA, 318 bp, Homo sapiens; identical to SEQ ID NO: 209579
  chr4:8372557-8372875
  hypo

SEQ ID NO: 253640 - DNA, 38 bp, Homo sapiens
  chr4:8375724-8375762
  hypo
gtgcatggcagggggcgcaggggcgagggggtgcctgg

SEQ ID NO: 253641 - DNA, 261 bp, Homo sapiens
  chr4:8386104-8386365
  hypo
atgtggaagtgaaaaagtatcgctgaaacaaactaggcaggaaaacgggcactgacgggcagtgaattctcttgctcggaatgcggctgctggcggcctgaggacacacccagcgtcaacaacctctgtcctcaagactctcccagaatcctgggtcaccacggcctttccatgtgcctcacaccagaaggactctcgaaggtgcccccagccgccctgtgcacccaatgactgcccctcgatctgccccctccccagctg

SEQ ID NO: 253642 - DNA, 111 bp, Homo sapiens; identical to SEQ ID NO: 209580
  chr4:8386732-8386843
  hypo

SEQ ID NO: 253643 - DNA, 173 bp, Homo sapiens; identical to SEQ ID NO: 209581
  chr4:8389738-8389911
  hypo

SEQ ID NO: 253644 - DNA, 121 bp, Homo sapiens; identical to SEQ ID NO: 209582
  chr4:8396396-8396517
  hypo

SEQ ID NO: 253645 - DNA, 172 bp, Homo sapiens; identical to SEQ ID NO: 209583
  chr4:8398723-8398895
  hypo

SEQ ID NO: 253646 - DNA, 154 bp, Homo sapiens
  chr4:8411915-8412069
  hypo
tgagggccaccccagcgtcctacctgcacgataaagggatgcagcccatggcactggtcccctggcacacacagcttagcaaacaccaccgcgtgagtggctgtcttgcccatgttgccaacccaaaacttggcagcttcgaaatcaggggaat

SEQ ID NO: 253647 - DNA, 31 bp, Homo sapiens
  chr4:8455077-8455108
  hypo
ttcaggccaggcacggggctcacgcctgcaa

SEQ ID NO: 253648 - DNA, 90 bp, Homo sapiens; identical to SEQ ID NO: 209584
  chr4:8455168-8455258
  hypo

SEQ ID NO: 253649 - DNA, 178 bp, Homo sapiens; identical to SEQ ID NO: 209585
  chr4:8466217-8466395
  hypo

SEQ ID NO: 253650 - DNA, 56 bp, Homo sapiens; identical to SEQ ID NO: 209586
  chr4:8473097-8473153
  hypo

SEQ ID NO: 253651 - DNA, 262 bp, Homo sapiens
  chr4:8474998-8475260
  hypo
ccgccaaggggcggcgcgctgcatccatgctggctggtatggagcctggcaccgtgctgccgggtacacgcggggcctcatctcatcctgcactcatggcagagcaggcctttcctccttgaacatgtagacaagtctcagagaggtcagtgcgccggcccgatgtctcccagtgagtggagaggccacgccacagtccgggccaggtctgacccagcactggcacccctgagcctatggcatcatccgaggactgtaatcc

SEQ ID NO: 253652 - DNA, 131 bp, Homo sapiens
  chr4:8475645-8475776
  hypo
ctgcctgcgccgttcgggagcctcatctctatcatcagcgcccgctcctcagtccttagacaccctgcaggtcctgcttccaaaacatggttgggtgtgctcttaactccggagccgcgtgggagggcctg

SEQ ID NO: 253653 - DNA, 385 bp, Homo sapiens
  chr4:8483724-8484109
  hypo
tgaaagaaagccttccgtgttgaggtctatgcttcagacttgttaaggtgcgtgtcgaggtctgcaaagcttttgctaaacccttcactgtaaattttcttggggctcatcttgtttttcgccagttgcctcttctcttgccccttgttcagctctgcgtccctcttccagttccagcagctcatttgtcagttcttcaggaaccgcctggaggcactcctcaacggcatcctcctccaccctagactggagttgtttgccgtcctagccacagccgtgttgagttttgcagcctcctcatcctgggcaaatcctttgaagtcctgggtgaactcttgcgtgtcctcctctggatgccactcacgcacaccttggcaggcacacc

SEQ ID NO: 253654 - DNA, 279 bp, Homo sapiens
  chr4:8514257-8514536
  hypo
actttatgtgtaagcgttgtgtgtgtgcgtacataaaatcgtcgaaacttcctcaataaatgaagagatgtcctttttgtacgcctgaatttatgaaaggtaaatttctcgaggtcttgtttctttgggcagctgcgtgtgcagtgctgacccatgagtgtctgatcgatcacgtcaccagacgtagggtgtccttcatgggttttcaaatgacagctgttatctcaggaatttctttatgaatgtggtttgtctgctcatcaccgagtgtctatgctt

SEQ ID NO: 253655 - DNA, 322 bp, Homo sapiens
  chr4:8549955-8550277
  hypo
caggcagtggttgccggggtcggccgctgccttagggcagattgttacacgctcaggaatgtcttgcgcaggctgatgctatgcatcaactcactggggcttgggggtgcccaggtagctgccgctgcaacattatttctgggtgcctgagaggtgtttctggaagggactagcattagaatgaggaaactgaggaaagaagatggccctccccagtgtgggcggcatcatcccatctactatgggtgcagagggaacaaggcagcggaggagggaggcagtggttctctgcctcccggagctgagacgtgcacacctcctg

SEQ ID NO: 253656 - DNA, 293 bp, Homo sapiens
  chr4:8560360-8560653
  hypo
agccctcactggccacagctcggcccccatttccctggccagcaccgagccgcaggggagggtgagaatctttggcatcttggcatacgtttgttgttccagagtcgggctgtgccgagggaatgtgctgcttcccccattttgcagacagggacactgaggctcagtgagggtgagggctcacccaggttgcagagcctgcccaaagctgggtcttctggctccaagtcgggagcacgctgcacacctcatgccatggatcaggccttgaagctctccgtgaaggtgtacat

SEQ ID NO: 253657 - DNA, 248 bp, Homo sapiens
  chr4:8603005-8603253
  hypo
gcaacccggacctgcggctgctgggctgtgctgtgctggccccccggtgtgagggcggctgggtgcgcagaccctgccggcacatctgcgagggcctgcgggaggtctgccagcccgccttcgacgccattgacatggcctggccctacttccttgactgccaccgctacttcacgagagaggacgagggctgctatgacccgctggagaagcttcggggtaagggaaagtggcgggggcctgtgtgg

SEQ ID NO: 253658 - DNA, 111 bp, Homo sapiens
  chr4:8607741-8607852
  hypo
aacattcatggcaacgaggtggcgggccgggagatgctcatctacctagcccagtacctgtgctctgagtacctgcttggtaacccccgcatccagcgcctgctcaacacc

SEQ ID NO: 253659 - DNA, 231 bp, Homo sapiens
  chr4:8615876-8616107
  hypo
cccctcagctgcaggaggggcgtctgtggcgagtacctgctgcactcacctgcctgctgggcacttggctgacaccccgacgtcccggctgtctctgcgcggctgacaccccggcgtcccggctgtctctgtgcggctgacacccctgacgtcccggctgtctctgtgcggctgacacccctgacgtccccgctgtctctgtgccacaggcatgtccgatttcaactacct

SEQ ID NO: 253660 - DNA, 269 bp, Homo sapiens; identical to SEQ ID NO: 209591
  chr4:8621150-8621419
  hypo

SEQ ID NO: 253661 - DNA, 110 bp, Homo sapiens; identical to SEQ ID NO: 209592
  chr4:8647631-8647741
  hypo

SEQ ID NO: 253662 - DNA, 330 bp, Homo sapiens; identical to SEQ ID NO: 209593
  chr4:8739498-8739828
  hypo

SEQ ID NO: 253663 - DNA, 166 bp, Homo sapiens
  chr4:8749242-8749408
  hypo
cagcacctccgcagcgaggcctaggcagcagctgtgctgcaaacaccaccctggctgtgctcagaggcggccggccgccccgagaaaccctccatgatgtgacgcgaccagacaggcgcaaggaacaggccccgcagtcatgtaaaatgcaggagcgctcccatcc

SEQ ID NO: 253664 - DNA, 232 bp, Homo sapiens
  chr4:8749438-8749670
  hypo
cagtaagcgcatcccagtccccgtttgggggcaatttaacccgggcccttgcgtaacaacagcctcattattcggaggaagccggaggctcaggcgtgttctttgaatggcatagcccttgtagggggtgcgcgaaatcatctggggtggacgccacgtggcctcccagagctagcccagcccactacccagatggaagcttccagatgagtcagtccgtgggaagagaaca

SEQ ID NO: 253665 - DNA, 143 bp, Homo sapiens
  chr4:8761656-8761799
  hypo
cgtagcattccgcacgcatttgccacaggacacagcagtcaccatcctggacacttacccaggcgaaatgaaacctgtgttgccacagtcgcccgaatgtcaatggttagaggagctttattgacgatcgctcaaactggaag

SEQ ID NO: 253666 - DNA, 146 bp, Homo sapiens
  chr4:9523562-9523708
  hypo
agtagctgtcagtgcgcctagcccggcgtgtggacctggggactcaccagaagggcccgatgtggagtctcacggagcgtcggcggaaggcgcacaggatgctaaagctttacaacggcctttgggaaggggaggctgtgggactc

SEQ ID NO: 253667 - DNA, 80 bp, Homo sapiens
  chr4:9602007-9602087
  hypo
acatttggaggcccgagcaagaaacgccaccaggcgagagccgggttagctccgggcctgctgcgggctcccccggaagg

SEQ ID NO: 253668 - DNA, 35 bp, Homo sapiens
  chr4:9602117-9602152
  hypo
aaaaaaaattttcaggtccccgaaaggtgaccatc

SEQ ID NO: 253669 - DNA, 207 bp, Homo sapiens
  chr4:9701510-9701717
  hypo
tcctgagcacccagtcgatggaagacgagcaggatgactgtaaagaaggggaactggccccgtagtgtgccagcaactgtcctcagacctgacatttgtcagcccccagcacctgtgagggtgtgctgtctttgtcccatctcactgacaaagacactaggacacacagaggccaagcgacccctgaactcccgcagactgcagccc

SEQ ID NO: 253670 - DNA, 35 bp, Homo sapiens
  chr4:9784385-9784420
  hypo
tacacgcgcatctaccgcatcgcccaggtgcagat

SEQ ID NO: 253671 - DNA, 62 bp, Homo sapiens; identical to SEQ ID NO: 209595
  chr4:10086436-10086498
  hypo

SEQ ID NO: 253672 - DNA, 348 bp, Homo sapiens; identical to SEQ ID NO: 209596
  chr4:10087761-10088109
  hypo

SEQ ID NO: 253673 - DNA, 134 bp, Homo sapiens
  chr4:10101397-10101531
  hypo
accgagcagttccacgacgcacaggaatccaagcgtaagattcttctgtgagagtagcaggtgggtgttgcgggggaaggagaattacacacagaactcgatgctgattctcttctcaccggagcgtgggcagc

SEQ ID NO: 253674 - DNA, 429 bp, Homo sapiens
  chr4:10120444-10120873
  hypo
tggatgacagtctccgggtcacttagactccgttgtccgcctcccctcatctgtatcatctttgccttgggtactggcttcggagggtgttttcctgaaactcttacctgagatctacttggctgactcctgtgtccttcagaagtacttaattgctcaaatgttagttgatgagtgtcaccggtctcattttaaattgcaacttcaaccccttgcaaacactgcttctcattcccgcgttccctaactttaactctcaggaataaccctgacacctggaagatgctcctagggatgaccccactccccacccacaactgttaatcaggaaataacggatatgaaagtagctctgcgaactgaggagccgtggagaatgtacaaaacagattcctaaagtaagatacgcaggcccggcttgtaggccgc

SEQ ID NO: 253675 - DNA, 79 bp, Homo sapiens
  chr4:10128970-10129049
  hypo
aagtcacttatgcacgcagtctttgagatttgaaggggcggggttgcccctccacatccgtgggtgtttctcgttaggt

SEQ ID NO: 253676 - DNA, 37 bp, Homo sapiens
  chr4:10412555-10412592
  hypo
gggcggagcctgagcgtgcctgcgtggcaccactcgg

SEQ ID NO: 253677 - DNA, 173 bp, Homo sapiens
  chr4:10444978-10445151
  hypo
ggcgtacatgatgccgtctgatgcctagctgacacctagtcctctctgataaaacaactttgaggacattgcctttgtatttatttattaccttcatcacattggtcacttctggcgagtccacatcagggtggtttaacacaatgactggctggttccgacggggacactta

SEQ ID NO: 253678 - DNA, 120 bp, Homo sapiens
  chr4:10447425-10447545
  hypo
tctcctttcgtatacgaaatgtagctgcagtgagaacaaatgaatttaatctcctcgtgttgaagggtgtgctttttgtactgcagcgggtcctttgtagagaatcgacatttatcacaa

SEQ ID NO: 253679 - DNA, 84 bp, Homo sapiens
  chr4:10622723-10622807
  hypo
acagaaaaacaagaaaccaaaaagccctacctcagtacctcagtcaccaagaggtaagtggccgctgcaggccagacacttctg

SEQ ID NO: 253680 - DNA, 189 bp, Homo sapiens
  chr4:11374203-11374392
  hypo
caaaggctatgcgtgcgtagagtttgagaatccagatgaagctgagaaggcgctgaagcacatggatggaggacaaattgatggccaggagatcactgccaccgtcgtgctggccccctggcctaggccaacccccaggagattcagccctcccaggagaatgttgccaccaccgcctatgtggctcag

SEQ ID NO: 253681 - DNA, 318 bp, Homo sapiens
  chr4:13300414-13300732
  hypo
agcccaaaggagagcgctgtggtcgtggaaggagagagccacggcgaggagagggtggctccttccagggggcggtgcgctctgccgttccgcgtcatatcccttggcagtattgtaaacacaagtccactgtatgtttttaaaacgtgagaagaagcaggatcctgccctcgtgttttgacatcgcctgcagggagggagaatgggacgagcagatctggcctgtgcaaaatgtaattgcttttcccacctgatggttaatctcaggcgggacgggctgtcccacaggctctcaacctgagccgcccacacccgggt

SEQ ID NO: 253682 - DNA, 379 bp, Homo sapiens
  chr4:13600964-13601343
  hypo
gagggatccttagccgtctgcccagacgtctgttctggtcctctcaggtgggcaggtgagttagcattcccctctaagccccttcctgctgaataacttgctgtgctactgccccctgctgtccctgtctctgggctcttatcttctttctgaagggagttcaacaatacattcttctcttctgcatttatgaggtgtaaagtgctctctttctgtcctcttcctgcaaatggtcctatttcggggcactccttgccatgcttctcttctttttccgcacaaacagcacttggatggccttgccctgcagagggcttgtggactgatggcccgttgtgcccctcctcggtgctcactgccaacacgggacccggttctt

SEQ ID NO: 253683 - DNA, 43 bp, Homo sapiens
  chr4:13627679-13627722
  hypo
agaaaaccctcgaccgggcgcggtggctcatgcctactgggcg

SEQ ID NO: 253684 - DNA, 89 bp, Homo sapiens
  chr4:14264570-14264659
  hypo
cttctcagatgtaatggtttcaccgggaaaccatcattttgagtgtcatcttctcttattctatccaacaacaacgacccatttctcca

SEQ ID NO: 253685 - DNA, 62 bp, Homo sapiens
  chr4:15789216-15789278
  hypo
cttcaggaatgattacgaatctttgtaggtaaagcggcagaatgccacgtcctctcctggtt

SEQ ID NO: 253686 - DNA, 33 bp, Homo sapiens
  chr4:15789491-15789524
  hypo
ttaacattgttgttccgccgtgcagggagcagt

SEQ ID NO: 253687 - DNA, 43 bp, Homo sapiens
  chr4:15843148-15843191
  hypo
caactgtaaaagcaatcttgcggcggaggagccaagatggccg

SEQ ID NO: 253688 - DNA, 42 bp, Homo sapiens
  chr4:17438265-17438307
  hypo
gcaggagccctccgcgggggtggagagaggctcaggcatggc

SEQ ID NO: 253689 - DNA, 120 bp, Homo sapiens
  chr4:17438427-17438547
  hypo
ccgggtgctaagcccctcactgccggggtccactctgagtgcggggcccgccaagcccacctcatccggaactctatctagctggcccctaagcgctgcgcgcagcccaggttcccgccc

SEQ ID NO: 253690 - DNA, 35 bp, Homo sapiens
  chr4:17741679-17741714
  hypo
aaaaatgtctggcagctgggcgtcatggttcacgc

SEQ ID NO: 253691 - DNA, 120 bp, Homo sapiens; identical to SEQ ID NO: 209603
  chr4:17817849-17817969
  hypo

SEQ ID NO: 253692 - DNA, 137 bp, Homo sapiens; identical to SEQ ID NO: 209604
  chr4:17818029-17818166
  hypo

SEQ ID NO: 253693 - DNA, 53 bp, Homo sapiens; identical to SEQ ID NO: 209606
  chr4:19280790-19280843
  hypo

SEQ ID NO: 253694 - DNA, 75 bp, Homo sapiens
  chr4:22601450-22601525
  hypo
gaccagcctgagtgacgccttccaaagagcgctcccgggtgggaaattgtcctggtggaacgcctcaccagagca

SEQ ID NO: 253695 - DNA, 158 bp, Homo sapiens
  chr4:22780297-22780455
  hypo
aggctcccgcctcgcgagagccccacagcggggggcggggctcaggcatggcaggctgcaggtccgggcgggaggcggctgaggcctggcgagaattccagcgtggcaggtgtggaccggcagtgctgggggacccagcgcaccctccacagctgctg

SEQ ID NO: 253696 - DNA, 33 bp, Homo sapiens; identical to SEQ ID NO: 209608
  chr4:24422943-24422976
  hypo

SEQ ID NO: 253697 - DNA, 33 bp, Homo sapiens; identical to SEQ ID NO: 209609
  chr4:24423216-24423249
  hypo

SEQ ID NO: 253698 - DNA, 133 bp, Homo sapiens
  chr4:24534548-24534681
  hypo
agtcagtacttcgacgaggcaaattaaatctgtccataattcgagatagctgctggcgtacattgtctgcggacatcagggacctgtagttaatgaagttgtcataacaccactgaaccgattcatgatctaa

SEQ ID NO: 253699 - DNA, 185 bp, Homo sapiens
  chr4:25013885-25014070
  hypo
cattcctcctcccgcgggcttgccgcaatgctgaaattagttcaacacatctgatcaaagccacaacacacctgtaatgttgtcatagctccggaaattcatttcaatgtggtcccactccagcaccatgcagttctccatgctgggctgcgcgatggccacgtacacatcgttcttggagttga

SEQ ID NO: 253700 - DNA, 57 bp, Homo sapiens
  chr4:25014433-25014490
  hypo
taagacggacaggacgctgcacagcaacattctcaaaactgccgtgcaaatcactct

SEQ ID NO: 253701 - DNA, 184 bp, Homo sapiens
  chr4:25025017-25025201
  hypo
acctaggacattgtccggtatcaactatgctgacacagatgtttcggcctcccatgtctgctccctcatctccttacccgataggctttaacttaggcagagcctctacttgtgggcgttccagaatcaagtgtttgcttggcctattgacaaccccctttgccaatatcggggcttgatgtga

SEQ ID NO: 253702 - DNA, 138 bp, Homo sapiens
  chr4:25360422-25360560
  hypo
ctgtaaaaggtataattaccctgctaacgctgtacatatggcctgtgcctaggttggctcatgcccgggctcacttgcacccagagagagagtaaagccatgttgaaactgtctacaattcctcgagtctttttccag

SEQ ID NO: 253703 - DNA, 533 bp, Homo sapiens
  chr4:25677738-25678271
  hypo
caacctcttgtgttgcagatcgccctgtgccactttttcttcaacatctccggcatcttgctgtggtacccgatcccgttcactcgcctgcccatccgcatggccaaggggctgggcaacatctctgccaagtatcgctggttcgccgtcttctacctgatcatcttcttcttcctgatcccgctgacggtgtttggcctctcgctggccggctggcgggtgctggttggtgtcggggttcccgtcgtcttcatcatcatcctggtactgtgcctccgactcctgcagtctcgctgcccacgcgtcctgccgaagaaactccagaactggaacttcctgccgctgtggatgcgctcgctgaagccctgggatgccgtcgtctccaagttcaccggctgcttccagatgcgctgctgctgctgctgccgcgtgtgctgccgcgcgtgctgcttgctgtgtgactgccccaagtgctgccgctgcagcaagtgctgcgaggacttggaggaggcgcaggaggggcaggatgtccc

SEQ ID NO: 253704 - DNA, 90 bp, Homo sapiens
  chr4:25681546-25681636
  hypo
tatggcctttcagtgctgtgcgttctgccaacaactgcgctagtcaaaataataacatgttggttgggtgcggtggctcatgcctctaat

SEQ ID NO: 253705 - DNA, 139 bp, Homo sapiens
  chr4:25811520-25811659
  hypo
ctccaaataaacatcgcaattgttggcaaaaataaagtcaaaagcaaggtagagcttcgctagtgcagccagtcactccttggcgtattgtgtggggacacctctgcccccacactcagcactccggagcctgggggca

SEQ ID NO: 253706 - DNA, 204 bp, Homo sapiens
  chr4:26223413-26223617
  hypo
agctagacgagaataattcaaatgttcctcgcataaagataaatacttaaggctgggtgcggtgactcatgccagtgcaatgctgtgtccccactcccaatgtgcggcccagcgctgaacgaattcaatccagagactggcagggcggtgagagggatggggggagggcaggagtgaggagacgaactgagaggtgctaatggg

SEQ ID NO: 253707 - DNA, 280 bp, Homo sapiens
  chr4:26466305-26466585
  hypo
gctttctgcttccccgggtggtgctggctcccgattacagcgggcaagagcagtcctcgcccccagtgaatcggcaggacccagctcacgttgtgcaaattcactcagtgggagagacgtgggcggcctggatacctgccctgctcaatgcctgtgagaagcagaaacaggcttcccgtcacctcccttcttctccaacagcagatccagcctggtgccctttggggactgagtaagaaaggaggggagggccccatgtgtttaccggtagagtatttag

SEQ ID NO: 253708 - DNA, 209 bp, Homo sapiens; identical to SEQ ID NO: 209612
  chr4:26823270-26823479
  hypo

SEQ ID NO: 253709 - DNA, 136 bp, Homo sapiens
  chr4:26855447-26855583
  hypo
cgcctggccaagaaacaacttttaaaatctgatcttctttctttcgtatttacaataatgctctgggaatgtgctcatccgtaattcaaacatccacatttccagactttctgttttccttcgtttccatatcaga

SEQ ID NO: 253710 - DNA, 99 bp, Homo sapiens; identical to SEQ ID NO: 209613
  chr4:26856540-26856639
  hypo

SEQ ID NO: 253711 - DNA, 32 bp, Homo sapiens
  chr4:27077854-27077886
  hypo
tgttcctattcggccatcttggctcctccccc

SEQ ID NO: 253712 - DNA, 35 bp, Homo sapiens
  chr4:27486040-27486075
  hypo
aattaaaaacactttatggccgggcgcggtggctc

SEQ ID NO: 253713 - DNA, 53 bp, Homo sapiens
  chr4:27570054-27570107
  hypo
tccttttctccctagactgacgtgcgcatatcgcaagcaccagttggtctttg

SEQ ID NO: 253714 - DNA, 156 bp, Homo sapiens
  chr4:35039895-35040051
  hypo
gctgccccgctgccccgaccaagggtgccagattcctgggcttcaggaggagtctctgtgcagggccgcctggggccgtgtccccagggtctgtctggcgtcagggtgactgctgagccttctactcccgatggctcggcccggggagtgatccac

SEQ ID NO: 253715 - DNA, 117 bp, Homo sapiens
  chr4:36345195-36345312
  hypo
caactctccctctgcgccgtagcaccattcagctcatcaaactcaagaaccctgatgatctcacagaacagatccacgagtttctttgcttctggaaaaaatcgcttccaactttca

SEQ ID NO: 253716 - DNA, 101 bp, Homo sapiens
  chr4:36896147-36896248
  hypo
agcgagactccccgtctcaaaaaaaaagaaagaaaagaaaagatcacgaatcgcggcaggctgtaactcaataaatgtctctctctcggccgggcacggtg

SEQ ID NO: 253717 - DNA, 37 bp, Homo sapiens
  chr4:37585278-37585315
  hypo
tcgatctcctgacctcgtgatagcctggccttgttta

SEQ ID NO: 253718 - DNA, 49 bp, Homo sapiens
  chr4:38016579-38016628
  hypo
actatgctcttcacggtaaaatatcacccagctcgtgcacagccccagt

SEQ ID NO: 253719 - DNA, 188 bp, Homo sapiens; identical to SEQ ID NO: 209617
  chr4:38278935-38279123
  hypo

SEQ ID NO: 253720 - DNA, 130 bp, Homo sapiens
  chr4:38313304-38313434
  hypo
aggaattccatgcatctcctcgggcgtctagcaccgccagcgagcaagaacacacacctcattccctccgattaaaatgagtaaggcaaagggatgaaatgttcctttcggcactcactcaggtaaattg

SEQ ID NO: 253721 - DNA, 213 bp, Homo sapiens
  chr4:38568875-38569088
  hypo
acttcaccaaaaaacgtgaaacaatacggcacataagtcctaaggtttctctcagttatatattatgtgaaattggcttagaaatattttttaaaacttgagagaaatataacaaacttccttatagcaacgtttgtctattactaacaagcactttgccccggtagccttttttctcagctttgctccccaatgttacggtcaatttcacca

SEQ ID NO: 253722 - DNA, 42 bp, Homo sapiens
  chr4:38678869-38678911
  hypo
ccacgcccagtcagtgccagcgttttatactagactatgttt

SEQ ID NO: 253723 - DNA, 206 bp, Homo sapiens; identical to SEQ ID NO: 209618
  chr4:38729967-38730173
  hypo

SEQ ID NO: 253724 - DNA, 89 bp, Homo sapiens
  chr4:39297607-39297696
  hypo
cagggagatcatgtcgccaactcagcctcctcaagcaactaatctcaacataccggttacctcaccgatgccaacgtcacagcaaataa

SEQ ID NO: 253725 - DNA, 548 bp, Homo sapiens
  chr4:39447939-39448487
  hypo
tgtttttcacagcccgagtctgtggcttcgtccccacagttcagcgatcctcatctgtacgtgtggaacgccactggcaacagactgttgcaccgagtggaaggggtgaggctgaaaacacgacccgctcaatgcacagattttgtaaacatcaaaaaacaacttgagatgttggcaagaatgaaagtcacccactaccggtttgctctggattgggcctcggtccttcccactggcaacctgtccgcggtgaaccgacaggccctgaggtactacaggtgcgtggtcagtgaggggctgaagcttggcatctccgcgatggtcaccctgtattatccgacccacgcccacctaggcctccccgagcctctgttgcatgccgacgggtggctgaacccatcgacggccgaggccttccaggcctacgctgggctgtgcttccaggagctgggggacctggtgaagctctggatcaccatcaacgagcctaaccggctaagtgacatctacaaccgctctggcaacgacacctacggggcggcgcacaa

SEQ ID NO: 253726 - DNA, 153 bp, Homo sapiens; identical to SEQ ID NO: 209622
  chr4:39481996-39482149
  hypo

SEQ ID NO: 253727 - DNA, 120 bp, Homo sapiens; identical to SEQ ID NO: 209624
  chr4:39623588-39623708
  hypo

SEQ ID NO: 253728 - DNA, 37 bp, Homo sapiens
  chr4:39629633-39629670
  hypo
atcctaaaaaaaaggctaggcgtgggggctcacgcct

SEQ ID NO: 253729 - DNA, 97 bp, Homo sapiens; identical to SEQ ID NO: 209625
  chr4:39745202-39745299
  hypo

SEQ ID NO: 253730 - DNA, 39 bp, Homo sapiens; identical to SEQ ID NO: 209626
  chr4:39761181-39761220
  hypo

SEQ ID NO: 253731 - DNA, 254 bp, Homo sapiens
  chr4:39773069-39773323
  hypo
ggcaaccctggcccggttccgcgcgctgtttttttttaatcccctattttccccacccccgcggggccggaagcgccccccacacacgggcagagccagggcagcatgtaggcgcagggcgggagggtgtatagggcgcgctcgcgctggcggggccggctccacgtgggcgtaaaggggtaggggcgggagcggctcgtgcggtgtgttccaggcctcgcgcgcgcggcgacggcgtcggctaggactcaaac

SEQ ID NO: 253732 - DNA, 79 bp, Homo sapiens
  chr4:39816677-39816756
  hypo
ctgggcaagaaaagacgagaaagttttcctgtcgatgtggcctcttggaggctgaactgtgtggcaatgtaactagaaa

SEQ ID NO: 253733 - DNA, 149 bp, Homo sapiens
  chr4:39817116-39817265
  hypo
accctggctcaagaaagcctgatgcaggcccagagcctggagagcagatgctgcaccaagcaggaacagcggagtctgcgagcgcgcccacctgctgcctgaggatgtcctggctggggacaccccttctgcttcagcagtggtagccg

SEQ ID NO: 253734 - DNA, 37 bp, Homo sapiens; identical to SEQ ID NO: 209627
  chr4:39913158-39913195
  hypo

SEQ ID NO: 253735 - DNA, 255 bp, Homo sapiens
  chr4:39937634-39937889
  hypo
agacttctaattcgcgataaaaggaacctgacagaagcaaggcgcaaatggggagcagagaggactaaaaagcaaaaggaggaaacttatgagggtgataagttcactttaattgaagtgatggtttcaatgctgtgtatgtatgtcaaaacttgtcaggttgttattccccgacagcaattctctgacaccaaataggtgtcctacatttcaattcagttctgacactacccaccttagcgcagaaccccacag

SEQ ID NO: 253736 - DNA, 38 bp, Homo sapiens; identical to SEQ ID NO: 209629
  chr4:39964135-39964173
  hypo

SEQ ID NO: 253737 - DNA, 83 bp, Homo sapiens; identical to SEQ ID NO: 209630
  chr4:39972695-39972778
  hypo

SEQ ID NO: 253738 - DNA, 104 bp, Homo sapiens; identical to SEQ ID NO: 209631
  chr4:40161797-40161901
  hypo

SEQ ID NO: 253739 - DNA, 91 bp, Homo sapiens
  chr4:40261225-40261316
  hypo
ttattattatgacgcggcatcgtcttgggtaaatacccagggttcatcatcttgcgccaagaagattcaggacatgcacacacacaaggaa

SEQ ID NO: 253740 - DNA, 107 bp, Homo sapiens
  chr4:40485048-40485155
  hypo
ataaatactggttacgctattaatgattacaggtgaaattagaaacacgagaacatctttaaaaggtcaactccaaggctgatcagtttagacgggatgctaaaatt

SEQ ID NO: 253741 - DNA, 199 bp, Homo sapiens
  chr4:40485402-40485601
  hypo
aaggggcggggtagcggaagcagagggagcgagacaggcaggggtcagatgggagcgttataacacccaggagaggacttcaagttctccttggctgattggaggattctgagcagagaagcgctgtgatctgcttttctgttttttaagatcactggtgtgcagccgggtgcattggctcacgccggtaatcccagct

SEQ ID NO: 253742 - DNA, 83 bp, Homo sapiens; identical to SEQ ID NO: 209632
  chr4:40492771-40492854
  hypo

SEQ ID NO: 253743 - DNA, 39 bp, Homo sapiens
  chr4:40625666-40625705
  hypo
acaggcatgaaccaccacgctcagctcttcactctccct

SEQ ID NO: 253744 - DNA, 40 bp, Homo sapiens
  chr4:40823880-40823920
  hypo
aactcaccatgcaggcggcctgcaccgcctcagacacgtt

SEQ ID NO: 253745 - DNA, 100 bp, Homo sapiens; identical to SEQ ID NO: 209633
  chr4:40857394-40857494
  hypo

SEQ ID NO: 253746 - DNA, 147 bp, Homo sapiens
  chr4:40910434-40910581
  hypo
cacattcctgtcaccgcgccttgctgcctcctaggtgcggcaacaatgctggctttcctgacggagagagggaggccggcatccccaggccacacctataatgcctctcaccccatacacgtgtgcacaacacgcctcctcccctcc

SEQ ID NO: 253747 - DNA, 39 bp, Homo sapiens; identical to SEQ ID NO: 209634
  chr4:40983409-40983448
  hypo

SEQ ID NO: 253748 - DNA, 188 bp, Homo sapiens; identical to SEQ ID NO: 209635
  chr4:41012740-41012928
  hypo

SEQ ID NO: 253749 - DNA, 88 bp, Homo sapiens
  chr4:41167664-41167752
  hypo
cctcaagagacaagacgtcaatttataacccaaggtatgcccactatgaaactctctacacctggggagttttcggccacttttacaa

SEQ ID NO: 253750 - DNA, 34 bp, Homo sapiens; identical to SEQ ID NO: 209636
  chr4:41198150-41198184
  hypo

SEQ ID NO: 253751 - DNA, 35 bp, Homo sapiens
  chr4:41317297-41317332
  hypo
cagacaatgtaggctgggcacggtggctcacgccc

SEQ ID NO: 253752 - DNA, 179 bp, Homo sapiens; identical to SEQ ID NO: 226537
  chr4:41993656-41993835
  hypo

SEQ ID NO: 253753 - DNA, 87 bp, Homo sapiens
  chr4:41994052-41994139
  hypo
gacagaatgaatcatcggctgggtgcagtggctcatgctgctaatcctcaggaagattgtaaaccttaggacgctgaggtgggtgga

SEQ ID NO: 253754 - DNA, 164 bp, Homo sapiens
  chr4:42316045-42316209
  hypo
ctctagtgaggcggcgtgccccgcccccctgtggcggtctcagcggtgagaaatcaggacccatgcagtgcgaggaataacccgagctctcagcaacgcggaaagaaacttgccagcaacctagcttaaaggatcctcacatactaccgcgacgactctgcaca

SEQ ID NO: 253755 - DNA, 120 bp, Homo sapiens
  chr4:42317330-42317450
  hypo
ccccagatcaagcccagcaggcgcccaccggccgcaccgactgcggggcccacttagcccgtgcccacctggaacctgcgccggcccacaagggccgtgtgcagccccggctcctggtgc

SEQ ID NO: 253756 - DNA, 265 bp, Homo sapiens
  chr4:42348066-42348331
  hypo
gagttggcaggagccgggaacaggcgggagccctgcccgggtcggagctggcgtggcacgagccctgcccgcctgggtgcagcctcccccacaggctcggaaatgcctgctcctgctacctggcctgtatctgttcttggcgcccgctccgatttcggagaaaagttgaggccgagtccgggtgctgtggtaacctggccgggtatgcgtgcgctcggggtggggctgacacgccagccctttgccacctcggccccctcctgac

SEQ ID NO: 253757 - DNA, 34 bp, Homo sapiens
  chr4:44679263-44679297
  hypo
agttccaagaaagggccaggcgcggtggctcacg

SEQ ID NO: 253758 - DNA, 181 bp, Homo sapiens
  chr4:47427738-47427919
  hypo
gagacgagtggctcggaagtgctcacgagcgtgagcgaccccaaggccaccatgtactcctatgacagcgccagcatccagtaccgcaagcccctgagcagccgcgaggcctacgggcgcgccctggaccggcacggggtacccagcaaggggcgcatccgcaggcgtgcctcccagctca

SEQ ID NO: 253759 - DNA, 150 bp, Homo sapiens; identical to SEQ ID NO: 209641
  chr4:48017182-48017332
  hypo

SEQ ID NO: 253760 - DNA, 31 bp, Homo sapiens
  chr4:48378917-48378948
  hypo
gcgcccggccgactttttttttttttttttt

SEQ ID NO: 253761 - DNA, 227 bp, Homo sapiens
  chr4:48496110-48496337
  hypo
cccccagagttgtaaacaaacgagatgttcctgcccagtaaaacttcgccacgtggaccctaaacggccccaccgtcaagatttgtgcggtagatgcaaaggcaaacgcctgtcctgtgacagcactttcagcttcaaatacatcatttaggtgaaagtcagtgttgctgtgcatgcgctgatggagtagacgagtgagcttttccgtgcctctcctccacctctcc

SEQ ID NO: 253762 - DNA, 151 bp, Homo sapiens; identical to SEQ ID NO: 209642
  chr4:48572779-48572930
  hypo

SEQ ID NO: 253763 - DNA, 148 bp, Homo sapiens; identical to SEQ ID NO: 209643
  chr4:48678685-48678833
  hypo

SEQ ID NO: 253764 - DNA, 136 bp, Homo sapiens; identical to SEQ ID NO: 209644
  chr4:48679320-48679456
  hypo

SEQ ID NO: 253765 - DNA, 196 bp, Homo sapiens; identical to SEQ ID NO: 209645
  chr4:48679696-48679892
  hypo

SEQ ID NO: 253766 - DNA, 88 bp, Homo sapiens
  chr4:48887292-48887380
  hypo
actgcgccatgccccgacatgttcttaaagagcagaaaaacatgtaacgcttagttcacttgaaagccttccacggaatacatttcag

SEQ ID NO: 253767 - DNA, 44 bp, Homo sapiens
  chr4:48987268-48987312
  hypo
cctgggctacagagcaggactccgtctcaaacacaacaaaacag

SEQ ID NO: 253768 - DNA, 33 bp, Homo sapiens
  chr4:53200853-53200886
  hypo
ggaggccaaggcaggtggatcgcgaggtcagga

SEQ ID NO: 253769 - DNA, 93 bp, Homo sapiens
  chr4:53201066-53201159
  hypo
ctgggcgacagggcaagactcagtctcaaaaaaaagaaaatagcaagttaatcttactttaaatacagatgcggaagttctaaataaaatgtc

SEQ ID NO: 253770 - DNA, 89 bp, Homo sapiens; identical to SEQ ID NO: 209646
  chr4:53230797-53230886
  hypo

SEQ ID NO: 253771 - DNA, 43 bp, Homo sapiens; identical to SEQ ID NO: 209647
  chr4:53587809-53587852
  hypo

SEQ ID NO: 253772 - DNA, 394 bp, Homo sapiens
  chr4:53739882-53740276
  hypo
tcactaattggactcgccaaaagacagactgtcgccttcaggaaaataaaaaaactttttttttttttttttaagaatcacagcaatccaagcaaagtacctcactgagtaggtatcaagacccttcaggcagaattccatcattctcgcaattagtgacagggacgctggttgtggaggagtatttggagtggtggcagaaaattgcatcggcatttccagcttgagtaggtcttatcttcttagcggatgctcagaagccaaggtctggatgcagtcggtcagttgcaaataacagctcaggaatgttaagtggcttcaggagtcgtgtggacagcacgattacctaacaacaggagagggcaaacacaccgcagggaattaggggggccaa

SEQ ID NO: 253773 - DNA, 32 bp, Homo sapiens
  chr4:54229705-54229737
  hypo
ctgtatgtttaaaaaaagggcgcggtggctca

SEQ ID NO: 253774 - DNA, 32 bp, Homo sapiens
  chr4:54229977-54230009
  hypo
agagagactccgtctcaaaaaaaaaaaaaaaa

SEQ ID NO: 253775 - DNA, 39 bp, Homo sapiens
  chr4:54317441-54317480
  hypo
agctactcattttcgatcgggggttgttttttttttttc

SEQ ID NO: 253776 - DNA, 37 bp, Homo sapiens
  chr4:54500677-54500714
  hypo
tgggattacaggtgtgagccaccgcccccaggctcag

SEQ ID NO: 253777 - DNA, 142 bp, Homo sapiens
  chr4:54732285-54732427
  hypo
tcttccctgcctgtcgattcagcgtggggacctcagcgctggacttcaaatcctgattctagctcccggtgactcagcaagaaggcctgaaggctctctaccctgacacaacctacatccacttatacggcaagacgctgag

SEQ ID NO: 253778 - DNA, 70 bp, Homo sapiens
  chr4:54858183-54858253
  hypo
aacaagttgggactcgcaggtaggagactatgacagagagtagacgaagttgatacgattacagaaaagc

SEQ ID NO: 253779 - DNA, 40 bp, Homo sapiens
  chr4:55406440-55406480
  hypo
aaaaatacacatttccggccgggcgcggtggctcacgcct

SEQ ID NO: 253780 - DNA, 204 bp, Homo sapiens
  chr4:56205291-56205495
  hypo
cctctctcatgaggcgccatgccgcctcttgtggtggccttaggggtaaggggctgagacccacccggtgtgatgaataaatctggactctcagcaacacggaaagaaactggccactaacctggggtaaaggatcctcatctaccatggcgacgactctgtgcacagaccaacgaaggagaagccacgggagtcgataaagta

SEQ ID NO: 253781 - DNA, 35 bp, Homo sapiens
  chr4:56213496-56213531
  hypo
ccttaagatgcatcttaggccgggcgcagtggctc

SEQ ID NO: 253782 - DNA, 35 bp, Homo sapiens
  chr4:56213651-56213686
  hypo
cagggcttggtggcgtgtgcctgtagtgccagcta

SEQ ID NO: 253783 - DNA, 103 bp, Homo sapiens; identical to SEQ ID NO: 209657
  chr4:56222930-56223033
  hypo

SEQ ID NO: 253784 - DNA, 103 bp, Homo sapiens
  chr4:56227951-56228054
  hypo
cagagtgagactccatctaaaaaaaaagagcaaacccgtggacatcctctttggaagggtaggctacatcagcggatctcactccactcgttaaaacttcatc

SEQ ID NO: 253785 - DNA, 105 bp, Homo sapiens; identical to SEQ ID NO: 209659
  chr4:56936357-56936462
  hypo

SEQ ID NO: 253786 - DNA, 37 bp, Homo sapiens
  chr4:56966393-56966430
  hypo
gcaagactccatcttgcggggacgggggggaaggggt

SEQ ID NO: 253787 - DNA, 38 bp, Homo sapiens; identical to SEQ ID NO: 209660
  chr4:57051388-57051426
  hypo

SEQ ID NO: 253788 - DNA, 31 bp, Homo sapiens
  chr4:57064132-57064163
  hypo
gcacccagccgggtgatttttttttaattta

SEQ ID NO: 253789 - DNA, 89 bp, Homo sapiens; identical to SEQ ID NO: 209661
  chr4:57082785-57082874
  hypo

SEQ ID NO: 253790 - DNA, 115 bp, Homo sapiens
  chr4:57093714-57093829
  hypo
tttagagcagagatcgaccaacttttataaagggccagatagtaaatattttaggctttacgggccacatagaccggctgcagctgttcaactccatcttcgcagtgcacagata

SEQ ID NO: 253791 - DNA, 174 bp, Homo sapiens; identical to SEQ ID NO: 209662
  chr4:57178037-57178211
  hypo

SEQ ID NO: 253792 - DNA, 92 bp, Homo sapiens
  chr4:57178241-57178333
  hypo
gccgctcatttttctcatcaggtccctcttccttttatcttctcagtgcagtcagtaccctgagacttctttggagcgattgtaccaaaact

SEQ ID NO: 253793 - DNA, 2799 bp, Homo sapiens
  chr4:57179994-57182793
  hypo
ggaaacagaatacacgtccttttctccattcgcacgacagagtcttgcgtggggtgaccgatgcctgagtttagctatccctgaacttgagaatacctgcttccaggtgttcttgagaaattaagagggtcgctggcactgtgaataggaaaaggaacgactgtgggtggagaaagcaaaaggctaattgtgttttcctttccaatgttaggatccacaacatgagcaaggcggccttgagagtcggccctgcctggaccagaacggacacccaggcgaggacaagccaacgtggcacgaagaggaacccaatccgctggattccgaggaagagagaagacgccaagaagactactggcgagaactggaggccaagtgcaagcggcaaaaggcggaagcagccgagaagagacgcctagaggagcagaggctgcaggcgctggagaggaggctttgggaagagaacagaaggcaggagctcttggaggaggagggcgaggggcaggagccgcctctagaggcggaaagggcgccgcgggaagagcagcagcggagcctggaagcgccaggttgggaggacgcggagcggagggagcgtgaggagcgcgagcgcctggaggcggaggaggagcgaaggcgtctgcaggcccaggcccaagcggaggagaggcggcggctggaggaggacgccaggctggaggagcggaggcggcaggaggaggaggaaggaagatgcgcggaggagctcaaaaggcaggaggaggaggaggctgagggatgggaagagctggaacagcaggaggcggaggtgcaggggccgcccgaggcgttggaggagactggggagggccggcggggcgcggaggaggaggatctgggggaagaggaggaggagggccaggcgcacctggaggactggagggggcagctcagtgagcttctgaacgactttgaggagaggctcgaagaccaggaacgcctgaaacccgaaggacaaagagaacactccgaggagccaggtatttgcgaggagcagaacccagaggccgagcggcgaagagagcagcagggaaggagcggggatttccagggggccgatcgtcctgggcccgaggaaaagagagaagaaggggacacggagcctctcctgaaacaagaggggccggtggaagccgcgcagcctccggtggagaggaaagaagccgccgcccttgaacaaggccgcaaggtggaggagctgcggtggcaggaggtggacgagagacagaccatgccccggccctacacgttccaggtgtcctccggagggaagcagattctctttcccaaagtcaacctgagccccgtgacgcccgcaaaggacacggggctcaccgctgctccccaggaaccaaaggcccccaaagccagcccagtccagcacgccctaccgtcgtccctgagcgttccccacaccgccattctggtcacgggcgcgcagctctgtggcccggcagtcaacctgagccagatcaaggacaccgcgtgcaagtccctcctgggcttggaggagaagaagcacgcggaagccccagctggggagaaccctccccgaggccccggcgacgcgagggcgggcagcgggaaggctaagccccgccaggagtctcccagcagcgcgtccgcactcgcagaatgggcttccattcggtccagaatcctgaagaacgcagagagtgacccgcgcagcagcgagagggaccagttgaggcccggtgatgagtccactcccaggggccggtgtgattcccgcgggaaccaacggaagactccgccagtcaatgcaaagttctctattatgcctgcctggcagaaattttccgatggtggcacggagacctccaaacagagcacggaagctgaaagcatacgaaaaagacccatgctgggacccagcgaagagacagccccccagcctcctcctgctggtgttcgcgagctcgggaagggtccggagaagtcggagatgcaccgggagcccgcagacaccaccgagggatgcaaatttgccaaagacctcccgtctttccttgtcccaagccttccttaccctccgcagaaagtggtggcccacacagagttcacgacctcgtcggacagcgagactgcaaacgggatagcaaagccagaccctgtgatgccaggtggagaggaaaaagcctcaccgtttggaataaaattgagaaggaccaactattccttgcgcttcaactgcgaccaacaggcagaacagaagaagaagaagaggcacagcagcaccggagacagcgcggatgcagggccgcctgcagcggggagcgctcgtggagagaaagagatggagggtgtggccctcaagcatggtccatccctcccccaagagcggaagcaagccccttccacccggagggactccgctgaaccttccagcagccgctctgttcctgtggcccaccctgggcctccaccggccagcagccagaccccggctccggagcacgacaaggcagcaaacaaaatgccactggcacaaaagccagcactggctcccaagcccaccagtcagaccccaccagcatccccactttccaaactgagcaggccctacttggtagagctgctgtctcgccgagcggggaggccggacccagagccaagtgagccgtccaaggaggaccaggagagcagtgaccgccggccaccctcgcccccaggccccgaggaaaggaagggacagaagagggacgaggaggaagaggcgacagagaggaaacctgcttc

SEQ ID NO: 253794 - DNA, 38 bp, Homo sapiens
  chr4:57486552-57486590
  hypo
ttttttttttttttttgagacggaattttgttcttgtt

SEQ ID NO: 253795 - DNA, 37 bp, Homo sapiens
  chr4:57486830-57486867
  hypo
gtgagccaccgcgcccgacatccttctagttgttttt

SEQ ID NO: 253796 - DNA, 247 bp, Homo sapiens
  chr4:57777250-57777497
  hypo
caaaggcaagagctcgaagaccaaaccctttcgctgtaagccatgccaatatgaagcagaatctgaagaacagtttgtgcatcacatcagagttcacagtgctaagaaattttttgtggaagagagtgcagagaagcaggcaaaagccagggaatctggctcttccactgcagaagagggagatttctccaagggccccattcgctgtgaccgctgcggctacaatactaatcgatatgatcactat

SEQ ID NO: 253797 - DNA, 114 bp, Homo sapiens
  chr4:57812272-57812386
  hypo
acaccactgcagatcctgggcgacaaagctagaccccgtctcaaaaaaaaagaatacgtcttaacgttttggatttgtttgaaaatgttcttcgttcttgggcctgtgagcctg

SEQ ID NO: 253798 - DNA, 360 bp, Homo sapiens
  chr4:57813006-57813366
  hypo
ccaccgcgcccagctgcattttctgtcttaatcctgcaccttttgggtgttttcctcatctgcagggcatgcctgcgtgtatgcacgtgcgggcacacacacgcgcgtgcacctttaaattcttcactgaggcttgctggagttctgtctctggtgggtagatggcttacagcaggcagcgcaagatccgtccaccccattcagataaagacagggatttcagggccgtggtccctcaagtcaatgaactccagaggaaaggactcttctggagataccagaagactctggtatgagcaaagcccagactctcctgggctgtactcatgttacaagaaagggatcccccagcctggccag

SEQ ID NO: 253799 - DNA, 113 bp, Homo sapiens
  chr4:57896302-57896415
  hypo
gccattattcaaggcggtgtttataataaaaaataagtacaaagtaataatttttttctcttaacagtgatggtggcctgcgttttggagaaatggaacgagattgtcagatt

SEQ ID NO: 253800 - DNA, 403 bp, Homo sapiens
  chr4:57921794-57922197
  hypo
gtggacagggtcatcgcggttctcctggactgctttccattttcataaaatagggcagtcatctcccacctgcaccctgtccctcttctgccctcctcattcctgcccttgactgttctgtatggagatggggctctgtgtctggagtgcatgggtcttatctaaaatccctcgaacttgggagccgccctttgctcatttctggtccgattgcctctctgttaagacattcggtttggctttaagcgggcaaggaggaggttgaataaagggatctctgtgtgcgaatagcccccttcagacttccatggagcagagcgcagggcgtgatggctgcttggcgggcgtctggcgtttgtacttgcgtatgtttttaccctccaggccccggactcccattgtc

SEQ ID NO: 253801 - DNA, 841 bp, Homo sapiens
  chr4:64214827-64215668
  hypo
tccaccccatcctctggggccgcccttcctcggcgtccacggccccgcgggcagttacctgttctaggtgtttgtgccccccgactccggtaaaggtcctcagccccggcctgctacgtctcagctgctgcccgcgccaggtgagggctcagggctactggttggggctcccggcgcttggtgtctggctctgggagtgcgctgccgagaggattgggccggcaggcgttcggttccgggagggggcggcacgccgggaactgggcggcctaggctggctggttgtggcggtgacggcggctgtctctggggttctctgcccccagccggagccagtcggtgccctggcggtgagacgggcaagttgggctccctggcctcggggccaccccgactggggcggctggggcagagggacgatatttgctcactacccggtgtctgccgctcattctcaggaggatccgcccgctgtgactgctgagagggagtcgctgttggccagggtgaaccggccggccgagcatcagcccctggccgaacatgagggcaaagtggcagcgagggaggagaaggccaaggccaccaccagcgagggggcgcggggagagccatcctccctggtggtgcctacacgcagcatgccccaggtggctgtccccgtgaggcccttggcgctgcatctggcgcacaaggcgcgtgggcccgggggccctttcagcagggagccgcggtggccagtgccgccgctgctgcgggatccattggcctaggataccatggaggaggcggcagctggccctaaggaaaagcggcagccgcccctgctgctgcctaaggg

SEQ ID NO: 253802 - DNA, 43 bp, Homo sapiens
  chr4:66107503-66107546
  hypo
cttcattgacagaacggctgcagaggaccggaagtggacagct

SEQ ID NO: 253803 - DNA, 217 bp, Homo sapiens; identical to SEQ ID NO: 209671
  chr4:70647970-70648187
  hypo

SEQ ID NO: 253804 - DNA, 75 bp, Homo sapiens; identical to SEQ ID NO: 209672
  chr4:71566925-71567000
  hypo

SEQ ID NO: 253805 - DNA, 38 bp, Homo sapiens; identical to SEQ ID NO: 209673
  chr4:71642192-71642230
  hypo

SEQ ID NO: 253806 - DNA, 93 bp, Homo sapiens
  chr4:71705996-71706089
  hypo
gctcttttttcaggcggtggaaactgaggcccaaagtaagtgaggctaggggcctggcgcagtgactcattcgtagtgactcattcttgtaat

SEQ ID NO: 253807 - DNA, 152 bp, Homo sapiens
  chr4:71706509-71706661
  hypo
gccatcctgctctgggtagggccgagagctgtagcacaagtctgtgctgccctgcgctgtgccaccgaaacccgtggtgtgagtggctaaagaaccctttctgaaaggaattgtgataccttggttataaaaaaatcgttgggataatatca

SEQ ID NO: 253808 - DNA, 37 bp, Homo sapiens; identical to SEQ ID NO: 209674
  chr4:71756389-71756426
  hypo

SEQ ID NO: 253809 - DNA, 38 bp, Homo sapiens
  chr4:71774023-71774061
  hypo
catgagccactgtgcccggccctctttttttttttttt

SEQ ID NO: 253810 - DNA, 149 bp, Homo sapiens; identical to SEQ ID NO: 209676
  chr4:71857969-71858118
  hypo

SEQ ID NO: 253811 - DNA, 37 bp, Homo sapiens
  chr4:71894316-71894353
  hypo
atttcttttttttctcgagacagtcttgctccgtcgc

SEQ ID NO: 253812 - DNA, 94 bp, Homo sapiens
  chr4:71941300-71941394
  hypo
gcctggggtgtttccgccagctctctccatggctcactccagctcttccttcaggtctccgctcaaatgtcttggctgactacccaatctgaaa

SEQ ID NO: 253813 - DNA, 83 bp, Homo sapiens
  chr4:71986660-71986743
  hypo
gaaccagggcagcacgccgccctcgcgggccagcacgagttccgggtgggcacgcgctcggtaggtcccgcacttggagtggc

SEQ ID NO: 253814 - DNA, 38 bp, Homo sapiens
  chr4:72004454-72004492
  hypo
taaagaatcagtaagttggccgggcgcggtggctcacg

SEQ ID NO: 253815 - DNA, 36 bp, Homo sapiens
  chr4:74402451-74402487
  hypo
tgatccgcccgcctcggcctcccaaagtgctgggat

SEQ ID NO: 253816 - DNA, 209 bp, Homo sapiens; identical to SEQ ID NO: 209678
  chr4:75137755-75137964
  hypo

SEQ ID NO: 253817 - DNA, 142 bp, Homo sapiens
  chr4:75241344-75241486
  hypo
ctgaccagcgattcttaaggttaacaggatagtggatgtaatatttctctggagatagattttttattcattggatcgcattcactcttctaccctagtttgcaagtgtttgggagcagacgcatattgcaggaacatttga

SEQ ID NO: 253818 - DNA, 98 bp, Homo sapiens
  chr4:75260920-75261018
  hypo
tctcctggacctgtcgataatgttgtataatttagaaatcatgagtaggaggttttgggctaatggatacaaatcttagctgacgtttcaggggtaac

SEQ ID NO: 253819 - DNA, 34 bp, Homo sapiens; identical to SEQ ID NO: 209679
  chr4:75949441-75949475
  hypo

SEQ ID NO: 253820 - DNA, 45 bp, Homo sapiens
  chr4:76394243-76394288
  hypo
ccagcatcctgttcccgtaggctgccaatcatctttttttttttt

SEQ ID NO: 253821 - DNA, 37 bp, Homo sapiens
  chr4:76553301-76553338
  hypo
ttttttttttttttttgagacggagtcttgctctgtc

SEQ ID NO: 253822 - DNA, 37 bp, Homo sapiens
  chr4:76553578-76553615
  hypo
gtgagccaccgcgcccggccttgaaattttttactca

SEQ ID NO: 253823 - DNA, 116 bp, Homo sapiens; identical to SEQ ID NO: 209680
  chr4:76554738-76554854
  hypo

SEQ ID NO: 253824 - DNA, 144 bp, Homo sapiens
  chr4:76912703-76912847
  hypo
tgaaaagaaccgtggcgctagataacactattccctcttaggaggaaaaaagagcaacgagggtcatataagttaatgtgtatgattttagatatgtttttattttggttttggttgtttcaacttagcgtgacccatacaagg

SEQ ID NO: 253825 - DNA, 37 bp, Homo sapiens; identical to SEQ ID NO: 209681
  chr4:76917507-76917544
  hypo

SEQ ID NO: 253826 - DNA, 147 bp, Homo sapiens
  chr4:76932385-76932532
  hypo
cgctcgtgctgctcgtgttgccgctgggtacgtttgctgccagtgctgatccagccggaggcgaagagaagcactttgggggcaaaaggtaggggttgtgccttcaggatctctcctctctgtcccctgagcggcccgcagcctccc

SEQ ID NO: 253827 - DNA, 38 bp, Homo sapiens
  chr4:77156171-77156209
  hypo
aaacataaaaataaattggccggtcgcggtggctcaca

SEQ ID NO: 253828 - DNA, 36 bp, Homo sapiens; identical to SEQ ID NO: 209683
  chr4:77448700-77448736
  hypo

SEQ ID NO: 253829 - DNA, 98 bp, Homo sapiens
  chr4:77596032-77596130
  hypo
ttaccttctccccactcatcctccccattccccccactcttcagcaactgtggcatactagtctctggtcttagggttcataccggctgccaggggtc

SEQ ID NO: 253830 - DNA, 61 bp, Homo sapiens
  chr4:77661925-77661986
  hypo
tgagcggaggagcgtcggacagcggccgtggcccccagaggccggacgctcggctcctccg

SEQ ID NO: 253831 - DNA, 121 bp, Homo sapiens
  chr4:77662882-77663003
  hypo
gggacctgcttagcggagcaaacggtggaacaaggggcacccagagaggggatgagacccccagggagccatcctcctggggggccagggccgggaagtccatgtcggccgaggacctgct

SEQ ID NO: 253832 - DNA, 35 bp, Homo sapiens
  chr4:77776591-77776626
  hypo
attacaggcgtgagccaccgcgccctgccagaaat

SEQ ID NO: 253833 - DNA, 164 bp, Homo sapiens
  chr4:78034396-78034560
  hypo
cctgggctggggccggctgcaggctgcaggctgcctcgcgcggtgccggagtcctcggccaccgtccctgcccccgctcctgccgtggcttcggcctccaagcagttgaggggccgtgccagcgcctcggtcgccacggtcttagcttcggtgtccatgccagg

SEQ ID NO: 253834 - DNA, 105 bp, Homo sapiens
  chr4:78584406-78584511
  hypo
gaacaattaaaaagaattctcgcccggtcttgcactgggaagctatgcttgcacttgagccttcttcaaatctgtttctatcccaagtggcttatcaaaaaaact

SEQ ID NO: 253835 - DNA, 161 bp, Homo sapiens
  chr4:78839184-78839345
  hypo
gcaacagagcgagacttcatctcaaaaaaaaaaaaaaaaggtatgtgtttatatatatacatgatatagaagttacagaaaagtagcaatgattgtttggagtagcaatggaacaagtaggtcaaggatgggttctaggaggagttcgaaaatatatacca

SEQ ID NO: 253836 - DNA, 48 bp, Homo sapiens
  chr4:78924253-78924301
  hypo
aagtaagttctccaaatccacgaaaccgttccaggtactcattacagc

SEQ ID NO: 253837 - DNA, 133 bp, Homo sapiens
  chr4:79345199-79345332
  hypo
agagccctgtcagtgatatacgactcacccgcattcaccgatttgtaggattttatgtactgtgataaaatgggttctgaatgaatgtattataaatcacgctaactgctgcgatataaaattattccactat

SEQ ID NO: 253838 - DNA, 178 bp, Homo sapiens
  chr4:79689600-79689778
  hypo
ttttcttttctctgctcacacgcagtgtcgtggcagcaggcacagtcttgagatgcagaaggacagcggcgagcttgtggacctgtacatgcggcagaaagtctctgctagtaaccgcgtcaccggtgccaagaaccatgcatccatccagatgaacgtggtggaggctgacaaggtc

SEQ ID NO: 253839 - DNA, 92 bp, Homo sapiens; identical to SEQ ID NO: 209685
  chr4:79702947-79703039
  hypo

SEQ ID NO: 253840 - DNA, 150 bp, Homo sapiens; identical to SEQ ID NO: 209686
  chr4:79828974-79829124
  hypo

SEQ ID NO: 253841 - DNA, 123 bp, Homo sapiens; identical to SEQ ID NO: 209687
  chr4:79832671-79832794
  hypo

SEQ ID NO: 253842 - DNA, 38 bp, Homo sapiens
  chr4:80273038-80273076
  hypo
tagatgcggctgggcgcagtgcctcacacctgtaatct

SEQ ID NO: 253843 - DNA, 97 bp, Homo sapiens
  chr4:81205171-81205268
  hypo
aatagtcaatgtgtggtcttcgaaagtgatgtcagcatagcagtccgggcctaaatgcaggctggcaaggtgtatcgtagacagggtgaaagggatg

SEQ ID NO: 253844 - DNA, 407 bp, Homo sapiens
  chr4:81307565-81307972
  hypo
ttcatctcctccagccccagcgggtcaggcaagggggtcaccaccttgcgcccaccactgccgccacggcgcggggctgccctcttctcgcgggcggtggtggggggggggggtgccgccgggtttgcaggtccttttccttctgggggccgagacgacagcggtgatctttgaggtatttgtggcggaaaaagcccttggcacagccagcatagcggaacttgtagtagcccgtgtgggcgcgcaggtgctcggcgaggtgggcacggcggctgaaggacctgctgcacagggcgcatttgtggagcttcatgccggagtgggagaggacatgggccttcagcttgtccggccggttgaacaacttaccgcagcttgtgtgcgtcgataaagggcatttatatttc

SEQ ID NO: 253845 - DNA, 44 bp, Homo sapiens; identical to SEQ ID NO: 209690
  chr4:81605694-81605738
  hypo

SEQ ID NO: 253846 - DNA, 140 bp, Homo sapiens
  chr4:83301589-83301729
  hypo
gccggaaagctctgcggttggtagcacctctgctaccatgccctctgggcttgttccgcccacgtggcccagcaggctgcactccacttgcactaccagcccagatctcatgcctgccaagggtgagccatgcacagagc

SEQ ID NO: 253847 - DNA, 320 bp, Homo sapiens
  chr4:83323437-83323757
  hypo
gcaaatgatctagacgcttgctggagttgacttgtttcatggtgagggctccttgaaacactggcaccaccaggtacttcaggtcggtggaagcaatctcttccaaatcttcatttcggctgaacaactcgagctgcgataacatttcggcagccttctcaaggagatccatccaggcccttgaacaccttctcctggactatccgggaatcggcaggttcagtcgctacttctacttcgtccagaatctgtttgccggtttccagcagctcggcggggggcagcgggagcagtagttcgtcttcagcagccatcttggg

SEQ ID NO: 253848 - DNA, 157 bp, Homo sapiens
  chr4:83407498-83407655
  hypo
aaaaaaaaaaaaaaaaaagaagaaagcactgcaaatgactatgaattcatagttatcgttatatctgcagaaataattttgaacatatcaaattactaactgccgacatgtaagttgtgtttggctctgcagtgctactaaccgtgtctgagtggct

SEQ ID NO: 253849 - DNA, 33 bp, Homo sapiens
  chr4:83448627-83448660
  hypo
gtgtgtttagctccacgacgaaaggtaccctct

SEQ ID NO: 253850 - DNA, 155 bp, Homo sapiens
  chr4:83551711-83551866
  hypo
catgttcaagcacatgacaacgtatatttgacgtattttagctatagcgattaaatcacatgtccacactctaatgttaaatcgtagtaatattgacttgaaaagttttttaggctgggcgcgctggctcccagctactcgggaggctgaggcag

SEQ ID NO: 253851 - DNA, 32 bp, Homo sapiens; identical to SEQ ID NO: 209692
  chr4:83700298-83700330
  hypo

SEQ ID NO: 253852 - DNA, 40 bp, Homo sapiens
  chr4:83760709-83760749
  hypo
attacaagtgtgagctaccgtgcccagcctcatttataat

SEQ ID NO: 253853 - DNA, 45 bp, Homo sapiens; identical to SEQ ID NO: 209693
  chr4:83808872-83808917
  hypo

SEQ ID NO: 253854 - DNA, 46 bp, Homo sapiens
  chr4:83839359-83839405
  hypo
aaggaaagacttggcgctttggacagttcaacgtcagtatggtgtc

SEQ ID NO: 253855 - DNA, 176 bp, Homo sapiens
  chr4:84310214-84310390
  hypo
cagcctccacctgccgttcactctgcccacagtaacaaaagtgcggatgcagccactgttagcgtgttctgcccacggcactatttagtgatgcatcagacctttctcacatttttctgtgtggactcatgtcctgcttttgtgcttctctcaaggactttcggcttctcctgaaa

SEQ ID NO: 253856 - DNA, 35 bp, Homo sapiens
  chr4:84468675-84468710
  hypo
attacaggcgtgagctactgcgcctggcctctgct

SEQ ID NO: 253857 - DNA, 161 bp, Homo sapiens; identical to SEQ ID NO: 209699
  chr4:86167317-86167478
  hypo

SEQ ID NO: 253858 - DNA, 160 bp, Homo sapiens; identical to SEQ ID NO: 209700
  chr4:86801948-86802108
  hypo

SEQ ID NO: 253859 - DNA, 104 bp, Homo sapiens
  chr4:86877878-86877982
  hypo
gcaatggacgcctcgctgaatcaggagcacagccgacacccagccagggtggaagtcagcggcaggcagcaaaaagcagtggtggatggcgagtgaaaactcag

SEQ ID NO: 253860 - DNA, 31 bp, Homo sapiens
  chr4:86958368-86958399
  hypo
tcaattcctaattgagctttcgaaggtaaaa

SEQ ID NO: 253861 - DNA, 101 bp, Homo sapiens
  chr4:87468463-87468564
  hypo
ggtgtggagggagaggcgctggggggaaccaggactgcgcgagttccgggtgggcgtgggctctgcggacccgcactcccagcagtcggccggccccaccg

SEQ ID NO: 253862 - DNA, 36 bp, Homo sapiens; identical to SEQ ID NO: 209701
  chr4:87797488-87797524
  hypo

SEQ ID NO: 253863 - DNA, 39 bp, Homo sapiens; identical to SEQ ID NO: 209702
  chr4:87922650-87922689
  hypo

SEQ ID NO: 253864 - DNA, 64 bp, Homo sapiens
  chr4:87946924-87946988
  hypo
cgctctgcaggtttcgcctagttcctatgcatggggatgtttgtgtttccgagagcgtctgtac

SEQ ID NO: 253865 - DNA, 143 bp, Homo sapiens; identical to SEQ ID NO: 209703
  chr4:87993064-87993207
  hypo

SEQ ID NO: 253866 - DNA, 83 bp, Homo sapiens; identical to SEQ ID NO: 209704
  chr4:87993507-87993590
  hypo

SEQ ID NO: 253867 - DNA, 40 bp, Homo sapiens
  chr4:88009708-88009748
  hypo
aatatagcatgctgtggggtcgcagattgctggtagagtt

SEQ ID NO: 253868 - DNA, 40 bp, Homo sapiens
  chr4:88010168-88010208
  hypo
acaggtgtgagctgctgcgcccggccgcatgtcgagtatt

SEQ ID NO: 253869 - DNA, 181 bp, Homo sapiens
  chr4:88053371-88053552
  hypo
tttctgtagtatgatagtcacgtgcagtttcacttctgtctttgttcatagcatgcgttgccagtccattttgaacatggcgatgtttcgttgtaaaaaagacatagcaataaagtattctcgtactcttaataaacacttcgagagttcttccaaagtcgcccaggcaccttctccatgc

SEQ ID NO: 253870 - DNA, 48 bp, Homo sapiens; identical to SEQ ID NO: 209705
  chr4:88259021-88259069
  hypo

SEQ ID NO: 253871 - DNA, 109 bp, Homo sapiens
  chr4:88296898-88297007
  hypo
ataaaagtaaaactaatgtggcaaaatcagggactactacagagaattgtggaaaactgattacactattaagctggccacattttctatttatttctgtttattttct

SEQ ID NO: 253872 - DNA, 45 bp, Homo sapiens
  chr4:88899513-88899558
  hypo
atctggtctcactgtttttccgccttctttttttttttttttttt

SEQ ID NO: 253873 - DNA, 182 bp, Homo sapiens; identical to SEQ ID NO: 209707
  chr4:88941048-88941230
  hypo

SEQ ID NO: 253874 - DNA, 145 bp, Homo sapiens; identical to SEQ ID NO: 209708
  chr4:88957314-88957459
  hypo

SEQ ID NO: 253875 - DNA, 40 bp, Homo sapiens
  chr4:89660212-89660252
  hypo
tctgtttgaccagccggtacctgtcgtatagtggcttcat

SEQ ID NO: 253876 - DNA, 31 bp, Homo sapiens; identical to SEQ ID NO: 209709
  chr4:90043371-90043402
  hypo

SEQ ID NO: 253877 - DNA, 150 bp, Homo sapiens
  chr4:90043642-90043792
  hypo
actccagcctgggggacagggcaaaaaaaaaaaaaaaaagaaaagaaattccaggggctaatcttgaaacagcccaggcctggagacccagctgcagattacctcaaggtggttaatctacaacctggtcacagtcgacatgggaccagc

SEQ ID NO: 253878 - DNA, 180 bp, Homo sapiens; identical to SEQ ID NO: 209711
  chr4:91052008-91052188
  hypo

SEQ ID NO: 253879 - DNA, 36 bp, Homo sapiens; identical to SEQ ID NO: 209712
  chr4:91052428-91052464
  hypo

SEQ ID NO: 253880 - DNA, 148 bp, Homo sapiens; identical to SEQ ID NO: 209713
  chr4:91640271-91640419
  hypo

SEQ ID NO: 253881 - DNA, 64 bp, Homo sapiens
  chr4:91760176-91760240
  hypo
tttgtcagacatggttgcggaggaaaagcggagcgaggcgcgcgagtacgagcgaagtctggtc

SEQ ID NO: 253882 - DNA, 92 bp, Homo sapiens
  chr4:95127585-95127677
  hypo
aaaaaattaaaacaattgaacgtatgagaaacggtagaacgatggctaccagaggctgggaagggtagtgtggggcgggggaggaccccggt

SEQ ID NO: 253883 - DNA, 31 bp, Homo sapiens
  chr4:95128037-95128068
  hypo
gtgctgggattacaggcgtgagccaccactc

SEQ ID NO: 253884 - DNA, 87 bp, Homo sapiens
  chr4:95407092-95407179
  hypo
aggtcagtcaattacgaattgggactcaggatgaagaggaggtctcaaaggcccccctcacgatcaggaaggcggaactggggactc

SEQ ID NO: 253885 - DNA, 85 bp, Homo sapiens; identical to SEQ ID NO: 209714
  chr4:95461557-95461642
  hypo

SEQ ID NO: 253886 - DNA, 31 bp, Homo sapiens; identical to SEQ ID NO: 209715
  chr4:95578063-95578094
  hypo

SEQ ID NO: 253887 - DNA, 66 bp, Homo sapiens
  chr4:95636992-95637058
  hypo
cacttgctggcttcaagtctcgctctttgctcaatgagactgggcgtgaagctatttagcttctat

SEQ ID NO: 253888 - DNA, 37 bp, Homo sapiens
  chr4:99178271-99178308
  hypo
gggattacaggcatgagccaccgcgcctggcccttat

SEQ ID NO: 253889 - DNA, 337 bp, Homo sapiens
  chr4:99399705-99400042
  hypo
ccctacaggagctacaaatacgagtaaccaggtaagaagagggttcaaccaaaaaatcactctgctcgtcccatgcacactctcggcatgatgtacagagtaggccaatagttcgctggcattcacttactgcgggatctttagtgcagcaggagaatggaacgccacatcgctctcgacttgcattggaatctgtgcaattgaagtaaatatttaggttccaatcatcagctccaaaagccccacagcactgccactagagcaaacaggaaagaattagaacatcccaacttggaggcaagcagtcacctacactcacacccgccgaacgacacca

SEQ ID NO: 253890 - DNA, 37 bp, Homo sapiens
  chr4:99843421-99843458
  hypo
gagttagcctggcgcggtggctcacgcctgtaatccc

SEQ ID NO: 253891 - DNA, 77 bp, Homo sapiens
  chr4:99936195-99936272
  hypo
gctaccacacactccaaatccgtcgcatgtgaagaacacttaagtggaaaggggacaatctgggcctctggcttacc

SEQ ID NO: 253892 - DNA, 49 bp, Homo sapiens
  chr4:99982329-99982378
  hypo
agatggttggactgcggtgacaagagacggaaagcggtctgctcagttt

SEQ ID NO: 253893 - DNA, 128 bp, Homo sapiens
  chr4:100555184-100555312
  hypo
aattatcctgctaacgctgtacatatggctcgtgcctggactcgctcgtgcctagaaagagtaaagccatgtcgaaactgtctacgtttccttgagtgtttttccagctcccccgcactcgcccaccg

SEQ ID NO: 253894 - DNA, 1033 bp, Homo sapiens
  chr4:100573592-100574625
  hypo
tggaaacacaggggcgtctccacatgtttgatttccccctcgactttgctgaccacgaactccaaggccttggtctgagacttcttggactggatgtagagctggtcggcagtggcccgggccccactgcccttcctcagacctgcagccacagaggccgcgctgctcctgaggaggctctgctccaccctggccccaacacccccacattttaagtccaggaaagttgaccagcgcccaaagcccacttcggagagcgtggtggaggactcccgggagctgatgttcagagcctcaaagtaggggtaagccaggctccggaaggcccgggaggtcaggttacgcacctctttgtccgcatcgtccagttcgctcacggcactggaggctccgctggagtagtccaccagctccttcgcccggatggccccgcacctggtttgcaggcgagcaggtacagcaatgaatttctttgcatggtcctgagccactgctgcagccgggttttgcttcagcgaacttgaattgtgttcagcagctgtagagacgcggaggctcatgtcgccttcatgcttggcagcataaataatgttttgctttgcacgcacgttgctaggctcatttatagcccgggaagccggtttgattgataggaggatctggcttgctgcactcccacagctgcttgcggcggcggctgctgcccctgaagctgcctccggggtctcaggcaagggctcagtcaggggggcagtgccaggcccagtgggtgggggagtggggccactgtcagaggggccactgcccacttcggtgctgctggtgtcgcggccactgcggcctgcattggggcgggccaggtcgctgcttgtagggctgggcgtccgggtggtgttggtgctgggagtggtgctgaggtagcagctgttgtcgtcgtcctcttcggtcagactggtgatgtcccctggggtctcgtcgctgccaccaaaggaagcataatccacgaacgagtagatcacgttgttgtcctcga

SEQ ID NO: 253895 - DNA, 80 bp, Homo sapiens
  chr4:100866007-100866087
  hypo
acaggcgtgagccaccgcgcccagcctaatcagtatttttttaaagaggaattcttcacgttacaacataaatgaaactt

SEQ ID NO: 253896 - DNA, 32 bp, Homo sapiens
  chr4:102266906-102266938
  hypo
ctctttgccagcaacctcagtgcatccttgcc

SEQ ID NO: 253897 - DNA, 43 bp, Homo sapiens
  chr4:102332863-102332906
  hypo
tttttaactctcatgtcaagtcacattgcggccttgcttcacc

SEQ ID NO: 253898 - DNA, 120 bp, Homo sapiens
  chr4:103079069-103079189
  hypo
aaaagaaaaagaaaaaaattcatgcgacccttcagaaacttcgaccatagaattaaataaacagttgcttagataagcggctcccaaccttttggcaccagggaccggttttgtgaaaga

SEQ ID NO: 253899 - DNA, 38 bp, Homo sapiens
  chr4:103240080-103240118
  hypo
gtttcagatgtcctcgtgttcagcgcgttgacattttt

SEQ ID NO: 253900 - DNA, 199 bp, Homo sapiens; identical to SEQ ID NO: 209718
  chr4:103421132-103421331
  hypo

SEQ ID NO: 253901 - DNA, 42 bp, Homo sapiens; identical to SEQ ID NO: 209719
  chr4:103494439-103494481
  hypo

SEQ ID NO: 253902 - DNA, 81 bp, Homo sapiens; identical to SEQ ID NO: 209720
  chr4:103806371-103806452
  hypo

SEQ ID NO: 253903 - DNA, 323 bp, Homo sapiens; identical to SEQ ID NO: 209721
  chr4:103941524-103941847
  hypo

SEQ ID NO: 253904 - DNA, 81 bp, Homo sapiens; identical to SEQ ID NO: 209722
  chr4:104854486-104854567
  hypo

SEQ ID NO: 253905 - DNA, 34 bp, Homo sapiens; identical to SEQ ID NO: 209740
  chr4:106335456-106335490
  hypo

SEQ ID NO: 253906 - DNA, 214 bp, Homo sapiens; identical to SEQ ID NO: 209741
  chr4:106335550-106335764
  hypo

SEQ ID NO: 253907 - DNA, 57 bp, Homo sapiens; identical to SEQ ID NO: 209742
  chr4:106631892-106631949
  hypo

SEQ ID NO: 253908 - DNA, 35 bp, Homo sapiens
  chr4:106689194-106689229
  hypo
atttttttttttttttgagacggagtctctccctg

SEQ ID NO: 253909 - DNA, 34 bp, Homo sapiens
  chr4:106689469-106689503
  hypo
agtcatcgcgcccggccaataatttttatattct

SEQ ID NO: 253910 - DNA, 218 bp, Homo sapiens; identical to SEQ ID NO: 209743
  chr4:108132182-108132400
  hypo

SEQ ID NO: 253911 - DNA, 327 bp, Homo sapiens
  chr4:108302153-108302480
  hypo
gaagaaatcgtttacgccctctgttggcagcaggggcctgtcctcctttactctttagaatctagagggagaaagccaaaaaccaacctctctagaagggaaagaccggtgtctagacaacccacacccactaacacgtgggtctagatcatcttcctccattcagtgcccccgatcccgctcctctggtttccgtttcaggtccctcccctgcttcctcttcctgctgtccctgatcccgcccctccggttcccatttcaggtacttcccgtgcttgcatccctcttccagcttttccgatcccgctcccccggtttctgttccag

SEQ ID NO: 253912 - DNA, 43 bp, Homo sapiens; identical to SEQ ID NO: 209744
  chr4:108446495-108446538
  hypo

SEQ ID NO: 253913 - DNA, 81 bp, Homo sapiens; identical to SEQ ID NO: 209745
  chr4:108975407-108975488
  hypo

SEQ ID NO: 253914 - DNA, 206 bp, Homo sapiens
  chr4:109002484-109002690
  hypo
ttgtttggaggcaacgctttccaaggaggctgagtccatcgcccgatggtgtggctggtccggccggggcacagcgcagagctcctacccgggactctctctgacacctagtgtgggagccaggcacactgcacagacagacacatggctgaggtatgcaccctcctagccaaccaaaaggcaagcagaggcgcacaggatgcaag

SEQ ID NO: 253915 - DNA, 168 bp, Homo sapiens; identical to SEQ ID NO: 209746
  chr4:109009508-109009676
  hypo

SEQ ID NO: 253916 - DNA, 101 bp, Homo sapiens
  chr4:110314367-110314468
  hypo
ataaaccactctattaaatacgttatgggtaaatatctattgtcctatatgcccaaccaattcaccgtcccaatatatcctatcttctgtgaataatatcc

SEQ ID NO: 253917 - DNA, 40 bp, Homo sapiens
  chr4:110314768-110314808
  hypo
tgcgtgagccaccgcgcccggcccctcctgtgtttttaac

SEQ ID NO: 253918 - DNA, 79 bp, Homo sapiens
  chr4:110735440-110735519
  hypo
aaaaagaccaacattcgttaaaatcaaattgcagcatttactaaactaaaagaaaaagaacaagtaaagtttcctctct

SEQ ID NO: 253919 - DNA, 87 bp, Homo sapiens
  chr4:111019210-111019297
  hypo
atatctgacctgcatcgtatctgtctacaagttagaaacattaaccgtgatagattcttcaagagttgaacacggacagaaaagaaa

SEQ ID NO: 253920 - DNA, 44 bp, Homo sapiens; identical to SEQ ID NO: 209749
  chr4:111096241-111096285
  hypo

SEQ ID NO: 253921 - DNA, 86 bp, Homo sapiens; identical to SEQ ID NO: 209750
  chr4:111097859-111097945
  hypo

SEQ ID NO: 253922 - DNA, 37 bp, Homo sapiens
  chr4:111144769-111144806
  hypo
ctgaattcctacaacgtccaatgcaataagttttttt

SEQ ID NO: 253923 - DNA, 34 bp, Homo sapiens
  chr4:111177276-111177310
  hypo
gattacaggcgtgagccaccgcgcccggcgagag

SEQ ID NO: 253924 - DNA, 90 bp, Homo sapiens
  chr4:111213416-111213506
  hypo
ggtgttagctcccccgacagcctgtatgtgggttccggtgcctgaagacatttgaggtgctcgaaaagaacacagcggaaaccatcatgc

SEQ ID NO: 253925 - DNA, 287 bp, Homo sapiens
  chr4:111214249-111214536
  hypo
ggcctcctggacaacgtcaaagacggcagctaccggctggccaatgcaagatctaccctttgccggaaaaacgtcccgtgaagaagctcacggggacgtcggtgcctcagccctcctgcatgatcaacagcatgctggctgagatctgccgccagaccagcggcctggaggaccaggaggaagggcatgcccaggtggtggaggagatgagggacttcaagttttagaaggtgcttggccacctgcgttgtgctggagcatctctttggctccgcagccaaatggtc

SEQ ID NO: 253926 - DNA, 36 bp, Homo sapiens; identical to SEQ ID NO: 209752
  chr4:111383532-111383568
  hypo

SEQ ID NO: 253927 - DNA, 577 bp, Homo sapiens; identical to SEQ ID NO: 209753
  chr4:111508744-111509321
  hypo

SEQ ID NO: 253928 - DNA, 73 bp, Homo sapiens
  chr4:113199031-113199104
  hypo
catccatttctgtcggagaactgctttgggaggagcagagcgaataagtgccatactccggtatgggcctgtg

SEQ ID NO: 253929 - DNA, 190 bp, Homo sapiens
  chr4:113276888-113277078
  hypo
cccaaagagcaggcggaccccatccgtggggtaacagtttcctcctggagcacaaagcagcagactggaagtgggggcggaagtgcaccgcgctcaaccgcaactgcgcgcctcagtccgcgaagtctgaactgcctgacaaagggggacccggtggcagcgctcgactggagtcggttgaggtcctgag

SEQ ID NO: 253930 - DNA, 48 bp, Homo sapiens
  chr4:113559154-113559202
  hypo
taaaacattttgcgaggctgggcacggtggctcacgcctgtaatccca

SEQ ID NO: 253931 - DNA, 183 bp, Homo sapiens; identical to SEQ ID NO: 209758
  chr4:114417171-114417354
  hypo

SEQ ID NO: 253932 - DNA, 101 bp, Homo sapiens; identical to SEQ ID NO: 209759
  chr4:114528566-114528667
  hypo

SEQ ID NO: 253933 - DNA, 44 bp, Homo sapiens
  chr4:115416724-115416768
  hypo
caaggccaagagaggaaacccggagtgaagcggataccagcttt

SEQ ID NO: 253934 - DNA, 38 bp, Homo sapiens; identical to SEQ ID NO: 209761
  chr4:119501591-119501629
  hypo

SEQ ID NO: 253935 - DNA, 211 bp, Homo sapiens
  chr4:119951552-119951763
  hypo
agagtcggtaagaacgcagagctctgtgagcaaaagctacatcgaggtgagtcatggtcttggccatgttccccaacagaatggcttcagtgggacatctgagacagcaaacatccagaggatggtccccatgaatagaacggccaaacccttcccagggtctgtgaatcagccagctacccccttctcgccaacccgaaacatgacgagt

SEQ ID NO: 253936 - DNA, 96 bp, Homo sapiens
  chr4:120024257-120024353
  hypo
accaccatgcccagttaatttttacaataaactcttagggcaaaatttgttcaaagaaattagcaatcaacatgtaatcttcgcttttagatttaa

SEQ ID NO: 253937 - DNA, 199 bp, Homo sapiens
  chr4:122158962-122159161
  hypo
gatttgaaagtatttcgaaaggttcaataaaataattgtgtggttattggagattgtagaaaagatattgtgggttaaaaattacaatctccctctccctctcccgcttcctctccctctcccgctcccgctcccgctccctctccagctccccctcccgctccctctccacctcccgctcccgctccccctccctctc

SEQ ID NO: 253938 - DNA, 38 bp, Homo sapiens
  chr4:122165518-122165556
  hypo
tgaaaacaaatactattggccgggcgcagtggctcacg

SEQ ID NO: 253939 - DNA, 76 bp, Homo sapiens; identical to SEQ ID NO: 209765
  chr4:122615463-122615539
  hypo

SEQ ID NO: 253940 - DNA, 34 bp, Homo sapiens; identical to SEQ ID NO: 209766
  chr4:122924455-122924489
  hypo

SEQ ID NO: 253941 - DNA, 307 bp, Homo sapiens; identical to SEQ ID NO: 209767
  chr4:123300366-123300673
  hypo

SEQ ID NO: 253942 - DNA, 222 bp, Homo sapiens
  chr4:124029142-124029364
  hypo
gatgcctgggtgcagagtcacggctggacaactgcagtgagccccgccctcccaactcagtaggggccagggctcctgcccgttcgcagccttgacggcttggcagagcttgcaactctagccgcacctacccagtgcagcgggcgtcctcacagccgcgctccagacgggccgctgctgccatcattactcccaagtttcgggtcagaaataagtagaatt

SEQ ID NO: 253943 - DNA, 182 bp, Homo sapiens; identical to SEQ ID NO: 209768
  chr4:124036406-124036588
  hypo

SEQ ID NO: 253944 - DNA, 139 bp, Homo sapiens; identical to SEQ ID NO: 209769
  chr4:124106851-124106990
  hypo

SEQ ID NO: 253945 - DNA, 32 bp, Homo sapiens
  chr4:124313335-124313367
  hypo
atttttttgaggcagagtctcgctctgcgccc

SEQ ID NO: 253946 - DNA, 40 bp, Homo sapiens
  chr4:124335275-124335315
  hypo
gaaaaacaatgtttgcaggccgggcgcggcagctcacgcc

SEQ ID NO: 253947 - DNA, 157 bp, Homo sapiens; identical to SEQ ID NO: 209771
  chr4:124335555-124335712
  hypo

SEQ ID NO: 253948 - DNA, 481 bp, Homo sapiens; identical to SEQ ID NO: 209772
  chr4:124468461-124468942
  hypo

SEQ ID NO: 253949 - DNA, 39 bp, Homo sapiens; identical to SEQ ID NO: 209773
  chr4:124533356-124533395
  hypo

SEQ ID NO: 253950 - DNA, 34 bp, Homo sapiens; identical to SEQ ID NO: 209774
  chr4:125038668-125038702
  hypo

SEQ ID NO: 253951 - DNA, 34 bp, Homo sapiens; identical to SEQ ID NO: 209775
  chr4:125038942-125038976
  hypo

SEQ ID NO: 253952 - DNA, 218 bp, Homo sapiens
  chr4:128651504-128651722
  hypo
cgtggctggaggccgttggagcgcctgcgcagcttttccgcacgcgcctcgccggcgcgcggctctctcagcgtcccaagagccactttctcgccagtacgatgctgcagcggttttccggttttccgcttcccttcatcgtagctcccgtactcatttttagccactgctgccggtttttatatccttctccatcatgcatcgtgagcctgcgaaaa

SEQ ID NO: 253953 - DNA, 196 bp, Homo sapiens
  chr4:128702503-128702699
  hypo
tacagacaggcaacacatgccgatcaaaccaagagggagggcgctggaccacactgggctcttttttgaggaccacagggcagcggctggaggctaaagcacagacttggctggtgtgagtggcacacttaattaaggtcactttcctgtaaaactggtttccagagacaagggtcagcggcggggccagcatctt

SEQ ID NO: 253954 - DNA, 568 bp, Homo sapiens
  chr4:128764580-128765148
  hypo
taatgcataaagatccactccgtgagaaaaaaaataaaaaatcacggaaattcacgggaatagcaaaagacaccccagatcccgaggaggaggaggtggacaggtggcccccatgatagtctctggctgataaaactgacactccagtacgtgagggggcagagagccagtttccgtgactcacctttccactagggatccgtgcaatccaggccgagggagaataacttgtttctctcaaaccctggagataacttggagagaggcgaagagacagagagacaccaggaaaagctgcagccattttcccggacttgggactgagatgaggacgcaatctttaaccctggcttatacaaagtcagtcactggccacctggcagcaggggccactgcaggcattttagtcgctggctggagattggagcacatgctctgagcaggaaatggcccacaaagccagaattgagcagtgagtgtggcgagtgccccagcactaggcgttggaattgggttccctaccaccgcaagactggaggactgcagcggcaggagagttactgaagct

SEQ ID NO: 253955 - DNA, 32 bp, Homo sapiens
  chr4:128889077-128889109
  hypo
acccctttcaaacaaacagccgggcgcggtgg

SEQ ID NO: 253956 - DNA, 31 bp, Homo sapiens; identical to SEQ ID NO: 209780
  chr4:128889349-128889380
  hypo

SEQ ID NO: 253957 - DNA, 39 bp, Homo sapiens
  chr4:128967288-128967327
  hypo
gctgggattataggcatgagccaccgcgcccaaccagga

SEQ ID NO: 253958 - DNA, 42 bp, Homo sapiens
  chr4:129697834-129697876
  hypo
tgccttagttccagacatcacgtacagacacaacaatgtgat

SEQ ID NO: 253959 - DNA, 37 bp, Homo sapiens
  chr4:129754820-129754857
  hypo
gcctggcgacagagcgagactccgtctcgaaaaaaaa

SEQ ID NO: 253960 - DNA, 52 bp, Homo sapiens
  chr4:129776887-129776939
  hypo
ctatgaagcccacccgtagcggaaccaagtgggtccacgttagctgtgctct

SEQ ID NO: 253961 - DNA, 167 bp, Homo sapiens; identical to SEQ ID NO: 209781
  chr4:130168457-130168624
  hypo

SEQ ID NO: 253962 - DNA, 43 bp, Homo sapiens
  chr4:138974561-138974604
  hypo
ggaggctcccagagccagcaacggctgtgagggctgccagcat

SEQ ID NO: 253963 - DNA, 35 bp, Homo sapiens
  chr4:139707316-139707351
  hypo
agaccagagctgttcctattcggccatctttgtac

SEQ ID NO: 253964 - DNA, 31 bp, Homo sapiens
  chr4:139946032-139946063
  hypo
caggtgtgagccaccgcgcccagccagtttt

SEQ ID NO: 253965 - DNA, 40 bp, Homo sapiens
  chr4:140100686-140100726
  hypo
agcctgggcaacgagagcgaaactccgtctcaaaaaaaag

SEQ ID NO: 253966 - DNA, 286 bp, Homo sapiens
  chr4:140357386-140357672
  hypo
ccccgtggtcctggcgacatcggtctcacgtgtgggaagaccagtgtcctgtggagagaaaacagggttaggggtcggcagcctgggtcaggagccagaccacgcgagcggccgcacccagggagaggccgcggggcctgttggggctgggtttcaccgccgcacatgtgtcagcgtgcggtgagctgaggcccctggaggctctgggcgccgaatctcacccgctgccatggccaaagccggggggtgattttcaaccaatgccgggtggtttcttttttgatct

SEQ ID NO: 253967 - DNA, 37 bp, Homo sapiens
  chr4:140566709-140566746
  hypo
tgagattacaggcatgggccaccgcgcccggcctgtt

SEQ ID NO: 253968 - DNA, 40 bp, Homo sapiens
  chr4:140592642-140592682
  hypo
gacctactgctctgtcgcccgggctggagtgcagtggtgt

SEQ ID NO: 253969 - DNA, 82 bp, Homo sapiens
  chr4:140640071-140640153
  hypo
aaagctgctgtctcccgacctggggcaggaggggctgaggatacctctcttgggtaatagtccctctcggctgaagcagctc

SEQ ID NO: 253970 - DNA, 39 bp, Homo sapiens; identical to SEQ ID NO: 209784
  chr4:140641398-140641437
  hypo

SEQ ID NO: 253971 - DNA, 90 bp, Homo sapiens
  chr4:140701211-140701301
  hypo
tagagccatgctgtccgaggcggtacccactatttacatttaaatttaataaaattaaaaattcatttctgcaggcgtgtcagccacttt

SEQ ID NO: 253972 - DNA, 531 bp, Homo sapiens
  chr4:140705006-140705537
  hypo
gttgtgtgacagcccgggctgctgaacaccattttaacatgcagattgactcctcggaggctcttcattacgcatttagcggtctgttttcagactaaccagcatgtcagagaggcccgctatcctctttccacctgggtggaggaaatagctcactgactgtgggggagccacagatattaaaatgcatatgtttaccttcctgagcatccgcacacaacagctttctctgatgcaagagaagaaaaaagaagaaaggacccttggttctgaaatgcaaggaaaatggctagcaaaacaagcgagcctttgttgatgagagcagtcaacaaggccaggcccgcctgatgccgcccagctgcccgcaagccgacctgggagcgtccacacaagcactcctcttatcgacacacagaccctctctttctctctcacacagagcctgaagcattttaagcagaacacttccaatttcctgtttctaaaaccatcttgcctctccagtggcattccaagcgatcctggcgaggc

SEQ ID NO: 253973 - DNA, 35 bp, Homo sapiens
  chr4:140705888-140705923
  hypo
tgggcctttgctatgcgctacgccttggccaagtc

SEQ ID NO: 253974 - DNA, 141 bp, Homo sapiens; identical to SEQ ID NO: 209785
  chr4:140751843-140751984
  hypo

SEQ ID NO: 253975 - DNA, 316 bp, Homo sapiens
  chr4:140754336-140754652
  hypo
tcaacacacaaacacgcaagttagcccagcctctggcccgggaacccagagaggggctggggaagacagagaaagacagggggagggggccgcgtggaagcgcctagagcagtcggcaggtcacacacacgcggtgctcggcggcaaactcagtttacaaagagacatctgttccattactccaatgcattgtggctaattacatcctggcccgtctgtgaaatgacagccacttattctccagtgaaccgtaaaatctgtacatgttcgatttggggagtgggagagcagaggcgtggaggctagagtgggagga

SEQ ID NO: 253976 - DNA, 407 bp, Homo sapiens
  chr4:140780992-140781399
  hypo
gtcttccaaaaaatcgacatcgagaaggttttaaacgtgtaaagattttttttagggaaaccgtctgtacgagagcaaacgagagcggagaggcctgagcgccacagggtgcaaggccggagtgaccggacgaaggcgtcgcgggaggggctagaggagcagccaccgagcctcgagtacccgggggcaggcgcgggcctcagcgagacgtgctgccgtttctattggagagacaaaatctaaatgttatcaggaggattttcatttatcaggaaagcaactcgaaaacccacagcctgagttcctgaagcccctagctccctcccaagccgcagaggcgtggaaacgccgtggggtcggagtcgcttccatgcggatcctgcgttcaccagcgcccaaaagaggag

SEQ ID NO: 253977 - DNA, 108 bp, Homo sapiens
  chr4:140929945-140930053
  hypo
caactgactccttgcgataaaagacacttctgtcaggcactgacctggcagcctttacagggatgtggatccatgtgtattatttcgccaccacgaaaactctttacc

SEQ ID NO: 253978 - DNA, 207 bp, Homo sapiens
  chr4:141007379-141007586
  hypo
catccgcacataggcgctacctcacaaatgtgtctgggtaagaccctgccccatcagcgtcccctgaaacttctcttccttgaatctcactttgataagcacacatgcttggactcaaacaggtcatctccagtatccatttctttcattttcttttgtcccacaatagagttaaacaatacactgtctcgtcgtccaaatgcttca

SEQ ID NO: 253979 - DNA, 37 bp, Homo sapiens; identical to SEQ ID NO: 209787
  chr4:141014855-141014892
  hypo

SEQ ID NO: 253980 - DNA, 138 bp, Homo sapiens; identical to SEQ ID NO: 209788
  chr4:141067295-141067433
  hypo

SEQ ID NO: 253981 - DNA, 215 bp, Homo sapiens
  chr4:141207750-141207965
  hypo
tgtttggagcccagactgggcggcatgtgcagccgtgtgcccgcgccgttcctcacgtgcacatgggtggcttgagcgcataagcatgactgccaatatcacggttggttagcttgtggcccaatactgggcggtgtggtgtgtgcgggaggcggggcgctggagccgctgtcaaggacgactgtgggagtcacgcagcctctaagctacttggg

SEQ ID NO: 253982 - DNA, 154 bp, Homo sapiens
  chr4:141266288-141266442
  hypo
gcttgctaatggagcctggacgtgtgggcatgggcgctgaagaactaggaaagagtgagcaacgctctctggttggtagtgagagtgccggcaaccacacgagaggaccaacgtccccttgctcccaattgccgcctccttctcctttgttaga

SEQ ID NO: 253983 - DNA, 1377 bp, Homo sapiens
  chr4:141563899-141565276
  hypo
agctcatagtcatctgatgtcggcagagatttgctgctcagctttccgctactgttgcagttcttccccctcttgcgggcgggcgacagggctctcgggggcgtgggtctgtttccacggcctgcgtgccaagcttccatgggactcctcgtgcctgtcctcggagtcccggcgccgctgcagcttcaccagctcatgctgcttctccttgtactggtgctggacctcggcccgccacattctgaagtccagttccaggacgtccatgtcctccacggaggacttcatggggtacatccgctcctccttcttgcgcatccagctgtacttattgtgggcttcagctcccgtgggagccgcaggttcttgagcgggtcccaccacgggcccatccagcacctccctcagcatgtggctgccggctgccagcaggctctccagtgagggccgagccaccagggcccgctccgcacctcccaccttcttgctcctcctctccagctccagctctgcgatctcgctcagcagggtgatgccgtgcagaaagctctgctccaagacaaggctctcggcagcttcctgcttctccaaggcctggactccagtagcacctggggagggcagaggcctggcctggggcagctccatggccacctccatgccagccagtgggtcttccaggccgggcaggaactgctcagagcttgcctcttccaggtagcaggtgctgccgggcacaggcacggcctcccggggctccagtctcgggcactctccctccccggcgggcacgtcacagtctgacatttctaggctgggctggggctcgctcagggccgcctgggccaggccttcctccggcgctgcctctgccgcaggaaccgccacaggcacctccactggctcctccttggcctccactagcgtctcgggtgtcagctgcacccccaggtccaatgcggccgtgcagggttctgtccggcccggggaatccacgcatgcttcaggcccctccgcaaagtctgggcactcagagggctcggtgcagccctgcccggtggcactcagcgcctgggcctccaacgggccacctctgcatccgcctgcagggctcggggtagccatggtttccatggcgggcagtggcagcggcaactccagaggcggcagctctgcggggcgctcgtccacatcctccacctccaccttcgcctcctgttcagccagcggctcttcctccgggtcctcccgcagcggctctgggatcttggagggggacaggaggatgagcttgtcttcgggcgagagtgtcaggcgcttggtcccatcagctgggagcagcacatcaggggccaggccatccgcatcggcggccac

SEQ ID NO: 253984 - DNA, 84 bp, Homo sapiens
  chr4:142134704-142134788
  hypo
aactggggctgcgcctggcgatcacgggccagtgcaagttctgggtgggcgctggctcggcaggcccaccggcccacctggcag

SEQ ID NO: 253985 - DNA, 185 bp, Homo sapiens; identical to SEQ ID NO: 209802
  chr4:142677009-142677194
  hypo

SEQ ID NO: 253986 - DNA, 38 bp, Homo sapiens
  chr4:143073506-143073544
  hypo
cgtgagtcaccgcacccggcacttttttttctttttaa

SEQ ID NO: 253987 - DNA, 196 bp, Homo sapiens; identical to SEQ ID NO: 209803
  chr4:143477972-143478168
  hypo

SEQ ID NO: 253988 - DNA, 74 bp, Homo sapiens; identical to SEQ ID NO: 209804
  chr4:144141584-144141658
  hypo

SEQ ID NO: 253989 - DNA, 117 bp, Homo sapiens
  chr4:144265400-144265517
  hypo
tgtgagtgccagctcgtgttgggggggagagaataacaccaacggatcacatgaaaccccctctccctgtggatggaggggtttctctcatttcacattcctcgcatcaacatggcg

SEQ ID NO: 253990 - DNA, 124 bp, Homo sapiens
  chr4:144507008-144507132
  hypo
cctgctctgactttctggagcgcacggcgatggatgatggttgggaaagatcagtgcctcttctccaaacacaaacctccacgtagcgagcactttcattgacgtgatattcagcatccccaaa

SEQ ID NO: 253991 - DNA, 41 bp, Homo sapiens
  chr4:146047172-146047213
  hypo
acagagcgagtctctgtccctgcccccgcccccgcaacccc

SEQ ID NO: 253992 - DNA, 36 bp, Homo sapiens; identical to SEQ ID NO: 209810
  chr4:146449670-146449706
  hypo

SEQ ID NO: 253993 - DNA, 63 bp, Homo sapiens
  chr4:146694922-146694985
  hypo
tggttttctttggccgcgaacacacatgccatgcgtcattaaggagagcgtcagggctgcagt

SEQ ID NO: 253994 - DNA, 181 bp, Homo sapiens
  chr4:146825846-146826027
  hypo
tgtatgagagtgtgtatgcacgtgtgtgtgtgtgtgcgcgtgtgtgcacatgcactgtggtgcaggagtggggtcacacagatctacaggacgttgtgaactgcagaaaggtcttctgaatttggcaaaactgggtaccactggagggtttgtggcaagcgagtgttatgacatgacttat

SEQ ID NO: 253995 - DNA, 90 bp, Homo sapiens
  chr4:146853898-146853988
  hypo
tacaggcgtgagccaccgcgctcagcttgtattttaaaccaacttctgacctcaggagaagcctgcatcgtcactccaccaacacacttt

SEQ ID NO: 253996 - DNA, 99 bp, Homo sapiens; identical to SEQ ID NO: 209812
  chr4:148782279-148782378
  hypo

SEQ ID NO: 253997 - DNA, 37 bp, Homo sapiens; identical to SEQ ID NO: 209816
  chr4:149905345-149905382
  hypo

SEQ ID NO: 253998 - DNA, 33 bp, Homo sapiens
  chr4:151020124-151020157
  hypo
gcatgagccaccgtgcctggcctctcacactgt

SEQ ID NO: 253999 - DNA, 75 bp, Homo sapiens
  chr4:151435900-151435975
  hypo
gcttgcattcgatccgaagtatattaacttatcccaactctcttccatttcttcttattgcgtatgttaaattga

SEQ ID NO: 254000 - DNA, 213 bp, Homo sapiens; identical to SEQ ID NO: 209817
  chr4:151897750-151897963
  hypo

SEQ ID NO: 254001 - DNA, 33 bp, Homo sapiens
  chr4:151960720-151960753
  hypo
ggctcttaacacgttcagcctggtataagaggt

SEQ ID NO: 254002 - DNA, 136 bp, Homo sapiens
  chr4:151974306-151974442
  hypo
agagacaatggcccacttctcgatgtaccaaaggagggacccagcagagcccttagcataggaatgaatgcttcaccatccttctctaccgctagttctgatctcaagaataagtgacttcgaattaagaaacagg

SEQ ID NO: 254003 - DNA, 33 bp, Homo sapiens
  chr4:152157386-152157419
  hypo
agaggtgcaagcgggagccggggctgcgcccgg

SEQ ID NO: 254004 - DNA, 36 bp, Homo sapiens
  chr4:152448689-152448725
  hypo
ggggagagcgagagcgagagagagagggagagggag

SEQ ID NO: 254005 - DNA, 141 bp, Homo sapiens
  chr4:152591280-152591421
  hypo
tggtctttaagcgacgtgagtcagaggtaacaaaggcatatatataccgaacaaaggtgctccggtgcagtggagagaacagtattagtgtcgcaagcacaggagtgcagacagccccgccttcatcgtgatgcctgcagc

SEQ ID NO: 254006 - DNA, 297 bp, Homo sapiens
  chr4:152640710-152641007
  hypo
gttcctctcagaaccgcaggctgaacaaatgcttctcccacacactgacatcctcgctgaatatgcaacttggcccttcaacaggcattatctctggttctctgggtgggcagctccagttcacaagccgagtctgtttgcctgggaatcagggaaggatataaagaagaaaatgtatgcagcagtgggtcccaccgggcacttaaggaactgccacatcgggaaccctttcccccagtgcccggcatcaaagctaacaggaagagtcgcagaaaagcttagcggagtggttactac

SEQ ID NO: 254007 - DNA, 92 bp, Homo sapiens
  chr4:153247351-153247443
  hypo
taagagtggcatctcgagaaccgctaacaactctgcagagggagaaacagaaaaacaaaacaaaacaaaaaaacccacgtttagaattttta

SEQ ID NO: 254008 - DNA, 62 bp, Homo sapiens
  chr4:153460846-153460908
  hypo
tgccaagggcaagtacggcgtggagtggcaaggcatgtgtgagcgagcgtgaggtctggcta

SEQ ID NO: 254009 - DNA, 41 bp, Homo sapiens
  chr4:153535667-153535708
  hypo
tgcggcagccaagccgtgcagtcctgcgctttctgactcac

SEQ ID NO: 254010 - DNA, 97 bp, Homo sapiens
  chr4:153702687-153702784
  hypo
cgaattggccatttcattgctgttctctcagagcggctacagattactatattttactgctgccttaattctgcttttctttcgtttgtcctgtggt

SEQ ID NO: 254011 - DNA, 151 bp, Homo sapiens
  chr4:153821326-153821477
  hypo
ggagggatcaaagggcgggaactaacactgtaaaaacatagaacaaaaaaggcgaaagactttttttgctaaaggtgagaaaatctccgcactcagaatgttaatgtatgtaattattcgataaagaattataagacgtcaccacagttct

SEQ ID NO: 254012 - DNA, 86 bp, Homo sapiens; identical to SEQ ID NO: 209819
  chr4:153889785-153889871
  hypo

SEQ ID NO: 254013 - DNA, 251 bp, Homo sapiens
  chr4:153896021-153896272
  hypo
tccagcccctcctaccggcccccgaacacccgccgctcccgcctctccctgggtccctctgctgaccgggagctgctgaccttcttggagagctccaccggcagccctgaggagcccaataagttccacagcctgccccggagcagcccccggcaggcccggcccacgatagcctgcctggagcctgcagaagtgaggcaccaggactccagctttgcacacaaacctcaggcctcggggggccaggagga

SEQ ID NO: 254014 - DNA, 648 bp, Homo sapiens
  chr4:153897072-153897720
  hypo
ccgggagcgcccggcggagccagggggcagtggccaagtctgtgcggaccctgaccgcctcagagaacgagagcatgcgcaaggtcatgcccatcaccaagtccagcagaggcgccggctggaggcgaccagagctgtcatcccgggggccctcccagaatccccccagcagcacagatactgtgtggtcacgccagaactccgtgcggagggcctccacaggcgccgaagagcagaggctgccgcgggggagcagcggctccagcagcacccgtccggggagggacgttcccctgcagcccaggggttctttcaagaagcccagtgccaaaccactcaggaacctccccagacagaagcctgaggaaaataagacctgccgcgcccactccgagggccctgagagtcccaaagaagagcccaagaccccgtcagtgcccagcgtcccccacgaactaccccgtgtcccgagctttgcccggaacacagtggcctcctcctctcgaagcatgagaacagatcttcctcccgtggccaaagcccccggcatcactcggacagtgtcgcagcggcagctgagggtgaaaggggaccccgaggatgccgctcccaaggacagcagcactttgaggcgagccagcagtgccc

SEQ ID NO: 254015 - DNA, 240 bp, Homo sapiens
  chr4:153918912-153919152
  hypo
tcaggacacccactctcaagcggtgcatccctgaggccctttcctctgcaccgatgctcggactctccgtgtgtgccattttgcagtggggtcacgctccacgtgttgttctgccactgcctttggtttctcgacactgcctcgtggacacgcagggagagcttgcagctggtgacaagctctccagcaggtgagtaatccagcagctctttctgcctcgaggtgagtgaggtaacctct

SEQ ID NO: 254016 - DNA, 429 bp, Homo sapiens
  chr4:153943299-153943728
  hypo
gggaaggtccaggcacctcacgaggtaggtccaggtgactgggacacgggagggctccagacagccgctatttgccacacggaaccaaagcatttcactgttttaacaagcggttcagctggtccggagtatccctgctggctctcagccctaaagtggcgtgagggctgggcacgtcgacagcacttgatccgctccttccctctggaaatgcatttccttccattaccagaacagcctctcacagtttggcctgcctcttctcatgctatgtcgaaacaaagccacctgcctcccatgaaagacggcattgtttttccacctgagccacccacacctgggcaggtagaacagcgggtccccactccagggagctctcccactcgggcctgtcatggctcacaccccgagcagctgctgtgcttgccc

SEQ ID NO: 254017 - DNA, 233 bp, Homo sapiens
  chr4:153985892-153986125
  hypo
gcctgaggcccagtcgcccggtctctcacggggaagcgcacatttcctttcctggctctctgcacctacctgggaaggcggcccgccttgctgctacctgccagtctgctggcccgcctggtcctgtggctctccgtggagctttctggagcaaagaggctgaagaatacagcggcacagggccagaagctggcttctaggggctgggccatgtctctcggatcttggtcctc

SEQ ID NO: 254018 - DNA, 943 bp, Homo sapiens
  chr4:154216328-154217271
  hypo
gggttgacaaacaccgcttgctcagagccacctgcgtgggcaggtgtagagtctccttctcgccggtggagggcactgccccgggctaggccccgccctgtgggacgagctcaccaggcctccggttttcccgcaggtcctccagtcgcagctggatactctgctccaggggcaggagagcattaagagctgcagcaacttcacagcgcaggccctcaaccatggcacggagaccgaggtcctactggtgaagaagcagatgagcgagaagctgaacgagctggccgaccaggacttccccttgcacccgcgggagaacgaccagctggatttcatcgtggaaaccgaggggctgaagaagtccatccacaacctcgggacgatcttaaccaccaacgccgttgcctcagagacagtggccacgggcgaggggctgcggcagaccatcatcgggcagcccatgtccgtcaccatcaccaccaaggacaaagacggtgagctgtgcaaaaccggcaacgcctacctcaccgccgaactgagcacccccgacgggagcgtggcagacggggagatcctggacaacaagaacggcacctatgagtttttgtacactgtccagaaggaaggggactttaccctgtctctgagactctatgaccagcacatccgaggcagcccgtttaagctgaaagtgatccgatccgctgatgtgtctcccaccacagaaggcgtgaagaggcgcgttaagtccccggggagcggccacgtcaagcagaaagctgtgaaaagacccgcaagcatgtacagcactggaaaacgaaaagagaatcccatcgaagacgatttgatctttcgagtgggtaaggagagggcttctgtgcccgacgcctgagctggcactggttaaggggtaactgggcacgtgtcattgcaaatagcaaca

SEQ ID NO: 254019 - DNA, 150 bp, Homo sapiens
  chr4:154218327-154218477
  hypo
tcaggctgaatcttcgcaaagacggtgatatgatatgtaacttgtctgttcagagcatggaagccctcatacattcacggccagatgtgcgatatgggtgcaggggttgttgattctccaccagagcagagtggacgagcttgggtggat

SEQ ID NO: 254020 - DNA, 35 bp, Homo sapiens
  chr4:154247837-154247872
  hypo
gaaagataaacaaggctgggcgcagtggctcacgc

SEQ ID NO: 254021 - DNA, 40 bp, Homo sapiens; identical to SEQ ID NO: 209825
  chr4:154394646-154394686
  hypo

SEQ ID NO: 254022 - DNA, 96 bp, Homo sapiens; identical to SEQ ID NO: 209826
  chr4:154410569-154410665
  hypo

SEQ ID NO: 254023 - DNA, 222 bp, Homo sapiens
  chr4:154420387-154420609
  hypo
agtggtgcccagcctccagtcgctgtagctcagacatggcctcgggaggtttggaggatgcccagcgcttgtctgcccattgttgctgacctgccgcattgtgtgatatggctccatgtgcacatcttccatggatttatcagtcttgacaggagtcttccactttctgccagtgatgaaatagatctttatgatttttttttttttttttgagatgcgtct

SEQ ID NO: 254024 - DNA, 102 bp, Homo sapiens
  chr4:154420849-154420951
  hypo
tacaggcgtgaaccgccgtgcccagccccttatgacattcttaccctgattggttattcagcttcagcttgagcacttcacgtgatgggaagttcacctttg

SEQ ID NO: 254025 - DNA, 126 bp, Homo sapiens; identical to SEQ ID NO: 209828
  chr4:154421943-154422069
  hypo

SEQ ID NO: 254026 - DNA, 85 bp, Homo sapiens
  chr4:154454428-154454513
  hypo
acccagcctccttcttaattcttttatttccacattggccacgttcaccccattataagtagggggactgcgtgtgggagtgggg

SEQ ID NO: 254027 - DNA, 230 bp, Homo sapiens
  chr4:154456109-154456339
  hypo
aggccttggaaatgcggagttcttgtggggattttgagcagagcagtgatgccatttgaattaggtttaaagaggccatgctggcagtgctgagcctgggtggcagggaaaccagtgaggcccttacagccaggaagcaagagatggagagacatgatgggtgcttggatcaggtgtggcagtgggcctggtgaaagcggagctcatgggatttccgatggatgggatgc

SEQ ID NO: 254028 - DNA, 103 bp, Homo sapiens; identical to SEQ ID NO: 209829
  chr4:154469359-154469462
  hypo

SEQ ID NO: 254029 - DNA, 143 bp, Homo sapiens; identical to SEQ ID NO: 209830
  chr4:154520339-154520482
  hypo

SEQ ID NO: 254030 - DNA, 137 bp, Homo sapiens
  chr4:154554211-154554348
  hypo
ttattttttaaaaacgtctttaaaaaagacgattttttcatatattagaggcagatttgaaaaaaaaacactcataattcctaactgctagcagagcaaagctgttcatttttctgtggcattattcttgaacacgt

SEQ ID NO: 254031 - DNA, 102 bp, Homo sapiens
  chr4:156676882-156676984
  hypo
ggattacaggcgtgagccaccgcgcccggccgattacaatacttttaatacttaacttaccaaagtaatttatttttattcgctgaaaatgtgagtcacttc

SEQ ID NO: 254032 - DNA, 76 bp, Homo sapiens
  chr4:157974483-157974559
  hypo
atgctgaaattctagcgggctgcatttccagatctttctttccagaactttcttgatgagtcgctgattctgcttg

SEQ ID NO: 254033 - DNA, 141 bp, Homo sapiens
  chr4:158740621-158740762
  hypo
ccgtgcctgactggcggagagctccagcagggtgtcccctgtggccacgcaccagccgtcacgctccctctccacactgcagcttccttctgcctcacggcaactccccacttcacactgctagtacgtgtctgccaggtg

SEQ ID NO: 254034 - DNA, 68 bp, Homo sapiens
  chr4:158740988-158741056
  hypo
cccagatctggactcgccagcgccccgccttggagccaacaccacctcaagtgcgacattgcacatag

SEQ ID NO: 254035 - DNA, 34 bp, Homo sapiens
  chr4:159018075-159018109
  hypo
ttacaggcgtgagccaccgcgcccggccttactg

SEQ ID NO: 254036 - DNA, 104 bp, Homo sapiens
  chr4:159488285-159488389
  hypo
gcttggcagggctcgggacctgcagcctaccatgcctgagcctccctctcaccccgccttgggctcctgcacagccggagcctccccgacgaccatggccccct

SEQ ID NO: 254037 - DNA, 45 bp, Homo sapiens
  chr4:159680339-159680384
  hypo
ctctcctctctctctttccacggtctccctctgttgccgaggctg

SEQ ID NO: 254038 - DNA, 41 bp, Homo sapiens
  chr4:159749469-159749510
  hypo
cattaaaaacacaagtaggccgggcgcggtggctcacgcct

SEQ ID NO: 254039 - DNA, 195 bp, Homo sapiens
  chr4:159919845-159920040
  hypo
attaggtaagaatcgcgccggttttacccacactggaaagagctgagaggtatgcatagctcttttattgctctgagtaatgatggtaattatgatgtaatccacagagcacaaccgacactggactgggtggaaatagtgctctcaatcctccactctataacaatatggcttgtaaaacgtatgtaccattga

SEQ ID NO: 254040 - DNA, 96 bp, Homo sapiens
  chr4:159927208-159927304
  hypo
cctgaccctcttttaattttttaatgtggctgccagaaaatgttcaattatgtatgtggctcgaattatgtttccgttgaacagtgttggtctgaa

SEQ ID NO: 254041 - DNA, 32 bp, Homo sapiens
  chr4:162799090-162799122
  hypo
taactgcgcccggcaccaatattctgtttttt

SEQ ID NO: 254042 - DNA, 111 bp, Homo sapiens; identical to SEQ ID NO: 209836
  chr4:164394802-164394913
  hypo

SEQ ID NO: 254043 - DNA, 568 bp, Homo sapiens
  chr4:165109363-165109931
  hypo
tatatacacaaatactttctcgatgccggccgagacagcacagacagaccgaccgaccgactggggtgtttcgcaattgtgagaggcgggtaaccgcgctgcgctcctgtgctgcggccggtggcttcattgcctgcgacgccctgcctctgctgcccgactggctggcaagatgaagctctccctggtggcggcgatgctgctgctactcggtgaggcgtggttcgaggacaaggaggaggacgtgggcacggtggtctgcgtcgacctggggaccacctactgctgcgtctgtgtgttcaagaccggctgcgtggagatcaccgccaacaatcagagcaaacgcatcacgcggtcctatgtgcccttcactcttgaaggggaatatctgatcggcgatgccgccacgaaccagctcacctccaatcccaagaacacggtctttgacgccaagtggctcatcggccgcacgtggaacgacctgtctatgcagcaggacatcaagttcttgcggttcaaggtagttgaaaagaaaactaaaccatacgttcaagttgatattggaggt

SEQ ID NO: 254044 - DNA, 321 bp, Homo sapiens
  chr4:165850787-165851108
  hypo
aatttcagtggtgtgacaaccggagtgttgctactaaaattcctccctgggctgcatgagcggctgacagggcacggggagaaaacgattagcttctcccaggattggtgaagccaccgctgttggacaagtatagtcgtcgctggatctctgcaaagagactgtcgaagcggctgcggttcagcgtaaggtctgttagggagacctgaagccctgtgccaggaacgcagtgctcgcttagcccaccctgcagggatggctttccaggcgctgggtccagtgagaaaagcgtgtccggaattggttccttccggtgggttc

SEQ ID NO: 254045 - DNA, 312 bp, Homo sapiens
  chr4:165854268-165854580
  hypo
gttctgaggtccagcgcagagtcccagggctcccaagtcagattaagggcttgaggacgggggcgcagagatgggggtgtcctgcagaggcaggggcgccggcacaccctcttcagccatcggaatctggcagaagatgaagtgagcagggaaagagaagcctctttagcagggttcagttccttgactggcagctggcactcgcccctggagggtggaggactctgcggctccacattcggtgcccatgagaggcgctggggtgaggctgggccctctgtgggctccgggagaggtcgaaagtgaagatct

SEQ ID NO: 254046 - DNA, 161 bp, Homo sapiens
  chr4:166035044-166035205
  hypo
gggattacaagtttagccaccgcgtcttgcccactttcatacattctaatgcttatttgtacattgagtatagtgtgatccagtttaggatgtgtgagataaaactacgcaaatgttagtgaaggaagagatggtgtaagactccacgtgatcttcttttt

SEQ ID NO: 254047 - DNA, 180 bp, Homo sapiens
  chr4:166337214-166337394
  hypo
acaaggaatcttcccgcctgcactcccctgccagctcagctacttccctactcctgcgccaactcaaccgtaacagtagctgagacgaaagcattgctctgaagtaaggtgtagggaagctttctggcttccttaataaagttacacacgatcttctaagcttggcgatggagggagaag

SEQ ID NO: 254048 - DNA, 92 bp, Homo sapiens
  chr4:169105970-169106062
  hypo
ctacacagtctttagaacatcggcaggtgctaacttagaaaaccctttacctcagctgggcgtggtggctaatgcctgtaatcccagcactt

SEQ ID NO: 254049 - DNA, 43 bp, Homo sapiens; identical to SEQ ID NO: 209837
  chr4:169198694-169198737
  hypo

SEQ ID NO: 254050 - DNA, 32 bp, Homo sapiens; identical to SEQ ID NO: 209838
  chr4:169224159-169224191
  hypo

SEQ ID NO: 254051 - DNA, 37 bp, Homo sapiens
  chr4:169315725-169315762
  hypo
cgtgtcttgtaaatcgcactcgcggtaataccctctc

SEQ ID NO: 254052 - DNA, 33 bp, Homo sapiens; identical to SEQ ID NO: 209839
  chr4:169358978-169359011
  hypo

SEQ ID NO: 254053 - DNA, 163 bp, Homo sapiens; identical to SEQ ID NO: 209840
  chr4:169377152-169377315
  hypo

SEQ ID NO: 254054 - DNA, 118 bp, Homo sapiens
  chr4:169459971-169460089
  hypo
agtgggtgattacccgcgattggtgtctgttacagtcattgtgtctttctctaggattctctctctgtttccgaaacacatatgttccaagttttggatgctacgacttcgtgttcat

SEQ ID NO: 254055 - DNA, 33 bp, Homo sapiens; identical to SEQ ID NO: 209841
  chr4:169562060-169562093
  hypo

SEQ ID NO: 254056 - DNA, 205 bp, Homo sapiens
  chr4:169667598-169667803
  hypo
ctgagacagaaaacccgtgtgacacagaatatgagtccttaagcaaaaggactgtcgtattcatccctgtgtctctggagctagcacagtccttagtgcattgtacatttgaacaaatgtttgagtgaataacaagcccgttctccattctggttaacttacgagtactgtaccaattttcttccctgggcggaaaaaattatga

SEQ ID NO: 254057 - DNA, 92 bp, Homo sapiens
  chr4:169744533-169744625
  hypo
cagaaatccctttctcggcaaggtagttcacgcctagagtcccagcactttaagaggccaaggcaggtggatggatcacttgagctcaagag

SEQ ID NO: 254058 - DNA, 124 bp, Homo sapiens
  chr4:169751969-169752093
  hypo
atatcagtaatgacggcaggatacagttacagtactaaaccctttaaacaagtggtctactggctattcaaaactagttagcatttattggcagttactgagtgaccacgttaccgaaacagcc

SEQ ID NO: 254059 - DNA, 150 bp, Homo sapiens
  chr4:169952682-169952832
  hypo
tggaggccaccacacgcaccctggaggggcatcctggaggccaccgcacgcaccctggaggggcatcctggaggccaccgcacgcaccctggaggggcatcctggaaagcacctaggaatgtgcgagcttggccgcggctgtgcttgttc

SEQ ID NO: 254060 - DNA, 44 bp, Homo sapiens
  chr4:169957541-169957585
  hypo
cacctctcactgggattacaggcgtgagccgccacgcccagcct

SEQ ID NO: 254061 - DNA, 78 bp, Homo sapiens
  chr4:169978256-169978334
  hypo
ctacagcgatcctcccacctcagcctccccaagtagctggaacagataacaggtgtgagccaccgcacctgatcccag

SEQ ID NO: 254062 - DNA, 209 bp, Homo sapiens
  chr4:170037586-170037795
  hypo
aggccagaggggcactggctcgactgatactgatggcagcagtgtgcgtggctgagcctggcatcagaggcgcaggttgtggggaggccagcgagtgatgggacaggcccacagatgcagggctgaggccggcggcattctgtacctggatgggtgtcactgctgccgtggggcgttcctggttgtgcgctgcaactagtagatgggaa

SEQ ID NO: 254063 - DNA, 185 bp, Homo sapiens; identical to SEQ ID NO: 209842
  chr4:170043184-170043369
  hypo

SEQ ID NO: 254064 - DNA, 89 bp, Homo sapiens
  chr4:170064508-170064597
  hypo
tttgaaacccggtgcgaacggagtgcttccatcccactcagtttggacgagtctcgctgcaagttgctcaacagcgacatgtgcattgg

SEQ ID NO: 254065 - DNA, 214 bp, Homo sapiens; identical to SEQ ID NO: 209843
  chr4:170105281-170105495
  hypo

SEQ ID NO: 254066 - DNA, 45 bp, Homo sapiens
  chr4:170125972-170126017
  hypo
tacaggcgtgagccactgagccccggccaccttctccttttgaag

SEQ ID NO: 254067 - DNA, 76 bp, Homo sapiens; identical to SEQ ID NO: 209845
  chr4:170566083-170566159
  hypo

SEQ ID NO: 254068 - DNA, 75 bp, Homo sapiens; identical to SEQ ID NO: 209846
  chr4:170566219-170566294
  hypo

SEQ ID NO: 254069 - DNA, 37 bp, Homo sapiens; identical to SEQ ID NO: 209847
  chr4:170612105-170612142
  hypo

SEQ ID NO: 254070 - DNA, 70 bp, Homo sapiens
  chr4:170641910-170641980
  hypo
agtctcgaaggaagcgagaacgaaatctctcattgtgtgccgtgtggctcaaaaccgaaaacaatgaagc

SEQ ID NO: 254071 - DNA, 215 bp, Homo sapiens; identical to SEQ ID NO: 209848
  chr4:170652116-170652331
  hypo

SEQ ID NO: 254072 - DNA, 41 bp, Homo sapiens
  chr4:170845921-170845962
  hypo
ttgcagtataagaatgtagccgaagggccgggcgcagtggc

SEQ ID NO: 254073 - DNA, 101 bp, Homo sapiens
  chr4:170865253-170865354
  hypo
gtctgaggggtttcgtctgcggcttgtcctgctacaaaatgtggaaagtgggacaatcacgcccttgtgaaacaacaatcgcagcacttcagccttcctgg

SEQ ID NO: 254074 - DNA, 122 bp, Homo sapiens
  chr4:170937655-170937777
  hypo
tgctctacctacctcgaccctgcctttgtctttacagcattaactactacgtgtttacatactgcgctcccattaggatgggagctcctagagggctgggctcctgtcgttgccgctgttta

SEQ ID NO: 254075 - DNA, 120 bp, Homo sapiens
  chr4:173298723-173298843
  hypo
gccgtggagcaggggccggtgcccatcagggaggctcgggccacacgggagcccaccggttgtgggggagctcggtcatggtgggctgcaggtcccaagccctgccccacagggaggcag

SEQ ID NO: 254076 - DNA, 41 bp, Homo sapiens
  chr4:173467910-173467951
  hypo
ttattagagtttttcaactccgctttatatatatatacgta

SEQ ID NO: 254077 - DNA, 81 bp, Homo sapiens
  chr4:174136653-174136734
  hypo
tgcaggtgtcagccaccatacccggcctgctgttctccttttaatgcacccaagtcctggggaacccgactggggatcaga

SEQ ID NO: 254078 - DNA, 148 bp, Homo sapiens
  chr4:175940748-175940896
  hypo
agcaacttgaggctgcaccccgggctgccactccaagagcggaggcagtgagagtacgcgtgtgcctcgcgccagtccacgctaggagagcactgggaccgagacccggcaccacctcccggtccgccctccagaactttgttgagga

SEQ ID NO: 254079 - DNA, 184 bp, Homo sapiens
  chr4:181454371-181454555
  hypo
tcgtatcttctgagcgcactttcacggccatgcaaaatacaatggattctgtcactcacacactattattataccctgttttagtttattcagagaactcagtacggctttgttcattttgtgactgttttcaaaactctagactaaaaggtccatgatgccgtctttccgtgcttcactttgg

SEQ ID NO: 254080 - DNA, 198 bp, Homo sapiens
  chr4:183626526-183626724
  hypo
tgtctgtattttatgatgtacgtatctgatgtctacactataccgaggattcaagccagtagcccggtgaaaatattatacggtactatttaatatgcctccaccaagcgcattgttgacagcggaaacaatgtgagttgttcatagccatacacatcagcaactgcttatatacagtgaaaccgacttgaccttccc

SEQ ID NO: 254081 - DNA, 92 bp, Homo sapiens
  chr4:183673079-183673171
  hypo
aatgcagaagtcgtcgcagggacaggggagcaatgccttccgtttgacgaggcgagatgtggggatggagggaaggccgtggaagccacact

SEQ ID NO: 254082 - DNA, 274 bp, Homo sapiens
  chr4:183768991-183769265
  hypo
ctgagtggggaaggcgaaattccccgccattgtcggaggctggcgatatcttccagactatggacaagttggcttaggtctgttcttaaccgcccagcaagaggtgaacaacaaagaaaaggttcctgatctcacagcttagagacgaaggacagacagctggaggaatttgctcaaaagaaattgcttacgtttcgccaaagctctaggtttttgcttggagacctcactggtccgaggctggccaagccggggactgcgtggcgttcagcac

SEQ ID NO: 254083 - DNA, 159 bp, Homo sapiens
  chr4:183808104-183808263
  hypo
gtggctgaggcagacggggccaggttggcgaggcacactgcacattcaggaaaggatggctgcagaagatgggagcggcccaggtgtccattggtgcgtgaatggctaaacaaaaggcagtatgtgaacacaatgggcgattcttcggccttcagatgg

SEQ ID NO: 254084 - DNA, 39 bp, Homo sapiens
  chr4:183808323-183808362
  hypo
cagtcaaaaagagaaaattctgtacgattccacttatat

SEQ ID NO: 254085 - DNA, 195 bp, Homo sapiens; identical to SEQ ID NO: 209854
  chr4:183809396-183809591
  hypo

SEQ ID NO: 254086 - DNA, 317 bp, Homo sapiens; identical to SEQ ID NO: 209855
  chr4:183815957-183816274
  hypo

SEQ ID NO: 254087 - DNA, 203 bp, Homo sapiens; identical to SEQ ID NO: 209856
  chr4:183824599-183824802
  hypo

SEQ ID NO: 254088 - DNA, 32 bp, Homo sapiens; identical to SEQ ID NO: 209858
  chr4:184051481-184051513
  hypo

SEQ ID NO: 254089 - DNA, 41 bp, Homo sapiens; identical to SEQ ID NO: 209859
  chr4:184160138-184160179
  hypo

SEQ ID NO: 254090 - DNA, 82 bp, Homo sapiens; identical to SEQ ID NO: 209860
  chr4:184166102-184166184
  hypo

SEQ ID NO: 254091 - DNA, 179 bp, Homo sapiens
  chr4:184277759-184277938
  hypo
tgctggagcctgaccgccagctcagtcccctccggggttggttcccgccattcctcttgatcacctctccctccctccccacctggctctaagggatgggtcgtcagagcccggaagggggcagctgtggagccgctgcctctgatgatttgtggctgagaccccgtgcaagcgggagg

SEQ ID NO: 254092 - DNA, 179 bp, Homo sapiens
  chr4:184278167-184278346
  hypo
cccccctactctcccgccccgccccggcctgccccgccggcaccaaacgcaagcatcagactcacctgctctccggtgtgtgtgaccaagaaccctgcgggctcctctccaccctccactctcaggaaataacaggaaagatgtctccctggcatgcctggactcgtgcgtttattcac

SEQ ID NO: 254093 - DNA, 150 bp, Homo sapiens; identical to SEQ ID NO: 209861
  chr4:184289435-184289585
  hypo

SEQ ID NO: 254094 - DNA, 109 bp, Homo sapiens
  chr4:184331205-184331314
  hypo
gtgctagcctgatacccaggcgcgacagaaactcagagcccatgcctctttctggcctcaagcttgcattcttccatggggagtgaccgggccaaccatctctgtcatc

SEQ ID NO: 254095 - DNA, 37 bp, Homo sapiens
  chr4:184339996-184340033
  hypo
atcaacacacttcatcgcaatccggaatgtgctgaac

SEQ ID NO: 254096 - DNA, 223 bp, Homo sapiens
  chr4:184343147-184343370
  hypo
cttcagatgtctctttttttccctttccttgaaataatctgaatcaaatccggagactgccctcaggcccagctgagctctgaggagtctgagctagtcgtctccaaaggactcatagccaatctcggaaaccagttactccacaggaaagcccgtctacctcccagcacctcaggggcccacagcgcaagcaggtgagctggctggacgatcgagttcctgc

SEQ ID NO: 254097 - DNA, 120 bp, Homo sapiens
  chr4:184375285-184375405
  hypo
cacagactggtactggaggcttgcaggttggggaccccctgctctatggtgtagcatgaatttcacctgtgtcaatatagcagagatgagagtgatgacaattttcatccaatgatcctg

SEQ ID NO: 254098 - DNA, 133 bp, Homo sapiens
  chr4:184404652-184404785
  hypo
ccgccgcctcctccgagcgtttcaagaagctgcacgaaatcttccgcggcctccacgaagacctacaaggggtgcccgagcagctgctggggacggcggggaccgaagagaataagtcgatcagggattttga

SEQ ID NO: 254099 - DNA, 32 bp, Homo sapiens
  chr4:184554620-184554652
  hypo
gactcaccttgcccggccgaaagacatcattt

SEQ ID NO: 254100 - DNA, 180 bp, Homo sapiens
  chr4:184667624-184667804
  hypo
gataggaccaggcagggggccgtgcccgctggggaggcttgagttgtgcgggaacccactgcagggcgggagcgagctcgggcatggcaggctgcaggtcccgagctcttccccatgcagaggccgctgagaccgggtgagaattcaagcatggcacgggcccgccggcagtgctggggg

SEQ ID NO: 254101 - DNA, 200 bp, Homo sapiens
  chr4:184670515-184670715
  hypo
gcaattggcatcatccgaaatacagattttcaggaggagaaggattggtggactttgagatcatcaggccttgaagtgaacagaagaagagctgggccactctcatttgttcccacatcattactacatccacgtgttccttagcccatcagtcacagccagggagatggagtcacacgttcgtccgtgaacagatatta

SEQ ID NO: 254102 - DNA, 180 bp, Homo sapiens
  chr4:184675874-184676054
  hypo
aaagcgctgggattacaggcatgagccaccgcgccctgccggcagagcgtccagtttctaaaggatctgccctgtcctgcgttctgtttcctcaaggcggagcgggacaccgactagcctgacagcttcctgggatttttttaaattttgtttttatttatttattttgagacagagtct

SEQ ID NO: 254103 - DNA, 325 bp, Homo sapiens; identical to SEQ ID NO: 209863
  chr4:184678229-184678554
  hypo

SEQ ID NO: 254104 - DNA, 146 bp, Homo sapiens
  chr4:184679181-184679327
  hypo
gcttaaacggaaagcgacatggaatttgaaatacatgttttacaagtggagggtgtggggcggtgtcctggattctgccgagcccgcaccaagtgtcctgtcacacaaggcagaaggggaggctggccttgcgcctcaaatccctg

SEQ ID NO: 254105 - DNA, 81 bp, Homo sapiens
  chr4:184740848-184740929
  hypo
aaatgaaaggagggcgtgagatattttatgttcgtcaaaaggaagcatgggtgaaaaaggcttgaacggcatcgccccact

SEQ ID NO: 254106 - DNA, 116 bp, Homo sapiens
  chr4:184921950-184922066
  hypo
ttgcgaacttcgttcgatctacttgtctgtcttctccacttaaatagaaactgagggcagagatgtttggggagaggcgcgcactctgtctctgcagctcccgttcccccagcaga

SEQ ID NO: 254107 - DNA, 35 bp, Homo sapiens
  chr4:185121434-185121469
  hypo
cgtccggacccactcggcacatctgttggtgtgct

SEQ ID NO: 254108 - DNA, 245 bp, Homo sapiens
  chr4:185121499-185121744
  hypo
ccacactgttattactgcttgtgtgttggttaattacatgatctgtggtgcgtggaggcctctcaacaaaaggtggattcaagcatatgtaattggctatcgagtcactgtgaacctttttggcttcggttggggttagcacacctagttggccagaacctaattaacatcaattgcgcactcactaaatgcacaaccaacctcagggctccatttgtctggtcttctcacgctaaacagcaaga

SEQ ID NO: 254109 - DNA, 37 bp, Homo sapiens; identical to SEQ ID NO: 209864
  chr4:185185202-185185239
  hypo

SEQ ID NO: 254110 - DNA, 386 bp, Homo sapiens
  chr4:185238062-185238448
  hypo
tccacatctataacagagatcgtaatgcctacaacaccttctccccaccgttgatgtgaagattccatgagacggtgttagtggatcactttgtaaacgctaaaactccaggcaaacatctattgtcatttcttcaaacgaagggcccggcttcaaccacgtgtgtctacaaaaaaagggggcaagtttccatcaatactctaattacaaccaattgcatgcatttcccgtctgcccacatgggaagttaaacccctcaaagcacctttctattatttctgggggttcccctgggctgtgtcacacgtgttctggaataggttcccacgtacctgagcgtctgctcttcttccccgctcctgagcgaccaggactgccttcccagc

SEQ ID NO: 254111 - DNA, 124 bp, Homo sapiens; identical to SEQ ID NO: 209865
  chr4:185239992-185240116
  hypo

SEQ ID NO: 254112 - DNA, 36 bp, Homo sapiens; identical to SEQ ID NO: 209866
  chr4:185241303-185241339
  hypo

SEQ ID NO: 254113 - DNA, 89 bp, Homo sapiens
  chr4:185322205-185322294
  hypo
gagagtgacttgtccagactcgcacagcttggagtatatgtggtgctctatgttgcagtcattttctcaccaatcggcaaagtattcag

SEQ ID NO: 254114 - DNA, 228 bp, Homo sapiens
  chr4:185344286-185344514
  hypo
gtgtgttccatgggacatgacggtgttgctatgtgtgtgtagaccccgtgacgtcagtatgtgccaggtgtctcatccccgagtgaccagtcctgcacacgtggtggtggtacatgctgtgtatagacagacgcgccatgccagggcccaccatttgtacgtgtgtgcacaactctgcccatctgaaggaaggcaggagagatgagcgctgcttgacttcagaaaagc

SEQ ID NO: 254115 - DNA, 156 bp, Homo sapiens; identical to SEQ ID NO: 209868
  chr4:185352799-185352955
  hypo

SEQ ID NO: 254116 - DNA, 280 bp, Homo sapiens; identical to SEQ ID NO: 209869
  chr4:185353277-185353557
  hypo

SEQ ID NO: 254117 - DNA, 170 bp, Homo sapiens
  chr4:185355394-185355564
  hypo
cagaaatcaggacattgtgtcgcgaccttgactctgccattgctggtgtgtgtccttgggctaatccctccatcttcccggcccacactttgatcatctagaaaaatgggacgttttaaacagatgattcctggggttatccatgatacgatgaatcataatctgatgtt

SEQ ID NO: 254118 - DNA, 181 bp, Homo sapiens; identical to SEQ ID NO: 209870
  chr4:185386797-185386978
  hypo

SEQ ID NO: 254119 - DNA, 57 bp, Homo sapiens
  chr4:185425792-185425849
  hypo
gtcctcacccagcctggccacgctccagtggcatccgcagctctgctcttttcctca

SEQ ID NO: 254120 - DNA, 89 bp, Homo sapiens; identical to SEQ ID NO: 209871
  chr4:185426628-185426717
  hypo

SEQ ID NO: 254121 - DNA, 47 bp, Homo sapiens; identical to SEQ ID NO: 209872
  chr4:185480839-185480886
  hypo

SEQ ID NO: 254122 - DNA, 196 bp, Homo sapiens
  chr4:185491195-185491391
  hypo
gcttcggcctctaaattctttttatggagcctcattttcacagttaaatgtcttcaattgactgtggcctgttgggaggtgggatggaggaagcttcttatggaaaatgaacgtggaagggaagcacaccagaagcaagaaagtgtcatcaatttttccatcaaagactccgtgaaaaagacgaagcacaagtagc

SEQ ID NO: 254123 - DNA, 165 bp, Homo sapiens
  chr4:185684718-185684883
  hypo
ttccaccctccgatcgcccccacccattacttgcactcatcttacacagaattcttagcatcctgttctctgtaagaagagagaacatatgcagctttggcaaacctcacgcaccacctggttctgatcaacacggcctttatttccttgcgtatgaagaagcat

SEQ ID NO: 254124 - DNA, 162 bp, Homo sapiens
  chr4:185688832-185688994
  hypo
aaccattaaaaacataagaacgttctgagagataacaaaagtcctgcctcaaaataaagagtaagtgaacactctttctggagattgctcatgcccctcgcgcctggccctggctgtgcggtccacgcaatgatacccaccgcagaggggctggtgttctct

SEQ ID NO: 254125 - DNA, 159 bp, Homo sapiens
  chr4:185709701-185709860
  hypo
tctgaaaggccactcgttcttcatgaaacacggcgagcgggagccacgcaaatgcaggaaaatgcttacttgacacctgtattcccctctggaaaccttcgtataatgttgtgacatcatcatagaaatacaccaagggctcgtcgctgtcaagtagtg

SEQ ID NO: 254126 - DNA, 148 bp, Homo sapiens
  chr4:185765456-185765604
  hypo
ttcatcggaagcaccgctgctgaggaacaaccacctcctcctgaccatcgcaagctgcccaggaagacatgctcatagcagtgtccgtttccctgcctaactttccaccagaagattccttcatgtctacgggcggacccaggccgat

SEQ ID NO: 254127 - DNA, 145 bp, Homo sapiens
  chr4:185872174-185872319
  hypo
gacgaagctgaagccggcctaaaatgctggggagaggcaggactggcacggtgcatgaggagccgttcaccactgtgtgaggaagccagacccgtgggcgcacctgctagaatggctaccaccaaaagtgcgcactaacaagtgt

SEQ ID NO: 254128 - DNA, 211 bp, Homo sapiens
  chr4:185872523-185872734
  hypo
agacgcagcccaaacgtccatggtgaggcaagatgtggtctatccagacagcgaactattattcagacgtgaaaaggcatgaggtgcggactcacacgaaacacggaagggccttgaaacacgatgccgagtgaaaaagcccgtcactcatgccgtgtattgaacgaaccattccctttttgtgaaatgtccagaacgggcaaatgcatag

SEQ ID NO: 254129 - DNA, 69 bp, Homo sapiens; identical to SEQ ID NO: 209874
  chr4:185873079-185873148
  hypo

SEQ ID NO: 254130 - DNA, 44 bp, Homo sapiens
  chr4:185886250-185886294
  hypo
tatgtccagcacaccgcaggtgtgcagccagtgtgtgatggcca

SEQ ID NO: 254131 - DNA, 78 bp, Homo sapiens
  chr4:186066016-186066094
  hypo
tggaggggtaacctggccaacgtgatccgttacttccccacccaagctctcaacttcgccttcaaggacaagtacaag

SEQ ID NO: 254132 - DNA, 130 bp, Homo sapiens
  chr4:186150229-186150359
  hypo
aggccatgaaagactagcaacgcccgcggtgtggttgtggaatttttgtaggtggaacactaacactcctggagtgaagcagtggagatctcatctgtgggcgtggtacgacagagggccagggcacaag

SEQ ID NO: 254133 - DNA, 158 bp, Homo sapiens
  chr4:186203943-186204101
  hypo
cacttttgatcaagggaaagcgtacaaacatcagccctcctgattcttgaaccgaactcagcacttgcaaagtcgtatcctcctctggagaaagaaaaccgagtgagtgccaggtaactctggaagcccgtgtccccgtgtcctcatggatagccagc

SEQ ID NO: 254134 - DNA, 330 bp, Homo sapiens
  chr4:186220274-186220604
  hypo
agacttctttttcagagtaacgctgagttgagtcataaaggcgagaggctctcattcattccctctgggcttgtcaggggatatgggtggatggcggcacatgcgcatagaaaaagagaatcgtgaagcagccttgtgcacgtaggtaggtcagatgagatcatgtgctcgtgcttgatatgcagtggagagatgagattaatagacaaggcctaaagggcctgggagttatcctagaaagcctggacgtaatgctgtagagcagtggttctcaagctatggtgcacgtcagcctcactggagagcttgttaaaacgcagattgctcacc

SEQ ID NO: 254135 - DNA, 37 bp, Homo sapiens
  chr4:186224524-186224561
  hypo
acgaaggtgcagggcgtggtggctcacgcctgtaatc

SEQ ID NO: 254136 - DNA, 157 bp, Homo sapiens
  chr4:186224801-186224958
  hypo
gactctgtctcaaaaaaaaaaaaaaaaaaaaaaagcaaggcagggcacacagtgggcacaccctggccgggctgcacaaagtccatgtgtctctgtactcttctccatcataaagtgagtgattccgccatcaactcctgtacgatttctgctattc

SEQ ID NO: 254137 - DNA, 95 bp, Homo sapiens; identical to SEQ ID NO: 209878
  chr4:186319410-186319505
  hypo

SEQ ID NO: 254138 - DNA, 136 bp, Homo sapiens; identical to SEQ ID NO: 209879
  chr4:186348209-186348345
  hypo

SEQ ID NO: 254139 - DNA, 39 bp, Homo sapiens
  chr4:186348626-186348665
  hypo
taaaaggccgggcgcggtggctcacgcctgaaatcccag

SEQ ID NO: 254140 - DNA, 34 bp, Homo sapiens
  chr4:186933526-186933560
  hypo
taaaggagcccagtgcgagcgaagaaggactcag

SEQ ID NO: 254141 - DNA, 42 bp, Homo sapiens
  chr4:187027798-187027840
  hypo
catgtcaatatgaaaacaagcggccgggcacggtggctcacg

SEQ ID NO: 254142 - DNA, 41 bp, Homo sapiens
  chr4:187028080-187028121
  hypo
gcgacagagagagagactccgtctcaaaaaaacaacaacaa

SEQ ID NO: 254143 - DNA, 179 bp, Homo sapiens
  chr4:187206902-187207081
  hypo
taaaatggcagaaagcgggtatgatattgccttgttgaaactggaaaccacagtgaattacacaggtacggagaattttatccggaaagttgtctccaatggtgaactggataaaatgtttaacactactagacttacggcctgaccctgccaatctctccatgcgttatcatcatgaa

SEQ ID NO: 254144 - DNA, 103 bp, Homo sapiens
  chr4:187404906-187405009
  hypo
agaccaccccgtaacgcggccacctcaggagcactaggaccaccccgtaaccgagtcacctcagcagcactaagaacaccacgtaacgcggccacctcaggag

SEQ ID NO: 254145 - DNA, 36 bp, Homo sapiens
  chr4:187509900-187509936
  hypo
acatgggcatgctctcgacagcgggcgcctcgaagt

SEQ ID NO: 254146 - DNA, 199 bp, Homo sapiens
  chr4:187527079-187527278
  hypo
ttttaatactgatagcgacttcttgaattctacgtttcccatttttctagaaagaaacctttggataagaaagaaaagcaacagaggccaatggaaaagctcatttcaaagaaccccaggaccaccttggcactcgaagcccacctggataatgacactgtagtttcccctggagaagacgggcgcgttgtcattgaca

SEQ ID NO: 254147 - DNA, 177 bp, Homo sapiens; identical to SEQ ID NO: 209881
  chr4:187550654-187550831
  hypo

SEQ ID NO: 254148 - DNA, 35 bp, Homo sapiens
  chr4:187680708-187680743
  hypo
gccctcgggcccttccgggccgcttgcttttcatc

SEQ ID NO: 254149 - DNA, 267 bp, Homo sapiens
  chr4:187762170-187762437
  hypo
atgttcaagtgcacaggtcacgggtaaggacggaggcatagattaatccggcccctcactgccccgaggaacccaggatctggcacggtcctcggcatgctcatgctgcagtgaatgagcgagtgagagtgaactgacaggcgcggggaggaagaggctgaagcacgcttcacttgcccgcagttttgtgagggcggggtctgtaggccggaaaggaattcttcaccccggaagtgaatgcttgtcgcatgcattaaatagcctgat

SEQ ID NO: 254150 - DNA, 42 bp, Homo sapiens; identical to SEQ ID NO: 209884
  chr4:187796040-187796082
  hypo

SEQ ID NO: 254151 - DNA, 302 bp, Homo sapiens
  chr4:187840652-187840954
  hypo
gacccggaacctcccgaatgtcagcgagaggcaggcgccagccgctctgcccaggcctgccccgcgctgcacatgattcagtgggttggggtgaggtagggtgtggaagcaacacaggaatgggtcacgaatagcaaatagtctctttccaaaaggagatcatgtacagacattgtactgggtctttgggaatgccgcaggggatcctgcgggaacagcgagaaagagggagagaggggctcgcagttacaaaagaaggttcgggtggcgttaggaggcggcagggacgtagctatgcaggc

SEQ ID NO: 254152 - DNA, 383 bp, Homo sapiens
  chr4:188427932-188428315
  hypo
tgctcagcagttcatgctcccagcggccttacccgctcagaagcgcttccgaagtgcttcctccaggctccacagcggccttccccgctcgctcctttgagctcctcctcggtcgcttttgccagcctctgcctccctttctagcgtcctatttcagcacactcattttcgtttcaggcaggtgcgctttccgttcccagagcgcactggaacctctttcccgctggcctcagccttttcttggaatgccctttccagccttttcacgtggaagcaccactcagcttcaaagccacctccttgggaggccttctctgaccgcccagcctcgttcgcgccacgtgtacattctcagtgcagccagtaaccgcccatttatgtat

SEQ ID NO: 254153 - DNA, 94 bp, Homo sapiens; identical to SEQ ID NO: 209886
  chr4:189100360-189100454
  hypo

SEQ ID NO: 254154 - DNA, 523 bp, Homo sapiens; identical to SEQ ID NO: 209887
  chr4:189552365-189552888
  hypo

SEQ ID NO: 254155 - DNA, 223 bp, Homo sapiens
  chr4:189717745-189717968
  hypo
tttgcacctcacagaccctgcgcccatcacagacgccgcgcccctcacagacgccgcgccgcacctcacagacgccgcgccacacctcagaccctgcgccgcacctcacagaccctgcgccctacatcacagacgccgcgccacacctcacagacgccgtgccacacctcacagaccctgcgccccacctcacagacgccgcgccacacctcacagaccccgc

SEQ ID NO: 254156 - DNA, 284 bp, Homo sapiens; identical to SEQ ID NO: 209888
  chr4:189956760-189957044
  hypo

SEQ ID NO: 254157 - DNA, 224 bp, Homo sapiens; identical to SEQ ID NO: 209889
  chr4:190345362-190345586
  hypo

SEQ ID NO: 254158 - DNA, 171 bp, Homo sapiens
  chr4:190434295-190434466
  hypo
agaccggagactctcgactgagagaagagactgtctgggttgtggtgccagtggcccttctactaaaaacagcaacatcaataataatggtgtttaacatttagtaagcacttaatatataacagcgacactaaatcttcaggcttccttcaccatcgctgattatcatct

SEQ ID NO: 254159 - DNA, 743 bp, Homo sapiens; identical to SEQ ID NO: 209890
  chr4:190462467-190463210
  hypo

SEQ ID NO: 254160 - DNA, 149 bp, Homo sapiens
  chr4:190509469-190509618
  hypo
aggccccctccttttcgaagatctttctttccatgcttttgcctgacttcatggctcctcgctccccgcatcacgccgtggtggtgcctggatgcgtgacgatgtactgaccacattctgcggcaatcactgttcgtgaagctgcctcc

SEQ ID NO: 254161 - DNA, 43 bp, Homo sapiens; identical to SEQ ID NO: 209891
  chr4:190767154-190767197
  hypo

SEQ ID NO: 254162 - DNA, 285 bp, Homo sapiens
  chr5:110217-110502
  hypo
gcaacacacgtgcacgcacccacacagtctgcaacacacgtgcacacatccagtctgcaacacgtgcacacaccggccactctgcaacgcacatgcacacatccatacaatctgcaacacatgcacacaccggccactctgcaacacacatgcacacatccacacaatctgcaacacacatgcatacacccacacaatctgcaacacacgtgcacgcacccacacagtctgcaacacgtgcacacaccggccactctgcaacacacatgcacacatccacacaat

SEQ ID NO: 254163 - DNA, 344 bp, Homo sapiens
  chr5:110562-110906
  hypo
ctgcaacacacgtgcacacatccacacaatctgcaacacgtgtgcacactggccactctgcaacacacatgcacacatccacacaatctgcaacacacgtgcacacacccacgcaatctgcaacacacgcgcacacatccacacaatctgcaacacgtgtgcacacaccggccactctgcaacacacgtgcacacatccacacaatctgcaacacacgtgcacgcacccacacaatctgcagcacacgtgcacacatacaaaatgcaacacgtgtgcacacaccagccactctgcaacaaacgtgcacacatccacacaatctgcaacacgtgcacacacccgc

SEQ ID NO: 254164 - DNA, 532 bp, Homo sapiens
  chr5:139617-140149
  hypo
cttcctgcacccaggctggccgctgtgcgcccatgagaaggtggtggtgcagctggcgtccctgcacggagtcaggctccagcccggggacttctacctgcaggtcacgtcggcggggaagcagtcagctagactggtcttgaaatgcctgtcccggctgggaagaggcacagaggaagtcaccgtccctgaggccatgtatggctgtgtcttcacgggggcgttcctggagtgggtgaaccgggagcggcgccatgtccccctgcaaacctgcttgctgacctcaggcttggccgtccaccgagccccgtggagcgacgtcactgaccctgtctttgtccccagccctggagccatcctgcagagctactccagctgcacaggtcctgagcggctgcccagcagcccctcagaggccccagtccccacccaagccacagcaggcccccatttccagggaagcgcctcttgccccgacaccctgacctcaccctgccgccgagggcatacgggcagcgaccagctcaggcac

SEQ ID NO: 254165 - DNA, 124 bp, Homo sapiens
  chr5:141500-141624
  hypo
gggggcacccatcccgcctcttccagcttctggggctccaggtgtcccgggctgtggctgcagccctctgaccgtcctccgtggcctcctccccagtgcttctctgactcgaatctccctctcc

SEQ ID NO: 254166 - DNA, 531 bp, Homo sapiens
  chr5:142773-143304
  hypo
acatgcctcacacaatcacacgtgccagagttacacataccacacatgcacgcgcagtcacacaccacatgcagtcacgcatgctgcactttgagcagatgagtagggatgagatgacctgttcctcctgaggcgtctgcaggtagtgagcatgtctgtgagctggagactccgtctccgtgatgacgccgcgtgtccgtgatgacgccgcatgccctgtgcagtgggacatgctttcacttcccgtgtgaactgggacaagttttctcggaaccccctactttcatgcgtgtttttgtcccatggttcatagcaagctgagcatagcagctgctttcaacgcgcaggaaaaccttcatctttgacacggcctctttcctttgtccagacgttcttgcatcctcagcctgtgtcagcacagacggcggcagcctccattgccacaaccccagcgggccttccgatgtgcctgcccggcagccacaccccgagcaagaagggtggccacccggcacaggagacttccccagc

SEQ ID NO: 254167 - DNA, 120 bp, Homo sapiens
  chr5:164483-164603
  hypo
ctgatctgacaggaggcggagctcacacagtaatgatgtgactgggggcggagttcacccagtaatgctgtgacagggggcggggctcacagtaatgttgtgacggagcagagctcacac

SEQ ID NO: 254168 - DNA, 120 bp, Homo sapiens; identical to SEQ ID NO: 209895
  chr5:164903-165023
  hypo

SEQ ID NO: 254169 - DNA, 111 bp, Homo sapiens
  chr5:181712-181823
  hypo
gtgcagtgataagcgaccgggctcccaaatgtgcagtgatgagcgaccgagtccccgacagcatcgtcaagggcacaggtacggtggctcggtcccgccctcactcaccct

SEQ ID NO: 254170 - DNA, 177 bp, Homo sapiens
  chr5:183414-183591
  hypo
aaactcacagtgcctgacctcggagtgccaggcgtgcagaggagcagccaagggcaaacactccaaggagagtcgcctggcaaagccaaccacccagagccagcgtctgtgctagaatcacagaattcaaactgtggctgaaatcgcagcccaggcgtccagaaagttaaagttaag

SEQ ID NO: 254171 - DNA, 515 bp, Homo sapiens
  chr5:192150-192665
  hypo
gggcaacttcgaggcggtggtgcaggctctgaggccagcgggcccggcccctctgcgggtgcactgcccctcgttccgggcggacagcctgagccccagccagctcctgcacgtgctgcgtctggctggcccgggtgccctgcgcaagctggaggtggtgcacaacgtgcggctgcatgcgggccacgtgcagcagcttctggcccaggtgggcttcccccggctggcctcgctcaccctgcccaccaaggcctttgatgcaccccccacctacgcctccactcccgacggcgaggaccccctcctcgcctccatcgcccgggagctcagcaagatggcgcagctcactgagctcagtgtggccttctccacgctgaccgggaagatcccgacgctgcttgggtgagtcttggggaggggactgagggcgggctggtggctgcagaggcaaggagagatcgtccaggggcctgctcatgtccaaggccatgaggctacacggcctccagcctctc

SEQ ID NO: 254172 - DNA, 115 bp, Homo sapiens
  chr5:230941-231056
  hypo
gtccagatgtgggccgctgtgtgcagtcactgctctctattgtttccagaggctacgggcgcacctacttcagctgcacgtctgcccacaccagcactggcgacggcacggccat

SEQ ID NO: 254173 - DNA, 122 bp, Homo sapiens; identical to SEQ ID NO: 209897
  chr5:233693-233815
  hypo

SEQ ID NO: 254174 - DNA, 35 bp, Homo sapiens
  chr5:234921-234956
  hypo
ctgccacggatacgcagggacgactgtatttggca

SEQ ID NO: 254175 - DNA, 47 bp, Homo sapiens; identical to SEQ ID NO: 209898
  chr5:235348-235395
  hypo

SEQ ID NO: 254176 - DNA, 92 bp, Homo sapiens
  chr5:279481-279573
  hypo
taggctcttgattttccccacgagatatgcgtgccccagggaacggcggctctggctgtggaatgagaggcgtgtggagcaggcatggttcc

SEQ ID NO: 254177 - DNA, 149 bp, Homo sapiens
  chr5:285688-285837
  hypo
gatgttccagtttgagggccctgcagctggagacccatggggatctgatgttccagtttcaggttggtgcagctggcgacccgggtgggagctgatgttctagtttgagggccgtgcagctggcgacccgggggcgggctgatgttcca

SEQ ID NO: 254178 - DNA, 97 bp, Homo sapiens
  chr5:286140-286237
  hypo
tgcagctggagacccggggagtggggggagctgatggtgcagtttgagggccatgcagctgaggacccaggggggagctgatgttctcctttgagtg

SEQ ID NO: 254179 - DNA, 216 bp, Homo sapiens
  chr5:286417-286633
  hypo
tgagggccatgcagctggagacccatgggggagctgatgttgttttgagagccgtgcagctggagatccgggggtgagctgatgttcccgtttgagggctgtgcagctggaggcctagcgaggagctaatgttcctgtttgaggtccttgcagctggagacctggggaggagctgatgttcttgtttgagggccttccagccggagacccggggat

SEQ ID NO: 254180 - DNA, 81 bp, Homo sapiens
  chr5:306772-306853
  hypo
tggaagtacatcacggactggcagaacgtcttccgcacgtacgaccgggacaactccgggatgatcgataagaacgagctg

SEQ ID NO: 254181 - DNA, 470 bp, Homo sapiens
  chr5:309029-309499
  hypo
acattccagcactcaccacccggcaccgggacagctgactcagcacgtgccgtttaggttgctgtaaacagccggtgagattctcccctctggtgggcagtgcgtgtctgacaaaggcagtcgggcggagaacagttcctccgctgtggtcctttgccactgtaccaggcccccaagagctggggggagccccagggagcctcagcctgttgagtgggggcagctggtttgtcctccgaggtggaagaggtgatttctgaggaggtcatgctccgcttggctcgttcacagcatttcagagagtccgaaagaggagaaagaccttggcaaggggtgtgtcaggggtgggcccagggacgctggtggcctcatgtggactgactttcatgaacagaaactcagaaacagttgcttctggattttggcttctcagataaacattctttttgtagttcgtttgttcatccctc

SEQ ID NO: 254182 - DNA, 194 bp, Homo sapiens
  chr5:310508-310702
  hypo
attcagagagtaggtgcacacgtccctgcagagattccagcaggactgaaaaccagtagaaatatatcagcacctggatcttgcctcctgagtcagtaaggatatgccacagtcacgaaggcagtgggatttcgagggagggaagggaaggcggcaggcggggcatgccctccggggtgcccgaacacacctgc

SEQ ID NO: 254183 - DNA, 189 bp, Homo sapiens
  chr5:312943-313132
  hypo
aagggaaaagatgccgtgtaaaatctcgttctgtgtctgaattgccgtagggctcagatcttcatttgaggttctgtgtctgaattgccgtagggctcagatcttcatttgaggttatgttctataagttaacgttgatcttgtgtgagctttcggtagctggagtaacacaggcggcctcacagcgac

SEQ ID NO: 254184 - DNA, 118 bp, Homo sapiens
  chr5:314539-314657
  hypo
ggatatattcagacgttacgacacggatcaggacggctggattcaggtgtcgtacgaacagtacctgtccatggtcttcagtatcgtatgaccctggcctctcgtgaagagcagcaca

SEQ ID NO: 254185 - DNA, 84 bp, Homo sapiens
  chr5:325119-325203
  hypo
tggctttgcccaggcgttgcagggcgagtagtcactggtatgtgaggctgaggagggcaacgaggcttccgtctcaattccggc

SEQ ID NO: 254186 - DNA, 249 bp, Homo sapiens
  chr5:375541-375790
  hypo
agggctgtgtctccctaacccgcggaagtgggcagatccggtgaagcatggccgcctgggctgtgccacgccgggaccccggcacaggctgcccaccgtgaaggacggtgtgctggccttaaggtgccatgcgtgatgacagtttttatgccatctcaaggtcagaactggtggcaaggtagcatctgcctgagcggacaccacctgtgacttcagctgaggatccgggagacgcgggagcagcagatg

SEQ ID NO: 254187 - DNA, 102 bp, Homo sapiens
  chr5:387246-387348
  hypo
ctcaaagtgctttacgctgtgtctctggtgtgttccacacctgcagcttgggatgagccaggacacgtgtcagttcgtacacagaagcggggtcctgtctcc

SEQ ID NO: 254188 - DNA, 159 bp, Homo sapiens
  chr5:387838-387997
  hypo
atcgtgtgtccatacgctgtacctgccggaacttggcgacaccatgtcagcttcctggggcagccttaatgaatgactgcaaactgtgtggctcgaacaacaggggttattcttcacagcctggaggccaggagccaaaaccagcgccgatgggctgca

SEQ ID NO: 254189 - DNA, 166 bp, Homo sapiens
  chr5:405762-405928
  hypo
ggccttcgggtcgccggcacctgacccagcagccttgtcccaccgcctgcgaccaccagctcctccgctctctccatcggtcgtaacatcttactgctcccctcgcagactgttgagttggtctttgacaagtgtttcttttatattttcacggcacgtgtgactt

SEQ ID NO: 254190 - DNA, 202 bp, Homo sapiens
  chr5:427953-428155
  hypo
gtttggacagaagaagaaggcgccgtcaggagccatgctcccgccgcggctgtcgctgttctgcattgcggcacccgttctcctcccctccgcagcggagatgaaaatgaggagcgcgctcctgagggcaaaacccagagcagacaccgcagccaccgcggatgcaaagtgagtaagactcgcccttcacagccacatggtg

SEQ ID NO: 254191 - DNA, 114 bp, Homo sapiens
  chr5:429648-429762
  hypo
gtgctcctgctctgtgactccgagacccacccgacttgtcctcggcccctcggcgctgcaggcccaggccctggtaaccaagtgcagctcagccttgccgcgcgatcctgcagc

SEQ ID NO: 254192 - DNA, 163 bp, Homo sapiens
  chr5:447732-447895
  hypo
agtcgctggcagacgtcagcaaggactggaggcagagcatcaacaccattgagagcctcaaggacgtcaaagacgccgtggtgcagcacagccagctcgccgcagccgtggagaacctcaagaacatcttctcaggtaccagccagacgccgaggcacttgcc

SEQ ID NO: 254193 - DNA, 372 bp, Homo sapiens; identical to SEQ ID NO: 209903
  chr5:453928-454300
  hypo

SEQ ID NO: 254194 - DNA, 44 bp, Homo sapiens; identical to SEQ ID NO: 209904
  chr5:457006-457050
  hypo

SEQ ID NO: 254195 - DNA, 164 bp, Homo sapiens
  chr5:458631-458795
  hypo
ttttaaagttgctttcctgttcattggttaaggttctaagtattagaccgacctgcatttttaccacggattcactttccaacgcccaagcctcactaggtgttagaaccggtgtgttcttaccacggattcactttccagtgtccgaccgccctgtgtcccgt

SEQ ID NO: 254196 - DNA, 190 bp, Homo sapiens; identical to SEQ ID NO: 209905
  chr5:462213-462403
  hypo

SEQ ID NO: 254197 - DNA, 59 bp, Homo sapiens; identical to SEQ ID NO: 209906
  chr5:463463-463522
  hypo

SEQ ID NO: 254198 - DNA, 76 bp, Homo sapiens; identical to SEQ ID NO: 209907
  chr5:463552-463628
  hypo

SEQ ID NO: 254199 - DNA, 104 bp, Homo sapiens
  chr5:464586-464690
  hypo
gctcagaattcagcatccagcgagtccctccgtgagtgaacgttcacttgttgtcctatcagcccaagggaggcaataggctctgcggacgccacctccctggg

SEQ ID NO: 254200 - DNA, 1081 bp, Homo sapiens
  chr5:465050-466131
  hypo
ccccactgagcccccgctcctcctctgcggtgagatgccagagccgtggcggagcgaggaggagtgggctcagagcctccggggagccaccgggagccccagcctgggtttcaatgagggtgctcctggccgccagagccgtggagcctgccgctgaccgcgcgtgtctccccagaggatgacggccgaggcgcaccggcgcgtggtggtggagtacctgcgggcggtcatgcagaagcgcatttccttccggagcccggaggagcgcaaggagggtgccgagaagatggttagggaggcagagcagctgcgcttcctgttccggaagctggcgtccgtgagtgtcgcgcaggtccgggctggagaaggcctgtcgctccgcggccctgttcagcctccaccccgggactcgggccagtagatgggagtgtgtcgtgtgtttgtcaggcggggggagcctgggtccaggtcctgcctgaccttgtggttggacacgaatgtccacagaggtagacgcgccggccccgccggcttcccgaggccgcccacagctccctgacggacgcttcccagtctgtcctgcgctgcgaggtgctggctgcctcccacggtctcgccctcaccccagacccctggccctgtcactgagctttcagagtagatcctgaggagtcaggtgaagagggaggttcccagtcaggaaggggctcagccagaatccagctgctcccagcgccgcgggacagccgagggcggctcctcacattgctgctgccttccagggtttcggggaagacgtggacggatactgcgacaccatcgtggctgtggccgaagtgatcaagctgacagacccttctctgctctacctggaggtctccactctggtcagcaagtatccagacatcaggtaagggatgcacgtcttagaatcctgccttagaatcctggagtggagcggcaggtccctccttctgtctggggcgggtggggctcctggttcgcaagttcagccctgcagcacggcaagggttcaggtgcggcacagcggggcccaggcgcagggagcagagctgcttct

SEQ ID NO: 254201 - DNA, 82 bp, Homo sapiens
  chr5:466515-466597
  hypo
gccgcgtcacctccgtcccatcatctcgctggttaaacgtggaaaaacggggtcttgagctctccacggtctcccctctggt

SEQ ID NO: 254202 - DNA, 396 bp, Homo sapiens
  chr5:476482-476878
  hypo
agatgcttgtactgcgggatcaggcacggaggtcacagctgtgcccaccgccggacattctcgccctcctgccgcaggagctgagcacggatcccccgtggtcccaggaggggacgaggaagccgccccacggggtccctgcggggtcctccagcccccagcccgcagtgcccacctcctgccgcggcttgtacaggtactgctgtagcgtgtggtgcgtgaccatgtcctccgcgtcccggatgctccgccgtcgctgctccagagactgcatgtccaggcagacagcgctgacattttctctcctgcgtggggaccagcgctgagccatacaggctccctcagggtggggtctcttgcgcgcccctcgccttcccacggcgggcatctggccct

SEQ ID NO: 254203 - DNA, 93 bp, Homo sapiens
  chr5:480653-480746
  hypo
ctgggcaggccccgcggcagcaatggcagctctcctgtacaggctgagtttcagccacaccaagaagtcaaagctaaccgaggctgtgccttc

SEQ ID NO: 254204 - DNA, 40 bp, Homo sapiens
  chr5:481007-481047
  hypo
ctcttttttttattttgggacgaagtctcgctctgtcacc

SEQ ID NO: 254205 - DNA, 480 bp, Homo sapiens
  chr5:488124-488604
  hypo
tgtgggtccaaagtcacagacgctctggggaccaggagggcgggatttcaacagcgccatcattaaccctgaagctatggagtgggcgggcagggcctgggaactgtggaagatacaaagaagcctcgcgaaagctgccagtcgttctgagctgggaggaaggaggtggagggacgggacgcccccgggaggggagtttgaggacagggtttcacgccctcctttgctgactgaccgatggggggtgagacggggcccaggcctcccacggctcgcccgctctggagcggtggctccgttgctcaccacggtgactgcgtcgttcagcagcgactccccgaagacgatgatgaacaggacctcgttgacatggacctcctcaaacacggccaggacggccaccgggtccacagccgccatgaggctgccaaacaggaggaagtccagcagcccaatctgcaggtcgcctggaagacaagc

SEQ ID NO: 254206 - DNA, 342 bp, Homo sapiens
  chr5:490616-490958
  hypo
ggggaccattgtgacgtggccacagagccacggagtgtgcccggctctcaaaggagcggccctgacggccagactgatcacaggctactccatcccacactcgacacagctgggaggaagctgggatctcatgggcgaggggccatctggcaaggtaggtgtgagcctcgaggggccgcgggtccaggagtctctgctacaacccctgaggctttcccttgggtgcggtggctagggcggctgccccatccgaggtgtgtcctgaccacctatggcatcgcccacgtgacgggcctgccatccatgagcctgtctgtgccctcggcagctttccctgggctg

SEQ ID NO: 254207 - DNA, 1040 bp, Homo sapiens
  chr5:491138-492178
  hypo
cagacggaaaatcgccaattcttgtgagtctggttcagctggtggatttgtttgaggctgagttctcagaccggtgagggcggcaggtgccggaggcctgcgctcagccgtggggcccagctggtcaaagctaggctctgcctgaggtccctggacccacctggtcaaagctgtagcatccccggcagcagcggcgggcatcagggctgcaccgcacctggcatgttgagaggcgccagccacgcgtggtctgggtccggggcgggaggcagtgcccgagagatgaagcatccaagaccaaaaccgcgcagcagttctggctccggctgtggctgcagcggtggccgagcggctccggcacacaggctgggagggacggtgcccgatacaccaggctctgcagtcctcctcctctccctgggacctggtggccggcgagtgtggacggacccctacctctgcccagtgccggaggaagagcggcagcccctggccacctgcagcccccaagccgagctgccgagatgggaactcctccccaagcagaacacgtgctgggacctggggacgcgcaggggactggccttggtcacgagggcctacggggctgccagccacgtttctcacctgacacttaccgcctggaggccagggtgcggcaccccgacctttctgagatgaggcagcgccgcccctcccggaccccaccctgatcccggccggggcaacagtggcgcagactcacccatgagcccactgaggaagacgccgtagagggacagcccggtggtggccgcgttccacacggtacccacgacggcgtacaacaggatggtccccaggttgccgaagaagaggcggttgggcatgaagtagccggcgtccagcacgatggggggcagcaggtagaagaagaagacggtgggcgtcagtgtgaaggacgcgatgtggtcggccgcccagacgatgccgcccagcaccaggcccagcacgatgagcagggcgctctcgggaaccacgctggtgaccttgtgggacag

SEQ ID NO: 254208 - DNA, 127 bp, Homo sapiens
  chr5:500465-500592
  hypo
cggcatgcgactggcgtggatccctggcgagaatggaagggggggtggcaggagacggggacgggaccctccagggacacaggaaacacacaccaagcacggagaggccaggcgggccggtgtggac

SEQ ID NO: 254209 - DNA, 526 bp, Homo sapiens
  chr5:508111-508637
  hypo
cgcctgaatctccccgctacacccaaatgcccacccacacccatgtggctccagttcccattcggcttcttggcgcccgcccctcacaccagtggagccaggggaaggggtgaccagtgctcaggcgcggagcccagctatggaatcacaagcagcccagagcgcgcccgggatggagatgccgcagggagacgcaggcctcaggatggagtagccgcaggcagacgcagtcctcagcgcgccagggatggagatgccgcagagagacgcagcccatagtgtgcccgggatggagatgccgcagggagacgcagcccacagtctgccggggatagagatgccgcagggagacgcaggcctcagcgcgcccggggatggagatgccgcagggaaactcaggcctcagcgcgcccggggatggagatgccgcagggagacgcagcccatagcgcgcctgggatggagatgccgcagggagacacagcccatagtgtgcccgggatggagatgccgcagggagacacag

SEQ ID NO: 254210 - DNA, 397 bp, Homo sapiens; identical to SEQ ID NO: 209916
  chr5:510012-510409
  hypo

SEQ ID NO: 254211 - DNA, 37 bp, Homo sapiens
  chr5:519702-519739
  hypo
gctgggtaagacagcgggggtccgggagtcaagtgtc

SEQ ID NO: 254212 - DNA, 228 bp, Homo sapiens
  chr5:519989-520217
  hypo
accctgtgccctagcgtcctcctgaccctcctacggctgcgcgaggcactgcagactccagatacccgtctcgctcctgcctgcccttccagccagggttcaccaagatgtggggcggcctgggcctccgccatcacatccctcagcaacacaagctccacttcgagagcctgcccccaccgcccccacccagccccactgtcctggtttccccgtgggcagtcactg

SEQ ID NO: 254213 - DNA, 164 bp, Homo sapiens
  chr5:532005-532169
  hypo
gttcagtcaatcttagctcacgctggatcccagatctgtccctccccaggagcgctcagctctccactctgccccatcctgcagcttcggctttgactcagacaggccgggagatccctggtatttctggtcagatgcctgccgtggggagaagaagaaaactc

SEQ ID NO: 254214 - DNA, 77 bp, Homo sapiens
  chr5:537335-537412
  hypo
ctgcacaggtgggcgatgctttgctccggccggctcacctccccgatgaaagcccgctcaacggcatctgcagggca

SEQ ID NO: 254215 - DNA, 132 bp, Homo sapiens
  chr5:538681-538813
  hypo
catcacctgtgcctgcctgacgatgccgcctcagccgcccagggctccctcagggaaaacgtcgccaagcaccgacggctcaagggagtaaccgcgcctctgggagatggcgtccctgacttggctgtggca

SEQ ID NO: 254216 - DNA, 1041 bp, Homo sapiens
  chr5:554299-555340
  hypo
ggcaaggaaaataaacgagccgttacctttcaccaaatcgcactgtattttattcatttagggtgtacacacctatctgctcttcaaaggaattttgggcagattgtaaaattacgctcaacatacagcaaggcgactataaatacaaaagcagcactgaggtgctggtgctgcgggtgggtcacgggataaaccaggcgtggggtctgggtcacgggatgacccgagggtgggtcacgggataaaccaggggtggggtctgggtcacaggatgacccgggggtgggtcacgggataaaccaggggtggggggctgggtcacgggatgaacggggggcgggtcacaggatgaaccgtgggcgggtcatgggataaaccagggtggggtctgggtcacaggatgacccgggggtgggtcacgggataaaccaggggtggggggtgggtcacgggatgaacggggggcgggtcacaggatgaaccgtgggtgggtcatgggataaaccagggtggggtctgggtcacgggatgaacggggttgggggctgggtcacgggatgaaccggggggtgggtcacgggatgaacggggggggggtgggtcacgggctaaaccggggttgggggtgggtcacgggatgaacggggttgggggctgggtcacgggatgaacggggggtgggtcacgggatgaacagggggtgggtcacgggataaaccggggtggggggctgggtcatgggatgaacggggggtgggtcacgggatgaaccggggtggggggtgggtcatgggatgaaccggggtggggggctgggtcatgggatgaaccggggtggggggctgggtcatgggatgaacgggggggtgggtcacgggatgaaccggggtgaggggtgggtcaccggatgaacgggggtgggtcatgggatgaaccaggggtttccgaggtcgcaggcggcttccttgccccgtgacctggctggggctgcttaacttatgagcagttcggcttcctcgcgggcgccggggcggtgctgcc

SEQ ID NO: 254217 - DNA, 38 bp, Homo sapiens
  chr5:555660-555698
  hypo
aggtgtgagtccctcgagccctccgcataaacctctgt

SEQ ID NO: 254218 - DNA, 220 bp, Homo sapiens
  chr5:559381-559601
  hypo
ctgttcggatttcacgtctccttgattgacagcttatgttttgcgaggaaattgttcgttttgtatgtgtgcatctgtacatgcgttatgcacgcgggacacgcacacggagataccgagtttccgccgggtccctttgctcccatttctgtttccaacatcaaccatttgtgcttctcttttttcgtgccagcgtgtcgtgttgtctgtttcattattt

SEQ ID NO: 254219 - DNA, 392 bp, Homo sapiens
  chr5:569852-570244
  hypo
gaccagcgcttactcgaagaagatttaaaacacacaaggaaccgtgaaaccaaaccagaaaagccctgctgaccgagccgccccttctagaggccgaacaggcatggaaaccctgagccgacacaggcacttacccagcagagaggacagggccaccaggatccacatggccacaaagaagggggtgtgcacgggtagccaccgcaggctgaccactggaaacccgctgctgttccgggcaacggggggctctggccctgggccccggccaacgagtgtgcagggatgggctgtgcccaccagcaaggccagcaacgtgaaggcacagagtccagacccctggggctgcatgctgggggcacgtgccgccgacaaggcgctgtgtatccgcc

SEQ ID NO: 254220 - DNA, 265 bp, Homo sapiens
  chr5:572063-572328
  hypo
cggacctggagccgcggctgcgggcaagggcacctgcacacaggggtgtgcagcacgggagaggctgagctgtgcctcggatgctcctgccacaggctcatagcttggtcctgtctcgaagaaactcctgacacaccccagaatgaatgagggtcttcacccaataagtgccccgcaaccatctcgggagaaaaagaggccaagccgcagaggaccatgcttggtttcaattggacagctggattcgctccgagggctctgaggt

SEQ ID NO: 254221 - DNA, 130 bp, Homo sapiens
  chr5:583201-583331
  hypo
caggtgtctctggccgcgggcagcccgcctgtttggggtcggcaaaggctccaggtgttgaagtggtaaaatctcgaagctgcctggcccatctcttacccctgctctcctgtgccgcttcgtcctcagg

SEQ ID NO: 254222 - DNA, 341 bp, Homo sapiens
  chr5:595103-595444
  hypo
gcgagaacaccctttggaaacgaaggaaaaatcgatgcgagaacacccttcagaaatgaaaaatcaacgtgagaacacccttcggaaatgaaggaaaagtcgacgtgagaacacccttcggaaatgaaggaaaaatcgacgcgagaacacccttcagaaatgaagaaaagtcgacgcgagaacacccttcggaaacgaaagaaaaatcgatgcgagaacacccttcggaaacgaaggaaaaatcgacgcgagaacacccttcggaaatgaaagaaaaattgatgatctccagtgaggacgcactaagagaatttgttgccggcacacctgctttaaaagat

SEQ ID NO: 254223 - DNA, 527 bp, Homo sapiens
  chr5:600957-601484
  hypo
ccttctgacaaggtctgtggcgcccaccatggcgttagggccacagcctcctgccccatgtgccaggcccggctctgcccagctccctgcagctgcgccagtgtgtgctgtgactcgtgctcctggtttgtcatctgcctctcagtagacaccacggccttcaagctttctccgctccgtgaccagcagctgggacgggaccagcagtgcatgcggctctggattcatgtttgttgaatgactgactgaacggaggctcccttacagaagtgaacggcgcggccctccctgagttccggcctggctctggataccaaggagcaaggtggtcaggggtcaggggctggagtggggagattgcctgggagggggctggagggtgtggtggaactgcaggttctctccttgacatgcctgtgggggagcctttcccggccctctctccgctggttttcaccctttctccggtgcagccacactgggcatcccaccccagggatccaggaagggggcgtgtcggccgagtg

SEQ ID NO: 254224 - DNA, 196 bp, Homo sapiens
  chr5:608783-608979
  hypo
ccctgtgaggaacccgggatagaacctggggacagaggcctccattagtccttgggagcggcaggtagcccatggggtcactgtgatcccggcacattgtgggagcgtgcgctgggatggggaggggtcactgtgagcacggtgcgtcgtgggagcgtgcgctgggatggggaggggtcatcgtgatgatggcaca

SEQ ID NO: 254225 - DNA, 83 bp, Homo sapiens
  chr5:609241-609324
  hypo
tgcctttgctttcccggcttctctgcggctctgtgcttttgctgccccattccaggccggaaggctcccgcgcctccatggat

SEQ ID NO: 254226 - DNA, 37 bp, Homo sapiens
  chr5:609577-609614
  hypo
ttatctcagcagggcggcatatcgaatctcggtgccc

SEQ ID NO: 254227 - DNA, 189 bp, Homo sapiens; identical to SEQ ID NO: 209923
  chr5:623330-623519
  hypo

SEQ ID NO: 254228 - DNA, 319 bp, Homo sapiens
  chr5:628859-629178
  hypo
caggttgcagtccccggggagtgttcccacgacccagcccccttctttgtgcagcttctggagaactcaggttgccgtccccagggagtggccccaggacccagcgcccttctttgtgcagcgttctggagaactcaggttgccgtccctggggagtggccccaggacccagcccccttctttgtgcagcgttctggagaactcaggtcacaggccccggggagtgttcccaggacccagcccccttctttgtgcagcgttctggagaactcagatcgcaggccccggggagtgggactgtcctcgggtggaccaggtg

SEQ ID NO: 254229 - DNA, 89 bp, Homo sapiens; identical to SEQ ID NO: 209924
  chr5:633969-634058
  hypo

SEQ ID NO: 254230 - DNA, 565 bp, Homo sapiens
  chr5:640118-640683
  hypo
gagcttgccatcgtcggtggcggggggactgtcccaggcccaggccactgtcccagtgtggagttgccagctgtcgtctgcatggtggtttccacacagggcagtcggtgcttgtggaaggcgcagcgagttgtggcggcgccactgaaaccttgagacgtggcggcccctggttgccccttttcttggaggtcacctcttctctttcttcagttcccaccctgcccgtgtgtggacgcacagagcctgaggtggttttgtggcgccaacacccctttcccctctccctacctgtcgtctttttgaggcatcgtctgtgtgattcaaaacatactgagccgattttgtttacatttcatcctttaagcctaagtgctaatgtaatatttggttttcactcctagctcaggcaagacacatcttgtcatctgttgaagaattcacagcagctcaggacagctctgcgatggtgggtgaagatgtcggctccctggctctggagagtaagtccctgcaaagccgccttgctgagcagcagcagcagcacgcccgggagatgagcgag

SEQ ID NO: 254231 - DNA, 97 bp, Homo sapiens; identical to SEQ ID NO: 209926
  chr5:646057-646154
  hypo

SEQ ID NO: 254232 - DNA, 262 bp, Homo sapiens; identical to SEQ ID NO: 209927
  chr5:652921-653183
  hypo

SEQ ID NO: 254233 - DNA, 95 bp, Homo sapiens; identical to SEQ ID NO: 209928
  chr5:667282-667377
  hypo

SEQ ID NO: 254234 - DNA, 158 bp, Homo sapiens
  chr5:675592-675750
  hypo
ggccaggggtacattgtggccggggctgcagtgtgaccaggggtgcagtgtggccggggatgccgtgtggccgggggtgcagtgtggctgggggtgcggtgtggccaggggtgcagcatggggggtacagtgtggccgggagtgcagtgccagaggtg

SEQ ID NO: 254235 - DNA, 45 bp, Homo sapiens
  chr5:676610-676655
  hypo
aggagctctgagatgaaagaggtgatgagtttgcggcaatgtagg

SEQ ID NO: 254236 - DNA, 35 bp, Homo sapiens
  chr5:677075-677110
  hypo
gcacacagaaacgcacacacgacgcagaaacgcgc

SEQ ID NO: 254237 - DNA, 116 bp, Homo sapiens
  chr5:677571-677687
  hypo
tcataggccacctcccatgccgaaaccctacacacccacggggctgagaggagccagggctgccactcaggcctcggcaccgagaagtccggcaatgcccggacccctgctccctg

SEQ ID NO: 254238 - DNA, 438 bp, Homo sapiens
  chr5:677717-678155
  hypo
gtcagggctgcttctgagaagggcggggtcttgaagcacaaccccctccactccccatggcccgctccccacagaacccacccaggggctcagggccgcagacccccgtaagtcaggtccctcggcccgtgagcccagcgcactcacttgatcttgctgaagacgatgtccacgtcagtgacggtcacgttcctgccgtcgatcacctggcagtccttgcacagcttcgaccagttcttgccgtgcatctccctcccggtggccctggcgtccccgtgcacggcaaagcgccggaaggcctcctccagggcactgagctcaggggatgcggctgccccctcaccagcaccctccgattccagcgacagcctcttggctgcccggtccttcgaggggtcccccggggacttggggggcgtcctgttggcagctttggca

SEQ ID NO: 254239 - DNA, 145 bp, Homo sapiens; identical to SEQ ID NO: 209934
  chr5:750521-750666
  hypo

SEQ ID NO: 254240 - DNA, 40 bp, Homo sapiens
  chr5:760084-760124
  hypo
ccgtcctgagcccagcgccggccagcgggaggggcagcat

SEQ ID NO: 254241 - DNA, 673 bp, Homo sapiens
  chr5:850086-850759
  hypo
gcttggcatggaaacgcaggctgccgacctgcggggcatggcgctgttcctccttggcaccaggggcaaggagaaaggtgctggccatgtgcaaaatgctgcgcagggattttagcggaaggctgccagcagggcgggtcctgcgccacgccagggggctgctgtccctcctgacagattccctctccggagccccctcagccaacgctgtcctgtcctgaccctaagcaggggctgcacagagcatgagtggccactgggcccacctgcaggctcaggggacatagtctggcccagggcaggtgactggtgccaccgggcagccatggcccagaccccacagccaggtccatcgcaagttcctccaggaacccctcccgcttagaccatgccacgatgaaaaggataccacgtaggcaatgtatttccacgcgtgaggcaggaagggaatgaagatcccgaaggtggccgaggaaaggcccacgaagacagcccaggtcaccacctggaagtagtgcaggggtaacgaccagccgttcactctggagatgcggggcggcaagaccagcttttcattattgagtatggcttctggggtgacggaacactggctcccggagcgggtgtccatctgcaggacacagaaggggaggacctgcgccgtcagatcctg

SEQ ID NO: 254242 - DNA, 515 bp, Homo sapiens
  chr5:851407-851922
  hypo
ggaggttctgaacacgctgcggctgctcctggccagtcaggtggggagggcggcaggggtgggagggacgtggtgtcacagagcggcagtgaaagacactcaacggccgctacggggtggggggttgatcttgaggggctgggcggtctctacagaggagggttaggaagcttcgccacgttatgcctcgctcaaagtccttgttgtctctttgggaaaaaaccttcagaaaatgaagttgatattaaatgtatttctttgagaagagagacattgagaaatagttaacaattcttcgttcttgcagtcgtgaacgtccatgatacagtggctctgcgctgcctttggtggctcctccctggtcctctaaatgtgacaccaggcggatgcggggccacaggaccctggggcttgagtcacacaagaatgtctctgggagacccgagagactcacagttatgaaacaggaccatggttctttggccgggcgcgggggctcacgcctgtaatcccag

SEQ ID NO: 254243 - DNA, 120 bp, Homo sapiens
  chr5:855237-855357
  hypo
ggacagaccccatggaggacagcgagccgggggacacagaccctacagagaacagagagccggggagacagaccccatggagaacagtgagcagcggggacagaccccacagaggacagc

SEQ ID NO: 254244 - DNA, 117 bp, Homo sapiens
  chr5:864283-864400
  hypo
cacgatggccacacgcccttcgtgtatgactccactcctcagggttcacggggctgtgtacagagactctctctgctgacacgatggccatatggccttcgcgtatgactccactcc

SEQ ID NO: 254245 - DNA, 153 bp, Homo sapiens; identical to SEQ ID NO: 209935
  chr5:873761-873914
  hypo

SEQ ID NO: 254246 - DNA, 204 bp, Homo sapiens; identical to SEQ ID NO: 209936
  chr5:876062-876266
  hypo

SEQ ID NO: 254247 - DNA, 256 bp, Homo sapiens; identical to SEQ ID NO: 209937
  chr5:881857-882113
  hypo

SEQ ID NO: 254248 - DNA, 463 bp, Homo sapiens
  chr5:883801-884264
  hypo
ggaaatgaggtcagtgaccacgtggcctccacgatgcatgaaacaccagcggcagccctgccagaggcacctggaccccgactgaagagaccagccttatgtgtgtctgatccggacctcccgtcagggccccacgctgacctctggatcccggtggctgtgctagatcacacagcaccaacccagaaggagaggcacacagagagtctggggccacgtggcaccctctctcggtggccacagagcactaccttgccgcctgggaggaaccggttgatcctgtcccgagcttcgtcagctgcgtgctccaccagcgccagcacgtgctcctctgcggtactgtccgtcaagctgcaggcattcccttcaggctcaaacatgcagctgtgaggtggggacaaccaagtcacctggaggcagcgtccccaccgcacacctgctccccatgcgtcggcacctaacc

SEQ ID NO: 254249 - DNA, 135 bp, Homo sapiens
  chr5:884916-885051
  hypo
agtcacagccccatgagctccgcagggaggggctccactcaggcacctgcgtgagcccattaccgatgcgcactgctgtgacactaggtgaaggtgactgcctgagctcggcacgctctcctgcctgcagactga

SEQ ID NO: 254250 - DNA, 215 bp, Homo sapiens; identical to SEQ ID NO: 209938
  chr5:885339-885554
  hypo

SEQ ID NO: 254251 - DNA, 692 bp, Homo sapiens
  chr5:885757-886449
  hypo
tactgggaagaccgcgagccacagtgctgtcagacacacggccatgagggtggatgtcctgagactgcgctctctggggcctgcactcagcaagtgacacgtgatgaagcaggctctgtgccaggcgcttctgcccgctgcaggctatgttaagtgctcttggtgcctctaaggcccctggcgatactctcgctttgtttggtcctatcaggcagccacctcacataggtggaggagcgtctacaggaatgacgtgtgatacggactttgatacaatctcaatgctcagccaccatgagacaaagagcccccatgaaaaccactctggggtttagaaaaaaaggaagaaggttccctgaaggaccagccaagtcggctgctccctgtgggagggagcagagctacagggagctgtggcctgcagtcctcacctgcttcccccgcagcatccacaccttcctgaccacaggcctgcacctgctccactccagcgtctacacagacacagaagcgagcagttcaggagtgtgcatctgccccacagcaacaaagaagccccctgccaatgctggctgcccaaagtcagcccgcttgtgcggcacagtctgggacaagggcacagccttggctgccggcaggcgctgtgcaggggagggaggggccaatgatcttaacggcgtgtagagacagag

SEQ ID NO: 254252 - DNA, 396 bp, Homo sapiens; identical to SEQ ID NO: 209940
  chr5:887038-887434
  hypo

SEQ ID NO: 254253 - DNA, 164 bp, Homo sapiens
  chr5:888864-889028
  hypo
acatgtcctatttacgccagcgcagtaacttagaaagaaaagaaacagacttctaacagcgtgcaacctgacctagtttctagaccaaagcacagagaaaacgttcacgaccaatcatttccttaatgctgtgtctgtaaaacatcatccgaacacagaaacac

SEQ ID NO: 254254 - DNA, 273 bp, Homo sapiens
  chr5:891193-891466
  hypo
caggacacggtgccgacccctcatttacaacgatgagctgtgaacaccaggagagtctctaaaagtgcacccttgcctggctgtgtccggcacgctcggactggccgatctgggggcggctccacctccaccttcttcccaggatcaaagtcgtcagcctctccctccgtgtcacagtgctccctctctcgcttccgcttcttctcttcctgggcggcagagtcaagggagtgagaaaggcaggagtaggcgggatccggacaggtctgccca

SEQ ID NO: 254255 - DNA, 192 bp, Homo sapiens; identical to SEQ ID NO: 209941
  chr5:902318-902510
  hypo

SEQ ID NO: 254256 - DNA, 200 bp, Homo sapiens
  chr5:909087-909287
  hypo
gaaagaaaactcaggcatggtaagcattttacgtagcacagaaaagcataaaatgaagaactgctacgttcaggccttatcccacccacttctctcctatcccacccactgtcagcaccaactagtgctgctcgtaggtgaatggctgtcccctgctcgccctgctggcccaggacagacagcttcgtgtgcagatggtc

SEQ ID NO: 254257 - DNA, 45 bp, Homo sapiens; identical to SEQ ID NO: 209942
  chr5:909638-909683
  hypo

SEQ ID NO: 254258 - DNA, 466 bp, Homo sapiens
  chr5:912352-912818
  hypo
gtaccagtcagtgtaggggacgtcagtgaccggctgtgtttacctggctggctgcacaaaccttagttctcagcttaccccgggcttttccaatgccctgcctctcgggggcctgtatccttacctgaaagaggaaacatcacgggcgtagtatgggcctggttttggtcacggggtccacatgacgtcacgttcttgagtcgcctgttgtgatgataggcaggaacactgttgccgtgggcagagcgacgcgtgcgggttgtgtgtgtgagtcaggaaggccgtcgccacgggcagagcgacgcgtgcggggagcgtgtgtgagtcaggagggccgtcgccacgggcacagtgacgtgcggtgagtgtgagtcaggagggccgtcgccacgggcacaatgacatgtgcggtgagtgtgagtcagtaaggccgtcgccatgggcacagtgacgcgtgtggtgagtg

SEQ ID NO: 254259 - DNA, 228 bp, Homo sapiens; identical to SEQ ID NO: 209944
  chr5:913180-913408
  hypo

SEQ ID NO: 254260 - DNA, 139 bp, Homo sapiens; identical to SEQ ID NO: 209945
  chr5:919456-919595
  hypo

SEQ ID NO: 254261 - DNA, 150 bp, Homo sapiens
  chr5:948029-948179
  hypo
gcaaccccccacccccgccacccctccacctcaacacacacaccaggaggatgtgaaaagcttctttcttcacactgcgaggctttttgggggagcagggtggctccgagctgccctgaggatggattgagagggcggggcggggagggg

SEQ ID NO: 254262 - DNA, 134 bp, Homo sapiens
  chr5:961624-961758
  hypo
cacccccagtgctggcaggtcgcggctcctcgtggctgtgggccggacgtctcctcaccatgagggcctctccacgcagggccccgcacgcagtggctggcttccttcaggacgagtgacccaaggcagacaga

SEQ ID NO: 254263 - DNA, 516 bp, Homo sapiens
  chr5:962518-963034
  hypo
aggggccagggtctgcgggaatgagggggcagaccacccccaccgagcccagatgccagggaaggagcctggccagaaagatccagaaggactcagtgtctggcggccctcgctgctccccattctttgaggccgttgttcccagatgggatgtcggatgcgtctctggcccgggcccctggtgaaatgtgatggaggggtgtggatggagcgtggtggacacagcaagagcctggccaggcatccctggggcaggacagcatcagccggggagcggggtctagccccagccgcctggcacagagtggcgcccaattctagagcttgaatgaaagagggaattcaggaagacgcttacaccagccaggccccggggcactcaggacggtagcatcacggggtgccaaagtctgcaaaggtgacagaggacgtggggcctcggcagggctgcctccacttccccaagcacacggaagacaggcagggtggacgggggtgacccggcctgggacctgg

SEQ ID NO: 254264 - DNA, 155 bp, Homo sapiens
  chr5:993134-993289
  hypo
gagttaccagggagcgggaggggttctgaagttcccaggctctgaggaccgactgttgatggaaggcctgggccacatcaggtgtttgccctgaggacccttgtcgagtcccgggacaccatgaaggagaatcctggatttggggtctgttgttc

SEQ ID NO: 254265 - DNA, 157 bp, Homo sapiens
  chr5:1003043-1003200
  hypo
ggactcctggaaggcagcttctcaccgtcactgccgtctgccctgctacatgtgacggctgtgtttcacatgttcaccggtgtgtacgcccgggtgtgcttcgaactgagaagccaggagcccagggcttctctgctgcccacgaatcatgccttct

SEQ ID NO: 254266 - DNA, 86 bp, Homo sapiens
  chr5:1026900-1026986
  hypo
actgctggcctggacgtggccttggtcctgcccagccgcatcccaggtgcctcccgagtgccctgaggtggcggtggctgcagcct

SEQ ID NO: 254267 - DNA, 163 bp, Homo sapiens
  chr5:1027310-1027473
  hypo
ccacccaacagggccgtccccaccacagtgcaaggtggccaaggcgctggggagccagagtgcagcctgggaggtgcctatggatctaggggtgccaggtgctgctggtggcgatgaaagctgtaggagaggcccgtcctgtgtcaggcggtgtaggagctgt

SEQ ID NO: 254268 - DNA, 242 bp, Homo sapiens
  chr5:1027769-1028011
  hypo
taggtcatgtcccagagggccgtgacttcactgtggacacccgtgtgtttcccaccgggcgttccaccagagctgtggccaacagctgccctcacgaggcccaggaggggacagcgcctccttgcatttgcgagacctgggaaaggtgcctggccgtgcccacctgtccactgggaagaggacatcgcccgctccaggtggctcccagaggtgcctgcaccggcacttccaggttgaaggcc

SEQ ID NO: 254269 - DNA, 197 bp, Homo sapiens
  chr5:1028326-1028523
  hypo
ggcggggacgtggacggtggcctcggggtggttggctcacagaccagggtggccttcctgagcatcccgtagggccgtgggacctgaagcaaaggctacctgttgttgacgccgtgtgacagacgcctgctgctcatgcagctgcgaggctatgggttctggtcccggaggcctccgtgggttggggtcagaccctc

SEQ ID NO: 254270 - DNA, 239 bp, Homo sapiens; identical to SEQ ID NO: 209947
  chr5:1029657-1029896
  hypo

SEQ ID NO: 254271 - DNA, 36 bp, Homo sapiens
  chr5:1031041-1031077
  hypo
aacaatattcagcctcggcagcgccaccttagtgcc

SEQ ID NO: 254272 - DNA, 248 bp, Homo sapiens
  chr5:1031561-1031809
  hypo
ccatccctcccgcccgcctgcccgagagctgcctgctctcaggaaatgctccagggcggtgtgtgctgggccgaggggctccgcacctccaccactgcgcaaggcccctgccctgaccacaggtctgtctccttctctgtgtcctgaaggctgcagattattcatgagaaccatgtgagcttcggctcagctgaaacaccgctgggatgtgtttgaagtttttccccattttccgtaactggtctcgg

SEQ ID NO: 254273 - DNA, 191 bp, Homo sapiens; identical to SEQ ID NO: 209949
  chr5:1032282-1032473
  hypo

SEQ ID NO: 254274 - DNA, 32 bp, Homo sapiens
  chr5:1032887-1032919
  hypo
tcccagctcaggctcgacgtgcacctgtctgc

SEQ ID NO: 254275 - DNA, 471 bp, Homo sapiens
  chr5:1033254-1033725
  hypo
tggttgcagttgggggccaccgtgggctggtgagaggagggcacacccggctgtggctggccgggatagggcctccctcccctccgcaggggtcccaagatcgggctctcagctcaggcccgtctggacaggatcatggtgtggtgaggggagagcagcgagggtccccaatggcgggccacatcctccatgtgccctctgccagccccttcgcctcctcttgtccccctagtggcactccccgctgagaaagctgagggccgcgagcacccgggacaactcctcagcgcagatgacggagagagggcagcaaaccgcgagggcccgcgaggaccgggcgggcagcgcctcaacattgacgtgggtctctctccggcctcacttgcgggaacacgtccctggggccgggggctcagggacaggcatgtgttgccctaaactgggcatctgtggacacggcgtagttcactc

SEQ ID NO: 254276 - DNA, 464 bp, Homo sapiens
  chr5:1034278-1034742
  hypo
cttccccctgtggagttgggcgtgttggcgtgggtaggaggcgaggtcccggcccccacgtccccccacaggcactccagtgcgatgtctcggtggaggaggacgaccgccaggagtggacgttcacgctctatgactttgacaactgcgggaaggtcaccagggaggtaggtgagcttgtgtttgcgtcaggtccacagtagtagacagacggggcagacagactgtgctggcctcgcgatacctcagggggcaggaggggacctgcctgctgcgaggtcctcatgccagctgggcttgcgtctccccagggcccagttcacgtgtgtttctgggccgagcctgcgccgcccatttctgcggctgtgcttcccacactgcaaggctgccctcagggcactggaggcgctcacagggccacctgggcagacccaggctgctccgagaagatgcctgtgttggtt

SEQ ID NO: 254277 - DNA, 183 bp, Homo sapiens
  chr5:1036265-1036448
  hypo
gtcaggatgcaccccggacccctgccgcctgctgtaggcaccccgtcatcaggggtgcgccacccagtctgtgcgggggtcaggcccttctctgtgctccaagcaggaggcccagtactgacccccagccctgctcggagcgggggccctactgcgtggacgagaacacggagcgcagaaacc

SEQ ID NO: 254278 - DNA, 403 bp, Homo sapiens
  chr5:1036739-1037142
  hypo
gtgtgtgtatgtggcggatgcgggggtgcctggttcaaagtgagatggaagacattgggtttgcattcagggaaaccctgccttggggtgagaagtcagtattttagggtggaatcaccggctcagtcagcagagggggtcgtccagtagtgtggatggccggcagtgtggacaacaggcagtgtggacggcagggcaggcagtgtggacaacagacagtgtcgacagcaggcagtgtggatggcaggcaggcagtgtggatggcgggcagtgtggatggcagccaggcagtgtggacggcgggcagtgtggatggcaggcgggcagtgtggacggcgggcagtgtggacagcgagcagtgtggatggcaggcaggcagtgtggatggcgggcaatgtggatg

SEQ ID NO: 254279 - DNA, 664 bp, Homo sapiens
  chr5:1037839-1038503
  hypo
gtgggccctgggccgtttctgaggagatgggaacctgagcctgcactcccagggcctcacactctgacctgtgtccgcagggtcccctcctgtgcaagcaaagcaggagccccagggcagggcctcgcacctccaggcccggtcccgctcccaggagccagatacacatgccgtacaccaccgcaggtcacaggtgctggtggaacacgtcgtgccagcctcggagcctgctgcccgggccctggacacgcagccccggccgaaggggccggagaagcagttcctcaagtcccccaagggctccgggaagccgcctggggtgccagccagcagcaagtccgggaaagccttcagctactacctgccggccgtcctgccgccccaggcccctcaggacggccaccacctcccgcagcccccaccgccaccctacggccacaagcggtaccgccaaaagggcagggagggccactcgccactcaaggccccacacgctcagcctgccacagtggagcacgaggtggtgcgggacctgccgcccacgccagcaggagagggctacgcggtgccagtgatccagcggcacgagcaccaccaccaccacgagcaccaccaccaccaccaccaccaccacttccacccgtcctagcgccactgccaagca

SEQ ID NO: 254280 - DNA, 531 bp, Homo sapiens
  chr5:1039292-1039823
  hypo
tcacggtcccaacactcacggggcgacttctgtgacatgtcagctttggagaaaggtgtgtcctgcaagggtcaggagacggttgcaggccagaaggacgtcccagtgacgtttcggagtcttgcagcctgcaggggtccatgtggttacccggaacaggaaccgtgggggtgctttccgggacccagggggcccgtgccaatgtttctgagtcttggagcctgcaggggtccacgtgtttaccctgaacaggaacatgcgggtgttttccggaatctggcgaggccgcgcggcagttttgcatttacattccttgttttgtttttaaggataaagcggtgctgggtggggtctgtgggaggggtttgagccatggcggaagatccctggtgaatggcttggatgtttgtcgcctccgagtctcatgctgagacgtgatccgtggtgctgggtggggtctgtgggaggggtttgagccatggcggaagatccctggtgaatggcttggatgtttgtcgcctccgagtctca

SEQ ID NO: 254281 - DNA, 370 bp, Homo sapiens
  chr5:1039853-1040223
  hypo
ggtctgtgggaggggtttgagccatggcggaagatccctggtgaatggcttggatgtttgttgcctccaagtctcatgctgagacgtgatccgcagtgctgggtggggtctgtgggaggggtttgagtcatgaggacagatccctggtgaatatggcttggcgcccttgccgtggtgatgagtgagctctcattcggtgtttgtgggagatctggttctttagagcaagggccacaacccccaggctgtggactgctactggtttgtggcctgttaggaacgggcctcacagcatggggtgggcggtggtgagtgagcatgagtgcctgagccccgcctcctgttagatcagaggcgggattagatcctg

SEQ ID NO: 254282 - DNA, 189 bp, Homo sapiens
  chr5:1045515-1045704
  hypo
tgggtgagttagtgtgtgaacgagtgggcgagttagtgtgtgaatgggtgagttagtgtgtgaatgagtggctgaacgactgtgaatgggtgtgtgaacgagtgggttagtgtgtgaatgaatgggtgagttcgtgtgtgaatgagtgggtaagtgtgtgaatgagtcgggttagtgtgtgaatgtatg

SEQ ID NO: 254283 - DNA, 78 bp, Homo sapiens; identical to SEQ ID NO: 209955
  chr5:1046857-1046935
  hypo

SEQ ID NO: 254284 - DNA, 259 bp, Homo sapiens; identical to SEQ ID NO: 209956
  chr5:1049743-1050002
  hypo

SEQ ID NO: 254285 - DNA, 557 bp, Homo sapiens
  chr5:1050399-1050956
  hypo
ctggtcagccctgacgctcctgctagaaaaggggcggccagtacattttctccagctgtctttcatgctgaatgagactcaagagattcttcaacgtactcagatttcataggattttatttttctactaacacagacagacagggaaacctacaaaaggaaacggagtcaattgtaaatggctgtagttactggttacacggagttgacaacacaaaggatgcctggtgcttgcgtgcagaggctgcagcccagggcgggggcagagctgagccctcaggaggtggtttcgtgtgcagaactgagcggccctcagaagcagggctgttttccagccaccaaccaacgttcagagccagcaccatgtggccgctgtgcctctagcctgctctcctccaggtgcaggggacacaggacctgccggccccatccagacatggaggagcgttttgctgcttaactcatgcttagccaaggcaggcagaggctgtgggaactgctgagccccgctgtgatgtctgggacacgctctgggcagcagccgtcactctacagca

SEQ ID NO: 254286 - DNA, 295 bp, Homo sapiens; identical to SEQ ID NO: 209958
  chr5:1051292-1051587
  hypo

SEQ ID NO: 254287 - DNA, 1256 bp, Homo sapiens
  chr5:1051902-1053158
  hypo
acacgagggtgacacgggcatggacagagtcctccagcttcagtgccttgaggtacagaaacacaaagacagtcaaggaacagagtgactcggaggtgaccggggccctgagcggagccatggccagggctgacgtttcaccttcatcatcagggacagcttcagctccgggtgctcttccaagaatgttctggatggggtagaaatgcaacctaaccactgggtaaatccagccaaggaaaagaacttccagaaaccaaggcaagggctcactggcttcttgtgacctgcgagaagatctggccacgtccaggtcactccggtagcagcgtctgccctcagatgcaaggaaatcgtccagccacgccctgatttgctgagcctgttaaggctgaacaggagagccctaggtgacgggcctagaaacttccgtaggaagccccatgggcagcttgggcggcatcactgggggacaggtgtgtctgccgtctgtttccctgggccaagcccaggcccaggctgcccacgccgtcctccgtgcctgtcccagagtgccgtgatgctgttgggcattaggagtagatggtgatcacctcccggccgccacccctgaccaggaggactctgttcagcccctcggtcaggacttcaagaaactccatgtctgtggtcaacagagttaaggccacagctgatcttacctgagcgtgtgtagctgaaatcgtgataggagtgaggtttatcctctcctggttagctaagatttggtttgagaaacccagagccaaggtgaaaagagaggtggggattagagagaccccccaggcggggaggagcagggcaggggagagaggggccagtgctcgggaaagagagggagcaccgtggccacagggaggacgagcagagacagcgacacagcccacggtgctgaccccacccgacagggaaccccagccacgggactgggtcctcaccagcctacaggggacctgggccacggattccgatcaggacgcatggaggacatgccctcactggccccagttcttggtgccaacctggcagggatgtgccaggcgtcaccctgtctgtgccaatacgcccagatgcactgcggagttctccttccaaagcacaaattcccaaagctgcgaccaattgtggccttaaagccgagagctgggctcctcacctcccaccgttgtcggcgcagggtggggctgagccccagcggaggtcccagaatgcacagc

SEQ ID NO: 254288 - DNA, 1648 bp, Homo sapiens
  chr5:1053386-1055034
  hypo
cccacaaacccaggtcttagcgagaagccaccagggggtgcccgcacgctcagcaggcacactgcaagaaaggatacagttctcgtctccctgccggtttttgggaggacctggcatgttgagcaggaccagctgcgcatcctgggacttgttgaggacgacgccattgagcttcacagccgtgtgcatccgcctgacgttggactggtccctgcaggggaggtgggcacggtcagcgggcggcgggtgcaccccacgctccggacacgaggctgagctgagccctgatgagctgcattcacacgtgttggaaagggctgtgtgagtcaggatcaggcggattctctgaccctgaaggatgcagaagtggcggctccgagcgaaaggcgctgactgcagccagggcgggcgttcagcagcgggatgctttggcctccagggacctagaactcagcccactaaggctgccaagcttctaagggctacagtcacacaacacaaaccgcaagcgctttcctaactacatctacatctgcaaagcaggcagaacagtggaagccgtctgggtggcccatgtgcctgacgccttcaaggctgacacgcttctcttgacatctacatcatcgcccctaaaccccacgtcagacactgccaaacacagacccgtcaggctgggcacacatggcctcctctccgagggtcctgatacaactgggtccaaggggccggaagctcaggaaggaaaggcccagagtcccccacaccggcctgtgcagccgttgctgctgaagctcccaggcctgacaaggacagggtatgccgaggactcagctggaggcacaggccctcagtggccactactgggtcccctcctacggcccaccctgcccctgtctggccaagggctaaaggacaagcacttccaccgtgtggccgtccagcccccgccttccgtcctcacaacgcagctctgctccacgaccctccctgtctgctctctgaagctgctgtggccggtccatgtctcaaagcgtccctggcggcctgggcccggccacagccccacaggaggctccccaaccaagtaggtttggggacactgcagaatcatgctgtgaggtgctcaggcccttgcgggacagagcttatctccctcctctaccccacggtcccctcctaggcaggcccctaaactgcagcagaactggcgttccaggaggccacctggggaaacgctgggcggaggggagcacttgcgtttctgtgttggaaaaacccggcccgtgtgtggacttgaaagtcggagcgggtctcaggccagctgcagccgtgcggtcgtgactgtggccccctgggggaggtcaccagcgccctggacgcagaggggcggcggcggacagacagaggccgcccatgcagggtcatggagaggccccacggacgctatccaggctcacgccctttgatccgcttgacgcttaagccacataaacgtgatcataaccaccaatttccaggaggaacacagggagagaccttctatcttctctccagcctggtctaattacagatggggtctctgtccacagcacagtcaaggggctttcgtgccaggaacttggaactttgaattcgacttctggataga

SEQ ID NO: 254289 - DNA, 142 bp, Homo sapiens; identical to SEQ ID NO: 209961
  chr5:1055406-1055548
  hypo

SEQ ID NO: 254290 - DNA, 460 bp, Homo sapiens; identical to SEQ ID NO: 209962
  chr5:1055578-1056038
  hypo

SEQ ID NO: 254291 - DNA, 1876 bp, Homo sapiens; identical to SEQ ID NO: 209963
  chr5:1056068-1057944
  hypo

SEQ ID NO: 254292 - DNA, 128 bp, Homo sapiens; identical to SEQ ID NO: 209964
  chr5:1057974-1058102
  hypo

SEQ ID NO: 254293 - DNA, 244 bp, Homo sapiens
  chr5:1058147-1058391
  hypo
gaggcttggggcaggtggggccgtaccagcatccaggccctgtccccggggaagcaggctgtgtctgaccagccaggggacgtttgggggccggccaggctggcaggggccctgtggggcaccgctggggccaatgacagggccggccccctgtgcgtcacttctgacaatccgaggaaaatgaaaacaccgtccacgcccctagctgtaggcgccgaaggggaagtggcgccctcaccgcgag

SEQ ID NO: 254294 - DNA, 1067 bp, Homo sapiens
  chr5:1058827-1059894
  hypo
caggcctctactcattgtggcgcccggcccagcctaaatttcccatggccttgaacgtgaaaccagagcccaagggctgcccgctctcggcagagccagcgccgcccacctggcccgagggccaccgtgtaagtcactagagggtgtccacccagcgtctgcacagcagctcatccaaacccttctgcagagcggtgacacctccaacccccacctggcccaggaggggcccttcgagctcgagcttgctgttcccgctcccggtccctcctcggtcagcatttgctgactctccacactgaacttcccatgaagccatgggtggattcttgttcctagctggacccgggctgaacccttgtgacgccagggcgaccctgccggatctcagggacctggcctggacagaaaacagaggatgtgggtcctcccagacactcccggctgcccggacccccgtggaaggggtctctgtccacggacaagctgggcggccccccgtgtcctgcatctgtgcccaccctgacctgcccggggtctgggagtggacaggaccgcagctccacacgcctttctctgttgggggagagcagcagtcgctgcttagtgattccggctgtcagcacatatggccccacacgcagacccgtgtactgcaggttcctgctgaggccaaggccccagggcaggcaaatcccctgcccctgcctccgccgtcactgcagtctcagaaaaccaacacctgcacctggtctgcagacacacgtgtgtgataccagcctggtgggacccacgaagaccccatgaggccgtgacctcacagagctgagcatcccgctaccaggtgacccccgtgctgtcctccagtgcgaagtgaccacaaagacacctgcccttggggtctcacagtggccatggggcccaggccagtataactcaggtggatacacccagacgtcctcagcagcctacagttacccacggagccaaagccgctgcagccaggcggccagcttccacgcacggaggctgcacaggtctgtgtcggggggtggggggtggggggg

SEQ ID NO: 254295 - DNA, 205 bp, Homo sapiens
  chr5:1060413-1060618
  hypo
tacttctcagaaagcctggtgtctgtggccacggcccccacgtacctctcgctcctgctcgttcttggacagctgcatctgcttcagcatctgcgacctctgctccatcattagtgtcctctcgtaggtgaaagcagatatgtcgttttcaacctagaaagttcccaagcacgtagtaagcccggtgtgcacagaaccacggatg

SEQ ID NO: 254296 - DNA, 111 bp, Homo sapiens; identical to SEQ ID NO: 209970
  chr5:1060667-1060778
  hypo

SEQ ID NO: 254297 - DNA, 395 bp, Homo sapiens; identical to SEQ ID NO: 209971
  chr5:1060818-1061213
  hypo

SEQ ID NO: 254298 - DNA, 114 bp, Homo sapiens
  chr5:1061687-1061801
  hypo
cgtgcgggatccctgtgtctcacccgccgcacccggctcatgggagttgggagcagctgtgcctgttaagcaccagtatttaaaacagcacaccagatcaggtgcggtggctca

SEQ ID NO: 254299 - DNA, 840 bp, Homo sapiens; identical to SEQ ID NO: 209973
  chr5:1062887-1063727
  hypo

SEQ ID NO: 254300 - DNA, 163 bp, Homo sapiens
  chr5:1065118-1065281
  hypo
aggagactgaggggacacgggacagtgaggggacagcgaggggaggcagagggggacagtgaggggacagcaaggggacactgaggagacacacaggggacagtgaggggacggcgaggggatgcagaggggacaccaaggggacagtggggacgaaaagggg

SEQ ID NO: 254301 - DNA, 929 bp, Homo sapiens; identical to SEQ ID NO: 209975
  chr5:1065311-1066240
  hypo

SEQ ID NO: 254302 - DNA, 563 bp, Homo sapiens
  chr5:1066841-1067404
  hypo
gggaggaagagactgcgtggaggcacaggcgcccagggtcgcccgggggcccaggagctggaggaggcaggaggatcctcccgggagactctggaggcagcgtggcctgcggtctccttcatctcagactcctgggctccagaactaggagagaacagacgccctttgctgtgagccgtgtggtctgtgtcccatcacagcagccccgggccactcagggatcagagccaccacctgcctcctttgccgagattccagcagcccctacgtcagcctgactggtatcctcaccccctaccctggctcacacctagagctccaccagcccttcacacacaaaacaacatccaatgttctcccacggccccactcctcctcaggcacccctcgtccttaccctgctctccagacacctccaccttctgcccagctgcccgggcgcaagacgggacagggtgcagggccagcagatatgctcctctttgagacttttgtttaggtcaggaaaggcctgaacacgttacccccaaggggcaccagccagcaagcggaggcaggggccc

SEQ ID NO: 254303 - DNA, 218 bp, Homo sapiens; identical to SEQ ID NO: 209977
  chr5:1068045-1068263
  hypo

SEQ ID NO: 254304 - DNA, 1478 bp, Homo sapiens; identical to SEQ ID NO: 209978
  chr5:1068563-1070041
  hypo

SEQ ID NO: 254305 - DNA, 217 bp, Homo sapiens
  chr5:1073456-1073673
  hypo
agaaccatgattacggctctggacggggctcacccatggcgggaggaggcggtcccagggttcgcccttggaaagctaatggccctcacacctcccaagcttcccggggtgcggctggtgctcccaggccttagcgcgctgctctgagctcaaagccaccgccacggctaaaacacagcagcgccacgcacagcaccgtgttgacacgctgcgatga

SEQ ID NO: 254306 - DNA, 333 bp, Homo sapiens
  chr5:1073703-1074036
  hypo
tggggtgggaaagaggcctggcccccagaccccgcccggcccacctcctcggcccgctgagcctccatgtgcttgtccaggtacgtcccctccagcaccgagcccacgatggtcaggcccttgccggccttcagctgcgacgtgaaggacagcaggcgggggtgcttcacggcctgctccgcgtccaggttcagcatcaccagcacctggggcctgcagccagggtggggcggctgttaccacggcaacgcttaccagggcacggcccatcaacaggcagggcagatgggacgggcggggcacacgacacaggtgggacgggagatacatgac

SEQ ID NO: 254307 - DNA, 902 bp, Homo sapiens
  chr5:1074307-1075209
  hypo
acacccgaggcccccgccgaggcccctgaggggacaatggcccggggcacacacctgaggcccccgccgaggccctgaggggcagaggcttcccaaagatggcctttgcttcagcaggagccaccctctcccaccccaagcccagggctgtgctggcagaggggccggctccccacacccccaccctgcagcagggacacccccggcccccagctgcgccatccgctctgcaccaggcagtgttcacaccccagaccttgcctgagcggctgaaggtgagaggcccctgagactcaaaggtccccactcaaaggccgacctcagaaacagctcttctgtgcgtctgaggaccacggggcatgggcggtgctcacctccagttcttggtgtgggggggaccgtgctccacgcgcagcagggcgtagcgggcggcgttcagggataggccacggatgccatcgccccactccttctcggccctgtgggaaaggaagtcggggtttgtccagccgcgtacctggaggctcctctcccacctgggaaaggggacttctgggggcaggtgagttggggcaaacaggacccccaggaaaagtccctggatgaggagggaggcctccatgcccacccttgccctgaagggagcccgtcctaggagccaccgggtcagagggtgctgtggctgtggagggaacgaggtctacgtccagcatgcgtgaggtgccttcctcacaggacgggggacaggaggcccatgacagggaagtggctggaccccgggcacgaggcgggtgcaggtggagggagggtgggtgctggggcacggggaaggacgcctgtggctgccgagtgagtacagacacaacctggggacacctcgcgagacacgtagcaggaatagt

SEQ ID NO: 254308 - DNA, 4913 bp, Homo sapiens
  chr5:1075472-1080385
  hypo
tgacagcgcttacccgcggtactcgatgtacttgtagatgcagccagcgatgagcatggcggacagcgcgtagtaccaggagcagatgaacatcagcgccaggcacaggctcatacccagaaaggacagggtcctgggggcggggcaagtggctcggggcggcccaacgccatgcagcccccacacctcagccaccaccacacggacactgcccctccctcagtaaaactctctgttaacactaggaaaacagtcactgacgcctgacgaccatggctgtactcaaccacctctgaggggtgacgtggctccctgggcccctgtgggagctgtcactccaaaacccagtacatagctccagctcccagcgtgcacacagcacctcggctgtgcatgcaacaaggggctgaagcgtccacccagcgcctgattcctggggaggggagttaagaagacccacagccctgatgggctacgccccaagcctgggaaggctgggctgaccacgggaggtacaaggcacatgcagacacctgggcatcctcgtaaccagaggccttcctcaggtgcagtctcatcagctgcgcaggggcttactccgcaaaggaacagtcaaggacgcgctggggtcttcaggcccagagcagctggccttgtagaggcacccagtgtcccagcctgtggggctcctgacgcctgtgctgagcggcctcaccagtggcagaggcacccagtgtcccagcctgtggggctcctcacgcccgtgctgagtggcctcaccagtggtagaacttgaagcgtggacgccagttgggggtacgtagcagggtctgcacggcgcaggccaggttcacgaacaggtagcacatgaggaagaacctgcagggacggccggccactgatacgggcccactgggcccccctgagcccccagtcactgccacctgggagaccacccttgtcactgtccctcccacctgcgccttgtctccccatgtctgtctctgcacgtgagctgactcagactgattccgaatcaggccccctcaggttccagccatcctgtgaccacctggtccatcaagagatgggccatcgtcccttccccagcagccgtctgtccagccacactgtccctggctgaccccagcgggcggctgcctggaggcctgtgtacttgtcttccccggcgcaactcccttcccggcaggatcctgactgcccacagctggccatgcctgtctactgcttgtcctgagcaggacctcccatccacactgccccacgctccaggcccatacacccatccccaggtccccgtcctgtgggggctcacatggagaggatcggggccacgctgtccagagaggcgatgaggatgccagtctcgcagatgaggactgtcagcagcagcgcccacgtgggctccccgttggccttcccgtggccaaacacctgcagggagaagggcaggaagatggggcagatgacaccacccttttaggagagaagctgcaggctggtcaggtctagcccagatgaatcttaaagacacagaccagcagaaacgcctttcacagtaggtccccgggacatcacgcggctggcctgggaagaagccctgacaaagggctgcagcccaggaggcttcagagctgtgcctacgcccggcttgcctgcaacctgtgtggccccagcctgcccccccgcctcagtttccccgaccacacaacacaggaccagcgtctccagggcactcgcggttccccagaccctgtggtgacctttctcatcaggccaccctcacctcccagaagctgaggcccacggggcctgtgtgcctgtccccttcctggacaccatgccctaggcccggctgggactgaagatgcaaccacacaaaggccctgcgggtcggcaccctgccgagggaccagcgacgggcaaggatggctctgccatccacgaccttcccacagctgcccctgggcccaggtagcaggaggagccacaatcggcagctctgggcacagcacacggacaggacccatgcgggcgtccgtgcaatcctcagagcagccacacacactggctgcaggtggctggtgacgccacctcccacgggctgaagagctcagccacacagagaaagatgtggcaggcaggcagagggcttctgaccagacaacagaccaggcacctctggacacgtggctgtgggccctcacagccgctcctgacacacccggggccgagctcggagggacctgcaggcaggagggctagaattgcctctgcccaccacccacctcccaccactcccatgctctgtgcagtggccaggggcagaatgaccaccatggggtccaagccgcgggcatgcgtcccacacacggcactgtgaggatcccgcaggggaggagagcccccgaccctgaccttccagggtccccccgacgagggtgcgggactcacctgcaggaaggggacgatgccgtcacgggcaatggcctgcagtaggcgcggtgcccccgtgaggctctgcaggccggcaccgcaggtggagaagaaggagccgatgacgatgacccagggggagggccaggccagcatgccgatgaccaggttcccctgcagggcctccccgaacctgcaggcaggcgggcaggcgggcgggcggctttcagaagtgagcctgagtcagacaaaatgtcttctcccacccagagcgaggggcccagtgcagtgggggcgactccttggaaagctgaggcccggcctccagtccccgttggctgaaacctccaccaggctctgcccagcatggccagaatgctctggagggtcttcagcgggggagggggtcctgctcacctcagggtcgctcttgggagcagggaagacccagcctggcatcagcttcagtcagggaccacccaggacccccggggccttggggctgccagacacgcacaccccatgaggatgcagggtcagtgatgacctgcctgggaccccactacttctccacttgccagcagggctgagggatctcccagggccaagcctcacccgtccacacccctgtggcctccccaggaagggcctgcgcccccagccgcatcagggcttggagttggctctgaacggttccccaggccctaggctccagcggaagagacgacacatcagaccaagggatcccaaccctgggaccaggacgccttcagctctgcacgcggacatgaagtcctagggcgatgtaatttcaaagccgaattcatcctcaggaaaacccttgaagactacaggctttgcacgaaaactgcaggtggaaacgtacttatctcgtaagaccacgccttcaatgcaggccccaaacagcacaatgcaggagagatccacagccctcgtcaaggaaaggcaggtccgtgggtgcagggtcctcaggtacggggggtggggtggggtggggtggggtgggtggggagatgcactggccagcgggccgcaggatccaggtgggcggggaccgttctgcatcccatcccatcccgggcacgtcctgtcccccgtgtcctcagcgcaccctcctggggctctgtccagcgccacagaacggggccctggggtggtggacacacacctggcctggtgcttgaccgccagggattggcaggggaccatgctgaggggacaatgctcggctggaaagaggcagccttgggattgagaagccagaggccccgcgggcccagcctgccggcggcacaccccacacaccgctgcgcatcactgtccacacgcggcagggtgactgcttctgttttctctacgatcgcatcacacagtggtgaagaagccagggtcctgacagcagcccttgccccgtctcccagggaggatgacgtggtgagagcacagcctaacctgggaagtcacatgctggtggccgagggtatgatgctgagccggggagggcatgggggcctccccccaggcagaggctggaaccctcgcctgcacccctccaaggatacagatgaaagacgtcgtcactatggccaggatggtccccgtggggatggacttctgtgcatccttgaggtccccggaccggtttgaacccgccatgatacctgtgaacatggaaaatgctgcaaagacccatctgaggagtcagtgccatgtgatggcagcccctgcccagaaagctggaaaggcggtctctggggagaccccgagcgtgagctgcagccgaggctgcagtccaagctccgccagcccacgctgcaatactgcggctgaggggatgcgggcccaggcacgcggatgagcacccacgtctactgctcccctggatccgaggacgagaaccgaccccgtcactgacccccacgccccccacacccagggcttctctggagcctgtgttaatcccatggccaagggtcagcccagagacggtgctgagcaatggctcacaggcccccaggacctaaggactttgggaatgagatcctagaacgactcagcccagccagccaggccagcagacgctgcgacccctcccgctgtggcaccaccttgctctagggagccacggccggggatgtttccacacaatcggctcctacaaagctctgggaagccgggtcggtgggggccacttcacgcctggctcggtcccatccaaggcgcagcctgaagcacccattgctcggggtggcctgggaggcagcagagcccacaatccagtgccgcggagacacccggagccacgcagaggctctgcccccacgccctccacccgcggctcagagacacccggagccacgcagaggctctacccccacgccctccacccgcggcgcggagacaccaggagccacgcagaggctctgcccccacgc

SEQ ID NO: 254309 - DNA, 89 bp, Homo sapiens; identical to SEQ ID NO: 209981
  chr5:1080415-1080504
  hypo

SEQ ID NO: 254310 - DNA, 93 bp, Homo sapiens; identical to SEQ ID NO: 209982
  chr5:1081414-1081507
  hypo

SEQ ID NO: 254311 - DNA, 313 bp, Homo sapiens
  chr5:1081824-1082137
  hypo
cgcccccgcgtgcgcgtacgtactccacaggttctctgccgggcaaggaagatcccatgggtttctggcaccttctgtgcagtgcccccgccatggggccgcccactccccggcaggtgccactggtggccggaggggaagggtcacagcttgtgcgccgcaagcaggctccaattcaaacacgctttcgagatggtacctctgggaaagctgcctgtctgcgtctacggagggaaggtcagcactaaagagaagcctcatgtggggaacaacatactcctggaaagcctgggcttcccgtctcgggttctgg

SEQ ID NO: 254312 - DNA, 734 bp, Homo sapiens; identical to SEQ ID NO: 209983
  chr5:1083626-1084360
  hypo

SEQ ID NO: 254313 - DNA, 556 bp, Homo sapiens
  chr5:1084390-1084946
  hypo
ctaaatgaagcgttctagacgtaaacaattcacacgttttccaccgcgcggtgccgagtagtgaggtggaacccagcaacctccccccgcgccagcacagccacgctgcagccgctccctccccgaggccctcggcggcgtcctggccgggtcagctgtcacaatctcagtgtctgagttcaagccaccctcgtgccacgtgccaacggccaagagcacaggagtgccgcccccgacgtataagccaggcctgtacgtggaaaacagtctacacagggccgtagcgtcaagcatcggcagggggtctcaggacgggtccccgagggggagggcagctgtgcttccctaaaacgggcttgtggggttgcagctgttctgcctccctctgttttgaggcctctatgaggctgttccttcaggggctccctccacgcagagacggcaaaaccgcgggagcctcaaggggcttggctgctggccctttctggacctgctccctgcgggctctggtggccactcccatgttccaggaccctgggccgcctcccagctgctc

SEQ ID NO: 254314 - DNA, 1658 bp, Homo sapiens; identical to SEQ ID NO: 209985
  chr5:1085200-1086858
  hypo

SEQ ID NO: 254315 - DNA, 2216 bp, Homo sapiens; identical to SEQ ID NO: 209986
  chr5:1087080-1089296
  hypo

SEQ ID NO: 254316 - DNA, 241 bp, Homo sapiens; identical to SEQ ID NO: 209987
  chr5:1090422-1090663
  hypo

SEQ ID NO: 254317 - DNA, 166 bp, Homo sapiens; identical to SEQ ID NO: 209988
  chr5:1091065-1091231
  hypo

SEQ ID NO: 254318 - DNA, 281 bp, Homo sapiens
  chr5:1091614-1091895
  hypo
cacaaactccagcacacaggcggacagacagggaaggcctgtggctcctgagttttggtgccagagtaccagcctgagcccatgaggcctcaaggtagtgcccagcatgcgtgaaaccccagaaaggtgctgagtgctgagcccggcaatacccagttccacagcgtccacgtgcggaaaggtactgagtgctgagcccggcacaccaccacccaattccgcggcgtccacgtgcggcacggcaatacccagttccgcagcgtccacgtgcagaaaggtgc

SEQ ID NO: 254319 - DNA, 37 bp, Homo sapiens; identical to SEQ ID NO: 209989
  chr5:1092774-1092811
  hypo

SEQ ID NO: 254320 - DNA, 185 bp, Homo sapiens
  chr5:1094019-1094204
  hypo
gggttcccgtggggccggagcaccctagatccaggaaggagcccagaaggcaccagccgaggagcacgtcccagctcaagtgcgggactgggcccccgccacagccttcaggacagggaggccccagttccttccacgtggtgtccagtcctgtgggaggccccggcctgggggcccccaggggc

SEQ ID NO: 254321 - DNA, 637 bp, Homo sapiens
  chr5:1094548-1095185
  hypo
atttcccagggtgcacgctagtcccaggacacatgctagccccaatgcgcaagctatccccagaacacaagctatccctaggacacaagctatccccagaacacacgctagctccagggcatacgctatcccccacacacatcatcattgaagacaaagcccctgaaagcctcggcaagtgagctgttcagcccagggcaagggtacctccctctggcgttgaaaatctctcattcagccaaatgtgggcaaaattctcactcttaaaagtcggggtggcacctcctagccttgctgcttaatccgccatttcggagggacacagaggacttcccactgttccctgttgaggacgccgcccacaggctctctaggtaaatgagcccctcctgagtctttcaggaaggctgggccggcgacccctccatggggctgagcccaggcttcgaaccagggggtaatcctagcagctgcccgagagcatgagcaagggaattggtggggaggaggacttgaggctccctggcaggttgaggcccgatggcccatgtgacggtgttagaagatagggtcggtaggaggtgggggcggtaggaggcggggggccggtaggaggcggggccggtaggaggtgggg

SEQ ID NO: 254322 - DNA, 417 bp, Homo sapiens; identical to SEQ ID NO: 209991
  chr5:1095613-1096030
  hypo

SEQ ID NO: 254323 - DNA, 78 bp, Homo sapiens
  chr5:1114068-1114146
  hypo
tgcagggctcccgtcgcacatccaagctctgcttcacaccccaggaccccagggccggctgcccgccatgtgctggct

SEQ ID NO: 254324 - DNA, 253 bp, Homo sapiens
  chr5:1114643-1114896
  hypo
tggggttaaatgtgcgttgtgtgactttcagtgctctcttcctacccacctccatccctctgtccttttctgtacccggcacctgttgtaggaagtggccctcggacacgtggaggtacccgaggcctgggttggagctgcatctttcggtgcaggcctctgcgtctcctggaagtgggcacctggagccaggggactgctgggatccgggtccagtcccctggcaaggccgggggctcgcagagggagccac

SEQ ID NO: 254325 - DNA, 664 bp, Homo sapiens; identical to SEQ ID NO: 209994
  chr5:1115142-1115806
  hypo

SEQ ID NO: 254326 - DNA, 630 bp, Homo sapiens
  chr5:1116660-1117290
  hypo
cagtcctgtaattcacggacactgagtcttcgctcaagttccctctggaagattccgtggatgagtccgacacactcttcccctcactcaggaggctccaggatttttagaccacgtgtgtggctttccttctctcaaagtgtaactcacataatgttactcagaatctcacacggacgcccgtgagttgcagacacagggaaggttcgcatctcctctgaagtccaagctgcccagaagcccacccaccccccgccagctctcgttcctgctccacaggtgacttctttcccgtgaagcttgggcaaatgtttgctgtcggctcagggggaaaggccatgccagggtccagatgggctcaaaacctcccaacctggcagacacgcagcccttcagaaatggaagcagagcccaggacacgatgtggccaatcctctctcagacgtcataaagagctgggtttggaagacgaggccaaccctcatggatgccgcccccgaccccagcaacaccatgagatcagggatttgctggctctgtctcagagccgcggagggtcctgctcaaaccccagagccgtggggatgggctggggggctggtggggagcgtactgcgaggggccactgag

SEQ ID NO: 254327 - DNA, 42 bp, Homo sapiens
  chr5:1119925-1119967
  hypo
gtgatgggcaggctggggggcggtgcccagctttgggccctg

SEQ ID NO: 254328 - DNA, 209 bp, Homo sapiens; identical to SEQ ID NO: 209996
  chr5:1120339-1120548
  hypo

SEQ ID NO: 254329 - DNA, 123 bp, Homo sapiens; identical to SEQ ID NO: 209997
  chr5:1120578-1120701
  hypo

SEQ ID NO: 254330 - DNA, 31 bp, Homo sapiens; identical to SEQ ID NO: 209998
  chr5:1121007-1121038
  hypo

SEQ ID NO: 254331 - DNA, 222 bp, Homo sapiens
  chr5:1122179-1122401
  hypo
gtgccccgggcccacggcaacgcagcccccattccagagagccagaccctccagctctcaagggaacagcagggaagacagggatggtgtggggggacactgtccttgggaactttccctgcccccaccgcctgcccttgcgcatgggcctccctagaaacgtgtcaccccaacccttgagaaaccagaacccccggcagggctgtgcgaggcggggtggga

SEQ ID NO: 254332 - DNA, 195 bp, Homo sapiens; identical to SEQ ID NO: 209999
  chr5:1122644-1122839
  hypo

SEQ ID NO: 254333 - DNA, 159 bp, Homo sapiens
  chr5:1124659-1124818
  hypo
atggttcctgatggaaacaccgaaatccagagctcagagaacacggactggcggggcaggcggcagagccttgcggcgctggacacattgaacactcagcgcccagcacaggggagggaggccctggagtccctgatcgcagcagacctggaccatcaa

SEQ ID NO: 254334 - DNA, 813 bp, Homo sapiens
  chr5:1128888-1129701
  hypo
gccccaagtgcctgcctggtctctacacggcttccagccttttcctagaatggatcacatgtttgcatacacacatatgtgcacacacatgcagaaaccagacccactcccaccatccacccacacaagctggaccctcagtcacgcggctccctgccacgtgctccatccccatgtgcgtccaacacacctgccagctctgctttcagctttccctgatggccaagcataccccgctgcccctgcaaggcttgggagcactcctgggatcccctgcaaggcttgggagcacccctgggatcccaagtctgatggcctctagaagtccctctcctcaaacctcggtcacagctgctgcctagggcctgccaggccagggggacagccacgtctctcctagacacacgaggacacccctccaagaggcctccctcagccagccgccactgctgccggcccctctgtgcatccccaagggctgagctgttgcagggtacaacgcctcctggctccaagtgaaagtcggaggtgggcaggacgttcaggtaacacccccacctccgaagtccagtctcacagagccttagcagccacccaaggcaaggaggtggccatgggccaccaggagtgtcccgagcatcccaggcccacaagggccagagaaagttccgggcttcccctagcgtaagggacagaaccaggcgccctcccctcctggccccctcagctttcctgtgacgcccaggaccaggaccaggaccagggaaaccacagcgtcccaggcgacagggtggagggcggctccaggagccc

SEQ ID NO: 254335 - DNA, 70 bp, Homo sapiens
  chr5:1140155-1140225
  hypo
ccaggtctcagggcatcaaacgctccgaggtcggtgaccaggcaccaccgccttggcctcaaccagcacc

SEQ ID NO: 254336 - DNA, 940 bp, Homo sapiens
  chr5:1143150-1144090
  hypo
caccacagagcttacggctccatctgtgacacgggccttccttccctgagggccccaacacagcctcctgggcaacatgcccctccatccgcagggtcagaagccgcagctcaaggatcacctgcggaaggtggcatttcccaagaccggagcttcccgacatcccgccacctcccgcagcgctggtgccagtcctgtcggataaggggcaagtgtaagaccggcctcatcagctccagcaattgtaacaaagcgccatgggcgggggcttcaacactagaaattgttccctcgcagcctgggggctggaagtcccagaccaaggggctgctgggcggtttctcccaaggcctattcatggcccgcagacggtggcttctcctgtgtcctcccacggccgctcctctgcacacacgcatccctggtgtcgctttctcttcttacaaggacacgtcctattgggtcagggccttcctcacaacctcatttaaccttaagtccctccctcaaggtcctagctccagatacagtcccgttggggctgggcctcagctgcgaatctgggggcacgactcagtcggcagctgtctgtgtcctgcatgcgcctccactgaccttcccagggttctccctgtgtcctggtgctgcttcttcacccagagcgctgccacccactgctgagcttcagacatgtgacctgcccagtcccctctgcaagccctgcaccttcctcagtaccaaccagcaaacccgtggctgcaccggggccagcagacactctcgggcagagtgctgggcaccctggcctcctgggcaccctggcgcttggcaccctggcctcctgggcaccctggcgctgggaaacctggcctcctgggcaccctggcgctgggaaacctggcctcctgggcaccctggcgctgggaaacctggcctcttg

SEQ ID NO: 254337 - DNA, 322 bp, Homo sapiens
  chr5:1154638-1154960
  hypo
cacacacatagacacacacacggacacacacaggcgtggacactcacatggctcccggcagtgctgcaggaggtcagcacagagacgtgctgaggagcctgagatgctcgctcctctgggccatcgcgtgtaaaggctgccctcgctgtggactctcacatgtgtgacatacatgaacaggcgaaacggacacgcacggcccccacacacgtgagctgggtcccccagggcccgtcggagcccttctgcctgggacctgcctcatccccggcccctcacagggcaagacatcgcagtaaccgcaggtcttcagagcagccta

SEQ ID NO: 254338 - DNA, 284 bp, Homo sapiens
  chr5:1161169-1161453
  hypo
ccaggtaaggctgccggcccctggagggtgagagacctggagagaggtctcagcccagagcacggcccagaagggccgataagcctagaccagctggccctgacagtgagcagggataagtaactgcagctcgacttgttacgcagtgttactgacccaacagcagactgatgcacttgtcctgcacccccttgccgaggtaaatcctcccagggcctcagcctcctcacatccgaagttgggagaacaatggtgcctccgccccaggacgggctcaaggttga

SEQ ID NO: 254339 - DNA, 86 bp, Homo sapiens; identical to SEQ ID NO: 210001
  chr5:1177291-1177377
  hypo

SEQ ID NO: 254340 - DNA, 196 bp, Homo sapiens
  chr5:1193748-1193944
  hypo
gcagcatctcccctcgtgggcgcttacctcggagaactccgggcatgaatgtgcgaaaggcaggaacagacgtccacggcggctttcatcctcatggcgcaaacgggacccctaccgtcagcaatggagccgtgaaggagctgcagccgtggacctggagcaggcacagcgagccagggtgcgaggcccggacagc

SEQ ID NO: 254341 - DNA, 231 bp, Homo sapiens
  chr5:1201777-1202008
  hypo
gtgctgcccaaccccggcctagacgcccggatcccgtccctggctgagctggagaccatcgagcaggaggaggccagctcccggccgaagtgggacaacaaggcgcagtacatgctcacctgcctgggcttctgcgtgggcctcggcaacgtgtggcgcttcccctacctgtgtcagagccacggaggaggtaggctggccgggcggggctgcgggcgaggccgtggccag

SEQ ID NO: 254342 - DNA, 414 bp, Homo sapiens
  chr5:1207166-1207580
  hypo
catagcagggtgctcgggttcaggtaggagacgcactgcgcggtgccaggccagcctcggaagccgggcgccacggcctgcactcacctctgctgttccctgaccctcgtccttctccaccttcgagtgaaggacccaccggtgtccacgctgccctggccggatgggagccctgccaaggctgtgtccctcctcgccctctgccgagcaccttgggcaccgtcatgatgcccaggagtggctgcacctcatcctgtgtgtagcctgggggccttgtggctgagctgggaggccgtacgtccacccgcagagggagcggtcagggcagcccgcttggccgggcgagtggagttcatgggcgcggccaggccccttctctgggtgctggctgccgctgagctctgagaggaagct

SEQ ID NO: 254343 - DNA, 237 bp, Homo sapiens
  chr5:1210303-1210540
  hypo
aggaaggtgtgagccgggaaggcgtgtgcagggcaggcgtgtgccaggaaggtgtgagcctggaaggcgtgtacaggctgcaccacggcatcagctgcatgatcccggcctgcactgggtcggcccctcagattctggagtagcccatcccagccacaccctgtgccagccctgggacctcctgctcagagtggggatgggtggccagtggagggtgtgcctcggccccaagcctca

SEQ ID NO: 254344 - DNA, 236 bp, Homo sapiens
  chr5:1212420-1212656
  hypo
atgtggacgagtgcgccaggagctcccctgtggactacttctggtaccgagagacgctcaacatctccacgtccatcagcgactcgggctccatccagtggtggatgctgctgtgcctggcctgcgcatggagcgtcctgtacatgtgcaccatccgcggcatcgagaccaccgggaaggtactgcatgggcccggccaggctgcaggtgctccagagggcgggtgcgggcagccc

SEQ ID NO: 254345 - DNA, 117 bp, Homo sapiens
  chr5:1213550-1213667
  hypo
ccatcccacatgtcccgccctccgcaggccgtgtacatcacctccacgctgccctatgtcgtcctgaccatcttcctcatccgaggcctgacgctgaagggcgccaccaatggcatc

SEQ ID NO: 254346 - DNA, 287 bp, Homo sapiens; identical to SEQ ID NO: 210002
  chr5:1215723-1216010
  hypo

SEQ ID NO: 254347 - DNA, 162 bp, Homo sapiens
  chr5:1216578-1216740
  hypo
gctggcgctctgggcgggatgcggatgctgccctgggctgtgtcctgacctgggacctcatcgccagccgccatgacactggtctcgtctgcagcaacaactgcgagaaggactcggtgattgtgtccatcatcaacggcttcacatcggtgtatgtggcca

SEQ ID NO: 254348 - DNA, 147 bp, Homo sapiens; identical to SEQ ID NO: 210003
  chr5:1216988-1217135
  hypo

SEQ ID NO: 254349 - DNA, 758 bp, Homo sapiens
  chr5:1218542-1219300
  hypo
acaggagcagaaggcgtccgggtggttgcgccttggtggttcttacccgagagcctgtctgtgagcacagcctgctctaacccggccgttggccacctgccttccgagcacgtccagggtatgcgtttattaacaggtgactcgcgtaacaccttgggtacgtggctcagctgcactggatcagggctgtgcaggctgtgagatctcagaagctccctgtgttgggagagcccgtctgtgggcggaacggggctctgagtgccgcttggtgatgggatccacgtgctggtcctgatgcatagttcggcttttgaaaatacactttgggcctaaaagacaagatctagctatttcatgacagctcagacctgcccgccccatgctgcgtggcttggcgacgcacgagacctcgggcggggaggagacggagcccacggagggcagaggccctggtgactgtgtgtcatccgtgcaggccgtggagggcacaggcctggccttcatcgtcttcaccgaggccatcaccaagatgccgttgtccccactgtggtctgtgctcttcttcattatgctcttctgcctggggctgtcatctatgtttgggaacatggagggcgtcgttgtgcccctgcaggacctcagagtcatccccccgaagtggcccaaggaggtgctcacaggtacgtgtgcagtcgggaggggtccccatggcaatggtgccacctgtgggatggcagcccccggctgtgtgaacagct

SEQ ID NO: 254350 - DNA, 527 bp, Homo sapiens
  chr5:1219330-1219857
  hypo
cgtgtgaacagctctgtccccggccgtgcgtgcagcccccaggcgtgtgaacagctctgtccccggccgtgtgtgcagcccccgggcgtgtgaacagctctgtccccggccgtgcgtgcagccgccgggcatgtgagcagctctgtccccggcagtgtgtgcagcccccgggtgtgtgaacagctctgtccctggccatatgtgcagcccccagttgtgtgaacagctctgtccctggccgtgcgtgcagcccctgggcgtgtgagcagctctgtcccccggcctgcaggcctcatctgcctggggacattcctcattggcttcatcttcacgctgaactccggccagtactggctctccctgctggacagctatgccggctccattcccctgctcatcatcgccttctgcgagatgttctctgtggtctacgtgtacggtgtggacaggtaggggccacggtggggacaggtgcctctaatgcagaaaagccaggtcacagggcgttcctgtgagggaggacccgg

SEQ ID NO: 254351 - DNA, 129 bp, Homo sapiens
  chr5:1219887-1220016
  hypo
tgactcggggcctcggccggccacagaggctggtgtagacctgtcctggcgggagcagagggcatcagcagggccctggcatgccgataatgggagctttgtgttgctgggagccgggaagcccagtgg

SEQ ID NO: 254352 - DNA, 237 bp, Homo sapiens
  chr5:1221116-1221353
  hypo
catgaccaggagggagggatcgggccctggcaaggggaggccgggcacctcgcagcacaccatctgttcgggtagcagaacgtacagaaagcttagcgagttgaagcccagctggtagcagcagtgacagctgtctctggccttggcaggttcaataaggacatcgagttcatgatcggccacaagcccaacatcttctggcaagtcacgtggcgcgtggtcagccccctgctcatg

SEQ ID NO: 254353 - DNA, 118 bp, Homo sapiens
  chr5:1222816-1222934
  hypo
cacacatatggacacgtgtggatatgtgtgcgtacacgtcgctgggacacatgcctgccactcggggcccagctgccctctgtgtttgtccttgccacagtcacggggtgcatgtgca

SEQ ID NO: 254354 - DNA, 86 bp, Homo sapiens
  chr5:1223196-1223282
  hypo
tgggcagttgctggcgattctgagaaaacttggccgcatccaccggggccctgcctccagtcggccgctgccgagtctctgcgttc

SEQ ID NO: 254355 - DNA, 84 bp, Homo sapiens
  chr5:1223582-1223666
  hypo
gcctgccctgcccccgtcacgggatgggcccccattggggttcaacattccatcgcagccaaaggcagtcggcacttgggacat

SEQ ID NO: 254356 - DNA, 818 bp, Homo sapiens
  chr5:1232524-1233342
  hypo
ctcctggatgagaggtggggcgggggcgggtccatgcctgtggtacggaagcggccaggccaggccggcgggtggggtggcagggagcccttgggtgtgtgtgagaagcagcggtgactcggggagaattagagatggagaacatgtgtgccaggacatcccggaaggacctggaagctggtgttgccattcacatgtgaggtgtgagggaggcctggctttcagctgcgcccttcagcatgtgttattttatgttgttattttgttttattctcactgcttctgggcagagggagctgggaaggagccccggggccacctgacatggtccctgtccacagggctgggctgtgtcacgctgtccttcctgatcagcctgtactacaacaccatcgtggcgtgggtgctgtggtacctcctcaactccttccagcacccgctgccctggagctcctgcccaccggacctcaacagaacaggtgagctgggcgccgcctgctgtgtgggtccgtgcacggccgagagaggcatgtgctgcagcgtgtccagcatcagagcagctgcgggtggcggatgctcaccgcggggggagggccggggaaccggttgctctgtgtgcacatgcacgcgcctcggtctccccaggagcacacgtgcagtccagttcttatgacctccacgctgtgctgtgcttccctgccaggtccggaccaccgaggtccccttgcagccatgtgcatggcgtggtcatgcgagggcactgctgttgttagatttaagacgttaggtcggacgccgtggctcacgcttgtcaaccc

SEQ ID NO: 254357 - DNA, 105 bp, Homo sapiens; identical to SEQ ID NO: 210006
  chr5:1253819-1253924
  hypo

SEQ ID NO: 254358 - DNA, 228 bp, Homo sapiens
  chr5:1261770-1261998
  hypo
atgcatttctttgacgctgctggtaggaccttcccaagtgtgcatcagacgtccatttcttctttcacagccatccccaacacgaccttgggctccggctcaccctgagcctatgggtctgacttgtgtggggtcctcgggcagagcaagggccccggagcaggaggccaggctgcaatcatgcatgccctttgccagctgggtgaccaagggcggctgctcccctgg

SEQ ID NO: 254359 - DNA, 303 bp, Homo sapiens; identical to SEQ ID NO: 210007
  chr5:1264407-1264710
  hypo

SEQ ID NO: 254360 - DNA, 54 bp, Homo sapiens
  chr5:1266473-1266527
  hypo
acttggcagagacaacgctgcggtgccaggggcaggacacggggggctcaactg

SEQ ID NO: 254361 - DNA, 399 bp, Homo sapiens
  chr5:1269045-1269444
  hypo
acagaaccagacacttgacccggaatgaatgcttaaccggactccttttttttttttcaaggaatttgtccacggtgaaagactcatgaccctacatgtagccgctgcgcgccaacggatacaaccttgcccctagtttcagcatgaccaacgagaagcagaaactctccaaacaaggatgccaagggtgcgttttcagacaaacagtgagagcagaatagccccgtggaacctaaaggtgcacacagaaggcatggctgccacgcgaccctcagccatccccagagcccacaggacgccactcctgttgctaagagacgcttgcagcctactgcaaaaacaagacctgttattttcgggaagcgctataggtggtcaccttaaaaagaggctttccgg

SEQ ID NO: 254362 - DNA, 421 bp, Homo sapiens
  chr5:1270694-1271115
  hypo
caccacaggccccccgagaggagcaaactacacggtcaaccccgcactttccagatgggaaatctagtcacagagagaagagcccgcgccctcgcgggggtcacacgacagggacaggaatgagaatcggataaaatccttttgtatcgggagagagagatacaagcgtgtgagagccgggtgtccagcgtcagtagtaacttggagctgacaagctgcaggctcaaacgctcggcgcacacctgacccagacacaccccccgcccctcgtcctccacgcaggagcaactccacaccccgcttgccatttccaggcctcgtgtggcacctgctccgctccggctgccgcaagccgagccatgtttccggggcctcgggagcctgcagcccaggagccggagggggcgggggccagaaaagg

SEQ ID NO: 254363 - DNA, 322 bp, Homo sapiens
  chr5:1272061-1272383
  hypo
ctggagagaggccgcgcagtcaaacgtgagcaggtgcctgaatgcagcagctgtcgcagcctggcatggcccagctcagatttcgccaaggcacacagctcatcatgcccccatcacagctcattccccccactgccccccagggccaacagtctgtccggtcatgagcccagtgattgcccaggggaggacccactgctgggagtccgtgcccaaccctgcagggcagtgcccagacctgctcgatgacgacggcatccctcagcgggctggtctcctgcaggtgagccacgaactgtcgcatgtacggctggaggtctgt

SEQ ID NO: 254364 - DNA, 548 bp, Homo sapiens
  chr5:1277142-1277690
  hypo
cgccccatacagagcggggcaggacggacagccacctcccgcaagagccccggggcggccagcacgggaacactgtgggcacgtgggcatcaagagagccccctgcacaatcccacgaggcggcttcgacaccttcaggccagcggccaccggaggcatcgccctcacaagcagccagccggggtgtcactgtcacccccctggaaactcccacaacatccctaaagcacgtctgtgacccagcaaccccacccctggaattcacccagaggcgagggcctctgacccctgggacactcccagaacccagcaggctcacagcaggcgcagccgtgcagtccgcacccaggagcctccacagcagcgggaaggatacatccacgtggcgagttccacaacggatgccattcatggacagaacgcacagctgaggcgttcagcatagctgaggctcgaaccccaaaacccacctcctgcctgatctcactcacatggagaccgggagagggagaccatggaggtcgaggtcggaacgagggtcacggtgg

SEQ ID NO: 254365 - DNA, 265 bp, Homo sapiens
  chr5:1279435-1279700
  hypo
ctgggcccgcacacgcagcacgaaggtgcgccaggccctgtggatatcgtccaggcccagcacagaggcgcccaggaggccggggcgccgcgcccgctcgtagttgagcacgctgaacagtgccttcaccctcgaggtgagacgctcggcctggcggggacagcatgggagacagtcaggaaagtggatccggccaagtgcccaccccaccatagggacccaggggagaagcagcccctccccagtgtccccagccacccagacc

SEQ ID NO: 254366 - DNA, 242 bp, Homo sapiens
  chr5:1282495-1282737
  hypo
gtgttccaggacttcgagaagcagaggcctggcgtggggatacagtacctgattccaatgctttgcaacttgctccagacactcttccggtagaaaaagagcctgttcttttgaaacgtggtctccgtgacataaaagaaagacctgagcagctcgacgacgtacacactcatcagccagtgcaggaacttggccaggatctcctcacgcagacggtgctctgcggccggaacacagccaac

SEQ ID NO: 254367 - DNA, 140 bp, Homo sapiens
  chr5:1294176-1294316
  hypo
ggtgacaccacacagaaaccacggtcactcggtccacgcgtcctgcccgggtgggcccaggacccctgcccaacgggcgtccgctccggctcaggggcagcgccacgcctgggcctcttgggcaacggcagacttcggct

SEQ ID NO: 254368 - DNA, 111 bp, Homo sapiens; identical to SEQ ID NO: 210010
  chr5:1318452-1318563
  hypo

SEQ ID NO: 254369 - DNA, 69 bp, Homo sapiens
  chr5:1319612-1319681
  hypo
ctctgaacacctggcgaggttgagtgtggagacagggcggggacgggagcactgcgctccccaagggcc

SEQ ID NO: 254370 - DNA, 213 bp, Homo sapiens; identical to SEQ ID NO: 210011
  chr5:1326183-1326396
  hypo

SEQ ID NO: 254371 - DNA, 278 bp, Homo sapiens
  chr5:1330258-1330536
  hypo
ttccagaacactgaggccatcgggaacaagcacacaggcttccacagaaggtctcaggtcccggggctgaaagcctttcctgagtgcgtggaggcacatggacctcagacagttcaggtcactgcccggaactcacctcaatggcggctccaacacccgccgggaccagcaccagcaggctcgtctgctcgtccagcaggaacagaaagatgaccacggtgctgaagcagcgccagagcactggggacaggatggtcgggctgggagggggtgcaggg

SEQ ID NO: 254372 - DNA, 282 bp, Homo sapiens
  chr5:1331474-1331756
  hypo
tggcaggccccacacgcccaggcctgcgctggtcggggaaggaacaccggcgggaggacggggcgagggaaccaagacaggggatgtgaggccccagccctgctcagcgcccatgagcagccgggaaggctcgagaggtccatgcatctcactctccacagcccagacccagaccccatgcacgccagagtccgcagccaggccctgagctgtgcagccgctggaggccctgagccgtgcagcctctgatggtcccaccacaattgccgcaacggctccctg

SEQ ID NO: 254373 - DNA, 112 bp, Homo sapiens
  chr5:1335182-1335294
  hypo
agggagtacacggcgtcctgcatgtggatccagaagcgcagccgccccagtgagaccttgtcgtaggacacggtgaggggcagctcggtggtggagcggtttatgacctgat

SEQ ID NO: 254374 - DNA, 234 bp, Homo sapiens
  chr5:1342379-1342613
  hypo
gaagggcagcagccacgagggctccaggtgcctcggcccacactactggaacctcagaaatttaatgtgggtagtttttttgggtgttgtagttttaaggataaaaagatgatcagccacaaaggactgactttcaaggctgtcagtcctgactgtgtggcatccagcacgagctgaggaaaggcccggcgagctgctacaactgtaggcctcggaccaggtgcctggctcttc

SEQ ID NO: 254375 - DNA, 434 bp, Homo sapiens
  chr5:1346149-1346583
  hypo
ggcacccgaggccgcgtgcaggggcggtcctgggccaccaacccctggaagctgggccaggagcttcggagccatccgaggcttttttcgctcctctcactctcatgcacctagttaccctccccacagagtcttctcacggcgcggttttcggctaccattgcagtggtgtctgactacacccagtgcctctatcgttcccccctcagtctgttctcgcttcttggcaaacctgtccttggaaagccctctgctgactcctgttaccctgatcaaatgcatcctcctcaggaggctcgtgagccctttgcagggtggcccaagaggcatcacgccctgctctccagccactcttggggtcccctacagggccaggcgtcccacaccagcagcgggtgctggtcctgccacagtctgtgcgacacgtgaatgaa

SEQ ID NO: 254376 - DNA, 39 bp, Homo sapiens
  chr5:1381049-1381088
  hypo
ggctgcctcatgggacgccacatccgccagcaccctggt

SEQ ID NO: 254377 - DNA, 99 bp, Homo sapiens
  chr5:1381148-1381247
  hypo
ggcttaggcgtgttgtcacagcagcccgaatggactccagcagcagagcagccagggctgcacgtggtgcgtgaacacacccgccgccctcctcctcct

SEQ ID NO: 254378 - DNA, 353 bp, Homo sapiens
  chr5:1409808-1410161
  hypo
gaaggcgaagccggcgatggtacgtacgttggtgacgcagaacagggacaggaggaaggtcgccaggacgatgaagagcgtgaagagctcacggtgtctgtgcagcagctggaactcatcgatgagcccggtgatcactgactccataccacccatctgcacacagagcacagggtcgggctgcaggctggcggcgctcctgaccgcagcctgggccaagacctacttgtcacccagtggacgcacacccggggatggacacggaacaggggccacatggccgtccagggtgcaggatgcctggtagtgaggacagctgttggcgagggcttctatggcggcacgaccgcagg

SEQ ID NO: 254379 - DNA, 245 bp, Homo sapiens
  chr5:1416071-1416316
  hypo
tgtctgaaaggccacgcagctcacaggtttgcgggttcagtggatccgccctgttctcatccagggacaccctatttctggaagtcagcgacctctccctagtattgatgaggcccctgcctggccctgctaggggctcacctgtagcagttgttggtgaacttgttgtagctggagaaggcgatcagcaccccgaaccccacgcccagggagaagcacacctgggtggccgcgtcaatccaaac

SEQ ID NO: 254380 - DNA, 74 bp, Homo sapiens
  chr5:1416944-1417018
  hypo
cctcggaacagcacggcctcatccacacatgacatgaccgcagcgtcctaacaaccctcggaacagcacagatt

SEQ ID NO: 254381 - DNA, 211 bp, Homo sapiens
  chr5:1431159-1431370
  hypo
tctggggagaatcgcgcaaacgtcctctcctcctctccaaaatgacggctgagtcgaagagtccgcctgtcagaacggcgacccggcacgaggccccaggcccggctggcgagggcaggaagatgtggatggcacccgccagatccagattccgggaggggtccaggggaaacagggaacccctgggtgtcagtaacgacccttccaggct

SEQ ID NO: 254382 - DNA, 165 bp, Homo sapiens
  chr5:1432518-1432683
  hypo
taccatgggggacctggctgcgccatctctcccgttcccgaggacccgactcccacttactcaaagtactcggcagcaggtgtggtcccaaaagtgtcgttgaggcccgagctgtctccactggagtcaccaggatgggcatccgagcagttggggctgttccag

SEQ ID NO: 254383 - DNA, 241 bp, Homo sapiens
  chr5:1439038-1439279
  hypo
ccctcagatactctccaacacggaccacggtgcaagctcagcatcgcttacgactgcaggctcagaggcagcactcctctctgaaacacgtccgtgccgctggccagggccaggcaggacacaggtaacgcgtgtgtcttgaactgttagcctgggttcactgcaacgccggatttgacacgcgcccctgtctgtctgtaacaacaggcctgggtcttccgttggctgctgcattcttcca

SEQ ID NO: 254384 - DNA, 105 bp, Homo sapiens
  chr5:1462598-1462703
  hypo
agtggtgtccgcacggctgtcaccagacatcctcatcaccctccgcaccgcacagcccagcgtctccttccacaagcaaaagactgcggctcctctctctgcagg

SEQ ID NO: 254385 - DNA, 235 bp, Homo sapiens
  chr5:1462733-1462968
  hypo
cgccagtcaccatggaaaccagggctgacaggaagatgcagccgcttccagcagggacctggcctgagggcaagggaggagcggcacggcggcggctgccttgcgcttccagctcgggccctgctcatttgaacaatatccaacctcggactggagtttaggctacagtgaaatggattacgttatgccgaaacagaaacatcaaactgccaacgtttataaaaaaagaggggac

SEQ ID NO: 254386 - DNA, 242 bp, Homo sapiens
  chr5:1463474-1463716
  hypo
cacggggcggcaccggtgccccccgcccggcagggaacctgaccccacggggtccaggccaggcgggggatccgcgtgcgcgccctccgattctcgcacagtaagcgtcggttctgcaacacacttcacaaaggaacaagatacaaacagcccccgaggcccctggaactcgggctgaagacagtgcctgtacagcaggagtgaggagcggagcccagaggtcactcgcaaagaggctcatg

SEQ ID NO: 254387 - DNA, 236 bp, Homo sapiens
  chr5:1467132-1467368
  hypo
ggacacgggggactcgaacttccatgtggagccatgcagcagggccctgtgccttggatctggccccctccaggtgcctcgtggacacacagcagatgcttctcgggcaagggctcagacgctgcccaccccacccgtgatagctcagcaaaccaaccagcacctgtggctgccactgggaggccgcggaagggtcctgcctgggccacgggcgagcgcggcgcaagcttgggctg

SEQ ID NO: 254388 - DNA, 159 bp, Homo sapiens; identical to SEQ ID NO: 210014
  chr5:1468060-1468219
  hypo

SEQ ID NO: 254389 - DNA, 401 bp, Homo sapiens
  chr5:1476320-1476721
  hypo
tattggcagcagtccggagcacaggtgctgggcttggaggtgggaatgcattcccctggctcggcgcctactcagctttttgtattgttcagagctgcctgtggtgggggttgagtggagctttgcgggacagagactgccgggcccatttctaccctcggacacatgctttgggagggagaggatgggaacgtgagggaacgggccgcccagctgaatcttcagggtgtcagcggagtgtgaacaaagtggctcggaggtcagagccaggcacactctgatgggcccggccgtggctgtgttcccctctgggctctctggagaggcgagttcccagccatgccccgacctgctgcagcaggagcctgggggtggggccggtggaccgaggctgatgtggc

SEQ ID NO: 254390 - DNA, 95 bp, Homo sapiens; identical to SEQ ID NO: 210016
  chr5:1490331-1490426
  hypo

SEQ ID NO: 254391 - DNA, 72 bp, Homo sapiens
  chr5:1497221-1497293
  hypo
ggggtgcaaaacatccaccacgctcgccaagagagtctggaagaacagggcgctgaggagcatcaaagaaca

SEQ ID NO: 254392 - DNA, 145 bp, Homo sapiens
  chr5:1510456-1510601
  hypo
gccgtaccgcctcccgccgctgtcatctctactccaccgtcctcaccagaaccctcggcaccatcacctacccgaggctcttgcctgcgagatgacagtgtgttcagtaattccctttggatttgcaaatcggccccgcagtccc

SEQ ID NO: 254393 - DNA, 202 bp, Homo sapiens; identical to SEQ ID NO: 210017
  chr5:1517524-1517726
  hypo

SEQ ID NO: 254394 - DNA, 189 bp, Homo sapiens; identical to SEQ ID NO: 210018
  chr5:1546897-1547086
  hypo

SEQ ID NO: 254395 - DNA, 271 bp, Homo sapiens
  chr5:1548856-1549127
  hypo
gcagataaacagcgcgatcggaggggttgataaaggtgtgatcggaggggctgataaacgttgcacaatgttgcctgtttttctacattgtcgctgtttctcagaaagtgccctcaggcgatgacactcaagagccctcctcactgcaggctacaggtgtctccctggagaactgcggaggggctctatagcacggaccctgcccgtgtcatgggcatacagaagaatccgtgcaggcttcccaacgggcgggatcctgatgaggggctgg

SEQ ID NO: 254396 - DNA, 57 bp, Homo sapiens
  chr5:1549947-1550004
  hypo
aatgtggaccagagtgggagcggatcacagggagccgccaccttctcctagagtccc

SEQ ID NO: 254397 - DNA, 114 bp, Homo sapiens
  chr5:1550654-1550768
  hypo
ccctgggatcaggctgtttccgtccgcactagaaatgggccctgtgcaggcagggacgagggctcagtgggtacctggcatggtcatccctccgcaaatgtcagtggaggcaat

SEQ ID NO: 254398 - DNA, 295 bp, Homo sapiens
  chr5:1551523-1551818
  hypo
cacagactgaagaagttcctcgtagctgtaggaaagcaaaacaccaaaaaacaggcacagctcatgaacaggagactcgctgagaggagacctaccgggccacggagacagggcacctgccgtgctggagctggctggggtaccgaagctgcaatgggcacccggcctggagctggctggggtaccggagctgcagcgggtgccccgctggggatggatgcacctctctcccctcgactgaggaagggagcaggtctgaccaggcctagagcccgtgactgctgggcagtcacac

SEQ ID NO: 254399 - DNA, 341 bp, Homo sapiens
  chr5:1553050-1553391
  hypo
cgatgctgacccagcgacacacagctcccttgtgttcccgctggacgctggcccggcggccgtggcctatagagcaggcccctcggtgcatgaagccagcacagccctggaaatcccgtgcaacaaaaagcctctgttccacccagaagagctctgagcagagagggccccgccgaggcctgccgcgacggactcacagatgggcgcctggagagagcgggctttcattaggtcagcccaggggtggggggagcagacagcactgctgggcttggcttgggaaagaggcgccccgaacccggaggaacttccaagagtttacaggacgctcaggagcctcc

SEQ ID NO: 254400 - DNA, 163 bp, Homo sapiens
  chr5:1554246-1554409
  hypo
gacacatcctatgaggacagcggctcccaggaggcctccagaggctgggaggcctttcaacgcgaggatcttactggccacaggtgctgctcaaacgaacgctccgaaagtctcagcaggtgagagcgcaagtctcagtgccggaaactgctgtgctgggggt

SEQ ID NO: 254401 - DNA, 144 bp, Homo sapiens; identical to SEQ ID NO: 210019
  chr5:1641262-1641406
  hypo

SEQ ID NO: 254402 - DNA, 302 bp, Homo sapiens
  chr5:1702100-1702402
  hypo
gggccgtctggggccgggtgagtcctgacgcacctaaaccagcccacagcccctcagcgactcccgggcacggctcacactcactcagaatggaaggatgtggctgcttaggggcctggctgccacgctgagagctttctggtcaagccacgctagcattgagctctgaactcaagcctggagcccgatggggagctcgaacccattgtgccgatgcgtcattgaaagttacacgcgtgcccaggactggacaacaggttgaagcgatgtccgatttcttcgatcctaatggtctgtcaaag

SEQ ID NO: 254403 - DNA, 134 bp, Homo sapiens
  chr5:1704597-1704731
  hypo
tagatcctgggattgtgggccgatccggctccagccccgtgaaggtgcaatgcttgaaggtgcaatgcttgccgccaatccccactgcgcagagctgaccaggtggaggggacgaggccttgctggcacaggtg

SEQ ID NO: 254404 - DNA, 172 bp, Homo sapiens
  chr5:1707499-1707671
  hypo
gagtgatgtgaagacgtgccctcttactgagcaccacctctcaaatggccaagggctcccacgtggtccacttgcaatgtgggaggtcatcctagcagacggcaagggaggggagctggctgcaaaggtggacagtcaggctggaaggcctgagacccgcaagagaccgctc

SEQ ID NO: 254405 - DNA, 575 bp, Homo sapiens
  chr5:1729754-1730329
  hypo
agatgtgagctgtaagattccgcggctgtgttagaggaggcgccggggcctgggtgcagaacgagtctccaagtgccgcgtgagcgagggtgggtggctggagctcccgggccagcccgggcggaggcgctgcctccagacccagcctgtgtgcagaggggctggcggagctcggacgccgggctcgctggcctttgccgatggacctcgggtgtgtccaggccgggcgagggccggcagctccagtgaggcgggacctcactctatctgtgttgtgcatcctgttcgagtttctgggtcccgatcttgagcaagccaactgacctctctgatgttggtttgctcagatgtaacgtgcggttgacagcgtctatgctggagcacgtggcggcttaagagcaataggtgaaaggggtatctcagaagacgccctcaggacacggggatgccataggcctcgggtggtggagggtgccccggctccgaagggctcctgagcctggcaggctggcacccgcgcgtgggctggggctcactctagctgttcccttggcgcttttatggatgttcacaga

SEQ ID NO: 254406 - DNA, 112 bp, Homo sapiens
  chr5:1745628-1745740
  hypo
tggctggccgcacccgcatttccgtgtcgcatgatccatccggtgcctctgcagacagcaggcactaggacagatgggctggagctggcatatcgtgcggataaactgttta

SEQ ID NO: 254407 - DNA, 771 bp, Homo sapiens
  chr5:1746028-1746799
  hypo
agccgagcacgccccgtccacttggtgggggcattagcctgtcggaaagctgcctggtccaggggggctttcagcccgcaggacgccgagagctgtctgtaaacctctccatggttgtgtgggcctcgggccgaggcagcctgcagtgaaggaagatgttttggagaagttgttggggggctgaatccctaaacgcaggggacacttcacgcccgtggaatttggaaaaccgaggcagggagcagggaagggtgtgggactcgggaaggggagcagctggtgctcctttaactcgcccggtggcagttcagggtgtttccatctgagatcctacactcagccgggggcccacggtgtagcgggtcgtcagccgggccccgggccttctgggcagcaagggccctggcaggaccctgagggctgggccaaggagggcagttcgctccggggcacctgtcaggggccccacacggctgcttttaggccaggggtggcaaagacgctgctgccgcctgctctgggctcggctcccatggctgtgaaggaccctcgtcactccccgtcgcctgcctgggctgcccggggaccctcctgctgcgtcagcacagagcctggaaccgcggccaaggcaggaagctcccctgtgaaggcaccaagcacggcagacgccctcacatcgccggggcccgtttccctgtggacgggaagtgggaacgtgacgtggacgtgacgtgggaacgtaacgtgacgtgacgtgacgtgacgtggcat

SEQ ID NO: 254408 - DNA, 496 bp, Homo sapiens
  chr5:1746829-1747325
  hypo
ctcagatccagcagggagggagacgaaaggcggatggaagaggggcccccggaccccgcccctcgaggcttgtgtgccgccctggctgcggcgttctgggcgacgggaaacagagtcaggacacagaccagggagggccggggcagagccagggcacctgcgggcgaggacggctgggtgctgggtccccggcgtcagggcgcaatgccgcctgctgggcgtcaccctttcccagggctgctgggacacgtggccgcagctgcttggctcaccacagcggaagtcggtctctctcatcctggagtccgcgcggctgagggcgaggtgtccttccgggggccctgaggggctctgtccccggcctctcccctcggcgcccctgcccggccaagcattgcgccaagcccacccccacctcacgtggcggcctcctccccggcttggggacttctctctgtcacttgcaaaaacacgcgtccttggatttagggccctc

SEQ ID NO: 254409 - DNA, 114 bp, Homo sapiens
  chr5:1752559-1752673
  hypo
acagagcagggtgtggagtgcgtcttagcgcagaggagtgccactttgctgtgatcatggctcagaggagcttcttctccagggatgctgccttcatgacgctgaccacgccat

SEQ ID NO: 254410 - DNA, 882 bp, Homo sapiens
  chr5:1769198-1770080
  hypo
gctggacctcaccacaggaccgcaccgctggaccgcaccgctggaccgcaccgctggaccgcacggcaggaccgtaccgctggacctcaccacaggacctcaccacaggacctcaccgctgggccgcaccgcaggaccgcaccgctggaccgcaccaccgtcctggcaggtgagcgtggagcctggcgctccctggcgacgaccctggtcagacttccaggagcgcccctgcgggtaaagtcacatgtacgctctgttctgggctcagcaaccgagtcgtaggagagacggagtggcctggggccaggtcctgagtccgaggagcagctgtctgggctctcccttggccacgaagcagctcacaccgagggcaggagcagaggcctcccggccccgggcggaaccccgcaggagggcctccctgaggccaacgtctctggcgccacctcccgcagtgttcgctggagcccgcggccatgcagggccacacggacccgggggctgcgcagaactggggccctcgtgcaccgtgggtgggaatggaacgtggcgccgctgctgtggaaaaccaaagggcaactcctcagaaagttaacacagaatctctatagggcccagcaatcccacctccaggcctatccacaaaagaatcgaaaacaggggctccaagaagtacgagtacacacatgcgcatagaaaccgcatgcgcagcagccgagaggcagaagcagcccagacgtccccttgacggctgagtgcataatggggcctccatagaagggaatatgtttccgccacagcaagggacgccgcactgacacggggaaccgcacgggtgaacctcgagacaccgtgctcagtggggttcgccagacacagaag

SEQ ID NO: 254411 - DNA, 327 bp, Homo sapiens; identical to SEQ ID NO: 210025
  chr5:1786634-1786961
  hypo

SEQ ID NO: 254412 - DNA, 292 bp, Homo sapiens
  chr5:1787311-1787603
  hypo
caaagatttacaggcgcccaggctgctgggcaggctgaggctgggggaagcagagctcctgggcaggtgagtgtgagctgggcggtgcctcccggccaggcctgctctgcctgcattccccacgcagcccatggctttcccaggtgaggccgaggtaaacacaaggaaactcgctgtgcggcagtttcctttgccacgcactcttccatcagagatggcctccagcctacccccagccacctcccatcttccatatccctgtcctggagggctgcctcgccgcccacatctg

SEQ ID NO: 254413 - DNA, 214 bp, Homo sapiens
  chr5:1794463-1794677
  hypo
aggggtgagcaagcaggaggcgggcctcctctcatgagcaggcacggaggtgctggtctgccttcgctggccgagtgcccgctgcaggctgggctggtgggagacgtacggacacaaacacggctgggaagcaggctctgcctccacgcagcatgctcatctgtccgggctgcaataacaaaattccaccaacggcttacagacaagaaactgg

SEQ ID NO: 254414 - DNA, 367 bp, Homo sapiens
  chr5:1795101-1795468
  hypo
atcacttccaccatcgctgggggaagaacgaatgcaccgcgtggagtgcttccgccacaaagcagcacatcacctctgctcggagaccctgctggtgaccctcagccagcctcataggccacagcaggtctcacagccatgcccactcgcagggaggcagggaagccccagcccccaccggtccggcacaggaaggagacctggaccctgggagtgccggtctcgcctcccactctcctgggtgagtgacagcgacgctgccaggtgggtggtccatcagttagacctggtccgtgagtagcctcctaggtggatacaaacatgacagcgtcccacagagcacctcgcctccttctggaaatgcata

SEQ ID NO: 254415 - DNA, 226 bp, Homo sapiens; identical to SEQ ID NO: 210026
  chr5:1808311-1808537
  hypo

SEQ ID NO: 254416 - DNA, 629 bp, Homo sapiens
  chr5:1809067-1809696
  hypo
gtattctacagtgtcgatgatccagctggtggacttttcccttctgcgttggttttgatgctgtgtcacagaatcacatattttatgttttatctttaatagatgtaatctcagtttgacacaataggactttgactcctaaagatttaaacctacatatctttatgcccaatcatttgatcatcaagaggtcaatggaaagagtgtttcctattttttacattagtgacgggcgagggactcattttacagaggttggacacttcactgtgtatgatgtgccgtgtgcttaacaagagatggcgtgcgggctgctgtgacggttctcccttgattccctcgtgaagtgcagcagcgctcttcagtttttctcacctttccccaggtgaaagcaggtgagaatggagccttgagtctgaacccagagcggggctttgtgttgtggctgggtgtgttcactgccggagcttggccgtgtgaacccggagccgggctctgtgtcgtggctgggtgtgttcactgctggttctttgtattcctgcggttgcactgagctcctggagccagacgtttgctggtgatgggcggtcagggtcacccttgagctgcgcacactaaatgacgggagg

SEQ ID NO: 254417 - DNA, 243 bp, Homo sapiens
  chr5:1809726-1809969
  hypo
gtcagcagccctccctgcagggaggtggccggtctctttgactgccgtgatcggggcctggcagtttgttagtgcggcctttgtgacacgttgtcacttaggcagacaccatattatttacaccataaggcttaatttgtatggttagttgcatcgcctgcagcaggggtgagcagaacatcgctcactccagagccctctgtaaggcgctgcgacaaggcgagccgccgggccggcagcaga

SEQ ID NO: 254418 - DNA, 116 bp, Homo sapiens
  chr5:1813758-1813874
  hypo
cacacaagcaggacgtgaagttaccagagtctttcccgcacatgcctatgagtcataaatgaccaggtggaagacacagtggatgaggagacccagtgtacggtagcagcaaacaa

SEQ ID NO: 254419 - DNA, 164 bp, Homo sapiens
  chr5:1814740-1814904
  hypo
ggcctacatagagccgcctgtccgaaaaccccctttcaactgtgaagtggtgggcggcatgtttctcttctcggacgcccaagcgtctttcctctctgggcccttctcggtttggtcatcatctcagctcaggctgccacacacagcaccgcaggctggggtcg

SEQ ID NO: 254420 - DNA, 185 bp, Homo sapiens; identical to SEQ ID NO: 210027
  chr5:1815267-1815452
  hypo

SEQ ID NO: 254421 - DNA, 98 bp, Homo sapiens
  chr5:1826983-1827081
  hypo
cccaagacggagccgcccaacctttagcgtgtctgcttccagatggggaggcccagtccctgtggaagtgactgctctcccgcggcccagcctcggga

SEQ ID NO: 254422 - DNA, 173 bp, Homo sapiens
  chr5:1858632-1858805
  hypo
gtgaagtgtggaatgggactcgctgacgaaagcccactcctccctgggccaggaggggcgcggggcccagggccggtgtggctggacgggggcctcccaggtggacgggcaggggggctctgagagcagctgccgggatgggaggcggatgcgtctgcctgctctgtccaggc

SEQ ID NO: 254423 - DNA, 53 bp, Homo sapiens
  chr5:1864431-1864484
  hypo
tcgacgactcgccccgggcccctgcccttctgagatttcgttttcccatcgaa

SEQ ID NO: 254424 - DNA, 345 bp, Homo sapiens
  chr5:1865341-1865686
  hypo
ggtcctgagagccgcgccatgtgtaaacatgcgccaggctccagatgatcgcagtgataaccgcgtgaccactccgggatcacgtgtgagtgcaccttctccacaggtcccaggaccacccatcggatcagggatcactccagactcctctcctagaggcgctgccaccctggaagcacatctggcactcagatcatgttcagtcagaaaaacgaagccaccgcgattatgattatgggaacatagggtttacacgggggagttgctggggagggcatttcaggacagccttgatcaaagggctggggagatggtccaggcgatgccaaccggaagccccagagg

SEQ ID NO: 254425 - DNA, 42 bp, Homo sapiens
  chr5:1900863-1900905
  hypo
ttggtttgtgtactgttttgcggttgttccttcatgataatc

SEQ ID NO: 254426 - DNA, 369 bp, Homo sapiens
  chr5:1910374-1910743
  hypo
ggatagagtcttgggccacacggctgctcatgtgccgacatgccatgtcacccaggtggggatccggtcattaccacggagtggtcttgggcctctgtggaggggccctgcacctgcccaggccggcgtctgactccacatcgcgtgctctgtgggaagagcccagtggagccctgtacctgcccaggccggtgtctgactccagatcgcatgctctgtgggaagagcccagccagccacgcacaggctcctgccttgaaatatctgcgccttccgaaggagaggagaggatccaccactgggggggtcagagcccagcgttgtctctgcacgtcttctgtatacgctggaaggcggcctgtgctgggt

SEQ ID NO: 254427 - DNA, 282 bp, Homo sapiens
  chr5:1911955-1912237
  hypo
gcagggagtgaggaggtccacggtgtgctctcggggctggtacgagaatccgcacatggggcggtggggctcatgttacattgggtgcatcgcgtaacctcattttaacagctgggcttcaccacgtcgtggcacgtcagagctccgtgccttctcgctgccaagggatgtccacgtgtggccgggctcacggcgcgtctcactcaccaggcgaggtcacttgggttgtttgtgcttcttggctattgtgaatcgtgctgcgaggaacatttgtgtacaagt

SEQ ID NO: 254428 - DNA, 42 bp, Homo sapiens
  chr5:1914052-1914094
  hypo
gagtagagcctggagagatgcgattaaactgctagtctcctt

SEQ ID NO: 254429 - DNA, 330 bp, Homo sapiens
  chr5:1922813-1923143
  hypo
tctgagggactcaccgctgctgctcagggacccctcctcccattctggaaaccatcggcaaaacctcagcagaccacggggccattactgtgggctccggtttccagccactgcacttccagacttttctcttcggagccagtgggaatttagcaaatgactggatggggtctgggcaaccaggcatcacgaggcgccttctccttccactcggtggagcagggtctccagtgaatgcggcgtccacgcctgatcggggctcctgccagggcggccatgcctgctgctagagcctctgagaaaacagccgcctcctccccttcccatggc

SEQ ID NO: 254430 - DNA, 154 bp, Homo sapiens
  chr5:1923520-1923674
  hypo
gaaaatgcattcatactgaacgtgccgtcttgggcttgatgctttgcttgttggtttggttttcgcgcatttctataaacttaaacacactgtgtgactgaaagcccgtccccagtaacgtacgtatggagacgcctagtgcctgtctgctgtc

SEQ ID NO: 254431 - DNA, 95 bp, Homo sapiens
  chr5:1924125-1924220
  hypo
cctcagccaacgatcgctttcctctgacacgctctgtctgctccgctcggcacagcggatttgcctgaagcctcagggctcgccctgcagcctgg

SEQ ID NO: 254432 - DNA, 393 bp, Homo sapiens
  chr5:1950778-1951171
  hypo
cctcggcagcttcacgacctcaccaagtgcccgccgctctcacgagagaggtggttatggttgcgcattgaatatgcttgggagaggcaaagatggatggcgtagtctctaccctcacacccagtgctgagcgcgagtcgtccgctgtgtgtgcatcatctgctgtgcgtgtgtcatctgctgtgcatgcctgcgtcatctgctgtgtatgtgtcatctgttgtgcatgcgtgtgtcgtctgctgtgggcgcgtgagtcatctgctctgtgtgcttgtgccgtctgctgtgcctgcgtcatcgtctgctgtgcgtgtgtcatctgtgcgtgtgtcatctgctgtgcgtgagtcatctgctgtgcgtgtgtcatctgtgcgtgtgtcatctgct

SEQ ID NO: 254433 - DNA, 470 bp, Homo sapiens
  chr5:1951386-1951856
  hypo
gtctgctgtgcgtgcgccgtctgctgtgcgtgagtcgtctgctgtgcgtgtgccgtctgctgtgcgtgagtcgtctgctgtgcgtgtgtcgtttgctgtgcgtgtgccgtctgctgtgcgtgtgtcatcttctgtgtgtgcgtgccgtctgctgtgcatgtgtgcattgtccattgtctgctgtgcatgcatcgtctgctctgcgtgcgtgcgtcatctgctgtgcgtgtgtcatctgctgtgcgtgtgccatctgctgcgggtgcatcatctgctgtgcgtgcgtgtgccatctgtgcctgtgtgcatcgtctgctgtgtgtgtgttgtctgctgtgcatgcatgcgccgtctgctgtgcgtgcatgtgttgtctgttgtgcatgtgtcatctgctgtgcatgcatgcattgtcttctatgggcacaggcgtcatctgctatgggtgtgtgcgtcgtctgctgtgggcc

SEQ ID NO: 254434 - DNA, 65 bp, Homo sapiens
  chr5:2006866-2006931
  hypo
gctgaggatgtctgggactccggtcaccaccggtcctgcgtaacgacatctccacatttggtgta

SEQ ID NO: 254435 - DNA, 319 bp, Homo sapiens
  chr5:2007527-2007846
  hypo
tctcttgtttagaacgaggaatgacaatgaatgttggagagcctctcccgcagatgggtggcacggcctcagcctgagggaaacgtgttcccatcccgctccgggggcaagtccccgccggctcggaccccagggaggtggaggcaggcaccgtccccttgtccgggtgaccctgtgtggcctccctgctaagcccgcagcctgggctggcaacagcctcgatcgggggccgggggaagcggccgagatgtggctcggaggtggcagctggcaggcggggtcctccagtgacagctgatgtgtcgcggcctgagcctcc

SEQ ID NO: 254436 - DNA, 101 bp, Homo sapiens
  chr5:2041329-2041430
  hypo
cacttttgtggtggcgcttagtgttggtgacggtgcagcggcacagcccgtccgtgggtggctggtggaggtgtcggtcagctctgcgtccgtggaaagca

SEQ ID NO: 254437 - DNA, 328 bp, Homo sapiens
  chr5:2052998-2053326
  hypo
gcattctggggagccggtgcctcgggctgcccgccaccaggaagttgccccgttgctccccacgtctcctcccgccatcatcttttctgtcctggttctcccccagtagcctgttggcccatgcagctggttgaagcatcggtgctgcaagtgcttgctggtttaggtgacgcaggtcagttttagctgcgacgagaagccaccctggacttttaaaaacgagatgctctggtgacagttgcttccagtctgagatgagttagcttctcgtttctgagatccagccacacagattttgggcacgtgaggtggccggctctgccattgg

SEQ ID NO: 254438 - DNA, 31 bp, Homo sapiens
  chr5:2054410-2054441
  hypo
ttgggaggccgaggcgggcggatcacgaggt

SEQ ID NO: 254439 - DNA, 624 bp, Homo sapiens
  chr5:2111864-2112488
  hypo
gccaccgctggggtcggggtccagtcctggggaacgcgggtccctggagcacagcagggcctgaccgcctccgcgccgccctccccgcatttcctctcctcctccccaagcccatggctcagaacaccgagacctgcctcgccaagaaacgcccatttatttccttcctatttatttattttgcaaaagccgccttttgaaagccggagtgcagtgcggactggctgaggccggggcccaggcgcgcgcctccttcctgcaggcggcccggggcatcgatcgcgcggggcgtaatgaaccctaataacagctctatcaccgcccgcccgccaattggcccgggtgccctccaaattagccacaaagaagccagtctgtcaatattaattccgccgcggagattacttgttgtgggagaacaaaggtgttctggcttgagctgaacaacttaactccttgtctcataaaatttaagctgctattgatcgcctccttgcattgtgtgaggattaaacacgtgcgcgtgcacatccaggcacacgcgcgcacacactcggggcgcccggccccgctcaggcagccgccccacctcctcgcctacccggaatcattcagcaacgtgga

SEQ ID NO: 254440 - DNA, 383 bp, Homo sapiens
  chr5:2136841-2137224
  hypo
tggacagaggtgaccgggtccacgtgcgtgcctggacagaggtgaccaggcccgcgtgtgtgcgtgggtagaggtgactgggcccgtgtgtgtgcgtgggcagaagtgactgggcgtgcgtgtgtggacagaagtgaccgggcgcgcctgtgtgggcgggcagaggtgactgggccagcatgcgtgggtgggcagaggtgaccgggcatgcgtgcgtgggcgggcagaggtgaccgggcgtgcgtgggtggacagaggtgactaggcattgcttgcgtgggtgggcagaggtgaccgggcttgcgtgcgtgggtggacagaggtgaccaggcgtgcgtgcgtgggcagaggtgactgggcattgcgtgcgtgggtggacagac

SEQ ID NO: 254441 - DNA, 165 bp, Homo sapiens; identical to SEQ ID NO: 210035
  chr5:2155744-2155909
  hypo

SEQ ID NO: 254442 - DNA, 154 bp, Homo sapiens
  chr5:2181762-2181916
  hypo
acaggctgcccctgcgcgcttgctggttgtgtacgtctccggcatcttctacacgcccagggtctgccgcgtgcagcaaacgcaggaaagaaggtaggctctgccttgacctggtgtccaccaccccagggcctggcaccgcagggggtattgc

SEQ ID NO: 254443 - DNA, 119 bp, Homo sapiens
  chr5:2224967-2225086
  hypo
ggtggacagcacgccgcgtgcactgcccagggcgtgaggaccacgcacacctgtctgggggatgtggagacctggcgatcaggagcctggaagatgcagaaagtcgctcatgcgctggc

SEQ ID NO: 254444 - DNA, 259 bp, Homo sapiens
  chr5:2225364-2225623
  hypo
ctgaacccagaccccgcaggtgcacagcaagggagccgagtttcctccagcgcttgaaaaaaaagtgtttactttgccagcggaccttgtcgcaggagtggaggaacggcctggaagcgcacttgtgatctcagcaaactgctgaaatctgtactgattgaggaaaagtatccctgttaaaggacgcgtgttcatgtatgaaagaagtggcttgaaatggaagatcgttcttgttcccgtgtctataatttaacatctg

SEQ ID NO: 254445 - DNA, 463 bp, Homo sapiens
  chr5:2261211-2261674
  hypo
gaaagcctgctctccgggtggctctgtggctgagacgggcaacacctctcaaatggaaacacctgacgttgcaccagatctcagatgcgaagggcgggggtccctccagtgaggactcccaggggaccgagttttccacctgcgttctagatgttctccgtgaaagcatcacgtggtgtcccggtgaggggcctggctgagtgggcatcggcttgagcgcctggagcttgctggagaagagactcatgggcaccaccgggcccaccatgcagacttcagggaaagagagcagccggaatgcgttttaaatcctgcctgagagcgtggatgctacaggactcctggcgtggggaacccggcatctgtgtatgtgcccgtgggcatgtggtcagcgaggcaaccctcacaggaccacgaggccctggtcggacacaggctgcccgcagccccttcccacaggagc

SEQ ID NO: 254446 - DNA, 45 bp, Homo sapiens
  chr5:2302693-2302738
  hypo
attttcttctaaaaatggaccgccgtaattatatgttaaatatga

SEQ ID NO: 254447 - DNA, 325 bp, Homo sapiens
  chr5:2338565-2338890
  hypo
gtaggagagggcaccgcagacaaaaagaaaaaaaaaaaagaatgagcagacgcagctggagcgtgttaccaccatgcccggttctgtcaggtggtgcagagttagaataaacatggggctttacaatggcacatttacattttagaaaaccgtttcacatcgaaaatagcatctaagaaggtcgtggcacctacgccgctttcccatataactgctaaggttctggactgtctgcatgttttaatattcagcacctcctgagacccgagccccgtgtcgggattgctaggaaatggcagcgagcccaggccgcagcctgggctgg

SEQ ID NO: 254448 - DNA, 257 bp, Homo sapiens
  chr5:2369537-2369794
  hypo
tgcaaacacatgcacgggtaggcatgcacagaacacacatgcaaacacatgcacaggcatgcatgcacagaacacacatgcaaacacatgcacgggcacgcatgcacacacagacacagggcattcctcccgcctcaggcaccctggccaatgacagcatcagttgtcgattcgcgtggatccctccactagcgaccattctcacaaccttcacatttaactttgaatttcttccccatgaacggggctgccagatg

SEQ ID NO: 254449 - DNA, 434 bp, Homo sapiens
  chr5:2371456-2371890
  hypo
aagctccgggactgcgctgagccatggtgacctgctatgccaggttccttttctgcacagcgtcgctccctctgcttggcttggtcgccaccagtttactcctcctggaggtgactgggcgagagggtctcactggactctggagccacatgccgaacaccggcttctttccccgcagggaggccgagtttcctgttcctcgaactctaaatctcctctccaccgcgagcttggatgtgcagttgagtttcccactttcacctcggcagagaccacctgtgcacacgcggccttctagccaacccttccccagcaagcgtgacctccaaccttccccaggccccgcctatccctccccatcagtgatggtgcgtttggctgttagctaggagcccgattacgtaatttaccatccaggtcggacgttgggagtg

SEQ ID NO: 254450 - DNA, 127 bp, Homo sapiens
  chr5:2374870-2374997
  hypo
ccagggctctatttggccttcgcaagctcaagaaagccacctatgggagcacgttgtttgtgtaaaccccctgctcatctctacagggctgccggcgaggggagccgctctctctgcagggcttgcc

SEQ ID NO: 254451 - DNA, 232 bp, Homo sapiens
  chr5:2412071-2412303
  hypo
ggcctcgctctggccggattcggccattctcatggaaaccaggggcccttcccagggcgcctcctcacttcatctccaagctgagaggcaattagtaggagtccgtctcagagtttctggagcctcagccatgatggcggccacctcatccccggaaaggacgtaccgggagcacagtcagaagtgaggagcagccgtggtaacaaatctcatctgtcgccctcatctgctg

SEQ ID NO: 254452 - DNA, 55 bp, Homo sapiens
  chr5:2495120-2495175
  hypo
gttgaaggaaaccagcatgccgtccttgctatccggtccaagtcaaaagtctctt

SEQ ID NO: 254453 - DNA, 169 bp, Homo sapiens
  chr5:2524943-2525112
  hypo
gccagtagccctgccgggatcatccgggtggaaagtcctcagtgagagtgcagcgggcagctctcgattgtttaagcctggtttcctctcactaggatcctggagatgggcttacctagaaacccaggcactggagccatggctcgcactgtcccggtctcacattagc

SEQ ID NO: 254454 - DNA, 213 bp, Homo sapiens
  chr5:2541476-2541689
  hypo
cctgtgtgtgcctgtgtgcacgcatgcgtgtgcaggctctgctgtgtgtgtgtggtgtgtgcctgtgtgcacgcatgcatgtgcgggctctgctgtgcatgtctgtgtatcgtgtgactgcgtgcatgcttgcatgtgccgactctgatgtgcgtgtctatgtattgtattgtgtgccctgtgtgcatactcgcatgtggagactctgctgta

SEQ ID NO: 254455 - DNA, 48 bp, Homo sapiens
  chr5:2542212-2542260
  hypo
acctcctgatgggacaaaagcgaaagcgcccacaggcaaggtggtggt

SEQ ID NO: 254456 - DNA, 236 bp, Homo sapiens
  chr5:2547095-2547331
  hypo
aaaatttcccaggtcttcctcggtgttagtgcccaccagcctccccggtcaccctgttagcccagactttaattagctctggcgtcctcttcataatgataaatgcagagatgatgaatcgaaatgcaaatgacggtgaagtgcctcagccatcagcgctgaatatcattaataccttcccactgttaaatcgatcactgtcatccccggatgccggcgtgcggcggggcacatgg

SEQ ID NO: 254457 - DNA, 163 bp, Homo sapiens
  chr5:2557178-2557341
  hypo
ccagtccagtgtagcgtctatcggccttagacgacctggagccagggattactgaggatgaaaacactctgcggaaatatgcaaaacctatcacctgatgcggaggccaccaggctgtgtacggagtgtgagtaaaggccgtcatcctcgagccgctgattgg

SEQ ID NO: 254458 - DNA, 68 bp, Homo sapiens
  chr5:2561183-2561251
  hypo
gcaggccccaccaccgtgcgtttccttgtacgatagacaccaaacgtcaaccacgcctacttatgagt

SEQ ID NO: 254459 - DNA, 45 bp, Homo sapiens
  chr5:2564558-2564603
  hypo
tggcggtaatgcagggagcacggcggctggcggtaacgcagggag

SEQ ID NO: 254460 - DNA, 113 bp, Homo sapiens
  chr5:2579041-2579154
  hypo
ctcaggcatccaagcggtccctgttcttggggaaggggcgcctagccccatcagcggctctgtgattttaacgggctcttctttctttctaagacgcacgcctgggccacctg

SEQ ID NO: 254461 - DNA, 118 bp, Homo sapiens
  chr5:2634150-2634268
  hypo
ttcctccttccccgcggtgcccctatctgctcgagtcagctgtgtgccagcgagaaggagacgcactcggagaaggcgtccaagcctctgtgagcagcgcccacgcctctacttgtgg

SEQ ID NO: 254462 - DNA, 300 bp, Homo sapiens
  chr5:2668651-2668951
  hypo
ccaacatgctctgaaggcagcgcccaaaacacagggagagcgcaggctcatcaggacccaggcgcgtgttttagagcatggccttgccgtgccacacataacgcccactgttaatggcattaacagagggcaggggcgccggggaggaggggaagggtgaagacgcagagaagtgagcgagaggtctcagcagacgaagctggagcgcccactcataatttccacattggccattggtgcctcgcacctgctgttactcctccttcacctccctgtcccgggtcccccaggctcccagag

SEQ ID NO: 254463 - DNA, 86 bp, Homo sapiens
  chr5:2669179-2669265
  hypo
gacttcagccatcatgacaacgtcagatgactgcggttctcctcagtttcgcctaaaattctcacggaagataaactcacatatga

SEQ ID NO: 254464 - DNA, 200 bp, Homo sapiens
  chr5:2708350-2708550
  hypo
cctgtccccagcattcacaccgcagcctcagccgtctcaggacgagccgtctgagtgcaccatgagcagcttgcaccacggcgatctctacacacttgcaatgccaggttgtccttcccggatacaggacagctgccatccggggcagtgtacccacaggtgtttcccgtagagacaccggcccctccccagggcttcat

SEQ ID NO: 254465 - DNA, 126 bp, Homo sapiens
  chr5:2708903-2709029
  hypo
gttcccaccttcctatcctgcgctctcctcaccactctttgcttccagggcacggctctggtccatcgggtctccactccttgctgccacacccttggagacagcgagtgtctcagcaggatcact

SEQ ID NO: 254466 - DNA, 109 bp, Homo sapiens
  chr5:2808978-2809087
  hypo
acttctggggactccgtgtggtagggagcatccttctcactcttctcagaccagagcctgcggtatgagggcgtgacggtgctagctgccaccacgtattctgttacca

SEQ ID NO: 254467 - DNA, 119 bp, Homo sapiens
  chr5:2823299-2823418
  hypo
agggaagggaggatcgaggcaagccaggggcctgctgggggcaggggccttccatgatacagctggaggctgcacaccttaaaatttgccgactttgaaagcatcgcgcctgggcttgc

SEQ ID NO: 254468 - DNA, 186 bp, Homo sapiens
  chr5:2831543-2831729
  hypo
catcttacccaccacggcccatggaaccctcactcagtgcagacaccatctgccccggcctgccatacactgcctaagtgtgcggtgggtgggagggaggagggatagatggccgaggcctgaggaggcccgcgggaggagaggcccaaactcaggggctgcaggtgcagacgtggcaggggaggc

SEQ ID NO: 254469 - DNA, 195 bp, Homo sapiens
  chr5:2889718-2889913
  hypo
ggaaagactctgagcgggcagggaagagcttccaggaaaaagtgaggagacctcagctgaaacaagatttgaaagcctctgttccttttgccatcctgcggactccgagacgcctcttactccggtgacgccgtatccaggagtactgagcaggctgctgaggttccgtcaggtaagtcacgattctttattgaa

SEQ ID NO: 254470 - DNA, 270 bp, Homo sapiens
  chr5:2890699-2890969
  hypo
cacagcaagtaacttagagccgataaacagccggcagcgcattatggaacataaaatttaaaacgctttctgggcctcagcttcctaaagcttctttgattgtcaaacgtcgttactaagtccaagtttaagacatctgccgctctaccttacacaccacgcacaggccgcaaggccaccgggaaatgatgaaaacatgaatgcgggcagcattgctgtggtgttaaccctacctttgaaaatacttacgtttgtgatctgtaattgatt

SEQ ID NO: 254471 - DNA, 389 bp, Homo sapiens
  chr5:2896879-2897268
  hypo
tcagggtgcatgggcgtttgctgaagctacacgtccagggactccttcccactgaggggtcgcgggtgctgtcttgtgggggcaatgttcgctcagactccatggatgcgtggccagacccttgtggaccccagctctgctggcttctgatagcagggcatcggggagttagactggagcttcatttcctcttctttaacatggcatctcacgggtgtcgtaagcatgagattaggcgaagttattcctgtggagttgctgactccacccctggtgtgtagtcaccggtgccccttccttctctgggctcagacagcagcctcaggtgggctctgactcctcccagaagaaaactgtcaaggatgccgcgcccccggctctgggccccg

SEQ ID NO: 254472 - DNA, 52 bp, Homo sapiens
  chr5:2903649-2903701
  hypo
gtgtcagcagacatctcacccgacatgagccgctctgctcttgctttcatgc

SEQ ID NO: 254473 - DNA, 115 bp, Homo sapiens
  chr5:2904033-2904148
  hypo
gtggaggcaaaggaaatgggcgaaggacgggcatctgctgccagcctgcatagacagtggggctccgggtccaggaggaggctgtggctgtggcgggtgcctcctggccccctgt

SEQ ID NO: 254474 - DNA, 32 bp, Homo sapiens; identical to SEQ ID NO: 210039
  chr5:2990179-2990211
  hypo

SEQ ID NO: 254475 - DNA, 325 bp, Homo sapiens
  chr5:3027111-3027436
  hypo
ttctagcccagaatcgaagggaagcaggtgatccactggactcctagggactgcacgctccagcccgcgccagggagcccctcaccagcttgtgtcggtctctgccatgcctatggctggttctccttcatcattgtcaccccagccttcatcctgccccggattcagagccccttgttggtcttgcatggcggggaggagcccccaagacagcgtgtgttgaaggtcaccacgtctcagtccaccggtgaggggcagtgcccccagcgacatgcggtgttttaagcaggtctgacccctggccgcctccacatgtgcacaccca

SEQ ID NO: 254476 - DNA, 38 bp, Homo sapiens
  chr5:3028123-3028161
  hypo
ggtgtggtctcctctctgtgcggagcctcctcaccttg

SEQ ID NO: 254477 - DNA, 98 bp, Homo sapiens
  chr5:3028191-3028289
  hypo
catctggagccgcctcgcctccctgcgcactcgtggccatggctctcctctttgtgcggagccgcctcaccttgctgtgcgctcgtggccgtggctct

SEQ ID NO: 254478 - DNA, 45 bp, Homo sapiens
  chr5:3029916-3029961
  hypo
aaaggaatcctgcccggcgcggtggctcacacctgtaatcccagc

SEQ ID NO: 254479 - DNA, 84 bp, Homo sapiens
  chr5:3031838-3031922
  hypo
tttggctgccaggggttcagcggggaggcagtgagcaggccaagcaccgagggtttcgagggtggtgaaactgttccaagcgac

SEQ ID NO: 254480 - DNA, 144 bp, Homo sapiens
  chr5:3031982-3032126
  hypo
gagggacccgcatgtgcactgcggcctttgggtgacaatcacccgtcactgtggctcatcccttgtgaccaagctgccgcacagagcagggtgttgatagaggggaggctctgcttgtgtggcgatgggggtgtgtgggagctc

SEQ ID NO: 254481 - DNA, 82 bp, Homo sapiens
  chr5:3042022-3042104
  hypo
agaggagattgaagattttccgcatcctgggactccaggccgaatcactttgtgtggcctcggagggaacacctatccaatg

SEQ ID NO: 254482 - DNA, 136 bp, Homo sapiens
  chr5:3051522-3051658
  hypo
actcaaaccccttctgctgacgggcagtcctgcgcagtggggagacacccaggaagcaggctcagaacaagtcaggccggaggccatggttccgccggtgcattcagggagtttcgctggaggatttccaggtggc

SEQ ID NO: 254483 - DNA, 209 bp, Homo sapiens
  chr5:3078556-3078765
  hypo
ccatccacaggtgactccaccgcgtgccaggagggatccacaggggactccgccgcatgtccggagggatccacaggggactccgccgcgtgtccggagggatccacaggggactccgccgcgtgtccggagggatccacaggggactccgccgcgtgtctggagggatccacaggggactccgccgcgtgtctggagggatccacagg

SEQ ID NO: 254484 - DNA, 32 bp, Homo sapiens
  chr5:3098404-3098436
  hypo
ttttcccagattaggctgggcgcagtggatca

SEQ ID NO: 254485 - DNA, 92 bp, Homo sapiens
  chr5:3114549-3114641
  hypo
gaactgcacccacacaaggccgctggtgctgccacgtgtgtggggcagatgggatcccaggagcactttgcgagtgtccccctccctaaaca

SEQ ID NO: 254486 - DNA, 190 bp, Homo sapiens
  chr5:3143537-3143727
  hypo
aacatgcgtccttccgtgaccagcttattttacgtggcatcatgtcttcaaggtgcaaacatgttgtagcgtgtgtcagaattgtcttcatttctgcgactgagtaatgttccatatggagacgcctcctttggtttatccattcatccatccatgaacagttgggctgcttccccgtcttggctatggt

SEQ ID NO: 254487 - DNA, 42 bp, Homo sapiens
  chr5:3152257-3152299
  hypo
ggagggccttttacagacagcgtgaggagaagaaaaactgga

SEQ ID NO: 254488 - DNA, 359 bp, Homo sapiens
  chr5:3155670-3156029
  hypo
acaacacctcagcgcggtggtgtgtcttttaacccacgtgtttgggtgggaatgcctgtgaggagcactgtttggggctgctctgtcagaccctggcacactctcagggccgccttgcacgaaccagccctgccccctcagggaggagcatcgggaaagctgaggcaagcgcagggtccagttgatcacagtgccgttgcccaccaggcactggctttgcctgtcatgaggctctggactcagcgtctcaggcatccacacatcagccaggaagggtggatggggcactcgaggctatgtggggcttgaagaccatgacagaggcgctggcccagagcgggcacagccagggtgcagca

SEQ ID NO: 254489 - DNA, 263 bp, Homo sapiens
  chr5:3188087-3188350
  hypo
agcactgaaagccgcgtctgtctgggcgtcgcaggagcggtctaaagtgtttactctgcttcttctcagaaatggctttgatagcgccaataaccgctacaaccggaagcgaaatgaaagggggggggacttttttgaaatgatgtttcggtgccgccatgcacttttcatgcgtcctggcaggttcacactgtgctcccaggctgcagctggctcactgcggccggagcctgccaggcgggttcccgcgggcgcagccgagg

SEQ ID NO: 254490 - DNA, 55 bp, Homo sapiens
  chr5:3203778-3203833
  hypo
agcatccagtccctagcaatcgcatttaagcaccgggtctgtagtctctctgctg

SEQ ID NO: 254491 - DNA, 114 bp, Homo sapiens
  chr5:3212680-3212794
  hypo
gaagggagggcttgaggcatcgcagaaggaagggtgccgaggggcagtacccaggtggaggaaggtggtgctgactcttcagttttggggagcgagacatccctgtgagaaggt

SEQ ID NO: 254492 - DNA, 112 bp, Homo sapiens
  chr5:3213161-3213273
  hypo
cgggaaagctggttcggcgggtcggtcacaccttcctcttctttttagtgttcgttcctggaagaatcatggaagaaatggtcttggtggcttcctgcgccctcctcagcgc

SEQ ID NO: 254493 - DNA, 337 bp, Homo sapiens
  chr5:3221000-3221337
  hypo
cagatgcaggccggcgcactgtgctcctggtcctggcgcgagcatctcctttccagcctgcccggcgctagggctccatggaaccccaagctctctggcttcagaactgctccaggcaaatgcgtggcatcattcataaggaggcagcgtcttgcggtgctgagaccgagcccctggctgcttccagatgtcacttccaatgccagcccttccgcatgatagctctgtcaccaggagcgctcgggcgccttcactctgcttgcgcctctaaagcacacctgccccgcccacctggatctgctgtcaatagctgtcgggcgtgcggtgtgcaatttgg

SEQ ID NO: 254494 - DNA, 358 bp, Homo sapiens; identical to SEQ ID NO: 210042
  chr5:3282932-3283290
  hypo

SEQ ID NO: 254495 - DNA, 942 bp, Homo sapiens
  chr5:3324688-3325630
  hypo
tcctcctcctgacccggcgcggtggggctgggtcccaggctggctccccgccctccctcctactgtgatcccaggaccctcggccaccgcccttcctgcccaggcccgtcctgggacccgggtggccctcgtcatagaaggctgtgttgcccccagcaagagcaaagccaccgctccacgcctgcccggggaattggtggccgagcttatctgggaccactggtccacgcgatgccccgtgacgggccaggaagggttcaggcttggaaatgtcggacggggacgactctgggccttgctggttggtggagctgggagcagcttcattctcctctgactgtgtggacacagccctcaaggggagagggccgcatccctgttccccgccttcctcgccatgactggacgcagcggggcgccctgtccctgcctggagctcttccagctcagggccccatcagcgccaccaccttggactgccgccatccagggcgcagggcccgctgccccacacctgagggacacagccaggctttctgcttggcctgctgttctctacgtctcacaggcgtcttgctttccaccatgcaacttcacaatctgcccaaatgtccttttattaaaactagtcgacaaagtcccaaagccctagctgttcggcgtgtgtgtgtgtgtgtgtgagcgcgcgcgtgcgtggggttaagtgtttccataattgcatctctcttgaaaatcaaaacagaacaaaccgtgctttatgtacgagtaagagtcatgattcaacaatggggcctgcctgaaggagctgcctatttagtcacataccacagcaacctactggcttgtcattttatgatctggcacggagccgacggcgcacacggtgtcttgggcagccttgggagcccgtgacagtgctgtgaccagcgggggccagtcctg

SEQ ID NO: 254496 - DNA, 171 bp, Homo sapiens; identical to SEQ ID NO: 210044
  chr5:3326308-3326479
  hypo

SEQ ID NO: 254497 - DNA, 230 bp, Homo sapiens
  chr5:3339351-3339581
  hypo
ggggtgagaattaacgctggcgatgcggtaattaccgtaattaccagactcaacaattgttcattatctgagacttcacgtcttcaaacagttggagacatgacctgcgagaggccggtctgcgttgctttcatggtgctgtcctgggatgccagtgtcagttccggggtctgtgcacttggcacaggggttcatgcgggtcggggtccgtgtggcgtgaggggctccac

SEQ ID NO: 254498 - DNA, 147 bp, Homo sapiens
  chr5:3346708-3346855
  hypo
ggccagccccatcccgtgggagagaaccacatgacgggccagcccaatcctgtgggagagaaccacatgacggtggagccacacgtccaccagagcctaagcgttggggccccgagtgaccacacggaaccacgctgccccaggcac

SEQ ID NO: 254499 - DNA, 266 bp, Homo sapiens
  chr5:3454259-3454525
  hypo
ggacatcacccactaacacacgctcccgctagcacggcaggcgtcacccactaacacacgctcccgctagcacggcgggcgtcacccactaacacacgctcccgctagcacggcgggcgtcacccactaacacacgctcccgctagcacggtgggcgtcacccactaacacacgctcccgctagcacggtgggcgtcacccactaacacacacggcagccctggactcttctttcctggatgtccgagggaattccccagagggat

SEQ ID NO: 254500 - DNA, 45 bp, Homo sapiens
  chr5:3489720-3489765
  hypo
gtatacacagccccatatgccggcgacagtgatacaagtgtaatt

SEQ ID NO: 254501 - DNA, 919 bp, Homo sapiens
  chr5:3535478-3536397
  hypo
tctcagtgggaccttcctcccggaagagcgttcgcgtgtaaaatgtgttgtgtaccattcttcaccacgatactaaggcagagaatgcagtgagtggaagagagcgtgcaataagcataggcatgcacgtgtctcccctaatgcacatgcagcgacttctctcccgcgagcttatgggaaacgccctgcgcagctgaccagtcatccgacgttgcggagagcagcgtgggtccgagggaaggctgcggccggggacgcccagactggaggccttgtctgccccacccagcctcggacttctcaggcttctcggcccgagggagaaacattttgaaattctttaagaagcaagttttccgtgggctgagtggacttctagggccctgaccacactgacctgggcttgtcgagctctgcccgcaggcccctcgaggtctgggtttcggccccatggccgtggctgtgcttggaaggccccgggagcagccagggagcgcggtgcctgccctccacggcggccgcctgcggggaacagggcagcgtccagcaggcggaaggcgagtgaggcagagtgaagcacacagagccaaaccatatcaccgccaccccgtgtgactgaggtcagggcttgcctttgaggcccagggtcagctggggactagcaggagctctaatctcgcgctgcgtcagggcgggaactgcaagaggccgcccccggcaggccgcgcatgcgcactcccgcgcgcacgctcacccgcgctgacccggctacgctggacccaggtgcggggacccaggtgcgctggacccaggcgtgcgccaccgccacctcctgcgcctacaccccgagagcggccgccgccagcagtggcatccgggctgtcccaagtcatccttcgtctgtttcagtgtctttatg

SEQ ID NO: 254502 - DNA, 257 bp, Homo sapiens
  chr5:3627873-3628130
  hypo
acctctcctccactccctttcgggtgctgcactcctggcctgtccgccggacctggacctgcagccgccatgctcaccgagaccttcatttctgcagatccgacggtgtgtggcgcctcttctcctgactcagcttctccatcgcatctggcacacttggcctctctggccccgtagcgggaaagcatgatttagatgtggcttctgggcttgcctacaccctagctgtccttcccgctcactggccatctacctcc

SEQ ID NO: 254503 - DNA, 149 bp, Homo sapiens
  chr5:3630989-3631138
  hypo
attttcatccatggcgagaacttgatttttatccatggcaagaacttgattttcatccagggcaagaacttgattttcatccagggcgagaacttgatttttatccatggcgagaacttgattttcatccagggcgagaacttgatttt

SEQ ID NO: 254504 - DNA, 218 bp, Homo sapiens
  chr5:3659551-3659769
  hypo
gtaagagcagtgcttcaaaacggcctagagggtgctcactcagccccagcccggcagcctctgaaggcctctgggaggctggtctgtggtgtgggccacagactcggctccgataagagcagtgagagagcagcacgttggatgacgagcgcagattcaaggaatggaatttacgttgcccagtgccagcaaattccgagaagtaatacattttatta

SEQ ID NO: 254505 - DNA, 454 bp, Homo sapiens
  chr5:3740590-3741044
  hypo
cggtgtgaggtgaccgcgtgctgtgctctgcagggccaggcctagaccccgacgtcccagtcccagtctctgtctgcccaagtgggcgggagaatctgggggagggagggagaggctgcttcccaggccgtcatcccagcacggcttcctcactgggaggacgcggcttgttcccatttctggagtcaggctgtatgggcccctccacaatcttcagcgccgcgtccctgcaggtccacatgtcccccgcgggccctcccctggtttccgatgcccatcacccaacctcttctgtgtcctcagcccggggtgggggtgcagcccctgcaggtgcctcagggtgtctgtgctcccagccctacccactgctcggtcaaaccttcacatcgccttctctcctgcgcgcagctggcggcttctatcttctgacccaccccagcgtgcctaccggctt

SEQ ID NO: 254506 - DNA, 831 bp, Homo sapiens
  chr5:3761114-3761945
  hypo
cacctgagccagaacatgcccgctgaatgcggctctagcagctgtcgtgggccttcagagaggaagaatcttaaggcgcgtccaagacaagcggagtcgaggactccgtttcggggaggtttacctgaaaagctgtgtggaaaaacccgactgcgactttcaagcttgtgcttcacaacccaggagccgtgcattatgtccatgtgttcagatgcaagatgctcagaccccaggaaaaagggaattcggtgtaaagaaaaaaggactcttagcatggtccagtattaggacagtaacaccctgtgtgtgtgcacgtgccctccctccatctccctggcctttgcgtctctgtgtgggtgcacatgccctccctcctccctccatctccctggcctttgcgtctctgagtgggtgcacatgcgctccctccatctccgtggcctttgcgcctctgtgtgggtgcacatgcgctccctccatctccgtgggctttgcgtctctgtgtgggtgcacatgccctccctcctccctccatctccgtggcctttgcgtctctgtgtgggtgcacatgcgctccctccatctccgtggcctttgcgtctctgtgtgggtgcacatgcgctccctccatctccgtggcctttgcgtctctgtgtgggtgcacatgcgctccctccatctctgtggcctttgcgtctctgagcgggtgcacatgccctccctccatctctgtggcctttgcgtctctgagtgggtgcacatgcgctccctccatctctgtggcctttgcgtctctgagtgggtgcacacgttctttttctatcttgatgg

SEQ ID NO: 254507 - DNA, 156 bp, Homo sapiens
  chr5:3781374-3781530
  hypo
tggtgaaatagtcgcgcctagagtgagatgcatgatgcacacataggccaacccaccctggcagggcgatgatgtcgtgctccgtggcgtgattgccatggctttcagctgcaggcagagcccaggccaggaggaaaggagcggcagcccaggcaa

SEQ ID NO: 254508 - DNA, 67 bp, Homo sapiens
  chr5:3805791-3805858
  hypo
gcgcctgccgtcgacgagtgtggcaaactgagctgaaatgtatagtgtagaacgaccatggagtggc

SEQ ID NO: 254509 - DNA, 160 bp, Homo sapiens
  chr5:3865173-3865333
  hypo
gtgactggagaaggcggtatttacaagtctactgtgggcccatattaaacttcactttgacataggctcacttctttggcagtgagagtgaaaggggtggagtgagtgtgccacgctagttggctccgggacacaatggggctggcggctggaagaggat

SEQ ID NO: 254510 - DNA, 221 bp, Homo sapiens
  chr5:3932150-3932371
  hypo
gcccggggaaagttcgtaggcaacattcatttgcacaacgagcgcactttgaaagactccagcgcaggcctgtgttcctggccgcaacaaaacacctgcttgaagcggagacaaaatgccaagctggagagagttcaaaagaacagggtgacaatcacacagtgttgaacaacagcaacggcaacccatcactacagccttttgtccgtggctgcttgatt

SEQ ID NO: 254511 - DNA, 976 bp, Homo sapiens
  chr5:4144250-4145226
  hypo
aaaaaaaaagaaagaaaaggtgactgtagtgaagaaatacatttccaagtcctctcaaagccgtgatattctatgcaagcaacattcatagaagcacagcttactacatgtgttctgtgtgccgtgctcttgcgtgcacctggaatgccaactgcacagtttactgtgtcctgtgtgccgtgctcttgtgtgcatgcagaatgctgaccgcacagttactaagtgttctgtgttccgtgctctcgtgtgcacgtggaatgtggaccacacagctaagtgtgttctgtgtggcatgctctagtgtgcgcatggaatgctgactgcacagcttactacgtgtgttctgtgttccgtgctctcacatgcatgcggaattctgacggcacagcttactaagtgtgttcggtatgccacacacttgtgtgcatgcggaatgctgactgcatagcttactatacgtgttctgtgtgccccactctcctgtgcatgtggaatgctgactgcatagcttactatgtatgctctgtgggctgtgctctcatgtgcacgtggaatgctgaccgcacagcttactaagggcgtcctacgtgcggtgctctcatgcacatgcacaatgccgatggcacagcttactaagtgtgtactgtgtgctctgctctcgtgtgcacgtggaatgctgactgcacagcttactacatgtgttctttgtgccacgctctcatgtgcgtgcacaatgatgactgcacagcttactacgtgtgttctgtgtgccgtgctcttgtgtgcatgcagagtgctgaccgcacagcttactacgtatgttctgtgtgccacactcttgcctgcacgtggaatgctgactgcacagcttactacctgtgttctgtgtgtgacgctcttgtgtgcatgtggaatgctgatggcacaacttactctgtgtgttatgtttgccacactctcgcgtgcacatggaatg

SEQ ID NO: 254512 - DNA, 35 bp, Homo sapiens
  chr5:4195642-4195677
  hypo
attctcctgcctcagcctcccgaaaaacaactttc

SEQ ID NO: 254513 - DNA, 598 bp, Homo sapiens
  chr5:4580998-4581596
  hypo
cacatgcacacacgcgtggacaggcacacgcacagcgacactcttgcacatggtcatacacgtggacaggaacatgcacagcaacactcttgcacacacacacacacacacacggtcaggcacatgctcagcgacactcttgcacacagaaacacacgtggacagacacacgcacagcgacactcttggagagcacatacacatggacaggcacacgcacagtgacactcttgcacacacacacacgtggacagacacacgcacagcgacatcttgcacacgcggacacacacgtggacaggcacacacacagcgacgctcttggagagcacacatacatgtggacaggcacacgcacagtgacgctcttgcacacgcacacacacgtggacaggcacatgcacagcgacactcttgcacacacacacacgtggacaggcacacacacagcgacgctcttggagagcacatacatacatgtggacaggcacacgcacagcgacgctcttgcacacgcacacacacgtggacaggcacatgtttgcagcacggctcactctcaagtccacgcccacacgcacagaggcagcttcgtgaa

SEQ ID NO: 254514 - DNA, 237 bp, Homo sapiens
  chr5:4886500-4886737
  hypo
cttaggatcaccaccgtctaccgagagagatcagaggaagagaattctttaatgagacaaaacagacagcgaagtccatggagaaccaggagagaagagtgtccccaaagtcagcaagggtgagtgataagaaaatgcaataaacatcatattccgaagagcaattcattaagataaggcatgaaaaaaggccataagtcacggcaacgtgggcatcagagacgacatccagagaaa

SEQ ID NO: 254515 - DNA, 390 bp, Homo sapiens
  chr5:5303189-5303579
  hypo
gggaggtgagaaacagcaggcgcagggagactccggtaggaatgctcacccaggaaaggtggaactgaaaataacggcacacacacgaccgtggctgggaaatcgcgccgctgcctccacatcagatgtggggccgcttctatcagagtgatggagccatccctcaccgaggtctctttgtccctgcccagctggtccgtggggaactggagtgcctgcagtcggacgtgtggcgggggtgcccagagccgccccgtgcagtgcacacggcgggtgcactatgactcggagccagtcccggccagcctgtgccctcagcctgctccctccagcaggcaggcctgcaactctcagagctgcccacctgcatggagcgccgggccctgggca

SEQ ID NO: 254516 - DNA, 71 bp, Homo sapiens
  chr5:5652238-5652309
  hypo
aatagttacttcccattccccgtagctatagccaccaccaatctgttttcgttctctaaggattagcctcc

SEQ ID NO: 254517 - DNA, 38 bp, Homo sapiens
  chr5:5907761-5907799
  hypo
taaagaatcaataaggcagccgggtgcggtggctgatg

SEQ ID NO: 254518 - DNA, 276 bp, Homo sapiens
  chr5:6228485-6228761
  hypo
actgctgttccaccagtgaacgtgtgtccagccaagatcactgtccccgccaccctctggcaccgcggtccctcccgcagctccagccatcactggaatagagcgatggccgggaacggctcctgtgcctgctcctctctcgggcctcggcagcagttgctggttctctcaaccctgactacacgcctataatctgtttactaagggatattggcggatactgactcccttatctccccttatatctaaatgaacgcaagatgtaaatataacaat

SEQ ID NO: 254519 - DNA, 31 bp, Homo sapiens
  chr5:6322027-6322058
  hypo
ctgcagggcttggacgcgctagctttctgac

SEQ ID NO: 254520 - DNA, 507 bp, Homo sapiens
  chr5:6349464-6349971
  hypo
ccttgcgctaggagcggccgtcgccctgtggtccccggagagggtcctccgaggactctgaaagccgcttccatggttggcgccgagcacaggcggctccctctggcttccgcaggcacggacggggtttgcccagagacaccctgctcagcactgccaagctggaaaacaagtgggtgggggcagccgccgggaggggccagcaaaccgggccctcatccaggagcaaattccaccttcagtgcctcacttttatctccagatgggcgcgtccttgtgagaaaccacagtattgtccctcacccatgaagggaggcgtggacgtgatcccaaagcccctatgttagacggtccagcctcacctgagcagtcacatggacctgcccggtcctttgacctcaacaccacacacttcccacccctgcggcaggaaggcgaggcaggaagcatccacacaaacctgagtatatcacagtggcaccaccaacgtgccggctgcaaagttga

SEQ ID NO: 254521 - DNA, 115 bp, Homo sapiens
  chr5:6420112-6420227
  hypo
gcccccaacttttacggcatccactgaatttgtgcccccaatctcctgcgttggtgatgcttcaacccttgtgtattaatgtcctggcacacgcggcaaagtatcatggactggg

SEQ ID NO: 254522 - DNA, 51 bp, Homo sapiens
  chr5:6527276-6527327
  hypo
accacccaggccagcgagccaggtagggacagtgtgcggacatgggtatgt

SEQ ID NO: 254523 - DNA, 87 bp, Homo sapiens; identical to SEQ ID NO: 210055
  chr5:6758954-6759041
  hypo

SEQ ID NO: 254524 - DNA, 76 bp, Homo sapiens
  chr5:6760002-6760078
  hypo
gtcctgtgacgtgacgggcttctaaaggtcacgtggcacatccgccaggcccccgagagggcgctgggtctcgctc

SEQ ID NO: 254525 - DNA, 72 bp, Homo sapiens
  chr5:6762500-6762572
  hypo
ctgtgcctcccctgcgggtggaagtcttggcccctggacccggcattcgaggccttccgagacattctgccc

SEQ ID NO: 254526 - DNA, 215 bp, Homo sapiens; identical to SEQ ID NO: 210056
  chr5:6846210-6846425
  hypo

SEQ ID NO: 254527 - DNA, 34 bp, Homo sapiens
  chr5:6846845-6846879
  hypo
cccggcgcagggcgtgcccagggcttctgatgcc

SEQ ID NO: 254528 - DNA, 47 bp, Homo sapiens
  chr5:6857839-6857886
  hypo
gactgcagagtccacgtctcaaccgtgaagatcgtggctcagaattg

SEQ ID NO: 254529 - DNA, 42 bp, Homo sapiens
  chr5:6906771-6906813
  hypo
actgccagcaaggtgtagggcggggtgtggctgccaggattc

SEQ ID NO: 254530 - DNA, 36 bp, Homo sapiens; identical to SEQ ID NO: 210057
  chr5:7704693-7704729
  hypo

SEQ ID NO: 254531 - DNA, 42 bp, Homo sapiens
  chr5:7802432-7802474
  hypo
gaatgccttcggctcctgaacgagatcatcgctgactttgat

SEQ ID NO: 254532 - DNA, 147 bp, Homo sapiens; identical to SEQ ID NO: 210058
  chr5:7825240-7825387
  hypo

SEQ ID NO: 254533 - DNA, 139 bp, Homo sapiens
  chr5:7867953-7868092
  hypo
gaacactggtccaccgagtggatgaaggtcatttccatttttcgaatgaaactttttacaatgggcatgatggaatttgaccccgaaaggctcaggttgtcgtgaacacaaccaagggcacagacgctccttgactacc

SEQ ID NO: 254534 - DNA, 78 bp, Homo sapiens
  chr5:8424507-8424585
  hypo
ataattccctgtggttgcatcgatgctgttgaatgtgtccacagtttgtgccttttttcgtttgttttttctgagacg

SEQ ID NO: 254535 - DNA, 92 bp, Homo sapiens; identical to SEQ ID NO: 210059
  chr5:8649803-8649895
  hypo

SEQ ID NO: 254536 - DNA, 120 bp, Homo sapiens
  chr5:8841451-8841571
  hypo
agccagactacgaacccttactacgaacccatcagctggaaggaacaattccagacaattccacacaggaggaagcaacaactctggatgtgccacctttaggaactgtaccactcacgg

SEQ ID NO: 254537 - DNA, 160 bp, Homo sapiens
  chr5:8841691-8841851
  hypo
attcttgaagtcagcgagaccaagaacccactaattccatacgcaatgggttcatttcttttttttttttttttacaaaagtcttctctgtgctgacttaaggggacactttgtgtcacttccagggaaggatgcgctggggtcccgacattctgtcagg

SEQ ID NO: 254538 - DNA, 195 bp, Homo sapiens
  chr5:9040384-9040579
  hypo
caggaatttaaaatgtgaaccgcaaagtttcaccaggacttccaaacagcccaggcctaaggaagagcggctttatgaaggagtttccaagacaggtgagagatcacactgtgaaagtccaacatgtgagggttcacgcgataagcgtggagtacagagccagaacatgtgaacggtagctacacagtgatggac

SEQ ID NO: 254539 - DNA, 42 bp, Homo sapiens
  chr5:9044652-9044694
  hypo
ggagctgctcagccccacggcgatcatgtggaacatgttgaa

SEQ ID NO: 254540 - DNA, 199 bp, Homo sapiens
  chr5:9051992-9052191
  hypo
aaattagagtcaaacacacacggccggctctccgtggtgttcccggagcactggctgcccatggggaacaggaggatgcactggcgggcgcggacttggacgccagaggcttcacactcagaccagtccgaccactccgaccagctctctgcagagaccagaaaaggggagatggggcggaatggccagtaagctcaat

SEQ ID NO: 254541 - DNA, 166 bp, Homo sapiens
  chr5:9054171-9054337
  hypo
ctgtgcagtaggtgaggtgccgcttacctgggcagggctgcgtgttgcagagtgcctcttctgtgtgcagccccaggcagatgtcccctccataggccggggctggattggagcaagagcgggtcctcatatagtgtccaccgccgcatgttgctgaacattttgt

SEQ ID NO: 254542 - DNA, 155 bp, Homo sapiens; identical to SEQ ID NO: 210060
  chr5:9066591-9066746
  hypo

SEQ ID NO: 254543 - DNA, 255 bp, Homo sapiens; identical to SEQ ID NO: 210061
  chr5:9119015-9119270
  hypo

SEQ ID NO: 254544 - DNA, 402 bp, Homo sapiens; identical to SEQ ID NO: 210062
  chr5:9122692-9123094
  hypo

SEQ ID NO: 254545 - DNA, 155 bp, Homo sapiens
  chr5:9136512-9136667
  hypo
atatgaaaaggtgcagacagcgtgacagtgtgactgaggatcgccaggggagcatggctcccatgggcagcattttcagaggatggagaaggtgggcactcaccggacacgcagagatgctctgttcccactgcgtcatgctcaggctctcctcc

SEQ ID NO: 254546 - DNA, 70 bp, Homo sapiens
  chr5:9183702-9183772
  hypo
agtaaggctgagagaacctgcggttgaacttacgacctgaccaatgagcggtccttctctgttgtctgag

SEQ ID NO: 254547 - DNA, 106 bp, Homo sapiens
  chr5:9220793-9220899
  hypo
agagtcaaggacagggcagacgctcaagccacagcgtgcactacctaagtatggtacagcataaactttctgtaaaagaaacttcgaggcaacaatgtcatccttc

SEQ ID NO: 254548 - DNA, 41 bp, Homo sapiens
  chr5:9330247-9330288
  hypo
aaaaaatacagatgggaggccgaggtgggcggatcgccagg

SEQ ID NO: 254549 - DNA, 42 bp, Homo sapiens
  chr5:9445440-9445482
  hypo
catttaataaagaatcccttcggtaaatatctctcgtgccat

SEQ ID NO: 254550 - DNA, 179 bp, Homo sapiens; identical to SEQ ID NO: 210063
  chr5:9497476-9497655
  hypo

SEQ ID NO: 254551 - DNA, 42 bp, Homo sapiens
  chr5:9498629-9498671
  hypo
agactactgtatggatgctacgtggaaggtggttgatcattg

SEQ ID NO: 254552 - DNA, 42 bp, Homo sapiens
  chr5:9629931-9629973
  hypo
gaagataacaatcacattaacgtagaagatgaacaactgcag

SEQ ID NO: 254553 - DNA, 144 bp, Homo sapiens
  chr5:9725136-9725280
  hypo
acatgggccacctgagtcaccgagctgcctaaaatccgtagtgtacaggtgatgagggggactcctgagagaagggggtgaactaggtgatggcatcctagtgagaggtgacagcgtgctggcagtggtgacagcgagcccttg

SEQ ID NO: 254554 - DNA, 216 bp, Homo sapiens
  chr5:10080575-10080791
  hypo
gggcctccaggaataactcccggaaccaggggccaaactgaccctcggaggccagttagaaatacaggagttaaaagtgcagccctagtacaactcgccacagggaatattggctcctcctgcgccaagctggggacagaaatcacaatactgagttcctctgccttcaaacgagcgatgcccaaacactgcaccggctgccaacactgctgtgaa

SEQ ID NO: 254555 - DNA, 103 bp, Homo sapiens
  chr5:10248592-10248695
  hypo
ttcaaggtctagcgcgtaagtatgccaagcatgaagagttaacagatcaccaaccatcccatgacagtcagtcctccctgtttttagagacagaatctcgctc

SEQ ID NO: 254556 - DNA, 217 bp, Homo sapiens
  chr5:10256073-10256290
  hypo
tggtgccttgttagaagaagcggagcaattgctagaccgaggcattcacccaatcagaatagccgatggctatgagcaggctgctcgtgttgctattgaacacctggacaagatcagcgatagcgtccttgttgacataaaggacaccgaacccctgattcagacagcaaaaaccacgctgggctccaaagtgtacgtttcagtagatgatatgatt

SEQ ID NO: 254557 - DNA, 78 bp, Homo sapiens
  chr5:10268930-10269008
  hypo
caagcgggcaacgagagatccaatgcagggttgggcctttcaacttggggttttatatgttggcgtacttccagggtc

SEQ ID NO: 254558 - DNA, 190 bp, Homo sapiens
  chr5:10278515-10278705
  hypo
ccacatggaccatgccgatatcctacccacaccgacccctctcagtcacagcgtgagtccccggggctcatgcctgcttgctctaaaccccccagttagaacctccaggggaaacctgcatagatgacaccctgggccccagtgaaggctttggctcatagctccctctctctctcgttctccaccttct

SEQ ID NO: 254559 - DNA, 40 bp, Homo sapiens
  chr5:10283590-10283630
  hypo
tataaaaatcagtttttggccgggcgaggtggctcacacc

SEQ ID NO: 254560 - DNA, 56 bp, Homo sapiens
  chr5:10322104-10322160
  hypo
gtgggaagagtcattcgagatccctgcagcattgggactcccgtttgcctacagtc

SEQ ID NO: 254561 - DNA, 157 bp, Homo sapiens
  chr5:10352280-10352437
  hypo
atgtaacatctgatcggcccggtctttgcccctagtatcagcaggccaatacgtgctctgctacaggtcttacagggagggtgagctcttggagttggatcagaaggagaggggctggggaaagatcgtcttcaaattgtttctttggcggtagtat

SEQ ID NO: 254562 - DNA, 498 bp, Homo sapiens
  chr5:10453378-10453876
  hypo
tctgccctggctcccgcggcccacagagtgctgagcacgagttcaaacacctgtctcggggtgcgctgggtagacaggaggtgctcggaccctccaggccttggtgtggacagttgtgttgttgaccttgttggccctgggtggcttggaggtgtgctaagaacacaaagctgtgaattcaaggaggggtttcttcatgtcgttcagcgtcataagcgttcatttttatgctttaaaaaaataccttcaaaaaggaggaaatgaagtgcgatgagaataatttgtagtggattaccacctgcagaagtttatttcacataggatgctgtgtaattggtggctagccgctgcctgcgtgagcgggatagatgtcgttcctgctccctgcatctatggcgggggcgtggcttgtggcaggtgtactctctgtgctgtttacatttatttatcttagaaatcactctagtcaaattcatcgagttgaagatctctaaaaag

SEQ ID NO: 254563 - DNA, 150 bp, Homo sapiens
  chr5:10479715-10479865
  hypo
gctggcagctgcttcgggcgtctcaccttgtgactatttcctgggcactgtgggagaggaggcctcttgcctgagctcctgtccctactgtctcctctcactaaatgcacggcacggctttgcggtaataggctgggacatgtcaactct

SEQ ID NO: 254564 - DNA, 106 bp, Homo sapiens; identical to SEQ ID NO: 210065
  chr5:10486101-10486207
  hypo

SEQ ID NO: 254565 - DNA, 40 bp, Homo sapiens; identical to SEQ ID NO: 210066
  chr5:10548513-10548553
  hypo

SEQ ID NO: 254566 - DNA, 36 bp, Homo sapiens; identical to SEQ ID NO: 210068
  chr5:10618606-10618642
  hypo

SEQ ID NO: 254567 - DNA, 107 bp, Homo sapiens; identical to SEQ ID NO: 210069
  chr5:10702260-10702367
  hypo

SEQ ID NO: 254568 - DNA, 100 bp, Homo sapiens; identical to SEQ ID NO: 210070
  chr5:10936742-10936842
  hypo

SEQ ID NO: 254569 - DNA, 60 bp, Homo sapiens
  chr5:10972031-10972091
  hypo
aagagcaaagctagtttacccgcggcccatgttcttttcgatggttagccttatttctta

SEQ ID NO: 254570 - DNA, 39 bp, Homo sapiens
  chr5:11074314-11074353
  hypo
cccatatcccagaacgttctgtcacgtgccagccattag

SEQ ID NO: 254571 - DNA, 75 bp, Homo sapiens
  chr5:11130332-11130407
  hypo
ttctgtgcccaaagcggtggttgctaggttcataccacaccccccccatccacccataaacgtaagccatcagaa

SEQ ID NO: 254572 - DNA, 152 bp, Homo sapiens
  chr5:11130729-11130881
  hypo
taactgtgagcctaattgtgcgggtggccctttgtgctccacaaacactcacgtgccgctcacagttgttctttcctaacttgcagtacttggggaatgagctgtactcactaggcattgattttttcatgaccggacgacgtctcaagctt

SEQ ID NO: 254573 - DNA, 400 bp, Homo sapiens; identical to SEQ ID NO: 210071
  chr5:12794952-12795352
  hypo

SEQ ID NO: 254574 - DNA, 36 bp, Homo sapiens
  chr5:13037956-13037992
  hypo
taagaaaggccgggcgcggtggctcacgtctgtaat

SEQ ID NO: 254575 - DNA, 32 bp, Homo sapiens
  chr5:13416579-13416611
  hypo
ttatggccccatgaaaatcacgtcaaccgagg

SEQ ID NO: 254576 - DNA, 80 bp, Homo sapiens
  chr5:13884614-13884694
  hypo
gttcataatgtttaaaattacgagaaggcactaaataaacggtggatatggccaagtgcggtggctcacgcctgtaatcc

SEQ ID NO: 254577 - DNA, 240 bp, Homo sapiens
  chr5:13946864-13947104
  hypo
ggacctcatgtgggcggaaggcttcatccagaaatccaagtacctgcaggcaaagtttgaagttccactttcattcattgaacaaaagctcgtgagtgccttttacgcagccagacgctgcgctatacactatgaatagaacagctaataaaaacagatgtttactcagacatttaaaaatattaattgtagaatgcataattatcctatgcaacactcggaatgaaaaaataatgctgc

SEQ ID NO: 254578 - DNA, 99 bp, Homo sapiens; identical to SEQ ID NO: 210072
  chr5:14122606-14122705
  hypo

SEQ ID NO: 254579 - DNA, 40 bp, Homo sapiens
  chr5:14173630-14173670
  hypo
cttaagtgttctgtgagccgctaataaaaatcaccttgtc

SEQ ID NO: 254580 - DNA, 93 bp, Homo sapiens
  chr5:14253721-14253814
  hypo
gattacgggcatgaactcccgcacctggccagtgctgggattcttgatcaaaagtgtttgaagactatgcccttaaagcggcaattctcaaag

SEQ ID NO: 254581 - DNA, 134 bp, Homo sapiens
  chr5:14269364-14269498
  hypo
tctatggacaggagcgatttacattaagaaatcagatcacaccgctgatttattcattctttgtttctatgaatgataatgttgtagagactgaattctgctatattcctcccgaagatgttgattttgttgct

SEQ ID NO: 254582 - DNA, 181 bp, Homo sapiens; identical to SEQ ID NO: 210075
  chr5:14273915-14274096
  hypo

SEQ ID NO: 254583 - DNA, 86 bp, Homo sapiens
  chr5:14286806-14286892
  hypo
tttatggtacaagggagggacgagaaggagctgagcacagtgtgctccttcccctgcctccgcacgtgtccagcaggggagggaag

SEQ ID NO: 254584 - DNA, 190 bp, Homo sapiens; identical to SEQ ID NO: 210076
  chr5:14303326-14303516
  hypo

SEQ ID NO: 254585 - DNA, 41 bp, Homo sapiens
  chr5:14315628-14315669
  hypo
ggattacaggcgagagacaccacacccggcctgcttactag

SEQ ID NO: 254586 - DNA, 191 bp, Homo sapiens; identical to SEQ ID NO: 210077
  chr5:14319946-14320137
  hypo

SEQ ID NO: 254587 - DNA, 105 bp, Homo sapiens; identical to SEQ ID NO: 210078
  chr5:14325452-14325557
  hypo

SEQ ID NO: 254588 - DNA, 481 bp, Homo sapiens; identical to SEQ ID NO: 210079
  chr5:14328242-14328723
  hypo

SEQ ID NO: 254589 - DNA, 315 bp, Homo sapiens; identical to SEQ ID NO: 210080
  chr5:14332850-14333165
  hypo

SEQ ID NO: 254590 - DNA, 159 bp, Homo sapiens; identical to SEQ ID NO: 210081
  chr5:14338464-14338623
  hypo

SEQ ID NO: 254591 - DNA, 314 bp, Homo sapiens; identical to SEQ ID NO: 210082
  chr5:14348848-14349162
  hypo

SEQ ID NO: 254592 - DNA, 142 bp, Homo sapiens
  chr5:14369627-14369769
  hypo
tgaaggtaggggcagcgctgcgggacagtgcacccatcagaggcttcctgcctgccaggtgcgcgtggcacagtcatcgcttcccaagggagcctgccccacacctcttgcctgctgtggaatgtaacggggcagtgtcgca

SEQ ID NO: 254593 - DNA, 175 bp, Homo sapiens; identical to SEQ ID NO: 210083
  chr5:14378048-14378223
  hypo

SEQ ID NO: 254594 - DNA, 102 bp, Homo sapiens; identical to SEQ ID NO: 210084
  chr5:14381249-14381351
  hypo

SEQ ID NO: 254595 - DNA, 263 bp, Homo sapiens
  chr5:14390712-14390975
  hypo
aggcagacaggtgaacgtgcggtcatgctgtccaaagcccacagccagctctgcacgcgtgactgtggaaagagaggactggtgctcagcccgacgtgtcggggtcggggaggctgctgcagctgcatgctgtcagaacgatgtgtttcttatttcagtagctttctttttaaaatagagtctcttcaactcgaggcttaaatttccgttatccatactgcttcttttctatatgaaagtttatcatgcgttgacttgttatg

SEQ ID NO: 254596 - DNA, 188 bp, Homo sapiens
  chr5:14405986-14406174
  hypo
ataaagcatatccgcgaagtcatccaggagcggacgatccacctgaagggagccctgaaggagcccattcacatccctaagaccgctcccgccacaagacagaagggaaggaggtgcgtgtctgggcgccactggaggtttgtggatgtgggagggaggggcgaggcggtgttagctcaccctgcttc

SEQ ID NO: 254597 - DNA, 435 bp, Homo sapiens; identical to SEQ ID NO: 210086
  chr5:14409998-14410433
  hypo

SEQ ID NO: 254598 - DNA, 100 bp, Homo sapiens
  chr5:14414264-14414364
  hypo
ctcttccccgccctcgttcccttttccacttcatagccagaaagcgtttacctgccacgccacagggccgcctgtggggcctgcacggcacctccggcat

SEQ ID NO: 254599 - DNA, 145 bp, Homo sapiens
  chr5:14420065-14420210
  hypo
tggttcactgtgcatcgcccactccagaagtagcatggaaatggagggcatcttcaaccacaaaggtaggaatcagtggggcatgggtggcagacccctactggaagtggccctggagcgctctgtctccgcgcctctcctgcct

SEQ ID NO: 254600 - DNA, 138 bp, Homo sapiens
  chr5:14426765-14426903
  hypo
ggtagagaaagcagcgagtctccgcagatggccggcactgagagccagcaagaagcggaggagatgggccttcagcagggggttgcggggggagctttaaactgagccctgtaaacatggcagaactgctcagtggga

SEQ ID NO: 254601 - DNA, 327 bp, Homo sapiens; identical to SEQ ID NO: 210087
  chr5:14427574-14427901
  hypo

SEQ ID NO: 254602 - DNA, 39 bp, Homo sapiens
  chr5:14431087-14431126
  hypo
tgggattacaggcatgagccactgcgcctggcctgaatt

SEQ ID NO: 254603 - DNA, 105 bp, Homo sapiens; identical to SEQ ID NO: 210088
  chr5:14435287-14435392
  hypo

SEQ ID NO: 254604 - DNA, 136 bp, Homo sapiens
  chr5:14441380-14441516
  hypo
ggacacgctggactcgctgtcctctgtcagttcagcctactgcagcggcgggcagccgggcacctgcaagtactggatcctcgacctaggtacacaagctctctgcagatgctcgggctggcgctgctttctctct

SEQ ID NO: 254605 - DNA, 160 bp, Homo sapiens; identical to SEQ ID NO: 210089
  chr5:14454341-14454501
  hypo

SEQ ID NO: 254606 - DNA, 317 bp, Homo sapiens
  chr5:14459375-14459692
  hypo
tcacctgcagcagggaatggcgtccagagccagagaggcagtgcagcccctacaggtatctgtgcaaaggagtagctcacaagattacttgacttgagaagatagcaagcacagtgaatgatcaccattgtcaccgttctgctttctaaagttggtcacttcattccatgccaccgtggtggagcccctgagccaagagctcaggaaggggcccagcagctttcacgctcactggtgtgcgagttgtacagtagacgtcacacaagtccatggattggctgagtgtctgctgtcacccaaatttcagatttttgaat

SEQ ID NO: 254607 - DNA, 155 bp, Homo sapiens; identical to SEQ ID NO: 210090
  chr5:14460339-14460494
  hypo

SEQ ID NO: 254608 - DNA, 268 bp, Homo sapiens; identical to SEQ ID NO: 210091
  chr5:14461124-14461392
  hypo

SEQ ID NO: 254609 - DNA, 187 bp, Homo sapiens; identical to SEQ ID NO: 210092
  chr5:14485223-14485410
  hypo

SEQ ID NO: 254610 - DNA, 122 bp, Homo sapiens
  chr5:14487503-14487625
  hypo
ttcctccctcaccccgcggcgtgctccttggcgccctgacccagtctctcccgctgtcttgtcttacagccttgacatcgccaatcgagtaccagaggaaccacagcgggggcggcggcggc

SEQ ID NO: 254611 - DNA, 709 bp, Homo sapiens; identical to SEQ ID NO: 210093
  chr5:14487989-14488698
  hypo

SEQ ID NO: 254612 - DNA, 183 bp, Homo sapiens; identical to SEQ ID NO: 210094
  chr5:14489508-14489691
  hypo

SEQ ID NO: 254613 - DNA, 168 bp, Homo sapiens; identical to SEQ ID NO: 210095
  chr5:14492758-14492926
  hypo

SEQ ID NO: 254614 - DNA, 175 bp, Homo sapiens; identical to SEQ ID NO: 210096
  chr5:14493321-14493496
  hypo

SEQ ID NO: 254615 - DNA, 537 bp, Homo sapiens
  chr5:14498253-14498790
  hypo
gttgttcttagatgtcgagtctgtggccgccccaaagcctcaattacctggaagggccctgaacacaacaccttgaacaacgatggtcactacagcatctcctacaggtgagggaggcccactcctggtgggtttcgctggctgggagcaccatcttgtcacttggcaactggaaattcctccttcacggatggatttctttggctgccttcggcactccacttcttccgtgagagcccatttcacgcctgggtgtacagctcctcatcagcacttgagctcctgccttcccttgatcctgaaggaggaggccagcgctgatggccacgtgctcagcttttctgatgcgcagtgtgttcccatctgtgccgcagtgacctgggagaggccacgctgaagattgtgggcgtgaccacggaagatgacggcatctacacgtgcatcgctgtcaatgacatgggttcagcctcatcgtcggccagcctgagggtcctaggtaagcaccgtgcaacgaggattctacgtgacccagtgggg

SEQ ID NO: 254616 - DNA, 189 bp, Homo sapiens
  chr5:14501759-14501948
  hypo
ttggacatggtttaaggaaacgcattcccagtgacaacctggggagaggtgaggaagcccacgtgaagatagggatgggcagatgctcggcctgggctggactgcaggtcaggtgagcgggccgaaagaggggagaggaaactaagtggggagaggaggctggatgagtggggtcgggagggccaggct

SEQ ID NO: 254617 - DNA, 141 bp, Homo sapiens
  chr5:14502171-14502312
  hypo
accatgtaaaaccctgtggacgttaagtaaatactgtggactcttgatctctcacggctgtgaaaggaggcgtggggaggagagagcaacttagcctcgaggtggtgcggccaggtgaacggggaggaccatctgtagcag

SEQ ID NO: 254618 - DNA, 98 bp, Homo sapiens; identical to SEQ ID NO: 210098
  chr5:14504056-14504154
  hypo

SEQ ID NO: 254619 - DNA, 369 bp, Homo sapiens
  chr5:14507312-14507681
  hypo
gttctggaagctgtccggtacctgcacaactgcaggatagcacacctggacctaaaggttggtgaggccccgggcaggtgaaggggggtctgagcacaccggcttggccatgcgggacacagagccccctctgaagccaggccaggagcccccaagtgactagggacaaaaagggtgggtggggcagcgcagacactgattgctaatctctctctctaagcgtttgcgttcagtgatgcacacggtcaggagcacactgggtaaaacgccggagccctcccagccttccacgactttcagaaagtccccatgagttttgcccggtgggtgtggcgggtgcagtggtagcttaggcgggaaagagagcat

SEQ ID NO: 254620 - DNA, 142 bp, Homo sapiens; identical to SEQ ID NO: 210100
  chr5:14508326-14508468
  hypo

SEQ ID NO: 254621 - DNA, 76 bp, Homo sapiens
  chr5:14523713-14523789
  hypo
atgacacctattagaataaccgcatccagaaccctgataccaccagacgctggtgagaatgtggagccacgggcac

SEQ ID NO: 254622 - DNA, 137 bp, Homo sapiens
  chr5:14681597-14681734
  hypo
tcacctccatacggcgagtccgtggtgataattactgtgcactgagggccacgctgttccaggccatgagccaggctgtggggctgccgccctggctgcaggacccggagctcatgctggtacgctgctgctgcagg

SEQ ID NO: 254623 - DNA, 321 bp, Homo sapiens
  chr5:14725552-14725873
  hypo
gttgattcacattccggtgctagcttcttatcccatcacggatggccagacctctggcactcatctgcaaaccccgagcctgcgagcactgcagtttgcataaaccgcttttccagcaccggcacaccaaatgtgatccacggatgtcacctgtgagtattccagaaggtttcctgggaccgtattctaacaaaacgctagcaggggagtcctctggaggtggtgagattaggactgattgaattttcctctttgtatttttccgtggcttccacaaagaacatgtattctttttatcagaaaaacatttttttttctttt

SEQ ID NO: 254624 - DNA, 277 bp, Homo sapiens
  chr5:14726310-14726587
  hypo
taacactatgctgtcttgctcgactttccagagagagctgacgcagccataaggaatgctgtttggccttttgtttcttagtgccagactgcaccagctgcatgcacgtaaggaaggaggacagttcacgaagggtttcacaggtcatggtcacgactctggctttcactcggagggatgtgagagccatggcaggttgtgggtggaggagaggcagggcaagcaggggaagggctgaatcaaggatcctcgtcacggctactgtgaccatccaggt

SEQ ID NO: 254625 - DNA, 222 bp, Homo sapiens
  chr5:14734656-14734878
  hypo
aaaaccgaaagagccgggctgggcacctgcctctttgaggtggaactcgggtcaggcagcactcggcaggtgcagggatccgtggggcccaggctttacttccttaagggctcagaggggctggtgagcagtgcgtgtctgcaggcccagggtataaacaacgtgtcttccctgttgctttcaaactcattcaggtggtgggccccacgtgggttcttggca

SEQ ID NO: 254626 - DNA, 273 bp, Homo sapiens
  chr5:14756369-14756642
  hypo
ctctgtctctcaagcgtctcagtcccaaagtagcatccttcccacgtgatgcagatcataatgagggctctcatttgggtctgagttattacagtcattaccggtgctcactgactgattagggcctactgttttcttgccttcaagtttgggcaggatctgacctgacactttgggagatgaggaggaagatgctacgaggggagcagacgaaaagcccgaggaacagcaggtctggagaaggtttcaagttcatgacgggctctgtttaag

SEQ ID NO: 254627 - DNA, 39 bp, Homo sapiens
  chr5:14774554-14774593
  hypo
ttttttcctcaagacacagtcgcgctctgtcgcccagtc

SEQ ID NO: 254628 - DNA, 38 bp, Homo sapiens
  chr5:14774713-14774751
  hypo
tcattaagttactatacgtccttcagtcacctactgtt

SEQ ID NO: 254629 - DNA, 161 bp, Homo sapiens
  chr5:14780229-14780390
  hypo
tcactgtgaatgaacggtgcctggatgggcgacagggcattcaggagaagtggctgtgcaagtcaggacgtgccaagggctgctgggccctgaccttgttatacacattcatgaccacatggttagaaaataaaatcatgggccagacatggtggctcacg

SEQ ID NO: 254630 - DNA, 132 bp, Homo sapiens
  chr5:14780932-14781064
  hypo
aaagacaactcctccgtctacagcttcaatgatctcattatacttacgatgacatcaaggaaactgaccattgtagtagacgaaatctagttttaaaatgtgccttacaccctaagtcgtcagaaaatgtac

SEQ ID NO: 254631 - DNA, 85 bp, Homo sapiens
  chr5:14789325-14789410
  hypo
aaaccctgtctccaaaaacaacaacaacaacaactcagttagcatatataccatagtatttatttaagaacgtaagaatggttcc

SEQ ID NO: 254632 - DNA, 34 bp, Homo sapiens
  chr5:14839001-14839035
  hypo
gttggccaaggaaccgactcgctatccacgtgaa

SEQ ID NO: 254633 - DNA, 212 bp, Homo sapiens
  chr5:14846242-14846454
  hypo
agcatgagccaccgcgcccggccgtaaaacttattttgatgcagccaaattctaatctctgagcatcttttggtaaatatgcataaggcagtgtgtcaaactgcgaggaggtcataatcttaaaagattaaagactgttacctaagtgtctactatttccatgatacaaggattcccactgctttcctttaattttccgtacaggcaatgcc

SEQ ID NO: 254634 - DNA, 110 bp, Homo sapiens; identical to SEQ ID NO: 210101
  chr5:14849840-14849950
  hypo

SEQ ID NO: 254635 - DNA, 39 bp, Homo sapiens
  chr5:14934638-14934677
  hypo
tagcagggcatggtggctcacgcccgtaatcccacagtt

SEQ ID NO: 254636 - DNA, 33 bp, Homo sapiens
  chr5:14959676-14959709
  hypo
tgctccaaatagcgcgcccggggacctgggaaa

SEQ ID NO: 254637 - DNA, 44 bp, Homo sapiens
  chr5:15343332-15343376
  hypo
aatagtcacttgcccaaggccgtaaaatgttgagccaggaaagc

SEQ ID NO: 254638 - DNA, 872 bp, Homo sapiens
  chr5:15936621-15937493
  hypo
atggcaaacagatttccatccgctacctggacatgacggactgcttcgtgctggaggacgaaggcctgcacaccatcgcggcgcactgcacgcagctcacccacctctacctgcgccgctgcgtccgcctgaccgacgaaggcctgcgctacctggtgatctactgcgcctccatcaaggagctgagcgtcagcgactgccgcttcgtcagcgacttcggcctgcgggagatcgccaagctggagtcccgcctgcggtacctgagcatcgcgcactgcggccgggtcaccgacgtgggcatccgctacgtggccaagtactgcagcaagctgcgctacctcaacgcgaggggctgcgagggcatcacggaccacggtgtggagtacctcgccaagaactgcaccaaactcaaatccctggatatcggcaaatgccctttggtatccgacacgggcctggagtgcctggccctgaactgcttcaacctcaagcggctcagcctcaagtcctgcgagagcatcaccggccagggcttgcagatcgtggccgccaactgctttgacctccagacgctgaatgtccaggactgcgaggtctccgtggaggccctgcgctttgtcaaacgccactgcaagcgctgcgtcatcgagcacaccaacccggctttcttctgaagggacagagttcatccggcgttgtattcacacaaacctgaacaaagcaaatttttttaaaagcagcgtatgtaagcaccgacacccactcaaaacagctctttcttccgggaaggttattaggaatctggcctttatttttcctcatttctcatgggcaacagaggccaaagaaacgaagcaagacaaacagcaaac

SEQ ID NO: 254639 - DNA, 42 bp, Homo sapiens
  chr5:16032775-16032817
  hypo
tcatgtagcatctttattaccgcactctaaaccaccatctag

SEQ ID NO: 254640 - DNA, 75 bp, Homo sapiens
  chr5:16467046-16467121
  hypo
agagcaagattccatctcaaaagaaaaagaaaacatgaacttcaaatgcttggggaggtcgtagatttcatccac

SEQ ID NO: 254641 - DNA, 35 bp, Homo sapiens
  chr5:16488904-16488939
  hypo
gaccttaggccgggcgtggtggctcacgcctataa

SEQ ID NO: 254642 - DNA, 35 bp, Homo sapiens
  chr5:16503482-16503517
  hypo
aaataattccatagaccaagcgcagtggctcacac

SEQ ID NO: 254643 - DNA, 204 bp, Homo sapiens
  chr5:16668250-16668454
  hypo
accacactgtattttcgtgttttgaagaaaaatattcaaagaaaatgacctggtcaaaggcatgaggaaatggggtcctgtttttctgttttgtcaagaccatgaataaaaagatgaacttgctttgcctcttacctcactggtttcaaagagcagctccctctcatcgaccacgatcttatacgtattcgccaggggtgcccc

SEQ ID NO: 254644 - DNA, 384 bp, Homo sapiens; identical to SEQ ID NO: 210104
  chr5:16670787-16671171
  hypo

SEQ ID NO: 254645 - DNA, 36 bp, Homo sapiens
  chr5:16671882-16671918
  hypo
gtgttttcagagagccgcattcgaattagtaccagc

SEQ ID NO: 254646 - DNA, 42 bp, Homo sapiens; identical to SEQ ID NO: 210105
  chr5:16674283-16674325
  hypo

SEQ ID NO: 254647 - DNA, 34 bp, Homo sapiens
  chr5:16680075-16680109
  hypo
gctgggtgggggtgtcgatcggggccttggtgtc

SEQ ID NO: 254648 - DNA, 311 bp, Homo sapiens; identical to SEQ ID NO: 210106
  chr5:16681935-16682246
  hypo

SEQ ID NO: 254649 - DNA, 803 bp, Homo sapiens
  chr5:16701010-16701813
  hypo
gcaacaggggtgggtgtgaccggccacccatttcactgggacacgccaggcaggtacttaccgaggactgcgccccctcagagctgaaccggtaggcacccgagctgttgtaggtccccacagagcagcggtagtcgggggaccactggctgccgtaggagttggagaaggtcacgctgctgccggaagtgatggcaccgtcctcatagtcatcctggtcgtagtcgtagtcgccgtctggggagggcaagtccccagcgttctggggcatgcagtaggtggactcgccgctggaggagttgtgtaggctcccggagtcctgcactgatggggcgagcagcaccgtgctgtccgcactggggctggtgggcaccaccgtgtcgttcatgtatgggtcctcctctgaagagtcatcgctggtccggatgccacttgttcgctggtctgagtggccgtgctcgctggggttgggggagtccttgaaggcgtcgtcgtcggcttcgaagccctcatcgacctcctcctctgggtagggctggctgaagttgaagttgggcttctcctcgcatgcgctctcagccagctcgctggaaaattcgcttcccaccgacagggaccgctcgatattccggacacactcgtcgatctcgtcgaaattgagggactcgaggaactcctgggccgccctgcacgcttcctcctccagcctgcggagctcctggtcccgccgctcctgcagcttctgcagggaagcctcggtcagcgacagctcctgctgctccttcatgcgctgcaggtcctcg

SEQ ID NO: 254650 - DNA, 31 bp, Homo sapiens; identical to SEQ ID NO: 210108
  chr5:16729562-16729593
  hypo

SEQ ID NO: 254651 - DNA, 248 bp, Homo sapiens
  chr5:16744497-16744745
  hypo
tgatgaggcctgggcgaaacctgggtgcacacctttgatctattgtatcggtggcttcatggctcctctgcacctgggtggctgtgcgatacccttcccatgccaacgggattatggtgtatcataatgtgctagacccagagcaccccgacaccctgggtctcagcaggcgcggcgcagggcttcctgtgcccttggtgcaggacatgaaggactgagtcacccaggccctgcgggtaactaagcag

SEQ ID NO: 254652 - DNA, 148 bp, Homo sapiens
  chr5:16745035-16745183
  hypo
aaaaatatttgacacgctcctatgaacgaatatctgacattttcacattaatctcaaatggccagaagaagagcagcgaatggaagatgcagaaatgcagatttcattcattacaattaagacctttcccaggccgggcgcggtagct

SEQ ID NO: 254653 - DNA, 134 bp, Homo sapiens
  chr5:16750563-16750697
  hypo
agattcttcaaccccagatgcgcgttctggggttcaaacacttggcaaggaggagaggcagcctgccgtagcagccagggcgggtaaagggggtgtgctcccactagcccggcgagtgtgtgagtctttatgcc

SEQ ID NO: 254654 - DNA, 161 bp, Homo sapiens
  chr5:16766144-16766305
  hypo
aggagtgtctagtaacgcaagatcagatggcaaagcgtgtgtacctgttgaacattgagaggcgtgaggatctcttctcccctgaggaacattgatctctgggtcaaagcatctgtgagctgtgttgggtccagcccaagtaactccgcagatctgcccaa

SEQ ID NO: 254655 - DNA, 311 bp, Homo sapiens; identical to SEQ ID NO: 210109
  chr5:16794680-16794991
  hypo

SEQ ID NO: 254656 - DNA, 42 bp, Homo sapiens
  chr5:16814253-16814295
  hypo
ttatttattttttcctgagacggagtctcgctctgtcaccca

SEQ ID NO: 254657 - DNA, 42 bp, Homo sapiens
  chr5:16814535-16814577
  hypo
cgtgagccactgtgcctggccgttttgtttttttaagttggt

SEQ ID NO: 254658 - DNA, 32 bp, Homo sapiens; identical to SEQ ID NO: 210110
  chr5:16816658-16816690
  hypo

SEQ ID NO: 254659 - DNA, 54 bp, Homo sapiens
  chr5:16920451-16920505
  hypo
aaaaggaacaaaaccggcacgtgtaccaacatggatgggcggcaaaggcactga

SEQ ID NO: 254660 - DNA, 33 bp, Homo sapiens; identical to SEQ ID NO: 210115
  chr5:16952528-16952561
  hypo

SEQ ID NO: 254661 - DNA, 120 bp, Homo sapiens
  chr5:16964573-16964693
  hypo
cgaagtgttgggattacaggcgtgagccacgacattttcatttaaaatgggcattgtgcgatataatatgaatgttgaggccgagcgtggtggaggttgcagtgagccaagatcgcgcca

SEQ ID NO: 254662 - DNA, 88 bp, Homo sapiens
  chr5:16968119-16968207
  hypo
gaactagaagagaacgtaatttcactttgctgccttaagtcttatgaaatggtctttcttggccaggcgcgatggctcacgcttgtaa

SEQ ID NO: 254663 - DNA, 120 bp, Homo sapiens; identical to SEQ ID NO: 210116
  chr5:16969886-16970006
  hypo

SEQ ID NO: 254664 - DNA, 37 bp, Homo sapiens
  chr5:17006738-17006775
  hypo
gccatggccaggcacggtggctcacgcctgtaatccc

SEQ ID NO: 254665 - DNA, 32 bp, Homo sapiens; identical to SEQ ID NO: 210117
  chr5:17032024-17032056
  hypo

SEQ ID NO: 254666 - DNA, 35 bp, Homo sapiens
  chr5:17159691-17159726
  hypo
ttgggattacaggcatgaaccgctgtgcttagctt

SEQ ID NO: 254667 - DNA, 35 bp, Homo sapiens; identical to SEQ ID NO: 210118
  chr5:17161190-17161225
  hypo

SEQ ID NO: 254668 - DNA, 669 bp, Homo sapiens
  chr5:17275349-17276018
  hypo
aagaagggctacaatgtgaacgacgagaaagccaaggagaaagacaagaaggccgagggcgcggcgacggaagaggaggggaccccgaaggagagtgagccccaggcggccgcagagcccgccgaggccaaggagggcaaggagaagcccgaccaggacgccgagggcaaggccgaggagaaggagggcgagaaggacgcggcggctgccaaggaggaggccccgaaggcggagcccgagaagacggagggcgcggcagaggccaaggctgagcccccgaaggcgcccgagcaggagcaggcggcccccggccccgctgcgggcggcgaggcccccaaagctgctgaggccgccgcggccccggccgagagcgcggcccctgccgccggggaggagcccagcaaggaggaaggggaacccaaaaagactgaggcgcccgcagctcctgccgcccaggagaccaaaagtgacggggccccagcttcagactcaaaacccggcagctcggaggctgccccctcttccaaggagacccccgcagccacggaagcgcctagttccacacccaaggcccagggccccgcagcctctgcagaagagcccaagccggtggaggccccggcagctaattccgaccaaaccgtaaccgtgaaagagtgacaaggacag

SEQ ID NO: 254669 - DNA, 44 bp, Homo sapiens
  chr5:17298136-17298180
  hypo
tattttattttattttatttcgagacagagtctcgctgtgttac

SEQ ID NO: 254670 - DNA, 378 bp, Homo sapiens; identical to SEQ ID NO: 210122
  chr5:17354380-17354758
  hypo

SEQ ID NO: 254671 - DNA, 183 bp, Homo sapiens
  chr5:17491366-17491549
  hypo
cacatcagaactaccagttacgggggaagagaaaaaagaaaacacaagcaaacagaaaagaagtcctctagagtgcaaggtttcccaggagcgtgggctctccggcaccctctccacggaggcggcgggccagctgcatgtctcggggcataattgtgacgcgcctggcatggatggcacaca

SEQ ID NO: 254672 - DNA, 42 bp, Homo sapiens
  chr5:17491985-17492027
  hypo
cctgtgagttgagatccatgcgcaggactctcccacacactt

SEQ ID NO: 254673 - DNA, 156 bp, Homo sapiens
  chr5:17512036-17512192
  hypo
tagggggaccaggtaggcctcgctgttctcctgaagtcgccagtggccgcacattggaagcgcaggtctgggttgatggcctgggtgatctcacgcattaggcattggaaggtcagcttgtgcagaagcagctgcgtggacttatggtacttcctg

SEQ ID NO: 254674 - DNA, 159 bp, Homo sapiens; identical to SEQ ID NO: 210123
  chr5:17670364-17670523
  hypo

SEQ ID NO: 254675 - DNA, 42 bp, Homo sapiens
  chr5:17670808-17670850
  hypo
gttgagatctgtgcagaagacgcaaccccactcttagcccct

SEQ ID NO: 254676 - DNA, 34 bp, Homo sapiens
  chr5:17924526-17924560
  hypo
ttttttttttttttttgagacggagtcttgctct

SEQ ID NO: 254677 - DNA, 34 bp, Homo sapiens
  chr5:17924800-17924834
  hypo
ttacaggcatgagccaccgcgcccggccgaaaat

SEQ ID NO: 254678 - DNA, 137 bp, Homo sapiens
  chr5:18034128-18034265
  hypo
agctaaaatctacatatttgcgactttatgtgctttgaactacatttccacatttcctctctcccaccaccgttttattctctgtgtatatttgtccttttaaaaaaagattccggccgggcgcggtggctcgcgcc

SEQ ID NO: 254679 - DNA, 66 bp, Homo sapiens
  chr5:18119293-18119359
  hypo
caagggaggcagtgagtgagcgtgccacccagcaggagaaactgcgcttttgctgtggaactgtgt

SEQ ID NO: 254680 - DNA, 31 bp, Homo sapiens
  chr5:18296459-18296490
  hypo
gttctgggattacaagcgtgacccaccgcgc

SEQ ID NO: 254681 - DNA, 36 bp, Homo sapiens
  chr5:18380066-18380102
  hypo
taatctgacttcaggctgggcgcagtggctcacgcc

SEQ ID NO: 254682 - DNA, 110 bp, Homo sapiens; identical to SEQ ID NO: 210125
  chr5:18482130-18482240
  hypo

SEQ ID NO: 254683 - DNA, 226 bp, Homo sapiens
  chr5:18793520-18793746
  hypo
gcccagcttgggggggacaccggacgactggaggccacatgtggacttagcaatccaccgctccatgtacctggatacgtttccaggcaaggcttcatagacagttgtgaagaccggtcagtgaaagtgaaacctgtatctttgcaccgtggcatcatcagctgcttggctccccgcttatgcactgtgtatgtctctcccgtacgtgagtacattttgggggtgg

SEQ ID NO: 254684 - DNA, 31 bp, Homo sapiens
  chr5:19289324-19289355
  hypo
tgtcaagatcataaactggccgggcgcggtg

SEQ ID NO: 254685 - DNA, 94 bp, Homo sapiens
  chr5:23726883-23726977
  hypo
tgcatggtaatacgcaaatacgttgcatacattaactatgtgaatgacagaagaaagaatttgcgtaaaaacaacaaagctatgtgatgtgatt

SEQ ID NO: 254686 - DNA, 42 bp, Homo sapiens
  chr5:24294250-24294292
  hypo
gtttttctgtttctctttatcgaggatttgtgttatgctctt

SEQ ID NO: 254687 - DNA, 42 bp, Homo sapiens
  chr5:26324223-26324265
  hypo
aaggttgctgctggaccagccgtacctcaaacacctttcaca

SEQ ID NO: 254688 - DNA, 33 bp, Homo sapiens; identical to SEQ ID NO: 210126
  chr5:27121727-27121760
  hypo

SEQ ID NO: 254689 - DNA, 33 bp, Homo sapiens; identical to SEQ ID NO: 210127
  chr5:27121940-27121973
  hypo

SEQ ID NO: 254690 - DNA, 137 bp, Homo sapiens
  chr5:27217838-27217975
  hypo
tggatgtcaagaggagcacaacagaggaggaacacagaggtggctagacacagagagtaacacactgacggctggacatacggagtaaaacaccgacaggcacgggcaccctggcaggccaccgaccattagaaata

SEQ ID NO: 254691 - DNA, 229 bp, Homo sapiens
  chr5:27523815-27524044
  hypo
gatgatactggcctggactccgcacctgctgaggatgagcccctcgaggagcggcgcggggtgtgtgggagaacaatcacgggctccggccaccgtgcacagccacgcacaccggctagcacagtggggagggcagctccaggtgcctgcacacgtgccggctgcgtgcaaggctcctgctgaaccggatgtactgcacacggcttccgctgcaggcacctgcatctgg

SEQ ID NO: 254692 - DNA, 55 bp, Homo sapiens
  chr5:29379762-29379817
  hypo
agtttattcaaaaacactctcgcaatggggaaacgctctaacctcaagatctgca

SEQ ID NO: 254693 - DNA, 32 bp, Homo sapiens; identical to SEQ ID NO: 210129
  chr5:30864345-30864377
  hypo

SEQ ID NO: 254694 - DNA, 99 bp, Homo sapiens
  chr5:31410341-31410440
  hypo
gtgtataatcctttcgttaactataataggattatttacaatgctgccagaccatatcggaaactgcaaaagacgacatttgtccgcagagctttgcac

SEQ ID NO: 254695 - DNA, 160 bp, Homo sapiens
  chr5:31424609-31424769
  hypo
agggagccatttaacgcactctagagtactaaataaaatgtcattatttgaaatacggaactatttcagacactgactccacttatggcaaattcaacagtgctggcaaactaattttttttttaagtgtattcaccactcaaaccgcctgtagtgactc

SEQ ID NO: 254696 - DNA, 160 bp, Homo sapiens
  chr5:31435824-31435984
  hypo
aagagcatgtcagacgtaactacaaatgctgcagatgtcttctatacctttgctagcatggcaaggtgctgattctgaacaatggcagtccgataggttgctaatcctccttcttccagactaggaaacaaatagtacaaatggacgctacaaaaaaaaa

SEQ ID NO: 254697 - DNA, 46 bp, Homo sapiens
  chr5:31599717-31599763
  hypo
acacaagccttgaggatggccgcacgggaaccagtgactacaaaca

SEQ ID NO: 254698 - DNA, 42 bp, Homo sapiens
  chr5:31662738-31662780
  hypo
tcccctttctttttttgagacggagtctggctctgtagccca

SEQ ID NO: 254699 - DNA, 31 bp, Homo sapiens; identical to SEQ ID NO: 210130
  chr5:31670494-31670525
  hypo

SEQ ID NO: 254700 - DNA, 31 bp, Homo sapiens; identical to SEQ ID NO: 210131
  chr5:31724694-31724725
  hypo

SEQ ID NO: 254701 - DNA, 155 bp, Homo sapiens
  chr5:31750621-31750776
  hypo
gtgcaagtgcatgtgtaacacgagggtccgccaaggatgggtgccgcgagggtgaggagtgtggtcctgaggggcgccgctccagggaggatatttgggaaggtccgagtgggtgctgtgacgggcagatccacggatagtttcaggcagaggga

SEQ ID NO: 254702 - DNA, 42 bp, Homo sapiens
  chr5:31758533-31758575
  hypo
aaatggaccacaaaggagcacgtccaggccctaccctggggg

SEQ ID NO: 254703 - DNA, 42 bp, Homo sapiens
  chr5:31797549-31797591
  hypo
accctgtctgggattacacacgcctgggattacaggcgcctg

SEQ ID NO: 254704 - DNA, 41 bp, Homo sapiens
  chr5:31797711-31797752
  hypo
ttacaggtgtgagccaccgcgcccagccttgcatttctttt

SEQ ID NO: 254705 - DNA, 57 bp, Homo sapiens; identical to SEQ ID NO: 210133
  chr5:31908394-31908451
  hypo

SEQ ID NO: 254706 - DNA, 92 bp, Homo sapiens
  chr5:32004111-32004203
  hypo
ccagcctctcctgctagtttggaaaatggggaaggggatggcttttctttgtcaagtcgttatccagaaacacaaaacgtaagattaaaaaa

SEQ ID NO: 254707 - DNA, 32 bp, Homo sapiens
  chr5:32012491-32012523
  hypo
ttttttttgttttttagagacggagtcttgct

SEQ ID NO: 254708 - DNA, 35 bp, Homo sapiens
  chr5:32184016-32184051
  hypo
attacaggcgtgaaacaccgcgcccggcctcacat

SEQ ID NO: 254709 - DNA, 34 bp, Homo sapiens
  chr5:32199875-32199909
  hypo
cgttgctctccattcttgccgacaactggtattg

SEQ ID NO: 254710 - DNA, 101 bp, Homo sapiens; identical to SEQ ID NO: 210134
  chr5:32314457-32314558
  hypo

SEQ ID NO: 254711 - DNA, 44 bp, Homo sapiens; identical to SEQ ID NO: 210135
  chr5:32333128-32333172
  hypo

SEQ ID NO: 254712 - DNA, 228 bp, Homo sapiens; identical to SEQ ID NO: 210136
  chr5:32445349-32445577
  hypo

SEQ ID NO: 254713 - DNA, 33 bp, Homo sapiens; identical to SEQ ID NO: 210137
  chr5:32446098-32446131
  hypo

SEQ ID NO: 254714 - DNA, 76 bp, Homo sapiens
  chr5:32526515-32526591
  hypo
ttactcacttctaatcgtgtttctccctatttgtgaaataacatgaaatccttctccacgccgggcgcggtggctc

SEQ ID NO: 254715 - DNA, 217 bp, Homo sapiens
  chr5:32584344-32584561
  hypo
gattacaggggtgagccaccgcgcctgatgtcagtgtttattttcatggcttcttttatttcattatgatggagagtttcacaacaaactaagggattagtttgtatttttgtcagcatttaatcctttaaaagtcaggtaattctagaaagggacgtgtgggggatgctttcacgtttagtgttcagactttgattccatccgctgtgttctttgc

SEQ ID NO: 254716 - DNA, 88 bp, Homo sapiens
  chr5:32640983-32641071
  hypo
caggttatgtaggccgggctgcctgccagaaacctcctgctgcggtggggtgccctgggccacgaggccttaagacagatgggaacgg

SEQ ID NO: 254717 - DNA, 37 bp, Homo sapiens
  chr5:32754968-32755005
  hypo
tttctttttttcttttgagacggagtcttgttctgta

SEQ ID NO: 254718 - DNA, 37 bp, Homo sapiens
  chr5:32755245-32755282
  hypo
gtgagccaccgcgcccggccaagagatttaatttctt

SEQ ID NO: 254719 - DNA, 35 bp, Homo sapiens; identical to SEQ ID NO: 210139
  chr5:32764594-32764629
  hypo

SEQ ID NO: 254720 - DNA, 359 bp, Homo sapiens; identical to SEQ ID NO: 210140
  chr5:32782525-32782884
  hypo

SEQ ID NO: 254721 - DNA, 111 bp, Homo sapiens
  chr5:32793679-32793790
  hypo
ccttttctgtacaccgcccctctctaaagggtcccgataagggccgagaaagggacagtgatagccacattgcctctgaagctttcagagggcctgcgcagctttactcaa

SEQ ID NO: 254722 - DNA, 109 bp, Homo sapiens
  chr5:32855654-32855763
  hypo
tagtactttaagtatgttttcgttattgtgagcaaatacccacaacgttttcgtcttgcagatctgaaactctatacccattaaacaaaaccttcgctttacacgcccc

SEQ ID NO: 254723 - DNA, 326 bp, Homo sapiens
  chr5:32934066-32934392
  hypo
accacaccagaccacgtaattagaaattacttcagcacataaacaggtactttacaatgtttttttgacaacgggcagcacgcttctcctttccactgccagaggggaaccagcgttggcttcccatgggcccacctcctcttcagcccagccccgtcttcccctacagagaaagcagcagacacagtcacacgggaacatctgctctaaatgtgggccccttccaggggccctggctcaagaggagcgggtaaaatggcctcctttaacctaaatcaccgcggccacggtgccctccccctccgccctcccgttctcccatcaac

SEQ ID NO: 254724 - DNA, 34 bp, Homo sapiens
  chr5:33035691-33035725
  hypo
agccaccgcgcccggcccccagcctaatgtttaa

SEQ ID NO: 254725 - DNA, 493 bp, Homo sapiens
  chr5:33162235-33162728
  hypo
tggcttaagatttttttgggcggtttctctttccagccagcgccgagcgatgggcatctctcgggacaactggcaccagcgccgcaaaaccgggggcaagagaaagccctaccacaagaagcggaagtatgagttggagcgcccagctgccaacaccaagattggcccccgccgcatccacacagtccgtgtgcagggaagtaacaagaaataccgtgccctgaggttggacgtgggggaatttctcctggggctcagagtgttgtactcgtaaaacaaggatcatcgatgttgtctacaatgcatctaataatgagctggttcgtaccaagaccctggtgaagaattgcatcgtgctcatcgacagcacaccgtgccgacagtggtaagatgtcccactacgtgctgcccctgggccgcaagaagggagccaagctgactcctgaggaagaagagattttaaacaaaaaacgatttaaacaaattcagaaga

SEQ ID NO: 254726 - DNA, 41 bp, Homo sapiens
  chr5:33234417-33234458
  hypo
ttacaggcgtgagctgacacgcctggctgaatttcttcttt

SEQ ID NO: 254727 - DNA, 324 bp, Homo sapiens
  chr5:33297914-33298238
  hypo
tgctgttttaatgacggcctgggtgcaggcgggccccaagtgacgactgggcaaagttttatagtctcctgtaaacagtaagtgtcacagtccgatgtaactgctacgttgtacccggatggcctttttctggatcttcgtgtcttccggccagggtaggtgtcttcccccggctctcttcctgcttctgctatcgcgcaccctgctggcgcaccctgctggcgcaccctgctggcgcaccctgctggcgcaccctgctggcgcaccctgctggcgcaccctgctggcgcaccctgctggcgcaagttgcgccttgggactggg

SEQ ID NO: 254728 - DNA, 38 bp, Homo sapiens; identical to SEQ ID NO: 210143
  chr5:33311279-33311317
  hypo

SEQ ID NO: 254729 - DNA, 102 bp, Homo sapiens
  chr5:33442929-33443031
  hypo
cgctgtgaagtgggttctgttattatctccattatacagatgagaaagcaggcgtaggaacagtaacttgctcaaacccagtatccccgtttttttccttcc

SEQ ID NO: 254730 - DNA, 179 bp, Homo sapiens; identical to SEQ ID NO: 210144
  chr5:33502053-33502232
  hypo

SEQ ID NO: 254731 - DNA, 120 bp, Homo sapiens
  chr5:33509454-33509574
  hypo
atttcttgctttttttggttgttgttcgtttctttttttaaaggctgaatagtaccgtattctattgtatgtatgtataccaccttttaaaaatctattcattcaggctgggcgcggtga

SEQ ID NO: 254732 - DNA, 119 bp, Homo sapiens
  chr5:33530561-33530680
  hypo
aagcatcacaaagccgccccagtttcttagccagcctctcctgaagtctctgtggatggaggctggagagggcacaggtggggcggctctttgccccacaatctcgtcgctgtgtctgt

SEQ ID NO: 254733 - DNA, 39 bp, Homo sapiens
  chr5:33724926-33724965
  hypo
attacaggcgtgagccaccgcacccggccaacagcttct

SEQ ID NO: 254734 - DNA, 359 bp, Homo sapiens; identical to SEQ ID NO: 210147
  chr5:33984387-33984746
  hypo

SEQ ID NO: 254735 - DNA, 91 bp, Homo sapiens
  chr5:34147860-34147951
  hypo
tcagcatcacacaacagattcgtgtaacagacttgtatatgtaccctcatatctaaactaaaagttgaaattaaaaacaaaaacaagggcg

SEQ ID NO: 254736 - DNA, 39 bp, Homo sapiens
  chr5:34440316-34440355
  hypo
ttttaaaaaatggtctcttgcggccgggcgtggtggctc

SEQ ID NO: 254737 - DNA, 126 bp, Homo sapiens
  chr5:34491443-34491569
  hypo
agtgtctgccctctgggagtcggctttttctaagctgaatgcatgcagcagacatgcagaatagaccgtgggtgagccagacgctggggggatggcagggacagcgggagcaggcagcctgtctca

SEQ ID NO: 254738 - DNA, 182 bp, Homo sapiens
  chr5:34530162-34530344
  hypo
aagttctttctgctctgccacgctctccccgcatagatcagcgctcagaagctaaaggaggatgcagagcctggactgagaggacacaggcagacgcagaccagacatactgacttggctctccctcctcagcaagtagcaactggccaaataccacacacgaataacaaacaccttgcatt

SEQ ID NO: 254739 - DNA, 83 bp, Homo sapiens; identical to SEQ ID NO: 210148
  chr5:34551767-34551850
  hypo

SEQ ID NO: 254740 - DNA, 38 bp, Homo sapiens; identical to SEQ ID NO: 210149
  chr5:34586707-34586745
  hypo

SEQ ID NO: 254741 - DNA, 163 bp, Homo sapiens
  chr5:34591003-34591166
  hypo
ctgggattacagacgtgaaccactgtgcccaattttcctgcttcttcctaatctcttttcctccctctgaggatgaggataattcccaaagatgctaacaaagctgtgaatgtggaggaaccagaattttgctctgcgtctagggcaacgttttatttggttg

SEQ ID NO: 254742 - DNA, 33 bp, Homo sapiens
  chr5:34736210-34736243
  hypo
ataagaaaaattcagctgggcgcggtgactcac

SEQ ID NO: 254743 - DNA, 34 bp, Homo sapiens
  chr5:34756421-34756455
  hypo
cttccttttaagggtcgatcgtaaagctgttaat

SEQ ID NO: 254744 - DNA, 218 bp, Homo sapiens
  chr5:36035944-36036162
  hypo
aagacatagggcttgaggtgcgtcgcgccccctgtctggaggacgtggtcaatccagcccaccagccgctgtgtggggctgagcgggtgggagcgcaggatgacactggcagccactgccgcggacttgtatctgttgagagagatagagagggggcattactaatgtgacctcacaagagttagaatgtatgatccgttctatatgatgcaccaaag

SEQ ID NO: 254745 - DNA, 147 bp, Homo sapiens
  chr5:36526936-36527083
  hypo
aaacaactcatatgcgccgctgcccccaaggaagtgctccttcaccctggtgctgtagacgtgtacaagggtctggccactagtgacagacctggcgaatctccctttggcatccattctcggggctcctgccgccatcttggatcc

SEQ ID NO: 254746 - DNA, 42 bp, Homo sapiens
  chr5:37022498-37022540
  hypo
ttgtcatttttataatgattcgtgaatataattttgcctttc

SEQ ID NO: 254747 - DNA, 79 bp, Homo sapiens
  chr5:37042504-37042583
  hypo
tccgcctgggtgacagaacgaggctctgtgtcaaaaaaaaaagtccaaaatctatgccggtaatccattactaacaatg

SEQ ID NO: 254748 - DNA, 106 bp, Homo sapiens
  chr5:37052539-37052645
  hypo
gtaaggggtttcagacaagacgagtcctctagcgctttgtgttcacacctttactccatgatccgtggaaaccgccaacacagacgagcctttcttatttctttac

SEQ ID NO: 254749 - DNA, 76 bp, Homo sapiens
  chr5:37064066-37064142
  hypo
gaggcacttcaggggtgaggcggaggaggagtcaacgtatttcgcagcgtattacgtaaaatgatttttatgtgct

SEQ ID NO: 254750 - DNA, 36 bp, Homo sapiens
  chr5:37082175-37082211
  hypo
caagagtgaaactccgtatcaaaaaaaaaaaaaaag

SEQ ID NO: 254751 - DNA, 55 bp, Homo sapiens
  chr5:37170189-37170244
  hypo
ggcagtgtgggctgttcttgcgaggctctctggcgttctctcccattgactgtgg

SEQ ID NO: 254752 - DNA, 31 bp, Homo sapiens
  chr5:37230262-37230293
  hypo
gcgaaactccgtctcaagaaaaaaaaaataa

SEQ ID NO: 254753 - DNA, 38 bp, Homo sapiens
  chr5:37338512-37338550
  hypo
ttttttttttttttttgagacggagtctcgctgtcacc

SEQ ID NO: 254754 - DNA, 37 bp, Homo sapiens
  chr5:37338790-37338827
  hypo
gccactgcgcccaaccgaacatcaatctttataaaca

SEQ ID NO: 254755 - DNA, 33 bp, Homo sapiens
  chr5:37347339-37347372
  hypo
aaacaaaaaaccgaaagagtgaatagttaaaag

SEQ ID NO: 254756 - DNA, 65 bp, Homo sapiens
  chr5:37806566-37806631
  hypo
cactgtgtcagcactgctatcgctacaccccagtccaagttaccgttatcacccacatggattct

SEQ ID NO: 254757 - DNA, 33 bp, Homo sapiens
  chr5:38198897-38198930
  hypo
attggaaggtgcaggccaggcgcggtggctcac

SEQ ID NO: 254758 - DNA, 31 bp, Homo sapiens
  chr5:38631851-38631882
  hypo
agcctggatcggccaggctctttttaacaac

SEQ ID NO: 254759 - DNA, 36 bp, Homo sapiens
  chr5:38635820-38635856
  hypo
tgagccaccgtgcccggcctggaagtcagctacttt

SEQ ID NO: 254760 - DNA, 42 bp, Homo sapiens; identical to SEQ ID NO: 210150
  chr5:39053667-39053709
  hypo

SEQ ID NO: 254761 - DNA, 213 bp, Homo sapiens
  chr5:39186060-39186273
  hypo
gctgagcagagtcccgctggctgccttgtccaggaggaaagaggagcacctggattgaagactggctgtcaaagtgccccatgtccgggcacactaaccccacccctctcttccctcaagcgggctgcacaaacagaaacggtggacaattgaattcaagctccactaaaacatgaacacaaaatcaagaattttcaaacattgaaaaggcaa

SEQ ID NO: 254762 - DNA, 102 bp, Homo sapiens; identical to SEQ ID NO: 210151
  chr5:39209363-39209465
  hypo

SEQ ID NO: 254763 - DNA, 87 bp, Homo sapiens
  chr5:39576392-39576479
  hypo
tcaaagaacaagagatactacggaataaatttaataaaaaacatatcagacatgggctgggcgtgatggctcacgcctgtaatccca

SEQ ID NO: 254764 - DNA, 228 bp, Homo sapiens
  chr5:39665680-39665908
  hypo
catggagccagtgcttgtgccggtcggtgtctggagctgcctgcctcacttcagcagctggtgcgcctggctgtgtgccgtggccggattctgcgcttgtttgctcacacacccttcgccactccacgcctagcccaccctcggtgggcatgggatctgggctggtagtgcaaaccgagcgcagcccgctggaccccgagtgggcgcgagtgaaactcaagcagaggc

SEQ ID NO: 254765 - DNA, 369 bp, Homo sapiens
  chr5:39721486-39721855
  hypo
tttttcagttcattcataaacgttgcatggttttctttccatccagccttgatagcacagggcggctcttcgaaagtgacgagcatatacctgtctcctctgctggcagggtcccgggcacggagccgagggactagaggaggaacagggcgagcgagagggaagcacagaggcgaggttaccaggcggaaaaggggcgcccagcggccccgccgcctccacagtaccgcacacgcagcggccacccctccacgcggtcccccacacacagatcgctccccacgcacagcactggggcgggagcccggcccaggcctagccctcctcgcagcgcccgcccgccctcgcgttgggggaggggagggaggg

SEQ ID NO: 254766 - DNA, 129 bp, Homo sapiens; identical to SEQ ID NO: 210152
  chr5:39740632-39740761
  hypo

SEQ ID NO: 254767 - DNA, 40 bp, Homo sapiens
  chr5:39802883-39802923
  hypo
aaaccaaattgcaggccaggcgcggtggctcacgcctgta

SEQ ID NO: 254768 - DNA, 40 bp, Homo sapiens
  chr5:39803163-39803203
  hypo
actgcgtctcaataacaacgccaacaaaaaaccaaattgc

SEQ ID NO: 254769 - DNA, 223 bp, Homo sapiens; identical to SEQ ID NO: 210153
  chr5:39808822-39809045
  hypo

SEQ ID NO: 254770 - DNA, 390 bp, Homo sapiens
  chr5:40066713-40067103
  hypo
aagtctgagtcctgtgctctcgctgtcctccccagacagcatgagcttcaccattcctccaccttctgcaccaactaccggtccctgggctccgtccagccgcccagctaccgcgcccgaccgctaaccagcgcggccagcttctaggcaagcgccgggggctctggttcccggatctccgtgttccgctccaacagcttcctgggtggcttggggtccgggagtctggcggcagggatggccggggtctggcaggaatgggaggcatccagaactaaaaggagaccatgcaaagcctgagcgacagcctggcctcctacctggaaagagtgaggatcctggaggcggagaaccggaagctggagagcaaaatccgggagcacctgtaga

SEQ ID NO: 254771 - DNA, 165 bp, Homo sapiens
  chr5:40775147-40775312
  hypo
taatatattttgtaacgattaattacattaagatacatattcaaagtatttgtataccctggaagcataagtctgaggattatgagttctgggggctcaagccaattccgtcattaataaatcacgttactgtgagcaatcatataagccgcgaggctcagtatc

SEQ ID NO: 254772 - DNA, 42 bp, Homo sapiens
  chr5:40823270-40823312
  hypo
attaaaatgatatttgggaccgggcgcaatgactcatgcctg

SEQ ID NO: 254773 - DNA, 42 bp, Homo sapiens
  chr5:40957872-40957914
  hypo
ttttttttttttaaatcttacgcatgcacagaagatatataa

SEQ ID NO: 254774 - DNA, 50 bp, Homo sapiens
  chr5:41588037-41588087
  hypo
cagcttcccagctcccccaacgcttggccgcaggacatggcaggaaagct

SEQ ID NO: 254775 - DNA, 39 bp, Homo sapiens; identical to SEQ ID NO: 210157
  chr5:41991877-41991916
  hypo

SEQ ID NO: 254776 - DNA, 39 bp, Homo sapiens; identical to SEQ ID NO: 210158
  chr5:41992156-41992195
  hypo

SEQ ID NO: 254777 - DNA, 81 bp, Homo sapiens
  chr5:42140523-42140604
  hypo
aactccgtctcaaaaaaaaaaacaaaaaacaaacaaaaaaaacagaccaaagagtccatcgctgatcatgcagacatgtaa

SEQ ID NO: 254778 - DNA, 567 bp, Homo sapiens
  chr5:42468532-42469099
  hypo
gccaagatgagtattgcctacgtgcgcagctgagaggcccgaccagagttcactggctctgcagcaggaggctgggggaccaggacctcagctcctactggcacgagaacaatgacccttattccttctttcttaagcaccatggacggctgcgtctcctctttcctgtcaaccacgccaacgctggagggcagcgggttcttgctgtctttctgggactccttgcgcagctagctatttgcctgccgccttggagttggtctgggtcgcagcctgagctgccgctcttggccccagagacgccgcccccgccagcttcttttttcttgttctctcctgccttcagcacctcgaaggggtccgattagttgtcaaataactggtcgaatcggttggtgaccaggcagctgaagccttcctgtaactgcccaggcatgatggttgctcggcggcacattcctccacggattgcagcgggctgcgccgagccaagagcgcgtgcttcagctcttcccagaagatcgaagaacaatttttttgaaatccgcctgtaaatgtcaggcaagg

SEQ ID NO: 254779 - DNA, 36 bp, Homo sapiens; identical to SEQ ID NO: 210160
  chr5:42476009-42476045
  hypo

SEQ ID NO: 254780 - DNA, 140 bp, Homo sapiens
  chr5:42582811-42582951
  hypo
caccctctttgggggctctgcggtttctgtcatctccatgctcccaggcgtcaccacattcccctcgtccagatgcagttgcccacggtggaagccatttgcgtacatcagatgcagccgcaggcttgcatggagctggt

SEQ ID NO: 254781 - DNA, 37 bp, Homo sapiens
  chr5:42638260-42638297
  hypo
tcgaactcctgacctcgtgatctgcccccctcagcat

SEQ ID NO: 254782 - DNA, 93 bp, Homo sapiens
  chr5:42697695-42697788
  hypo
tcactcaatgaacagcaggccggcggtggagtgggcacagagtgagcgaggagactggtatgagaccaaatcgcacagacaagacagtcaaat

SEQ ID NO: 254783 - DNA, 34 bp, Homo sapiens
  chr5:42760113-42760147
  hypo
tacattgtccaggcagggcacggtggctcactcc

SEQ ID NO: 254784 - DNA, 42 bp, Homo sapiens
  chr5:42975839-42975881
  hypo
taaaagatcactggcggggcgcggtggctcacgcctgtaatc

SEQ ID NO: 254785 - DNA, 31 bp, Homo sapiens; identical to SEQ ID NO: 210161
  chr5:42984043-42984074
  hypo

SEQ ID NO: 254786 - DNA, 34 bp, Homo sapiens
  chr5:43069386-43069420
  hypo
ttgagacggagtctcgctctgttccccaggctgg

SEQ ID NO: 254787 - DNA, 43 bp, Homo sapiens
  chr5:43120111-43120154
  hypo
acaagcgtgagccaccgcgcccgcccacatctcttcttacagg

SEQ ID NO: 254788 - DNA, 105 bp, Homo sapiens; identical to SEQ ID NO: 210162
  chr5:43147787-43147892
  hypo

SEQ ID NO: 254789 - DNA, 38 bp, Homo sapiens
  chr5:43215533-43215571
  hypo
cccatctttttttcttttttcgagatggaatctggctc

SEQ ID NO: 254790 - DNA, 118 bp, Homo sapiens
  chr5:43233244-43233362
  hypo
tggccaatgagatggagatgcggtcacgcatgattactgcttcacggctgccgaggcgatggtggagacaaggagagattgttgcttcttacagtgcgactcttaggtgattgatata

SEQ ID NO: 254791 - DNA, 89 bp, Homo sapiens
  chr5:43387666-43387755
  hypo
gtatagatatttccacgcttctttttgaaccttttcttttgtttttctttgcctttttgttgttgtggtggtggtggttttttgagacg

SEQ ID NO: 254792 - DNA, 34 bp, Homo sapiens
  chr5:43850518-43850552
  hypo
ttcaaaactggatatgtggccgggcgcagtggct

SEQ ID NO: 254793 - DNA, 31 bp, Homo sapiens
  chr5:43950021-43950052
  hypo
gtaaatttaaaaggaggacccgggccgggcg

SEQ ID NO: 254794 - DNA, 48 bp, Homo sapiens
  chr5:44708954-44709002
  hypo
tatgtgtctgtgtgtgcatgcgcgcacgtttgcacatgggtgtgtgtt

SEQ ID NO: 254795 - DNA, 98 bp, Homo sapiens
  chr5:44811149-44811247
  hypo
aagaaattattcctcgtggtcatcgaagaggtcgaattgatgacttgcgataccagatagatgataaaccaaacaaccagattcgaatatccaagcaa

SEQ ID NO: 254796 - DNA, 79 bp, Homo sapiens; identical to SEQ ID NO: 210166
  chr5:45196607-45196686
  hypo

SEQ ID NO: 254797 - DNA, 44 bp, Homo sapiens; identical to SEQ ID NO: 210167
  chr5:45225672-45225716
  hypo

SEQ ID NO: 254798 - DNA, 33 bp, Homo sapiens; identical to SEQ ID NO: 210169
  chr5:49903305-49903338
  hypo

SEQ ID NO: 254799 - DNA, 31 bp, Homo sapiens
  chr5:51793955-51793986
  hypo
tacaggcgtgagccaccgcgcccggccgtcc

SEQ ID NO: 254800 - DNA, 38 bp, Homo sapiens
  chr5:52888053-52888091
  hypo
ttacaggtgtgagccgctgcgcccggcattgttgagtt

SEQ ID NO: 254801 - DNA, 119 bp, Homo sapiens
  chr5:52941754-52941873
  hypo
tacaggctcttctgcgagcaaacagtctcttcagaaaataccaatgctttgttggacaaaagggcgtaaattttttttacgatccttttccactgtctccactacgtccccctaaataa

SEQ ID NO: 254802 - DNA, 46 bp, Homo sapiens
  chr5:53241084-53241130
  hypo
ctacatcactattacgttgcaactgtgaacacggacatgtttgtcg

SEQ ID NO: 254803 - DNA, 78 bp, Homo sapiens; identical to SEQ ID NO: 210170
  chr5:53821871-53821949
  hypo

SEQ ID NO: 254804 - DNA, 40 bp, Homo sapiens
  chr5:53959228-53959268
  hypo
tgctgggattacaggcgtgaaccaccgcgcctggccagat

SEQ ID NO: 254805 - DNA, 139 bp, Homo sapiens; identical to SEQ ID NO: 210171
  chr5:54069074-54069213
  hypo

SEQ ID NO: 254806 - DNA, 98 bp, Homo sapiens; identical to SEQ ID NO: 210173
  chr5:54665639-54665737
  hypo

SEQ ID NO: 254807 - DNA, 32 bp, Homo sapiens; identical to SEQ ID NO: 210174
  chr5:54734440-54734472
  hypo

SEQ ID NO: 254808 - DNA, 32 bp, Homo sapiens
  chr5:54734712-54734744
  hypo
agcaagactccgtctaaaaaaaaaaaaaaaag

SEQ ID NO: 254809 - DNA, 44 bp, Homo sapiens
  chr5:54850288-54850332
  hypo
gcgacgaagcgagactccgactcgaaaaaaaaaaaaagaagcac

SEQ ID NO: 254810 - DNA, 40 bp, Homo sapiens
  chr5:54952935-54952975
  hypo
acctcggcctcccaaagtcagtcaccgggcccagcctata

SEQ ID NO: 254811 - DNA, 284 bp, Homo sapiens
  chr5:55033681-55033965
  hypo
tatgaggccagagcgtcgccataggggcccgaacgctagcgtttagggaatccgcaggctagaagtggaggcgggacgccactggtcgtctgagcgctgattggctggtggcgctagtcaccagccaatcgtcaacagacgccatttgttgttggagccacgcacctgacgcagtgggcgtcttgcacgtgcagccgtttaagtcgcgtgggcgcctgcgagggcttgggagagcaagccgcggagaggtgagtgggccgcttttctacgggaactggcctgaa

SEQ ID NO: 254812 - DNA, 165 bp, Homo sapiens
  chr5:55229393-55229558
  hypo
agatggagaggagtggctggcggcaccgtgaaggtgaggcaggctggaacgggtgctcgcgctaggcagcgggcccggggaagtctgtggacagaaccacctggggtaggaccgtggtctgagcacccaggaaaagcccctgccggagatcctcctgtcactagt

SEQ ID NO: 254813 - DNA, 141 bp, Homo sapiens
  chr5:55309217-55309358
  hypo
tgctgggattacaggagtgagccactgcacctggccagaattagagttataattaaggcaggacgtgccaaggtgatcacagccaaaggtcccactgtgacctgggaatgcggttgttgttagcagcggcaacaactggta

SEQ ID NO: 254814 - DNA, 34 bp, Homo sapiens; identical to SEQ ID NO: 210175
  chr5:55330547-55330581
  hypo

SEQ ID NO: 254815 - DNA, 33 bp, Homo sapiens; identical to SEQ ID NO: 210176
  chr5:55330821-55330854
  hypo

SEQ ID NO: 254816 - DNA, 94 bp, Homo sapiens
  chr5:55379300-55379394
  hypo
ggagccaccgcgcccggctgccaccgcgtctgttcttactgcttccgtgttagtttgagttcctctctttctcgccaactcaatttgacaacct

SEQ ID NO: 254817 - DNA, 31 bp, Homo sapiens
  chr5:55705173-55705204
  hypo
gttgcgggattggacgcgttaatgcacatta

SEQ ID NO: 254818 - DNA, 133 bp, Homo sapiens
  chr5:55789717-55789850
  hypo
agcctaacttcttgcgattcgaattcctcaggcctgggatggggcctggagaacttgttttatgttcagccagcccaggccatactgactgagtagttcccgagtccacactgagatacgctgtcctgcccct

SEQ ID NO: 254819 - DNA, 146 bp, Homo sapiens
  chr5:56011132-56011278
  hypo
tcactgtggaatagtcgctgctccgcatgtgccttttccagcagtgggtgggcacgttctgattcacagaactaaagggatttaaaggacagattttttttgtgtgtgttctatgtgattagaaatacgctgctatcgggccgggc

SEQ ID NO: 254820 - DNA, 43 bp, Homo sapiens
  chr5:56487659-56487702
  hypo
tacaggcgtgagccaccacgccggcctgtctaggttttaagga

SEQ ID NO: 254821 - DNA, 155 bp, Homo sapiens
  chr5:56568064-56568219
  hypo
gaaggtagtcatccaatagtcgtttggatgatccagttttagtgtgtgaaaaaataaaaatcacttttgtttattgcgatgtgacattagtgagaaataaacactctaacactgaggctgggtgtggtggctcacacctgtaatcccgggacttt

SEQ ID NO: 254822 - DNA, 206 bp, Homo sapiens
  chr5:56718795-56719001
  hypo
ggtggctgtgaatcggcggagcgcagatgccctgcctgcccctgtgcctggcgccaacagcatcctcgagccgatactgtgtctgtagcagcagaagcagctacagcagacccagctcaccaagcagatccgcatcccggtgaacacattagcctctcgcgcctgcactccagcggggcggggccgacaccctgaagaccttgggc

SEQ ID NO: 254823 - DNA, 45 bp, Homo sapiens; identical to SEQ ID NO: 210181
  chr5:60676638-60676683
  hypo

SEQ ID NO: 254824 - DNA, 39 bp, Homo sapiens
  chr5:60700056-60700095
  hypo
agtattttttgtaccaccggaaaactttccttcacattt

SEQ ID NO: 254825 - DNA, 200 bp, Homo sapiens; identical to SEQ ID NO: 210182
  chr5:60821632-60821832
  hypo

SEQ ID NO: 254826 - DNA, 136 bp, Homo sapiens
  chr5:60866394-60866530
  hypo
aacctgcagttccccggagcggaagtatttcaaacctgaggcttcggtcaccgagccagaccctgagaggactgaatgcaaatttcgtagtttaatttaaatctgagcaggagaaaaggtgcggcagactgcactc

SEQ ID NO: 254827 - DNA, 161 bp, Homo sapiens
  chr5:61681252-61681413
  hypo
gtaaactcttactgcgtgtaatacaatacttattccctctttcttttctttttccaagataaagtgaaatctttccgtgcagctctacaagaggaggaacaagccagcaagcaaatcaacccgaagagaccccgtgccctttaaaccggcatttgctgcta

SEQ ID NO: 254828 - DNA, 83 bp, Homo sapiens; identical to SEQ ID NO: 210183
  chr5:61690791-61690874
  hypo

SEQ ID NO: 254829 - DNA, 39 bp, Homo sapiens
  chr5:61704349-61704388
  hypo
taatattgaaaactgttggccgggcgcggtggctcacgc

SEQ ID NO: 254830 - DNA, 31 bp, Homo sapiens
  chr5:61849887-61849918
  hypo
gccattcgtatgtcttcgtttgagagctgtt

SEQ ID NO: 254831 - DNA, 342 bp, Homo sapiens
  chr5:61910224-61910566
  hypo
tcctcgccccttcccgccagcattgtcattacaggacagggaagtgctgctggcagtaatgggtgggagccaaggctgttgctaagttctgcagtacgtagaactgaaatgctgaagagttacctgacccgccccccctcaccccgcaggatatgcgacaggggtgtgactcatccacaagtgctcaagccccttatgggagggtgagcatgcagacaggtaggtgcaggagccagggcaaatacccctgggctccagccccatgacaacatccagaggtggtagcctgcaactccgaaaacccaagtgtgcgtgtgtgtgtgtgtgttacagtccactttt

SEQ ID NO: 254832 - DNA, 42 bp, Homo sapiens
  chr5:62080933-62080975
  hypo
ccacattatctcatttaatccgttaaaccatgtgtaatatac

SEQ ID NO: 254833 - DNA, 156 bp, Homo sapiens
  chr5:64103541-64103697
  hypo
gtgcttccttattactcactcgccacaatgtttacttcacacttcaaactcactcaacggatcacctggctgcttgtttttttatgaaatgagagtaaatttcttcaacccgtatttctttctcttccccgcttcgagagtaaaaactaacaaaac

SEQ ID NO: 254834 - DNA, 138 bp, Homo sapiens; identical to SEQ ID NO: 210184
  chr5:64339982-64340120
  hypo

SEQ ID NO: 254835 - DNA, 39 bp, Homo sapiens
  chr5:64516272-64516311
  hypo
acagaagagtgggaattagccgggcgcagtggctcacgc

SEQ ID NO: 254836 - DNA, 38 bp, Homo sapiens
  chr5:64516551-64516589
  hypo
caacagagcgagactccgtctcaaaaaaaaaagaagag

SEQ ID NO: 254837 - DNA, 41 bp, Homo sapiens; identical to SEQ ID NO: 210185
  chr5:65020927-65020968
  hypo

SEQ ID NO: 254838 - DNA, 40 bp, Homo sapiens; identical to SEQ ID NO: 210186
  chr5:65107351-65107391
  hypo

SEQ ID NO: 254839 - DNA, 77 bp, Homo sapiens; identical to SEQ ID NO: 210187
  chr5:65465907-65465984
  hypo

SEQ ID NO: 254840 - DNA, 42 bp, Homo sapiens
  chr5:65505217-65505259
  hypo
gtcctcatcagttctcattccgattcttcctggagcctcctt

SEQ ID NO: 254841 - DNA, 205 bp, Homo sapiens; identical to SEQ ID NO: 210188
  chr5:65988337-65988542
  hypo

SEQ ID NO: 254842 - DNA, 186 bp, Homo sapiens; identical to SEQ ID NO: 210189
  chr5:66441263-66441449
  hypo

SEQ ID NO: 254843 - DNA, 119 bp, Homo sapiens
  chr5:66448539-66448658
  hypo
attcctctcccagccgagattcctcagcagcttctgccagtccacatcagccgattgtgatccacagttcggggaagaactacggctttaccatccgagccatccgggtgtatgtggga

SEQ ID NO: 254844 - DNA, 622 bp, Homo sapiens
  chr5:66459032-66459654
  hypo
gtccgggcacatccggcccagcactctccacggtcttgcacccaaactcggcgggcagcggtaccggtccggaaggcgaaagtccgccggcaacatcccactgtccccgctggcccggacgccctctccaaccccgcaacccacctccccgcagcggtcaccatcccctcttctgggacactcactgggcaattccaagatcgcgcaagcctttcccagcaagatgcactccccgcccaccatcgtcagacacatcgtgaggcccaagagtgcggagccccccaggtccccgctgctcaagcgcgtgcagtccgaggagaagctgtcgccctcttacggcagtgacaagaagcacctgtgctcccgcaagcacagcctggaggtgacccaagaggaggtgcagcgggagcagtcccagcgggaggcgccgctgcagagcctggatgagaacgtgtgcgacgtgccgccgctcagccgcgcccggccagtggagcaaggctgcctgaaacgcccagtctcccggaaggtgggccgccaggagtctgtggacgacctggaccgcgacaagctgaaggccaaggtggtggtgaagaaagcagacggcttcccagagaaacaggaa

SEQ ID NO: 254845 - DNA, 761 bp, Homo sapiens
  chr5:66460859-66461620
  hypo
caggccacgctgcccgctcccacctgaagcttccccctcaagggagaagccaggcctgagggaatcgtctgaaagaggccctcccacagccagaagcgagcgctctgctgcgagggctgacacatgcagagagccctccatggaactgtgctttccagaaactgcgaaaaccagtgacaactccaaaaatctcctctctgtgggaaggacccacccagatttctatacacagacccaggccatggagaaagcatgggcgccgggtgggaaaacgaaccacaaagatggcccaggtgaggcgaggcccccgcccagagacaactcctctctgcactcagctggaattccctgtgagaaggagctgggcaaggtgaggcgtggcgtggaacccaagcccgaagcgcttcttgccaggcggtctctgcagccacctggaattgagagtgagaagagtgaaaagctctccagtttcccatctttgcagaaagatggtgccaaggaacctgaaaggaaggagcagcctctacaaaggcatcccagcagcatccctccgccccctctgacggccaaagacctgtccagcccggctgccaggcagcattgcagttccccaagccacgcttctggcagagagccgggggccaagcccagcactgcagagcccagctcgagcccccaggaccctcccaagcctgttgctgcgcacagtgaaagcagcagccacaagccccggcctggccctgacccgggccctccaaaga

SEQ ID NO: 254846 - DNA, 212 bp, Homo sapiens
  chr5:66534133-66534345
  hypo
gagtgaaaggatggcggatgactcacgattttacgagacacttccaggacaaggagaaggcaaaggagagatgcagccttggagagcctaattcctctctggagtgcgtgcttttccctgatgtcaagattctaaattattccactgtttacctgctgcgtgacttgacaaaagggtaatgtgatttagaaactcagcggtcatccagaaag

SEQ ID NO: 254847 - DNA, 58 bp, Homo sapiens
  chr5:66790234-66790292
  hypo
ccacttacagcctttgttggcggggcctgttaccttcgcttacaccacatgatgtgct

SEQ ID NO: 254848 - DNA, 34 bp, Homo sapiens; identical to SEQ ID NO: 210190
  chr5:66911431-66911465
  hypo

SEQ ID NO: 254849 - DNA, 162 bp, Homo sapiens; identical to SEQ ID NO: 210191
  chr5:66938604-66938766
  hypo

SEQ ID NO: 254850 - DNA, 37 bp, Homo sapiens
  chr5:66987570-66987607
  hypo
gggattataggcgtgagccaccgcgccaggcctattg

SEQ ID NO: 254851 - DNA, 36 bp, Homo sapiens; identical to SEQ ID NO: 210192
  chr5:67015513-67015549
  hypo

SEQ ID NO: 254852 - DNA, 35 bp, Homo sapiens
  chr5:67021470-67021505
  hypo
taatcagtgggaatttactacgtgccctgagccat

SEQ ID NO: 254853 - DNA, 37 bp, Homo sapiens
  chr5:67488205-67488242
  hypo
aggcatgagtcaccgcgcagggcctgaatgagttatc

SEQ ID NO: 254854 - DNA, 341 bp, Homo sapiens
  chr5:67590943-67591284
  hypo
gataataacaaatacgtttcttttgcctgcaggattatgcataattatgataagttgaagtctcgaatcagtgaaattattgacagtagaagaagattggaagaagacttgaagaagcaggcagctgagtatcgagaaattgacaaacgtatgaacagcattaaaccagaccttatccagctgagaaagacgagagaccaatacttgatgtaagtatttgaaatggaatcctatacatgaataattggtgattgctacaattcaggatgagttaatgcgttctcttttcaaaactgtttttcaggtggttgactcaaaaaggtgttcggcaaaagaagttg

SEQ ID NO: 254855 - DNA, 174 bp, Homo sapiens; identical to SEQ ID NO: 210193
  chr5:67617620-67617794
  hypo

SEQ ID NO: 254856 - DNA, 80 bp, Homo sapiens
  chr5:67708116-67708196
  hypo
tgtcattttaaaaatcgcattatacccttaggatcttgtcatcacattttttttttttttttgagacggagtcttgctct

SEQ ID NO: 254857 - DNA, 137 bp, Homo sapiens; identical to SEQ ID NO: 210194
  chr5:67717789-67717926
  hypo

SEQ ID NO: 254858 - DNA, 37 bp, Homo sapiens; identical to SEQ ID NO: 210195
  chr5:67753209-67753246
  hypo

SEQ ID NO: 254859 - DNA, 36 bp, Homo sapiens; identical to SEQ ID NO: 210196
  chr5:67753366-67753402
  hypo

SEQ ID NO: 254860 - DNA, 160 bp, Homo sapiens
  chr5:67771773-67771933
  hypo
tctgctagtcagttcgttaatcaattattagtaacaaggtaataagaacccagaattggccattcaaaacaaaatctcagaacttgatgctaatctacatgtagcccaccccacacctgtggtcaccatcatccttttaaaaagctttttatgggctggg

SEQ ID NO: 254861 - DNA, 42 bp, Homo sapiens
  chr5:67845323-67845365
  hypo
taagaaatatgagaactcttcgcaccaatggtaaaaataagg

SEQ ID NO: 254862 - DNA, 156 bp, Homo sapiens
  chr5:68238653-68238809
  hypo
gtgctgggattacaggcgtgagccaccgcgccaggcccaacacacacagttttaataaatcaggaataagtcaaggagcaccacagttcttaaaatgtcctttatcccacaaccaccaccttgccaatttgttggcctcatcgccctcctgcttca

SEQ ID NO: 254863 - DNA, 37 bp, Homo sapiens
  chr5:68337841-68337878
  hypo
gaaataaatgtaaagccctacgcttacatttttttcg

SEQ ID NO: 254864 - DNA, 43 bp, Homo sapiens
  chr5:68363914-68363957
  hypo
ctgtttagtttttaaaaatgcgatattcgccgggcgcggtggc

SEQ ID NO: 254865 - DNA, 386 bp, Homo sapiens
  chr5:68370825-68371211
  hypo
aggcaccggggtaccgtgcccagcccccgggcacctccacagggctgccatgtggcagaggaagccggtgaactgacgcttggctgcagccaggcaggcctaagctctgttgccccgccgcatcccagctacacccacaggcctggatgccaaccagctggcgtcagtgcccgcggtgccttccagcacccgcctgtcctggaggagctgcacctgtcccctaatatcttcacccgcctcttaggggcagccttctcggccctggcgtgcatggtgcaccacctccacctctctgaaaagctggcctgggtgcccgtggaggccttcgtggggctgcagatccaagtgaaccaatccgccaacccgtgaaactgggactgtgccct

SEQ ID NO: 254866 - DNA, 39 bp, Homo sapiens
  chr5:68391293-68391332
  hypo
cgggattacaggcatgagccaccgcgcccgcccaacata

SEQ ID NO: 254867 - DNA, 38 bp, Homo sapiens
  chr5:68475608-68475646
  hypo
cccggccctcagtaggcgatttttatatgtggtataaa

SEQ ID NO: 254868 - DNA, 127 bp, Homo sapiens
  chr5:70945906-70946033
  hypo
tctacatttggccaaatgctcgtatctcagtgatgggaggagagcaggcagccaatgtgttggccacgataacaaaggaccaaagagcccgggaaggaaagcaggtcggtgtcgttttctcttgttt

SEQ ID NO: 254869 - DNA, 107 bp, Homo sapiens
  chr5:70958355-70958462
  hypo
tgtcacattagcaacgagttgtgaagactgagcattaatgcatgggaggtcacggtcgtggagagaacactgggcggggtgtggaccggtttcgctctagttcagct

SEQ ID NO: 254870 - DNA, 319 bp, Homo sapiens
  chr5:70994055-70994374
  hypo
ggtgaagggctcggcggtgtctggcgtatgccaagccacatgcttcctggaaagcagcaagcggagagtagcctcagcctgtgaaaattcagggcattgctttggctcgtccctgtccctgaccctaaccttaacccttatgtctgaagtagtttgagagggagacacaggccttcccaacaaatgggcccctttattctttgagtcgatgggaggccagggcggccagatctcccactccaggcaggtcagttctcgtcaggagcagcctgcgtctttaaggtcatagctgttattcttggagttatttatttatttg

SEQ ID NO: 254871 - DNA, 37 bp, Homo sapiens
  chr5:71313585-71313622
  hypo
aaaaacatttactcttaggccgggcgcgttggctcac

SEQ ID NO: 254872 - DNA, 157 bp, Homo sapiens
  chr5:71714798-71714955
  hypo
ccaccgtgcccggcccatgccaggttaatttttatactggttaatttttatatactggttatacaggttaatttttataccggggagggggagtctcgcagtgttgcccaggctggtctcgaactgctgagttcaagccatccgctcgcctccagac

SEQ ID NO: 254873 - DNA, 39 bp, Homo sapiens; identical to SEQ ID NO: 210197
  chr5:71780024-71780063
  hypo

SEQ ID NO: 254874 - DNA, 269 bp, Homo sapiens
  chr5:72197881-72198150
  hypo
acaagagcgagacttcatctggaaaaaaaaaaaatgtagttgagggagggaagcaaagaactaaattttggtttccaggaatgcacacaagagttataaaactgccccaaaaaaatgcttttatagcaataactttctcacatttcttaattttcaagaaaattgaaactttccactccgagaggggtgttttgaacatttttaaattgtgaccttttgatgtttcctagctcgtattgtggtttttcttaactcggttttagaaacgt

SEQ ID NO: 254875 - DNA, 180 bp, Homo sapiens
  chr5:72236834-72237014
  hypo
gacgtatttttcttcctgttgacgaaacatgagacagcagggcctagagagaagtgaaaagaatgttaaaattagcgaaagtgaacatgatgtacaagcagcacaaaggaaaacagacattgttgaaaacacagtgatgtacacagagggcaggatttttcttttttaaaaagaaaaaca

SEQ ID NO: 254876 - DNA, 45 bp, Homo sapiens
  chr5:72242483-72242528
  hypo
aaatccctgggtggccgggtgcggtggctcatgcctgtaatccca

SEQ ID NO: 254877 - DNA, 252 bp, Homo sapiens
  chr5:72292520-72292772
  hypo
cgcaggctgccaacgcctgtccgccagctccccgttccgctgggctttccaaaacctcgccaggggtgactttctgagccgcttgctccatacccctctctgcagcctctcctgccacttagggctgccgttccccctcccggcaacggggggctggcggagctgtgccacgggggcccccggggccggcggggccggcagagcaggcagtgccagggtcatcaggatgatgcggacgcagtgtctgctggg

SEQ ID NO: 254878 - DNA, 181 bp, Homo sapiens; identical to SEQ ID NO: 210198
  chr5:72388279-72388460
  hypo

SEQ ID NO: 254879 - DNA, 196 bp, Homo sapiens
  chr5:72980654-72980850
  hypo
tttcattgcagatgcgaaagccatggagttgagctgcagcgaagcacctctttacgtaagttgctaagcacggggcttcaggtccaaggggccctttcttaactccaaaccatgtgactgaagtggggagaaatgtttttcttgctattgagttaaggctttttaaaaacaacacactgagcgttactgtctagtt

SEQ ID NO: 254880 - DNA, 194 bp, Homo sapiens; identical to SEQ ID NO: 210201
  chr5:73081113-73081307
  hypo

SEQ ID NO: 254881 - DNA, 38 bp, Homo sapiens
  chr5:73102526-73102564
  hypo
tatgtaccatatatacgatatatcgtatacatctatat

SEQ ID NO: 254882 - DNA, 41 bp, Homo sapiens
  chr5:73192671-73192712
  hypo
ccgtgacagaggtgccggggcagcggcggacccagctgctt

SEQ ID NO: 254883 - DNA, 87 bp, Homo sapiens; identical to SEQ ID NO: 210202
  chr5:73205664-73205751
  hypo

SEQ ID NO: 254884 - DNA, 136 bp, Homo sapiens
  chr5:73228902-73229038
  hypo
gggattacaggcgtgagccaccgtgcccggcctatttcctatttcttacatattactttttaagctttaaatgaactcaaatttaaaagactggagaatagaaatccaaattccaagaaaacgttaactcatttca

SEQ ID NO: 254885 - DNA, 45 bp, Homo sapiens; identical to SEQ ID NO: 210203
  chr5:73247793-73247838
  hypo

SEQ ID NO: 254886 - DNA, 176 bp, Homo sapiens
  chr5:73623643-73623819
  hypo
tttcccatctggtcatttagcgagggtctatggaaagatagtggaaatcgtctacatcttttgctgagtaagacaagaaagtcaacgaatgcagcgactacatagtatactggaggctaaagtcttaagagacacattggtttagatgtgtgcacgtggccatgtttgctttgggg

SEQ ID NO: 254887 - DNA, 178 bp, Homo sapiens; identical to SEQ ID NO: 210204
  chr5:73627934-73628112
  hypo

SEQ ID NO: 254888 - DNA, 35 bp, Homo sapiens; identical to SEQ ID NO: 210205
  chr5:73665486-73665521
  hypo

SEQ ID NO: 254889 - DNA, 31 bp, Homo sapiens
  chr5:73687766-73687797
  hypo
ttttttttttttttttgagacggagtctcgc

SEQ ID NO: 254890 - DNA, 191 bp, Homo sapiens
  chr5:73855841-73856032
  hypo
tggagcccttctgctcggagttcaaggctcccatgtagacctggagcgtgtgcccccaggggctgccagcgtgggtctctgctccactcagtcttgggcacagtcaagcacagaatccaggaggggctggggctgggaggaggagtaattatctctttctgccgtgttgaagggcacgctgctattccatc

SEQ ID NO: 254891 - DNA, 222 bp, Homo sapiens
  chr5:73932084-73932306
  hypo
tgaacatggcctcaaagtagcgactgcatgcagccagcactgcccggtggcaagggaaggtcctatttccggcatggagaaggacgtcagtgaagagacgctgctggcgtaaaagattcaggtgagtgaggacgctgtcagcgtaggaggacttgtgaaacagatagatgttaatggagccgctgctggccctggacttgcggttctcatgcacactgactg

SEQ ID NO: 254892 - DNA, 39 bp, Homo sapiens
  chr5:74628696-74628735
  hypo
cttaacattatacttttaggcgggtgcggtagttcacgc

SEQ ID NO: 254893 - DNA, 37 bp, Homo sapiens; identical to SEQ ID NO: 210213
  chr5:74652649-74652686
  hypo

SEQ ID NO: 254894 - DNA, 90 bp, Homo sapiens
  chr5:74753658-74753748
  hypo
acttctttatcaatcgtgttagcttttctttctcaagccagactggtttttcttgggtgtatgggtataggcgcgcgtgtgtgtgtgtgt

SEQ ID NO: 254895 - DNA, 89 bp, Homo sapiens
  chr5:74753808-74753897
  hypo
atgtgtgtgtgtgttttgtgcctgttagaaataaccaaaacaggtgtttcaactacaactttgtgaaactcaaacgaacaagtataggc

SEQ ID NO: 254896 - DNA, 38 bp, Homo sapiens
  chr5:75587129-75587167
  hypo
gttcggatccgcaccgagctgtacggagtaagtaacaa

SEQ ID NO: 254897 - DNA, 37 bp, Homo sapiens
  chr5:76159635-76159672
  hypo
tacaggtgtgagccactgcgcccggccaattatatta

SEQ ID NO: 254898 - DNA, 136 bp, Homo sapiens; identical to SEQ ID NO: 210217
  chr5:76327277-76327413
  hypo

SEQ ID NO: 254899 - DNA, 37 bp, Homo sapiens; identical to SEQ ID NO: 210218
  chr5:76328105-76328142
  hypo

SEQ ID NO: 254900 - DNA, 169 bp, Homo sapiens; identical to SEQ ID NO: 210219
  chr5:76372312-76372481
  hypo

SEQ ID NO: 254901 - DNA, 197 bp, Homo sapiens
  chr5:76399986-76400183
  hypo
gtatcccaggcttcccgtagaggtttatgtggggcctatcgctcttccacacagtaaggaaccacgtgaaggcttgggagctgaagtacatgtttgccgggagggagctcagtatagtagatgttccctttataaccctgcacccagtgtgacaatgggcagtgctatggtttgaatgtttgcgtctattcaaaatt

SEQ ID NO: 254902 - DNA, 32 bp, Homo sapiens
  chr5:76738423-76738455
  hypo
acctttaaaaaaagccgggtgcggtggctcac

SEQ ID NO: 254903 - DNA, 118 bp, Homo sapiens
  chr5:77288993-77289111
  hypo
aggagtgtgtggggcggagtaggcatggctaggtgcacagctgaagctaccaaactaggtgatgcaaaagccaagtgggcaaaaggaacggttcggaaacgcacggaagagcaaagcc

SEQ ID NO: 254904 - DNA, 76 bp, Homo sapiens
  chr5:77289899-77289975
  hypo
tttagagacctgcacgctaataagaagtgctctgtgccgtcaatgcagacaggtgcttccgcggctgggacatgct

SEQ ID NO: 254905 - DNA, 207 bp, Homo sapiens
  chr5:77291947-77292154
  hypo
taacatggagtgggagcaagcgattatggtgtggtaatagtaatccagcgatggaggccgagtcggttggaaatggattgaggtaaaataactcccgcaccatgataaatgtgaacagcgctttgctgacagatgatctaacaggtgttcataacaactatataagaggatttatttatgaccagccacagccgcagcactgtaaat

SEQ ID NO: 254906 - DNA, 108 bp, Homo sapiens
  chr5:77300047-77300155
  hypo
aaaaataaaactgccgcgctaacagcacgctgcggactattcaagagcaaaccaactggtcagtgtctcatgtctgacaattagcatgggcctcgcacagagcccacg

SEQ ID NO: 254907 - DNA, 63 bp, Homo sapiens
  chr5:77425049-77425112
  hypo
taataaatcttgtacggtctctgatgtcgtagttttgatcatacttgccgagatttaatatgt

SEQ ID NO: 254908 - DNA, 93 bp, Homo sapiens
  chr5:77655148-77655241
  hypo
gaaaagtgaggaaagcgatgctctttcaataagttcggcagggtggggcaaggaatggtacaaattgattttttttttttcttgagacagagt

SEQ ID NO: 254909 - DNA, 72 bp, Homo sapiens
  chr5:77655481-77655553
  hypo
ggattacaggcgtaagccaccgcgcccggccggtacaaattaatttaacacatcttttgataatctcatcct

SEQ ID NO: 254910 - DNA, 111 bp, Homo sapiens; identical to SEQ ID NO: 210222
  chr5:77816710-77816821
  hypo

SEQ ID NO: 254911 - DNA, 34 bp, Homo sapiens; identical to SEQ ID NO: 210223
  chr5:77848659-77848693
  hypo

SEQ ID NO: 254912 - DNA, 85 bp, Homo sapiens
  chr5:77912255-77912340
  hypo
caggttttcttcttgaccaccccgactatggattgcttcggaagacattttacataaaagtcacgaaagaggttacagtaagaat

SEQ ID NO: 254913 - DNA, 180 bp, Homo sapiens
  chr5:78068862-78069042
  hypo
cgcccggtccaaataaccttttcaaaccaaaccggctgcttccctaacagatccagagtacatgctaatcaaaggttttgcctttagaaatactttatacagaaagaattcacagctctcatgtgggtaaaaaacgaaaacaggccgggcgtggtggctcacgaggtcaggagatcaaga

SEQ ID NO: 254914 - DNA, 254 bp, Homo sapiens
  chr5:78105382-78105636
  hypo
gctccccaagtcagcggcacttcttgccttcagctgaagctgggagacccatcctacggtcaggctgagggccgccagagcctgcggccaggcctaacactaggcagagacgactctgcagctgtctgctcacactcactgccagtcacgcttcactccactttcctgctctgaaaatcacgtcctggcaacctgcccatcggacctggagccagccttgccctctccactgcgggcctgtaggcctggccttg

SEQ ID NO: 254915 - DNA, 139 bp, Homo sapiens; identical to SEQ ID NO: 210226
  chr5:78264451-78264590
  hypo

SEQ ID NO: 254916 - DNA, 50 bp, Homo sapiens; identical to SEQ ID NO: 210227
  chr5:78264837-78264887
  hypo

SEQ ID NO: 254917 - DNA, 45 bp, Homo sapiens
  chr5:78445631-78445676
  hypo
gttaattgaaaaaatagttccgctgggcgcaatggctcacacctg

SEQ ID NO: 254918 - DNA, 99 bp, Homo sapiens
  chr5:78469179-78469278
  hypo
gttaactctcttctaaattacgtttgcctatgtgtcttgaattaaaaaatggctttaatcgtaaataaacatgagaaaaaagtatttttctatttcgaa

SEQ ID NO: 254919 - DNA, 43 bp, Homo sapiens
  chr5:78535318-78535361
  hypo
ttttggatactcagaaaaagcgactgtcaggccggtcgcggtg

SEQ ID NO: 254920 - DNA, 33 bp, Homo sapiens
  chr5:78812538-78812571
  hypo
tgagacactgcgcccgaccgcgtcgtttttttt

SEQ ID NO: 254921 - DNA, 36 bp, Homo sapiens
  chr5:78881932-78881968
  hypo
accttaaaaatgatctaattcggccgggtgcggtgg

SEQ ID NO: 254922 - DNA, 36 bp, Homo sapiens; identical to SEQ ID NO: 210229
  chr5:78882208-78882244
  hypo

SEQ ID NO: 254923 - DNA, 36 bp, Homo sapiens; identical to SEQ ID NO: 210230
  chr5:78949955-78949991
  hypo

SEQ ID NO: 254924 - DNA, 132 bp, Homo sapiens
  chr5:78985059-78985191
  hypo
aaagagagccgggacggaacactggttcaaaactgggcttttgagcagggcacgcctagctttgtttctcattgggtcattttactagcaatgacagcctgagctgctggagctcttcggagtctcagtttc

SEQ ID NO: 254925 - DNA, 214 bp, Homo sapiens
  chr5:78986242-78986456
  hypo
ggaggcggtgaaggcgcactggtaccttccgatgaatggcggtctccccgggggcctagcagtaggctaggctgcaataaggtgaccttattttgatacaaaggcccataaattctttgggggaaaagaagcatgagtttcagtaatccctgttcttcaagtcctggtcccaaatcccaaatatcagtttccgtgaatgcgatgaagtaatact

SEQ ID NO: 254926 - DNA, 119 bp, Homo sapiens
  chr5:79097421-79097540
  hypo
agacacctgagaaggtatgtcgaaaactgtctaatgcaactgcgcatgcaccctcgctagccgcgggtgaaggggaccaagtgccagcagcatctgccgtcaggttggaagcagctctg

SEQ ID NO: 254927 - DNA, 95 bp, Homo sapiens
  chr5:79393212-79393307
  hypo
tgaagtacacagaccgacaaccttttacagaggactgggcttgacaaagagctcgcttggatccatcttgcttccctgtgcgcacccggccccac

SEQ ID NO: 254928 - DNA, 86 bp, Homo sapiens
  chr5:79438045-79438131
  hypo
tcttgggtagctgccgaaagtcacgtttctgtattactttgcaagtacgtattttggaaattcctgtgcagcgtgatctcggctca

SEQ ID NO: 254929 - DNA, 38 bp, Homo sapiens
  chr5:79448991-79449029
  hypo
attcagttgccgggcgtggtggctcacatctgtaatcc

SEQ ID NO: 254930 - DNA, 118 bp, Homo sapiens; identical to SEQ ID NO: 210231
  chr5:79498689-79498807
  hypo

SEQ ID NO: 254931 - DNA, 78 bp, Homo sapiens
  chr5:79552929-79553007
  hypo
ggcgtgagccaccgcgccctgccggaatgaagatatttctgttagtgcgatttttgcgccaatccctttgctctttca

SEQ ID NO: 254932 - DNA, 31 bp, Homo sapiens
  chr5:79554326-79554357
  hypo
gccaccgcgcgcagccacaaggcaacattat

SEQ ID NO: 254933 - DNA, 165 bp, Homo sapiens
  chr5:79598627-79598792
  hypo
gccattgttgaatacgagagcagtgatatcgtcatgcatggtgagctggcagcaggtgtggatgggcggcggagtggagagggcgaggctctgtgctcgtggggaggatgcagtcttggcttcttttgttttgtttgttttttgagatggagtttcgcttttgtt

SEQ ID NO: 254934 - DNA, 42 bp, Homo sapiens
  chr5:79785450-79785492
  hypo
acaaatttttgggccgggcgcggtgactcacgcccgtaatcc

SEQ ID NO: 254935 - DNA, 39 bp, Homo sapiens
  chr5:79786095-79786134
  hypo
cagccactcaggaggagactgaggcgggagaatcgctta

SEQ ID NO: 254936 - DNA, 449 bp, Homo sapiens
  chr5:79911130-79911579
  hypo
ccagtgcttgcccgcggggctacagaggaagacagcagccacgcctgcatatgggcttctgcactgctagcctcaaggctgccagagtgcaaagaatgccaggataatggctttatccacgtgtggccttttgacacataagctaatgactatattccaggtacaaatagttctttcccacgagctgtttctgcaggtctccaaacagacaattacccggttccacttaacagagtgactcaaggacggatctgagggctgggtcttgtgaacgcgggctgttgtcctgccctctcccagctctaacattgtgctgaaaagttaaaatacaaaacgccaaagctccccaatcccatcccacgcccctgcctgcgcagcctttcatgcattgaatgggcagcttcatgatgctgctgcgacaatagcgacaatagcgggggcagaggagt

SEQ ID NO: 254937 - DNA, 447 bp, Homo sapiens
  chr5:79974517-79974964
  hypo
ttcagggcggctctcggaaatctgatttatagtatcatttagatatctgtgagtctgactcttcgtgtaagagtcctgaaaagcagacaggtttctaacactttagaaatagagtacatacatactcctgagtgtatcatctttactttttccatgtttatgctgtgttatagccataactggggaaatacattttttctgtaacattatatttgtatttgtttttagggagtgcagcctgccacaggcgaggttgtgtttgatagtttccaggactctgcttctcgttcagagctagaaacccggatgtcaagcctgcagccagtagagctgctgcttccttcggccttgtccgagcaaacagaggcgctcatccacagagccacatctgttaggtaagttggcacatcactggaatataataccgattctgaaacttaggtttag

SEQ ID NO: 254938 - DNA, 163 bp, Homo sapiens; identical to SEQ ID NO: 210236
  chr5:79986401-79986564
  hypo

SEQ ID NO: 254939 - DNA, 80 bp, Homo sapiens; identical to SEQ ID NO: 210237
  chr5:80076659-80076739
  hypo

SEQ ID NO: 254940 - DNA, 48 bp, Homo sapiens; identical to SEQ ID NO: 210238
  chr5:80550827-80550875
  hypo

SEQ ID NO: 254941 - DNA, 183 bp, Homo sapiens; identical to SEQ ID NO: 210239
  chr5:80652824-80653007
  hypo

SEQ ID NO: 254942 - DNA, 101 bp, Homo sapiens
  chr5:80717292-80717393
  hypo
tgagaccctgtgctcggcctgtgactctaactgtaatccagtcatttttgcacgtgagtaggaacatcattgttacatgcggacttgtcagtttgatgagg

SEQ ID NO: 254943 - DNA, 34 bp, Homo sapiens
  chr5:80728272-80728306
  hypo
gaaaacaaaccggccgggcacggtggctcatgcc

SEQ ID NO: 254944 - DNA, 152 bp, Homo sapiens
  chr5:81058593-81058745
  hypo
tgcatagctaatatcacaaacggtgtaggcaaacagacaaagtcgctctcctgtgaatactattagcttgtagttcacggtttaggtgactgttccggagtgaaataaaaacatcttcagagacttctaccggtcaatcaacacttcaaata

SEQ ID NO: 254945 - DNA, 42 bp, Homo sapiens
  chr5:81067109-81067151
  hypo
ggatgtggcagagacacagacgggtggacccaagcattgagg

SEQ ID NO: 254946 - DNA, 140 bp, Homo sapiens; identical to SEQ ID NO: 210240
  chr5:81570369-81570509
  hypo

SEQ ID NO: 254947 - DNA, 75 bp, Homo sapiens
  chr5:82808025-82808100
  hypo
gcggcatggaggaacggctttgaccagtgcgattacgggtggctgtcggatgccagcgtgcgccaccctgtgact

SEQ ID NO: 254948 - DNA, 60 bp, Homo sapiens
  chr5:83095505-83095565
  hypo
atgaaaaactgtttccggtatcaggctggcaaagataaaaaggttcgctaatatactgag

SEQ ID NO: 254949 - DNA, 550 bp, Homo sapiens
  chr5:86547819-86548369
  hypo
tgtcaccgctgacccgtgcacacacccggaggggatgtgacagcaccctagctcagccccaaccccaatcggagatctgattggcgccgggagtggggagaggccaggcagctggagcaggtacctctgagcctgcgaggggaaggggggccttctcagacctcctaagagttcagggatgccccgcctcttgggcggggctcctgctactctgggttcccaagagcaccggggccggaatgcagcccgcttgggtggctgcagttgtacctggagagctcccgcctggccaacttggaaagagcagggctcccggttgttcccagctcccactggcgcagtgggcacccagccgcacctcctggcagccagggacgggggctccaggtcatcccttgacctgcgccaccatctggtataggggcgagcttgctatgagctacccctgtgtcccagcgctcagggactggctggagcaccgcctgtgagctcagcgcaaccatgccaggccttatcaccacggcccccaaggtagcgggctgcagggagc

SEQ ID NO: 254950 - DNA, 134 bp, Homo sapiens
  chr5:86672203-86672337
  hypo
cccaagtatttatgcgctgccagttgagccgattacagaaagggcatgccacagatgaatggtttctgctcagctcccatataccattaaaaggtattgaaccagggtccctgcgtgttcgagcacgatactct

SEQ ID NO: 254951 - DNA, 31 bp, Homo sapiens
  chr5:88097575-88097606
  hypo
tacaggtgtgagtcaccgtgcctggcctact

SEQ ID NO: 254952 - DNA, 36 bp, Homo sapiens
  chr5:88139904-88139940
  hypo
gcatgagccatcgcacccctgcgaaacaattttaaa

SEQ ID NO: 254953 - DNA, 38 bp, Homo sapiens
  chr5:88161980-88162018
  hypo
gggattacaggagtgagccaccgcgcccggcccaagtc

SEQ ID NO: 254954 - DNA, 264 bp, Homo sapiens
  chr5:88233030-88233294
  hypo
gatgtagaaagaatcgctgcactttcccagggctgctccgcagtgtgagtggccactagctctcttttcctatgaccccagtgctgtttgggtttgctctccagaagaacaggtagatacatttgcagctggcgggggcactgctttattgcctattgtggaatgcgtgccaaataaaaaccatcgtgatttgaaatcggcaatcttatatgcttttcaggttactcggatgttcaaacacacgtaaccaaccatcaatatgag

SEQ ID NO: 254955 - DNA, 34 bp, Homo sapiens; identical to SEQ ID NO: 210242
  chr5:90257315-90257349
  hypo

SEQ ID NO: 254956 - DNA, 143 bp, Homo sapiens
  chr5:90670735-90670878
  hypo
taccattagtgaatattccacgcggattatactacagtcgaggatagagggagaaactggtggaattttcagcaacttgccattccacgtctctgtctttccagatgataaggattccccacgcaagttagccacaagctgtt

SEQ ID NO: 254957 - DNA, 93 bp, Homo sapiens
  chr5:90672506-90672599
  hypo
tagccaaggcctgtgcaattcggctttcacccaatagcgcacactgccatgtcggccttcgaatgaggtagcgagtggtctgtgcagaatata

SEQ ID NO: 254958 - DNA, 35 bp, Homo sapiens
  chr5:93032774-93032809
  hypo
aaaaaaaaaaaaaaggttggcggacaagtttagtt

SEQ ID NO: 254959 - DNA, 100 bp, Homo sapiens
  chr5:93076896-93076996
  hypo
ctttcagtatgcccgagatgtcctctggcggcggcaacttcggaatgctccgcagggcaatgtagggccccgggagggcgccttcggaggggcgtcgcaa

SEQ ID NO: 254960 - DNA, 144 bp, Homo sapiens; identical to SEQ ID NO: 210243
  chr5:93077276-93077420
  hypo

SEQ ID NO: 254961 - DNA, 157 bp, Homo sapiens
  chr5:93143746-93143903
  hypo
gccttatgcaaatagaagcacgtcctgcaacctagggagggaacatgcgcaatagatcaattggatataaaaaaccttacggctatatcggcttcagacagtaaatatatactgatgaatatctcatactgcccgcgaattcttaaaatgggttatt

SEQ ID NO: 254962 - DNA, 38 bp, Homo sapiens; identical to SEQ ID NO: 210244
  chr5:94762453-94762491
  hypo

SEQ ID NO: 254963 - DNA, 37 bp, Homo sapiens; identical to SEQ ID NO: 210245
  chr5:94762731-94762768
  hypo

SEQ ID NO: 254964 - DNA, 86 bp, Homo sapiens
  chr5:94776919-94777005
  hypo
caagcaccagaaacagcagccgaggaacctcaaactttacatgcgcatttttcaaaattaaaactatgcatctggccgggcgcgat

SEQ ID NO: 254965 - DNA, 94 bp, Homo sapiens; identical to SEQ ID NO: 210246
  chr5:94981773-94981867
  hypo

SEQ ID NO: 254966 - DNA, 33 bp, Homo sapiens
  chr5:94982107-94982140
  hypo
ggcgtgaaccaccgcgcccggccttaacatcct

SEQ ID NO: 254967 - DNA, 155 bp, Homo sapiens
  chr5:95213826-95213981
  hypo
ctcgggaaaaaaaaaaaaaaaaaaaaaaaggcataaagcattgattgtcaagtggtctggtaagaaaatacttactgcgcttccttacttttgctcatttttcattcccaaaagggcttcttttcagtttctctgaccctcgggcatctttctcc

SEQ ID NO: 254968 - DNA, 32 bp, Homo sapiens; identical to SEQ ID NO: 210247
  chr5:95290421-95290453
  hypo

SEQ ID NO: 254969 - DNA, 98 bp, Homo sapiens; identical to SEQ ID NO: 210248
  chr5:95515382-95515480
  hypo

SEQ ID NO: 254970 - DNA, 475 bp, Homo sapiens
  chr5:96111422-96111897
  hypo
aagagggtcccctctcggagctaagaccctcaggggaggccagcccgaggcatcccgcaagggaatcagggaagaacacctccacctactacctcctccgaccccagctccagctctccggctccccactgaccaacatccaaagggcaagaaagcttgatgacttggcctttacaagtcagcccctgggcatggagcaaggaagagggatgggcagcgggtctggaggggtgagccgggagagctttaacccagtcatcgtccggcttagtctcagatccaggtgttcattgttcagtagtcgactattcagagtctttcgaggagactgatgaaacagtttatgaatgataaacatggggtacagggttttggacacgggtgcttaagcataaactataaaatgagaagaataaggtactttattcttctgtggcagggaacccaacacttgggtttacgttgcagggcaaca

SEQ ID NO: 254971 - DNA, 203 bp, Homo sapiens
  chr5:96114496-96114699
  hypo
ggtaagagcagagagaagtgcgcaagatccagtgcatgtgctgagggaagaccggcaggacttgcgtagttagatgtctggggaagaaaggattcaggatgactcccgtattttatatgtccgtagtttgctctccattatgataacatctcgggctctttacttttcatgccctgcttcaggatcttcgcacctgatatttc

SEQ ID NO: 254972 - DNA, 166 bp, Homo sapiens; identical to SEQ ID NO: 210252
  chr5:96121446-96121612
  hypo

SEQ ID NO: 254973 - DNA, 33 bp, Homo sapiens; identical to SEQ ID NO: 210253
  chr5:96173522-96173555
  hypo

SEQ ID NO: 254974 - DNA, 85 bp, Homo sapiens; identical to SEQ ID NO: 210254
  chr5:96362698-96362783
  hypo

SEQ ID NO: 254975 - DNA, 60 bp, Homo sapiens
  chr5:96378907-96378967
  hypo
tgaatgccctgtgtcgctgattgggaaccagaggcgcttttgatccgcactgagtaacca

SEQ ID NO: 254976 - DNA, 55 bp, Homo sapiens
  chr5:96397786-96397841
  hypo
taatgatgttgatccgggctgctctccgctgccagcctctcgagtgatccaggta

SEQ ID NO: 254977 - DNA, 42 bp, Homo sapiens
  chr5:96742642-96742684
  hypo
ggcctcccccccacacttgtcggtgttcaaagtccccagggg

SEQ ID NO: 254978 - DNA, 82 bp, Homo sapiens
  chr5:97912104-97912186
  hypo
acgcgggttcagagcgtggagcagatgggcgaggtggcctagggagcggcccgcatccgtggggagacgctgggcctcaacg

SEQ ID NO: 254979 - DNA, 181 bp, Homo sapiens
  chr5:98200930-98201111
  hypo
aaaagtatgaatgccagtgtcgctggaaccaagtaagtcagagaagtggccggcaacgatgggaggtgactagatgctacgaggctggtttcaggctaagaatcttttctcctaaatgagatggaaagccactggagtgttgtaggcacagaaatataacggtgtgactttattctccctc

SEQ ID NO: 254980 - DNA, 132 bp, Homo sapiens; identical to SEQ ID NO: 210257
  chr5:98239920-98240052
  hypo

SEQ ID NO: 254981 - DNA, 76 bp, Homo sapiens; identical to SEQ ID NO: 210258
  chr5:98242969-98243045
  hypo

SEQ ID NO: 254982 - DNA, 39 bp, Homo sapiens
  chr5:100247924-100247963
  hypo
gagccaccacgcccagccgatgattcttgtttatggatg

SEQ ID NO: 254983 - DNA, 80 bp, Homo sapiens
  chr5:103289777-103289857
  hypo
caggccggcggcgcccgcccgctaagagtgtgggtcccaccgagcccacgcccacccggaactccgcgctggcctgccag

SEQ ID NO: 254984 - DNA, 343 bp, Homo sapiens
  chr5:107703569-107703912
  hypo
ggaagtctaaacaaaggtcacgccagtacttgcaaaccaatgatgcggaaaggcaacgctcatccagtgacaaattggaaaatatctgtgaataaaaaacggtaccatataatatgtgctaaacattttcaaggcacaggaaaaggtttttattagttagaaaaagttaactttgtaaaaagaaaaccttcttgaataaaagaggccattattgtaagtcaccgtaagagatcaccttaaagagaaactatgatacaggagctaaaaacggactgatgttatattttctgtaagaagaggaggggaagagaacaggcatgtactgacacgtgttcatgcatat

SEQ ID NO: 254985 - DNA, 215 bp, Homo sapiens
  chr5:108586386-108586601
  hypo
gcaaaggtggctgtcggcaggatcagtgctggaatttcagcctcatatctcatagcctgctcccggggtgatggatggcttctgcgcggctggccattgatcccagtcatagccgaagagtaaaacaacccttgccgccgcatttacattgcgggctgacatgtgtctgcaatgcggcgccgaggcccccagggactgcgcgtggccaccttctg

SEQ ID NO: 254986 - DNA, 38 bp, Homo sapiens; identical to SEQ ID NO: 210265
  chr5:108730038-108730076
  hypo

SEQ ID NO: 254987 - DNA, 43 bp, Homo sapiens
  chr5:109024574-109024617
  hypo
gaggcaataaatcaataactggcagaagcatcacttctcagat

SEQ ID NO: 254988 - DNA, 41 bp, Homo sapiens
  chr5:109032071-109032112
  hypo
ttacaggcgtgagcctctgcgcctggttggtatctcttaaa

SEQ ID NO: 254989 - DNA, 42 bp, Homo sapiens
  chr5:109040408-109040450
  hypo
accagggactgcagcaataacgatgacacccctgctggaaat

SEQ ID NO: 254990 - DNA, 289 bp, Homo sapiens; identical to SEQ ID NO: 210267
  chr5:109162076-109162365
  hypo

SEQ ID NO: 254991 - DNA, 122 bp, Homo sapiens; identical to SEQ ID NO: 210270
  chr5:111065740-111065862
  hypo

SEQ ID NO: 254992 - DNA, 123 bp, Homo sapiens
  chr5:111675709-111675832
  hypo
gaacagagaaccagaactcccgattagggccccatgtggttccctcatatccaatgctcacagcagcatgagaaaagtcacggaggagagcccatcgaccccgccctttcaacaaagtgttaa

SEQ ID NO: 254993 - DNA, 241 bp, Homo sapiens; identical to SEQ ID NO: 210272
  chr5:115570379-115570620
  hypo

SEQ ID NO: 254994 - DNA, 100 bp, Homo sapiens
  chr5:115717687-115717787
  hypo
atcactgagcagcaaggctgcgtggatctaaagcgggatgagatgaggtaaaaacatccaaaattgaagtaaaatattcgacaatgtacatattcatgtg

SEQ ID NO: 254995 - DNA, 559 bp, Homo sapiens
  chr5:115783167-115783726
  hypo
gctttaatgagcatcttggccgtgttgccgggagtggcgagcttgccgttgtgcatgagtggcgtgaggatggcctccggctttgggtctttggattgagtgtccccaaagaggccgctgagcttggtgacgctgctcatggagccccggcgcgagtgggtgagctccttctccttgcgctgcaccacagccacgtctttgcgccgatgatcacagacgcagtagacggtgatgcccgagaagacggcccccatgacgaaagccaggatgactgcaatggccaagagggtgacgggaaccagctggtcgtggcctttgaggtaactttcccgaatcactcctgcaatagacatcgcatatggcgttaagaaatgaaagcacaccccgaggcttgtttttgcttggcattcaccttgttaattaataacagtagtaagtgacaacagcacctctgcacaacttgtcttccaagctcagcttgccaaacattaaccaattaatcctccccaagcccctcgtgtgcagtatgtaaatggactccatttgtagccttctttgt

SEQ ID NO: 254996 - DNA, 61 bp, Homo sapiens
  chr5:115824596-115824657
  hypo
tgaatcgtgcttgacggtccgcagggtagggctttctccaagactccggtaaatgactgcg

SEQ ID NO: 254997 - DNA, 38 bp, Homo sapiens
  chr5:116177882-116177920
  hypo
tttaagatattgaatctggccgggcgcggtggctcacg

SEQ ID NO: 254998 - DNA, 33 bp, Homo sapiens
  chr5:116238695-116238728
  hypo
gtgtgagccaccgtgcctggcctgaagttcata

SEQ ID NO: 254999 - DNA, 156 bp, Homo sapiens; identical to SEQ ID NO: 210274
  chr5:118309319-118309475
  hypo

SEQ ID NO: 255000 - DNA, 35 bp, Homo sapiens; identical to SEQ ID NO: 210275
  chr5:118461528-118461563
  hypo

SEQ ID NO: 255001 - DNA, 34 bp, Homo sapiens; identical to SEQ ID NO: 210276
  chr5:118717629-118717663
  hypo

SEQ ID NO: 255002 - DNA, 41 bp, Homo sapiens
  chr5:119517817-119517858
  hypo
gctgggagatgtagaccggacctattcgtattcggccatct

SEQ ID NO: 255003 - DNA, 131 bp, Homo sapiens
  chr5:121187431-121187562
  hypo
ctgcgctggcctccgcctagactgcgccccacgcgggtccccagagcccccggcggcgcttccccagcgccctccgcgtggaaccccgcgcctctggaacagaaggggcgtgtgacgcagtcaccgttgcc

SEQ ID NO: 255004 - DNA, 149 bp, Homo sapiens; identical to SEQ ID NO: 210277
  chr5:121187995-121188144
  hypo

SEQ ID NO: 255005 - DNA, 165 bp, Homo sapiens
  chr5:121874457-121874622
  hypo
gagcaagactccgtttcaaaaaaaaaagaagaatattcttttgttagacgtggccctcacgacagataccatgtggtatcctcagccctaagagcagaggactaatgaatataaaataatgccataattcctgccataaaaataagctttcggaacacacttctg

SEQ ID NO: 255006 - DNA, 203 bp, Homo sapiens
  chr5:121906794-121906997
  hypo
cctgactgagctttacgatggcccatggggattctgcatacacatgtgtacaaggtaagtgcaaaaagtataaaactaggaagtgcacattgaaatcaggggaaaaaatacacccaacaaagtgtgctgttgttaggagatgcgccatagctttcaccctccatgctgtctgccgcagcgcctcacaccgtaggtaaatggag

SEQ ID NO: 255007 - DNA, 41 bp, Homo sapiens
  chr5:122150760-122150801
  hypo
atgggattagatgagtaatcgagaatcatcaaatagttgac

SEQ ID NO: 255008 - DNA, 54 bp, Homo sapiens; identical to SEQ ID NO: 210278
  chr5:122152701-122152755
  hypo

SEQ ID NO: 255009 - DNA, 43 bp, Homo sapiens
  chr5:122179759-122179802
  hypo
acaggcatgagccaccgcgcccggccatgtgattgttatagag

SEQ ID NO: 255010 - DNA, 38 bp, Homo sapiens
  chr5:122189087-122189125
  hypo
ctgggattacaggcgtgagccaccgcgcccggcggtat

SEQ ID NO: 255011 - DNA, 31 bp, Homo sapiens
  chr5:122906339-122906370
  hypo
gcgcccagccgacagtcctttcattgaagaa

SEQ ID NO: 255012 - DNA, 88 bp, Homo sapiens
  chr5:123929400-123929488
  hypo
ttacaggcgtgagccaccctgcccggcaccctgacatagtttttattatgactaatatattacttataattatcgttgatttacttgc

SEQ ID NO: 255013 - DNA, 144 bp, Homo sapiens
  chr5:124128449-124128593
  hypo
ctgggattacaggtgtgagctaccgcgcccggccgatcacatgctttttacacattcacttccatgtcctcatcagaagcactcacactaccgtcaaacatttaaggttaaaacaaagattacgttatgtgtagcagttaccca

SEQ ID NO: 255014 - DNA, 39 bp, Homo sapiens; identical to SEQ ID NO: 210283
  chr5:125911666-125911705
  hypo

SEQ ID NO: 255015 - DNA, 200 bp, Homo sapiens; identical to SEQ ID NO: 210284
  chr5:126073559-126073759
  hypo

SEQ ID NO: 255016 - DNA, 152 bp, Homo sapiens; identical to SEQ ID NO: 210285
  chr5:126193333-126193485
  hypo

SEQ ID NO: 255017 - DNA, 264 bp, Homo sapiens
  chr5:126213744-126214008
  hypo
ctcccgccagcaatcgaaggtctgttttctaccgggcaggtgagatgtgttacagacaagaggaaaggcttgtgccagctgtgaggctgccagctccaaatggcctgaaccccagccacggcccatacttactagtgtccaaaagaggtaaatagtgaagagtgcgacagtgagtgcaatcagtccgacggcttccagccgactactaaagtgcaggtggtccacggcgccccgcaggcacagccagcccgagatggtggccag

SEQ ID NO: 255018 - DNA, 303 bp, Homo sapiens; identical to SEQ ID NO: 210286
  chr5:126250500-126250803
  hypo

SEQ ID NO: 255019 - DNA, 40 bp, Homo sapiens
  chr5:126479575-126479615
  hypo
tgtcccgctgcacagcgcagggaggcggcccacagcgcgc

SEQ ID NO: 255020 - DNA, 42 bp, Homo sapiens
  chr5:127808517-127808559
  hypo
tttatgcaatgtgtgttttacgacaatcttaaaaataaatat

SEQ ID NO: 255021 - DNA, 298 bp, Homo sapiens
  chr5:130330814-130331112
  hypo
ctccagaaaaaccgcgaaaaccaggcgttcagctttctgtacgagccagcccaacagccaagcgtccaactgctactgacagaagctggaggagttccagaaagccaaggccggctccacaggcacccgaccccggcctgaagcgcaggtctcctcctgaggcccgacaaccacctgccccgcctcgtcctcgcctgtgtcccccccgtcatccccgctccaggcgcccccggggagccagcctccgcagccaccgtcaagaggaagccgaagagccggtggaggcctgaagagaaca

SEQ ID NO: 255022 - DNA, 422 bp, Homo sapiens
  chr5:130331393-130331815
  hypo
gaggaggtgagcagcgagctgcgcacctgggagcaccagctgcagcgcatggagatgaacaagacgagggaatgggccgagcagctgacgaagatgagccgaggcaagcacttcatcggagacttcctacctccagacaagctggagaagtttatggagactttcaaggccctgaaggagggtcgcgagcctgactactcggagtacaaggagttcaagctcaccgaggagaacgtgctgatgaagatgggctggaaggagggtgagggcctcagcgagccagggcatcaagaacccggtcaacaagggcaccaccgcagtggctggtgccggcttcggcattgacccgccagccgctgtctccaaggaagacggcgagaactaggccttcctcaagaggatgatgccggcctaccgcttcc

SEQ ID NO: 255023 - DNA, 97 bp, Homo sapiens; identical to SEQ ID NO: 210290
  chr5:130636510-130636607
  hypo

SEQ ID NO: 255024 - DNA, 65 bp, Homo sapiens; identical to SEQ ID NO: 210291
  chr5:130661706-130661771
  hypo

SEQ ID NO: 255025 - DNA, 42 bp, Homo sapiens; identical to SEQ ID NO: 210292
  chr5:130723958-130724000
  hypo

SEQ ID NO: 255026 - DNA, 43 bp, Homo sapiens
  chr5:130951290-130951333
  hypo
gtagctttcaagagggaagtcggctgggtacagtggctcacac

SEQ ID NO: 255027 - DNA, 189 bp, Homo sapiens; identical to SEQ ID NO: 210294
  chr5:131037383-131037572
  hypo

SEQ ID NO: 255028 - DNA, 40 bp, Homo sapiens
  chr5:131133935-131133975
  hypo
ccgaggcaggcagatcgctttagctctgtagttcgaaacc

SEQ ID NO: 255029 - DNA, 55 bp, Homo sapiens
  chr5:131410606-131410661
  hypo
gcagcactgccctccaaccccggtgagtgcctacggcagggcctccagcaggaat

SEQ ID NO: 255030 - DNA, 82 bp, Homo sapiens
  chr5:131517613-131517695
  hypo
tcctcaatctggtccggtgtccgacgcctgcgtctggagtcaagtcccaccttttacctcagtgataagtgctctaaagaaa

SEQ ID NO: 255031 - DNA, 518 bp, Homo sapiens
  chr5:131607799-131608317
  hypo
cgtggttacttctttctggacgagcggctctactgtgagagccacgccaaggcgcgcgtgaagccgcccgagggctacgacgtggtggcggtgtaccccaatgccaaggtggaactcgtctgagctgggaccctgctcccacgcctgcttcttaaggtccctgctcggccggtgtaaatatgtttcaccctgtccctctaataaagctcctctgctccaccttgaacctgtcacctggcctgccaccctcctgcgcaggccatgcatggctcccgagtacagtagtatctgcttaggtgccaggcatgtcctaggctctgggtgcagtagtgagcaggacgggtaccatgctgccctgaagggggccacagcctgggtggaaggcagacctgaatcacaacgggccagctctagtaatacgaaggtgaggtctgggatgctgcgtgcggcgcgacgacaggaggtatgacctgggtggggtcagggaaagtcttagctgagaactaagagatgaggga

SEQ ID NO: 255032 - DNA, 108 bp, Homo sapiens
  chr5:131608347-131608455
  hypo
tgcaaaggtgagctgggggcgagaaaggcctctgtggccgtcatcggcactagcgggttgggggtggtggtggggtgctggcagcctcaggagcgatcgctcccctgg

SEQ ID NO: 255033 - DNA, 324 bp, Homo sapiens
  chr5:131609888-131610212
  hypo
ccaaggggtcagactgtgtgcgttgaggccctgagggcgccccaccgtagcgctgcgcaggtgtgcacgcacacacgctccctgcagccacacccaaatagggtggggtggtggaggagtctgcccttgcctgcccaccctgcctccgctgacttggtcccagccccacccagtcataggtgggagaggagaggatgactggcacccaggaaagcagggaagcattattaagcacaggagtgggtggaaaaataccgggagccatgggccctggcccccacctctcactcccactcacccgcagaaactcgactctcccactgg

SEQ ID NO: 255034 - DNA, 60 bp, Homo sapiens
  chr5:131628975-131629035
  hypo
aacagcagaagggccttaggtctgggcactgagccaaaaaaagggaggctgtggtccctg

SEQ ID NO: 255035 - DNA, 52 bp, Homo sapiens
  chr5:131629083-131629135
  hypo
tctctccctccctccctctgttcctggactgggggcaggcccttctgctaac

SEQ ID NO: 255036 - DNA, 136 bp, Homo sapiens
  chr5:131701219-131701355
  hypo
ccccttaccagaagcgtccaaacacggatttgagggatctacagcagacactggacagatgctctgaatcattctctactctgatgctgaagctataatattggactaagcttgggccttctactcttttctttct

SEQ ID NO: 255037 - DNA, 179 bp, Homo sapiens
  chr5:131712816-131712995
  hypo
cagtgtgcctgctgcgggagttctccgtgtccagcctgagggttgcctgccaacccctctgagaggtgcccggaggctgtgcgcccacactgcccagcagtgcggagaagcaggcttgtttttccctgtcactggcttggaagagatgctttgttctagggagccgcatgtccccttgc

SEQ ID NO: 255038 - DNA, 131 bp, Homo sapiens; identical to SEQ ID NO: 210301
  chr5:131725264-131725395
  hypo

SEQ ID NO: 255039 - DNA, 177 bp, Homo sapiens
  chr5:131787118-131787295
  hypo
cacctcggcggtaacgctagagccccaccaagcatgtgtttgtcctcccatcccctatgattggcacctcccgggagagctccaggtaggagatcttgtaacccaaggctcatctgtcccagcttctgatgacaataaatgtgtgtagcctcttttagcggccgagacagcctgact

SEQ ID NO: 255040 - DNA, 37 bp, Homo sapiens
  chr5:131859639-131859676
  hypo
aggctggccgggcacggtggctcacgcctgtaatccc

SEQ ID NO: 255041 - DNA, 101 bp, Homo sapiens; identical to SEQ ID NO: 210303
  chr5:131982464-131982565
  hypo

SEQ ID NO: 255042 - DNA, 45 bp, Homo sapiens
  chr5:131991177-131991222
  hypo
ttacaggcgtgagccaccgcgcccggcctataaacaacctttaaa

SEQ ID NO: 255043 - DNA, 159 bp, Homo sapiens; identical to SEQ ID NO: 210304
  chr5:132001670-132001829
  hypo

SEQ ID NO: 255044 - DNA, 316 bp, Homo sapiens
  chr5:132015482-132015798
  hypo
tcgctgcctgggtgcgactgcacagcagttccacaggcacaagcagctgatccgattcctgaaacggctcgacaggaacctctggggcctggcgggcttggtaagctgcactgtattcctggcaagccggccgcgtggctcctggtggacagcagcctcacttctaaacactccttaggagctgcagcacccttggtcaacccattcattcattcactcattcaataagtatttgctgaagttccacaagtgctgggtgtggttctaggtgctgaggacgtgtcactaaagacacgcaggccgagtccctgttctc

SEQ ID NO: 255045 - DNA, 247 bp, Homo sapiens
  chr5:132083826-132084073
  hypo
aggaactcagcctacgacgaaaagtgggcgcgaggggtgggggtgatgggtgagccgctgcgccggggggcgcttactcccagcgggcatgcagaggaagggacttctcactgccccaccccccgcaccttaagcaggaggctcctgctgctgggggaccaggagtggccgctagcgaccttcctcgccccacctgctcttcttcctagcaggatgaaatctgcgacgccttcgaggaagtcgtgct

SEQ ID NO: 255046 - DNA, 219 bp, Homo sapiens
  chr5:132095767-132095986
  hypo
gcccctgtgggaagccgctttcctcccttaagccctgcgggcccttcagaacagctgtgtggtgaccagtctccaggaggccagtgttggctggcgcgagtgcccgcagttctccatcaccacctgccagccaatacgggctccacaccactgccccacagactgaggagggatgcgccacaggtgtccaagcagaaaccaccacggcttttggaatct

SEQ ID NO: 255047 - DNA, 68 bp, Homo sapiens; identical to SEQ ID NO: 210306
  chr5:132167162-132167230
  hypo

SEQ ID NO: 255048 - DNA, 160 bp, Homo sapiens
  chr5:132167447-132167607
  hypo
gagacacctgagcccgacttctgagagtggtgcccgctgggccctgctccttcttcaacaccatctggactcaggcaccagcttcagctggagcgctaggctttaagacagtgcctaagaacctttcggctttgaaagacttttgttgtttgttttgctt

SEQ ID NO: 255049 - DNA, 38 bp, Homo sapiens; identical to SEQ ID NO: 210307
  chr5:132267350-132267388
  hypo

SEQ ID NO: 255050 - DNA, 42 bp, Homo sapiens
  chr5:132585271-132585313
  hypo
cagagggaaaggaggaggcacggtcaggtgcaggcccaggga

SEQ ID NO: 255051 - DNA, 281 bp, Homo sapiens
  chr5:132607918-132608199
  hypo
tgaaaattaatgacacggccatttcttgaagccaacaaccaaaggaatgagtgtttgccaagaagcaatagctcttgtaacacttacactcactgcattcttaacgcattgtttgtctgtggaaaaagcagtttgcccagcgtggtggtaaggagggcatgatggaaagccggcgtggagggagagaggaggcacgcgcgtgcagcgccgtgacgtgcatttagttacacgacggcttctggaggcccacaactgattaatatacacgggcttgttcattt

SEQ ID NO: 255052 - DNA, 206 bp, Homo sapiens
  chr5:132654500-132654706
  hypo
tggaccttggtggggcgtaaaccacttctgagctgcctgctgccctgggcaagattcctttctgggagcctcttatttcgtctcaggaccccagtggccaggctggcctaagcatggagagcgccctgggagttcttggggtcaccagctggcaaacccatttctcaagtctgtagagctacacggactggcgtccccctgtgagc

SEQ ID NO: 255053 - DNA, 197 bp, Homo sapiens
  chr5:132664450-132664647
  hypo
accaggcagggaagtcggaggggatatgggagtgtgggtgccttctccacctcctgtttaattttattaattttgtttccaagacttccttgggaggctgcatcctcccaaacatctaactaaggggaaaaggccggctgtggagctggcagtaactttgctcagcgtcagcgaggcaatggcgtcagtgatgtcca

SEQ ID NO: 255054 - DNA, 92 bp, Homo sapiens; identical to SEQ ID NO: 210310
  chr5:133240405-133240497
  hypo

SEQ ID NO: 255055 - DNA, 42 bp, Homo sapiens
  chr5:133280965-133281007
  hypo
tacttattcatgtatcttttcgtttgtttgtttgtttgagac

SEQ ID NO: 255056 - DNA, 190 bp, Homo sapiens
  chr5:133362904-133363094
  hypo
tgcaaagtgctgagacgtccctggatcaggggcccctggataggatgatcccagccctcctccctctcccgccccatcagcagccatgagaggggctcccgttgcctccttcacctgcaggtctccctcagacccactgcttcatgaccagttcccgagcagcaaggtgtgcaggcgctgtgccgggccc

SEQ ID NO: 255057 - DNA, 100 bp, Homo sapiens
  chr5:133422878-133422978
  hypo
ttcatgctggggttcgcgtccctcctctgtttggcataaagagagtggaacagatcaggccctcagatctgtgtgcacctgcggtcgctgcaaggagggg

SEQ ID NO: 255058 - DNA, 198 bp, Homo sapiens; identical to SEQ ID NO: 210311
  chr5:133456100-133456298
  hypo

SEQ ID NO: 255059 - DNA, 90 bp, Homo sapiens; identical to SEQ ID NO: 210312
  chr5:133457288-133457378
  hypo

SEQ ID NO: 255060 - DNA, 141 bp, Homo sapiens
  chr5:133458996-133459137
  hypo
ttgggtccataccccgactgagccccttctctatacttcgcctggctcagcatgtggcgggctccctctgcccttccagagctcagtcctgggagacaaagagactttcactgggagcctctaagtcggctctgagattct

SEQ ID NO: 255061 - DNA, 207 bp, Homo sapiens; identical to SEQ ID NO: 210313
  chr5:133459375-133459582
  hypo

SEQ ID NO: 255062 - DNA, 77 bp, Homo sapiens; identical to SEQ ID NO: 210314
  chr5:133464194-133464271
  hypo

SEQ ID NO: 255063 - DNA, 207 bp, Homo sapiens; identical to SEQ ID NO: 210315
  chr5:133465710-133465917
  hypo

SEQ ID NO: 255064 - DNA, 110 bp, Homo sapiens; identical to SEQ ID NO: 210316
  chr5:133469215-133469325
  hypo

SEQ ID NO: 255065 - DNA, 379 bp, Homo sapiens
  chr5:133703366-133703745
  hypo
gatggttcttaaatcaaaaacttttcttgaacacttgccatatgccttttaattttttccaactgctagtaatcttttttaaagaaaaaaaacctccctcaccacatgtcaaactctaggaaagcaagtaattcgaagagttccaccatatacgaaatgatgtacaagagcacggaaataaagaggccagtgtctaactgcttaagtagacatagagttcaactggaatgacagtccctaatgaataaccaccatatcactagaccaagtgcctagggagtgctttctttattgaatagggctttctttgctttcttctataaaatgagttaaatgtaaaaaagcgaaatctcgctatgcttccgctaaataagaggaa

SEQ ID NO: 255066 - DNA, 32 bp, Homo sapiens
  chr5:133730848-133730880
  hypo
agagcaaagggggctgggtgcggtggctcatg

SEQ ID NO: 255067 - DNA, 240 bp, Homo sapiens
  chr5:133819200-133819440
  hypo
tgggattacagacgtaagccaccgcgcccggcctgaataattttttaaaggtcacttttatcaaactggaaatgtaaagaagctgtcttgattatataaaggctgtctttaaagaaataaaacaaggattatacctcgtggtaaaacaatgaaagttttccctttgaaaactggaacaaaacagagacattcattactacatttttttttttttttttttgagactcccgtctcgccctg

SEQ ID NO: 255068 - DNA, 102 bp, Homo sapiens
  chr5:133820039-133820141
  hypo
tttgttttgttttgttttgttttttactgtgatggccagaaccgttagtataatgttaaataaaagtggtagtaatgatgccaggcgcggtggctcacggga

SEQ ID NO: 255069 - DNA, 266 bp, Homo sapiens
  chr5:133845348-133845614
  hypo
actgagtgagatttgagtgacgaaaaggagcagacaaagacaacagcgagtacaaaggccctgaggcaggaacgagcttggcatgatcaagaactgaaaagagcacaggggaggctgcagcacagtgaaagagaggtcagtgataggacatgcgattagacggggcccactagacaatccaggataatccctccctctcaaggcccttaatttaatcatatctgcaaagtgccttctgccatgtcggggaacgtattcacaggctc

SEQ ID NO: 255070 - DNA, 61 bp, Homo sapiens
  chr5:133887785-133887846
  hypo
ataccagctcagcccggatgactactacatcctggcagacccatggcgacaggaatgggag

SEQ ID NO: 255071 - DNA, 318 bp, Homo sapiens; identical to SEQ ID NO: 210319
  chr5:133907414-133907732
  hypo

SEQ ID NO: 255072 - DNA, 135 bp, Homo sapiens
  chr5:133914459-133914594
  hypo
caccaccgcaggacgggcctggttcacggacgactccagacaaagcccccaagaagacctggggccaggatgcaggcagtggcaaggggggtcaagggccacctaccaggaagccaccacgtcggacatcttctc

SEQ ID NO: 255073 - DNA, 47 bp, Homo sapiens
  chr5:134099605-134099652
  hypo
acgatcggcatcccggggtcgctctggaagtcggtctagaagtcgct

SEQ ID NO: 255074 - DNA, 91 bp, Homo sapiens
  chr5:134202026-134202117
  hypo
agctcccatatcaaacaagacgtaagtcagtatcctcaaggaactcgtattacaaaacaaatgccagtcgggcgcggtggctcacgcctgt

SEQ ID NO: 255075 - DNA, 146 bp, Homo sapiens
  chr5:134242156-134242302
  hypo
gtgctgtaatagaagaaatttaaaatagctcgaagacggaggaagataggcactccgccgcttcttgtccacgaaggggagaacacaagttgagtgcctactgtcacctaggcgtgtcttcaggcgtactctgccccaggtgctag

SEQ ID NO: 255076 - DNA, 146 bp, Homo sapiens
  chr5:134253080-134253226
  hypo
caggaacaggtaagcggcagtggctgggcgcttgggtgaatgataaattttgtgtgtaggacatgaggagtttccaatggtgattcaggaggaagggaccaagctttgtgagaatcagcggtggttctctgcggaggagctcctgg

SEQ ID NO: 255077 - DNA, 39 bp, Homo sapiens; identical to SEQ ID NO: 210320
  chr5:134256617-134256656
  hypo

SEQ ID NO: 255078 - DNA, 85 bp, Homo sapiens
  chr5:134273246-134273331
  hypo
acacagcggacatccgctaatccagtggttagctgttccgggctctaatgcacactgttttacacgttaacggttttgaagttcc

SEQ ID NO: 255079 - DNA, 76 bp, Homo sapiens
  chr5:134273877-134273953
  hypo
agctgccatgcctacgatgtcgctgccttttggtatttatcataaggcatgtctccagatccgtcattgttgccat

SEQ ID NO: 255080 - DNA, 157 bp, Homo sapiens; identical to SEQ ID NO: 210321
  chr5:134278932-134279089
  hypo

SEQ ID NO: 255081 - DNA, 166 bp, Homo sapiens; identical to SEQ ID NO: 210322
  chr5:134303558-134303724
  hypo

SEQ ID NO: 255082 - DNA, 81 bp, Homo sapiens
  chr5:134411890-134411971
  hypo
ctggggtgagtcaccgccagcctgggaaatgcactggtgatgatggatggccggggtgctcggatgcgcccctgacagtat

SEQ ID NO: 255083 - DNA, 223 bp, Homo sapiens; identical to SEQ ID NO: 210324
  chr5:134436703-134436926
  hypo

SEQ ID NO: 255084 - DNA, 186 bp, Homo sapiens; identical to SEQ ID NO: 210325
  chr5:134453700-134453886
  hypo

SEQ ID NO: 255085 - DNA, 42 bp, Homo sapiens
  chr5:134462416-134462458
  hypo
ctgtaagtggtccaggaggccgcctggtcaggacatggtcac

SEQ ID NO: 255086 - DNA, 154 bp, Homo sapiens; identical to SEQ ID NO: 210327
  chr5:134513710-134513864
  hypo

SEQ ID NO: 255087 - DNA, 203 bp, Homo sapiens
  chr5:134524776-134524979
  hypo
atgggaacatgcgccgatcaccagtcagtgacttgggaatttttcaggaggcatattttcttacgttaatgcttttgtagattccatcgatgttcagacatcaaagggcatgcaattaataatgggcatctggagggccgatcacatgtttccgatgttaaagtggtgaacgacaggaaaatcggccacggtcaggtattagc

SEQ ID NO: 255088 - DNA, 298 bp, Homo sapiens
  chr5:134579600-134579898
  hypo
cctgaactccactggtgccccgcttgtcatgcacagccccgtcagagccggctccctgggctgaggggctgccctgtgctcctctgagtccccggccgagcgcaccgaattatgtaatgctgctgagccaacatttacgcgtctcagccaatttgctggcctagagttacactgtgcagatgctctgccttacggcttgcttttgtctcggaggccgtaagcagatagcataaccctgcttaccattagacatttcgcaaatcatctaggctcgagcgtgctgcagccagacagttca

SEQ ID NO: 255089 - DNA, 280 bp, Homo sapiens
  chr5:134582958-134583238
  hypo
ctaatagcatgaggcgcctttctcctggcactgcgaagtgcaccggtggccttgccgtcttccctgggggcgtgggggagaaggagagcaaatgccttacgtttagcggatgcgctaggaacggctaggacctcccagggtttgccttgtgcccatggaaccagcagttccgccccaagggaagccagccgtgtgtcctagtgccggaatgatggggtaatgccagtgagccgccccttctccacagggtactgagaacgaggccaggcagcagctgtcc

SEQ ID NO: 255090 - DNA, 204 bp, Homo sapiens
  chr5:134585645-134585849
  hypo
cttcttgataggcaccgccatgttggggatggacctctgtgcccatggtccactcgggggctcatccagggcagtgctatccatcagaaccttccgtggtgatggaaatgttcttcagatctgagctgtgcaacacagtggctcctagtcctgtgtgtctattgagcttttgaaatacccgctctggctcgtgcagctgaagga

SEQ ID NO: 255091 - DNA, 152 bp, Homo sapiens
  chr5:134605588-134605740
  hypo
ctcgggggtggtgtcgcctggctttcttttcagagtctactctcgggctgagattttccttaggccaagtttcagcctggagcaaattttttatggctgtgagctaatcccctagcaagctccggtttatacagaaacgctgacacagtgcg

SEQ ID NO: 255092 - DNA, 151 bp, Homo sapiens; identical to SEQ ID NO: 210330
  chr5:134608288-134608439
  hypo

SEQ ID NO: 255093 - DNA, 152 bp, Homo sapiens
  chr5:134666319-134666471
  hypo
aagaaaaggtggcctcgccccagccattgagcattccccttctcagcagggagtgggtcccaggactccctcctcgccccatcgccttcaggtggatcactggaaggcggcaccaaggccagctcccaagataacatcggccaggagtgccc

SEQ ID NO: 255094 - DNA, 38 bp, Homo sapiens; identical to SEQ ID NO: 210331
  chr5:134673488-134673526
  hypo

SEQ ID NO: 255095 - DNA, 432 bp, Homo sapiens; identical to SEQ ID NO: 210332
  chr5:135091170-135091602
  hypo

SEQ ID NO: 255096 - DNA, 237 bp, Homo sapiens
  chr5:135120902-135121139
  hypo
accccccttgtcccatagatcgtaatgtccgggtggggagatggtgatattattccccatggaacgggggatggaacacctcccttgctccatgggtcgtaatctccagggagggaggggctgatttactccccttggggcgggaggtggaaccctccccgccgcttgccctatggattgtaatatccagtgggggaaagggtgatattactccctatgcggcgggaggtggaacac

SEQ ID NO: 255097 - DNA, 149 bp, Homo sapiens
  chr5:135188296-135188445
  hypo
gccgtctacaactccgtggtgtttggggtcttcagtaacacgcagcggttcctcagccagcaccgctgcggggagccagaggccagtcctccccgcacgctgtcagacctgctcctggccagcatggtggccggcgtggtctctgtcgg

SEQ ID NO: 255098 - DNA, 749 bp, Homo sapiens; identical to SEQ ID NO: 210334
  chr5:135692313-135693062
  hypo

SEQ ID NO: 255099 - DNA, 34 bp, Homo sapiens; identical to SEQ ID NO: 210335
  chr5:135989645-135989679
  hypo

SEQ ID NO: 255100 - DNA, 131 bp, Homo sapiens; identical to SEQ ID NO: 210336
  chr5:136983257-136983388
  hypo

SEQ ID NO: 255101 - DNA, 35 bp, Homo sapiens; identical to SEQ ID NO: 210337
  chr5:137470416-137470451
  hypo

SEQ ID NO: 255102 - DNA, 81 bp, Homo sapiens; identical to SEQ ID NO: 210338
  chr5:137529621-137529702
  hypo

SEQ ID NO: 255103 - DNA, 220 bp, Homo sapiens
  chr5:137721787-137722007
  hypo
gaggaaaagtgcttcggactctgggtgtgaccctgcatcaaagaaattaaaaggagacaggggtgaagtagacagtaatgggagcgatggaggtgaggcaagccgagggccctggaaaggagggaatgccagtggagagccagggctggatcagagagccaagcagccaccgtctacatttgtcccccagataaaccgcaacattcgctttgccacttac

SEQ ID NO: 255104 - DNA, 77 bp, Homo sapiens
  chr5:137727077-137727154
  hypo
gcagctctgtggaccggaaagtgcctgcagagtccatgcccaccctcactccagccttcccacggagcctcctaaat

SEQ ID NO: 255105 - DNA, 471 bp, Homo sapiens
  chr5:137727475-137727946
  hypo
gccatggggaatggccgctccagctcgcccaccagcagcctcactcagcccattgagatgccaactctctcctctagccccacagaggagaggccaactgtggggcctgggcagcaggacaatcccctcctcaaaacctttagtaacgtctttggcaggcactcaggcggctttctgtcctccccggcagatttttcacaggagaacaaagctccttttgaagctgtgaaaaggttctcactggatgaacgaagcttggcttgcagacaagactcggactccagcaccaacagtgacctgtcagatttgagtgactctgaggagcagctgcaggctaagacaggcctgaagggaattccagagcacctgatggggaagctgggccccaatggggagcgcagtgctgagctgttgctgggcaaaagcaaagggaagcaggcccccaagggccggcctcggactgcccccctg

SEQ ID NO: 255106 - DNA, 141 bp, Homo sapiens
  chr5:137791022-137791163
  hypo
aaacaagagctgcccggatcggctgcccttgccctggctgccccagcgtgtgcccacgctcacttgtgctccttttctctctctcacacacagatgggagtcagctttccagccacattcagttctcgctttaattcaaat

SEQ ID NO: 255107 - DNA, 134 bp, Homo sapiens
  chr5:137802660-137802794
  hypo
ccatctccagcggcctcctccgcctccgcctcccagagcccacccctgagctgcgcagtgccatccaacgacagcagtcccatttactcagcggcacccaccttccccacgccgaacactgacattttccctga

SEQ ID NO: 255108 - DNA, 466 bp, Homo sapiens; identical to SEQ ID NO: 210339
  chr5:137803075-137803541
  hypo

SEQ ID NO: 255109 - DNA, 42 bp, Homo sapiens
  chr5:137824665-137824707
  hypo
tttcatctcattggtttatgcgggttaaatgaggcaatgtct

SEQ ID NO: 255110 - DNA, 96 bp, Homo sapiens; identical to SEQ ID NO: 210340
  chr5:137865653-137865749
  hypo

SEQ ID NO: 255111 - DNA, 216 bp, Homo sapiens
  chr5:137895657-137895873
  hypo
cacatccgtgacatcgccggccaacacacctccctgaatggcagctccaatggccacagcctcatcaggattgacagctttacttggggctctgccaaaaagatcctgtacagtctgctgaacctgaacatcaaggaaaaagaacctgtcggcccacacttgggaactacctgagcagaacaaaagggagcacgtgtcctacgctcccagccagat

SEQ ID NO: 255112 - DNA, 64 bp, Homo sapiens; identical to SEQ ID NO: 210341
  chr5:137911812-137911876
  hypo

SEQ ID NO: 255113 - DNA, 119 bp, Homo sapiens; identical to SEQ ID NO: 210342
  chr5:137912556-137912675
  hypo

SEQ ID NO: 255114 - DNA, 101 bp, Homo sapiens; identical to SEQ ID NO: 210343
  chr5:137945777-137945878
  hypo

SEQ ID NO: 255115 - DNA, 35 bp, Homo sapiens
  chr5:138101350-138101385
  hypo
gaattggcgctgggcgaggtggctcatgcctgtaa

SEQ ID NO: 255116 - DNA, 92 bp, Homo sapiens; identical to SEQ ID NO: 210346
  chr5:138119912-138120004
  hypo

SEQ ID NO: 255117 - DNA, 33 bp, Homo sapiens; identical to SEQ ID NO: 210347
  chr5:138179955-138179988
  hypo

SEQ ID NO: 255118 - DNA, 92 bp, Homo sapiens
  chr5:138268302-138268394
  hypo
tacctgcaacgcatcgccctctactgccaccagctgaacatctgcagcaaggtcaaggccgaggtgcagaatctcggcggggagcttgttgt

SEQ ID NO: 255119 - DNA, 615 bp, Homo sapiens
  chr5:138273629-138274244
  hypo
aaggcctcctcccctccccacggaagcaagagagaaggagctgccacgtgctgggcacctcagagcctgtgtccagcctttactctcgtcaccccatttcatctgtgcgacccgagatgtcagtgccattgctgcatctccagctgcacagctgaagaagtgactaggggaggtgaagtcacactgcggcaagtggctggccccgccacccggctttgagaggcacttcctccagggcccccagctttgggccatccctcctggaccctctgagtaatggtgatgccagtggccactccctccctctcacaccttgtcgattcccacggttccctgcccgtcaccaatgcgtgtccctcgtctcccttaccagctccttctcctcgtggcccctgacattgaggtgctccagggctcccatctggagcctcctctccatgttcagtgacacccagcaggggcttgctggtcaatgttgagccaccggctctctagggccaggccagggaggatgcgaacagatgcacatctgtgcatttagaaaacacgggaccgctataaaggaattgcagcacaccattcacaaaaggagacgtacaggactctaactgggaa

SEQ ID NO: 255120 - DNA, 91 bp, Homo sapiens
  chr5:138280519-138280610
  hypo
aacgaacctggatgcggccaatgaggagagagactgcagcccaactcccattccgatgctctgagtgtgtgagggcagagtgcacgcagtc

SEQ ID NO: 255121 - DNA, 292 bp, Homo sapiens
  chr5:138280640-138280932
  hypo
ggcgctggtccagccccctccctacagcccccaggtgcccgttcctccatcctcgctcccagaaatcctctcaagagcacctggcccaaagcctccctctgctttacagaatcgctgctgagggcagcacacctgggggcagaggggacactggggactgcagttaggcccctactagtggcactcctcccatagggacgctttccacaccccgggccagaccctggtggtcacagaggcctccagggccagcctggtcctgacacagccgagcgcccggcctggcctcccc

SEQ ID NO: 255122 - DNA, 77 bp, Homo sapiens
  chr5:138286151-138286228
  hypo
cagcctccaccattcggcagcagttccagcggctgcccagccctgctccactagtcggcatgcggctcttctgggga

SEQ ID NO: 255123 - DNA, 67 bp, Homo sapiens
  chr5:138290872-138290939
  hypo
agtgacatcagtggcgctggtgtgctcaaagtcaacagaaggatattaaggacgtagctcatctccg

SEQ ID NO: 255124 - DNA, 251 bp, Homo sapiens
  chr5:138441364-138441615
  hypo
ggcaggctgtgagccgcgacactggcagatggctgccccggtagcaatcgtgcacgctccaacggccgcctcctccagtccacccttgagcacaggcttatgttcccaaaaggggtggagagcaccagcaaacattacccccaaagaatagtggctttccctagggaaggtaaacatttccatcagaaggcagaagccggcacaaggcaatttctctctgtgcagggaaaaggagccgcaaacataaagtt

SEQ ID NO: 255125 - DNA, 120 bp, Homo sapiens
  chr5:138627523-138627643
  hypo
ggccaagtaacttcatttttatggctatgccatttcaggtagtgcttcgttgaggcatcaagactccactgaccagctttttcactttattgaattacataacctttttttttttttttt

SEQ ID NO: 255126 - DNA, 31 bp, Homo sapiens; identical to SEQ ID NO: 210349
  chr5:138659303-138659334
  hypo

SEQ ID NO: 255127 - DNA, 152 bp, Homo sapiens
  chr5:138668934-138669086
  hypo
ttgagggagtaaggggacaccggtttagccagccagatcagccaaatcaatttttgtatttttagtagagagggtttcaccacgttggccaggctggtctctaactcttgacctcaatcttccctcggcctcccactcggttcccaggtgag

SEQ ID NO: 255128 - DNA, 152 bp, Homo sapiens
  chr5:138676299-138676451
  hypo
cacccatttcctagtcggtcatttgccctctccaaagggaagaaattagtttgtgtccctttttcaaagatagtatctacacatttgaacatccagatttgtaaaacacatactctcggccgggtgcggtggctcacacctgtaatcctagc

SEQ ID NO: 255129 - DNA, 43 bp, Homo sapiens
  chr5:138741278-138741321
  hypo
tgttttgtttcttgcgtttattttcatggacttggagacaagg

SEQ ID NO: 255130 - DNA, 55 bp, Homo sapiens; identical to SEQ ID NO: 210350
  chr5:138928998-138929053
  hypo

SEQ ID NO: 255131 - DNA, 33 bp, Homo sapiens; identical to SEQ ID NO: 210351
  chr5:138945975-138946008
  hypo

SEQ ID NO: 255132 - DNA, 120 bp, Homo sapiens
  chr5:138959965-138960085
  hypo
atggctgaggagagtggatggcttgagtccaggagtataaggccagctgggacagcgtaacagagtgagaccctgtttctacaaatttttttcttttttgaaacggagtctcgctgcgtg

SEQ ID NO: 255133 - DNA, 51 bp, Homo sapiens; identical to SEQ ID NO: 210354
  chr5:139060689-139060740
  hypo

SEQ ID NO: 255134 - DNA, 33 bp, Homo sapiens
  chr5:139091838-139091871
  hypo
caccccactcaagtttggcgggggtcgggggag

SEQ ID NO: 255135 - DNA, 227 bp, Homo sapiens
  chr5:139113841-139114068
  hypo
cccgaggggtatcccggggtgagtccgtgagtgtgcatttgggtgaggacgtgattctgggtgtgaggggtcttgcttgagcgcttgagcacatgagcagcccctagcctgctcagaacagagcactgctgtctctgctgcgccaacaacgaggcctctctgtctcagcgcataatgtcccctctgtattgtctgctgcatcgctgtggtgacgataattttaaggc

SEQ ID NO: 255136 - DNA, 101 bp, Homo sapiens
  chr5:139556302-139556403
  hypo
gtggggcattggattcgctgaaaggagtcccatactatttgttgattgtagatcaaagatctctagacctggcctggtgcggtggctcacacctgtaatcc

SEQ ID NO: 255137 - DNA, 105 bp, Homo sapiens; identical to SEQ ID NO: 210358
  chr5:139632450-139632555
  hypo

SEQ ID NO: 255138 - DNA, 164 bp, Homo sapiens
  chr5:139633303-139633467
  hypo
gtgatggggtcaagcgatgggcagctgaagtcggtggggacttttggttcagagaagattaagggaagaaggaatctatcactaccttaactatagaaagcaatggctctccaagtgcagtcctctcccagcagcatcgggatcacctgcgaacttattagaag

SEQ ID NO: 255139 - DNA, 38 bp, Homo sapiens
  chr5:139640453-139640491
  hypo
gacaggacacgggccgggcacaatggctcatgcctgta

SEQ ID NO: 255140 - DNA, 32 bp, Homo sapiens
  chr5:139945503-139945535
  hypo
tggaaagcctgcagcggcgtgtagaagacgaa

SEQ ID NO: 255141 - DNA, 120 bp, Homo sapiens
  chr5:140045562-140045682
  hypo
acaatagagtgagacactcccttgattaaaacccttcaatggtctgcttttaggatttagtacaaatttctcaatcctgccttcaacgccctgaccatctgtgctcattcatccatacct

SEQ ID NO: 255142 - DNA, 32 bp, Homo sapiens; identical to SEQ ID NO: 210360
  chr5:140088250-140088282
  hypo

SEQ ID NO: 255143 - DNA, 32 bp, Homo sapiens; identical to SEQ ID NO: 210361
  chr5:140088522-140088554
  hypo

SEQ ID NO: 255144 - DNA, 168 bp, Homo sapiens
  chr5:140905568-140905736
  hypo
cctatctcagcccatcaacccgtcttcactcctcacctgcattcatgtctatgagttgctctctcttctgctgcttctctagccgctccttctctgccttctccttggctagttttgctcgcctcatcttttcttctgtctcccgccgcttctggttctccttgactg

SEQ ID NO: 255145 - DNA, 34 bp, Homo sapiens; identical to SEQ ID NO: 210362
  chr5:141002378-141002412
  hypo

SEQ ID NO: 255146 - DNA, 144 bp, Homo sapiens; identical to SEQ ID NO: 210366
  chr5:141051473-141051617
  hypo

SEQ ID NO: 255147 - DNA, 93 bp, Homo sapiens; identical to SEQ ID NO: 210367
  chr5:141052407-141052500
  hypo

SEQ ID NO: 255148 - DNA, 68 bp, Homo sapiens
  chr5:141072799-141072867
  hypo
catctctgtacatgcgcgcgcacacacacacacacacacagctgacagcctcacgcgctggaggggcg

SEQ ID NO: 255149 - DNA, 265 bp, Homo sapiens
  chr5:141244706-141244971
  hypo
gagtcactagccctatgccccggatctcaatggtgggggcattgtcattcatgtccttcacggtcacaaccacctgggcacgggcactcttggggttggtgcctcggtccttagcaagcactgagaagcgcagggtgcttaggtcctcacggtccaccgggccctgaacagtgataagtccagtgttcctgtccagtcgaagaagacgcctcacaacttcgggcgcctggtggaatgtgtattcgatttctgcattggcaccttg

SEQ ID NO: 255150 - DNA, 723 bp, Homo sapiens
  chr5:141248096-141248819
  hypo
gggtcaccctgacagttatacggagggggcctctcacctggatgaccgagtggcctatggggctattctcagatagttcggcctcataggagggccgctcaaacttgggggcgttgtcattggtgtcaagcacggtgacacgcagcagggcactgctggcgcgtggggggctgccgccatcctgcaccttgatggtgaggtcataggagtcccagcgctcacggtccaggttgcccatcacaatgagctgtggttgcttctcctcctggtcctctgccacctgcagcccaaatagctcctgggcctcaggcccagcctgcagctcataggatgccacaccgttgggaccagcatcacggtctgaagccagcgggatggggaagagtgagccgatgttggtgttctcagggatggccagagtgatgactggtgaggcgaagttgggtgtgttgtcattgatgtcttgtacttctatctggccctctagcagccgggggctgccattctgcacgaggtctgtgatagatacctcaaactccaggatgcagggatcaccagggagctggttctggcattcacggagcccctcacggtcgatggaggtctcggtggtgaaaatgtcacctgtcttgccatccacgcgaaggtacggggcacccacctctagcttgtacaggtgccccacatctggaaaaccatagtcggctgcgaggctcccaatga

SEQ ID NO: 255151 - DNA, 58 bp, Homo sapiens
  chr5:141295480-141295538
  hypo
gttctgtgctggatagagttcggccctgcccctcctcggttcctgccaataggactgc

SEQ ID NO: 255152 - DNA, 85 bp, Homo sapiens
  chr5:141355858-141355943
  hypo
catccacgcatgtgcgtgcatgcacgtgcatgcacacacacgcacaaaacagggacagattaactggatgcgtggttgtggtttc

SEQ ID NO: 255153 - DNA, 32 bp, Homo sapiens
  chr5:141468242-141468274
  hypo
tttggacctccttccggcgtatctgcagtggg

SEQ ID NO: 255154 - DNA, 41 bp, Homo sapiens
  chr5:141581708-141581749
  hypo
ggattacaggagtgggccactgcgcccggccacctgaggca

SEQ ID NO: 255155 - DNA, 31 bp, Homo sapiens
  chr5:141610129-141610160
  hypo
cgcccagcccgaagtagggagttgttgttta

SEQ ID NO: 255156 - DNA, 244 bp, Homo sapiens
  chr5:141663282-141663526
  hypo
gcaaactgtctcacacgatgcctggcacagagagtcaaacgatcatgcttgtagcagatgcctgcgttcgccagcaagcatatgttgtacctgcacatggaggctttctgcttgctcctggtagattattgcacttgccggcttttcttttctaataatttttcattttattattggggcgcgagatttagctgtgttccatgggtctagccgccaagtcctgcagtctcgctgtattcctctg

SEQ ID NO: 255157 - DNA, 34 bp, Homo sapiens; identical to SEQ ID NO: 210370
  chr5:141674168-141674202
  hypo

SEQ ID NO: 255158 - DNA, 34 bp, Homo sapiens; identical to SEQ ID NO: 210371
  chr5:141674502-141674536
  hypo

SEQ ID NO: 255159 - DNA, 317 bp, Homo sapiens
  chr5:141788585-141788902
  hypo
gcgcatgttatgggcgctgggtcggaacaggggccactttgaatggcaaggagggagaatcgctccagcgaagctggaacggccaagaagctgggatgtcaataaacacaggcaggacacagaaagccttttccgaagagatggaaggcggggaagcgaaggaaaggcagtgcctcactcccggtgcatttgagaaggaaaatgcttgaggtaacccgtgttggcagcttttatagcttcctctcgataatgtgctgggcagaccctgaacaggctggtgttttattttcgtgtaacgaagccgagtggaccagggg

SEQ ID NO: 255160 - DNA, 33 bp, Homo sapiens; identical to SEQ ID NO: 210375
  chr5:141803864-141803897
  hypo

SEQ ID NO: 255161 - DNA, 150 bp, Homo sapiens; identical to SEQ ID NO: 210376
  chr5:141850813-141850963
  hypo

SEQ ID NO: 255162 - DNA, 37 bp, Homo sapiens
  chr5:141903297-141903334
  hypo
ggattacaggcatgagccaccacgcccaaccccacac

SEQ ID NO: 255163 - DNA, 147 bp, Homo sapiens
  chr5:142170486-142170633
  hypo
ccctctaaactccccgctgcatgttgaataaatgatgtcgaatgttcctttaaagggcccttctcaaccacttgacttttttctagaagcaactctaagtgttgatggcctcaagcatcaagcatctcttggttctccttagggttt

SEQ ID NO: 255164 - DNA, 171 bp, Homo sapiens
  chr5:142239513-142239684
  hypo
cctcagggctgtcagcgttcccccttactcagtcgtagatataagacacttaccttgcacttactttgagtctcactgagctcccacacatggtgggtccaccagaattctgtgcactggggccacaaggagccccagtgcgcccgcatgacatcccggttgttgttcctg

SEQ ID NO: 255165 - DNA, 57 bp, Homo sapiens
  chr5:142259164-142259221
  hypo
tcatcggttctttacgggtgactgaagtacgaccatctgagccgtcaaccccggagg

SEQ ID NO: 255166 - DNA, 216 bp, Homo sapiens
  chr5:142552917-142553133
  hypo
aagtaacaaaccattctgcagggtgtgcaggagccacgagggcctagagggagtggagtcaggagagcggaaaatcaccacaggccagaattttcaagagacgtatttttaggcaggtccaagatgtttctccaaaaacgaagtggctttgcattgttttattagtaagagtcaacatttccgaattcaggcacttcgcttcgcaatttacatagg

SEQ ID NO: 255167 - DNA, 188 bp, Homo sapiens
  chr5:142623955-142624143
  hypo
cttcctcttcgtgccgcacatattgacgttcagggcttcaagatctctcgcctggactatttcagcagcctcctaacagtctctcttctcccagctcccgcctctggctcctctgcatgttaagagcaaagtcgccccaaagcaggaaatgggattactctcctatcgtgatgaagcctgtgttgcct

SEQ ID NO: 255168 - DNA, 210 bp, Homo sapiens
  chr5:142625530-142625740
  hypo
tcctggggtggccacggtcatgccaagtctcagtgccccctccgcttcaggggcttagaccgccacttggaatgcgtgcattctggcaggtgcggtgcatgcaggggtcagacccctatggtttgatgagataagagcctcctgcacagaatctcattttttctccatctgcaccgccatttgggcctcgggcctcatgactcacacagt

SEQ ID NO: 255169 - DNA, 39 bp, Homo sapiens
  chr5:143182536-143182575
  hypo
taataaatgacggattattctgggcgttatttcaaatgg

SEQ ID NO: 255170 - DNA, 158 bp, Homo sapiens; identical to SEQ ID NO: 210380
  chr5:145379611-145379769
  hypo

SEQ ID NO: 255171 - DNA, 229 bp, Homo sapiens
  chr5:145887322-145887551
  hypo
gcattacaagagatcgcaggtcagtgtgtaatattatgtacctatgtgctgcagtttgactccctaagtaaaagtgagttgtatttatgttttttattcatgtcttttcaaagattaccttaacatccacgtggaaagaagtaaaaaaaatcattaaggaagatcctcgatgtattaagttctcctccagtgacagggtaagaggattttgtgtcgagatttactgtca

SEQ ID NO: 255172 - DNA, 120 bp, Homo sapiens
  chr5:146085994-146086114
  hypo
ctccatcttccagcagcttcctgtaggtggcgatctcgatgtccagggtcagcttgatgttcatcagcttctggtaggcacgcagctgccgcgccatgtcctacttggtctgctgaaggg

SEQ ID NO: 255173 - DNA, 42 bp, Homo sapiens
  chr5:146685046-146685088
  hypo
acttggaggctgggtttctccgggacccttggctgtctcctg

SEQ ID NO: 255174 - DNA, 84 bp, Homo sapiens
  chr5:147015583-147015667
  hypo
cagagccatgcacacgtgccacttcactgatggtgatggcggtgacagggatgcggttgagcacgcagccgaggacagagcagt

SEQ ID NO: 255175 - DNA, 346 bp, Homo sapiens
  chr5:147040615-147040961
  hypo
gatcatattgctcagagcctcgtccacctgcttcttggccgttttcaggtccgcaatttcctgtaagagcttaaggcgctctgtgtcaaacagtttccgggcctcctcccgggcctcaatggtgagcgctgtccttactttgtcactgctgccgtcgcggagagcacagagagcagacttgagcctctggatctctccatcacgtaccttcaccgtccttgacatttcctgctcgtgctgcttgataaggttctccctcacagcctgcagctccttcatcttctcctcatggagcttggctttgagttctgtcaccagcaccgtgtgcttgcgctgctccagctca

SEQ ID NO: 255176 - DNA, 31 bp, Homo sapiens; identical to SEQ ID NO: 210384
  chr5:147055597-147055628
  hypo

SEQ ID NO: 255177 - DNA, 43 bp, Homo sapiens; identical to SEQ ID NO: 210385
  chr5:147274326-147274369
  hypo

SEQ ID NO: 255178 - DNA, 39 bp, Homo sapiens
  chr5:147439593-147439632
  hypo
tctagtttaaagcactgtaacgtctggattctctttttt

SEQ ID NO: 255179 - DNA, 98 bp, Homo sapiens
  chr5:147439812-147439910
  hypo
acggggtttcaccatgttagccaggatggtctcgatctggattctctttgaacggtataaaagtctgtgagatggccgtggggaaactcagagaaatt

SEQ ID NO: 255180 - DNA, 100 bp, Homo sapiens
  chr5:147610059-147610159
  hypo
caaatgcatctgttgtgacccgtttgttatttggaaatgtactacgttgagttccattaatgagtatctgcatgtgaaaataacttctataaaatttacc

SEQ ID NO: 255181 - DNA, 42 bp, Homo sapiens
  chr5:148222774-148222816
  hypo
cctttgaattgggtggtaaacgcagatatctagcaatgctat

SEQ ID NO: 255182 - DNA, 197 bp, Homo sapiens
  chr5:148409735-148409932
  hypo
agagtatgagtgatgcgcaagttacaaaatggtgtcccctctctaggaggaagaattacaaagggccatccttccctatggtatacgccttggggaagctgcaatttaccaacaagatgttctcctgctgcttgtcttggtgctggggcagcctgcacaaccataaggtgcggactgcacgccgcagagctgcactc

SEQ ID NO: 255183 - DNA, 82 bp, Homo sapiens
  chr5:148520459-148520541
  hypo
tattggtagccactatatgccgggccctgtgctaggtattgggggcctgtaggtgaaccctacggacagacccattctttca

SEQ ID NO: 255184 - DNA, 35 bp, Homo sapiens
  chr5:148686935-148686970
  hypo
tgatggatcctttcccgtgacgcctgcagataatg

SEQ ID NO: 255185 - DNA, 99 bp, Homo sapiens
  chr5:148695865-148695964
  hypo
ggtgggtccagggcacggggaggaagggtgctcaggtcctgtgtgcgcgggctttgggggctgaggccaggagacctcatgcctcgtccacctcacccc

SEQ ID NO: 255186 - DNA, 71 bp, Homo sapiens
  chr5:148702156-148702227
  hypo
atctcccaccaggacgaggagcccgagcgccccacaggggcccaggtgaagcgtcacgcctcctcctgcag

SEQ ID NO: 255187 - DNA, 49 bp, Homo sapiens
  chr5:148754033-148754082
  hypo
aacctggctgaacaccggcacgctcaccatgctgcggtcctcctgcatg

SEQ ID NO: 255188 - DNA, 33 bp, Homo sapiens
  chr5:148772455-148772488
  hypo
acagtctctgcatctgtgtacgtgtgtgtgcat

SEQ ID NO: 255189 - DNA, 92 bp, Homo sapiens
  chr5:148772608-148772700
  hypo
tgtgcgcatgtgtgtctgcgtgtgtgagattgttttcccctttccttcctcagcagcaagttacctaacccgtttattgtacaaatagaaaa

SEQ ID NO: 255190 - DNA, 141 bp, Homo sapiens
  chr5:148821007-148821148
  hypo
tcctgttggcctgggagccacggaaggtcttagagcaggggtcgctgaccaagtcgtctcatgtagaagtgggatctcggtccctgcggcccacccgcttcctgagccatcgttgaggacggtgtggtgggagaaggggaa

SEQ ID NO: 255191 - DNA, 33 bp, Homo sapiens; identical to SEQ ID NO: 210388
  chr5:148868824-148868857
  hypo

SEQ ID NO: 255192 - DNA, 120 bp, Homo sapiens
  chr5:148925772-148925892
  hypo
ctctttactcaggatgctatgcttcttaacaataggtctctcaaattacacaggaaggacctgattcagcaggtcatctacgcaggccaggtaattttcagtctctgttgtaagatatac

SEQ ID NO: 255193 - DNA, 58 bp, Homo sapiens
  chr5:148938522-148938580
  hypo
gcccaggcaacagagcgagaccttgtcccaaaaaatataagtacgtattttatttttc

SEQ ID NO: 255194 - DNA, 61 bp, Homo sapiens; identical to SEQ ID NO: 210389
  chr5:148980120-148980181
  hypo

SEQ ID NO: 255195 - DNA, 41 bp, Homo sapiens; identical to SEQ ID NO: 210390
  chr5:148981578-148981619
  hypo

SEQ ID NO: 255196 - DNA, 88 bp, Homo sapiens
  chr5:148982437-148982525
  hypo
aacctttcctgaacacgaatgatgaggatgcagattaaaaacaacaaatatgcaaaaaaaagttttatttttttttgagatggagtct

SEQ ID NO: 255197 - DNA, 144 bp, Homo sapiens; identical to SEQ ID NO: 210391
  chr5:148989228-148989372
  hypo

SEQ ID NO: 255198 - DNA, 36 bp, Homo sapiens; identical to SEQ ID NO: 210392
  chr5:148999330-148999366
  hypo

SEQ ID NO: 255199 - DNA, 43 bp, Homo sapiens; identical to SEQ ID NO: 210393
  chr5:149006876-149006919
  hypo

SEQ ID NO: 255200 - DNA, 136 bp, Homo sapiens
  chr5:149144786-149144922
  hypo
catgtaaggctcatcgggacctcggttaccatttcacctgtgcaaattttcaggactgagtcttttctctatactgccccacgaggggactgacattacttaaggcctctctccaggaccccgagctcaggcctag

SEQ ID NO: 255201 - DNA, 334 bp, Homo sapiens
  chr5:149189244-149189578
  hypo
tttcttaaaaaaaaaaaaaaaaaaaaaaaaaaattaatcaatttcatgttatttatattttaccacaatttaaaaacatactgataaaaggaggcaggggatagcagagaatgataagtgctaatcgagggaattccagcagggtgctaggtaggccagagacgggatggccatttggggtgcagtggtcagggaggcccatctggggagggacgttcaacctgggatgaggatagaaagaagggagccgctatgggagatgaaggagagagaaggcgttccaggctgaggaaggctccagcacagaggccccggggtggacactcaagccaca

SEQ ID NO: 255202 - DNA, 326 bp, Homo sapiens
  chr5:149230003-149230329
  hypo
cctgccaagggcatcgagtagtctctacttgctatcccgtacataaaatgctacaagttctaaaatttaccgaccctgcagacaacctctatcccgaaggactcattcggtgctgtgtattatttagggcaactccaaggtctattcagaaaaacgagtgaaccttggtctctttcccaccaaattgaggagtaacccagagggagcagctgccattggcaaccatctcgttgtagctctgtcctagtgtttgctcttgatgatgtttacatgtgatcgccataaagcttgctgtagactgtgtcgatagccgcccgcacagggca

SEQ ID NO: 255203 - DNA, 41 bp, Homo sapiens
  chr5:149262327-149262368
  hypo
actttaattcgggccgggcatgatggctcacgcctataatc

SEQ ID NO: 255204 - DNA, 442 bp, Homo sapiens
  chr5:149323764-149324206
  hypo
cctctgtgttggggacgttagcaatcttcttagagtgtgcgacatggcccacgatgcccatgtccaaagggaagacgatctcttggtcgggcatcaccaggcagtcctcgaggacagcatccttgtggacattgaaaagcctggtggccagctctgcgatgccattgcgggtccggtacatgaacaggctcatgcggtctgcctgcaggaggaagcacagcttcttcatgacattgaagatgcatttctctgtctgtaaattctcctgaaagtcccgcaggagatcaaagatgatttcgctctcctccatgctgctcggggagtggtagttgctgaagtccacggcagcctccttggccccaaggaggtcggagatgagcttggcccggtagtggaggttgtagtactgtttggcaaagccaatattcgagtccaggaactt

SEQ ID NO: 255205 - DNA, 33 bp, Homo sapiens; identical to SEQ ID NO: 210396
  chr5:149375068-149375101
  hypo

SEQ ID NO: 255206 - DNA, 94 bp, Homo sapiens; identical to SEQ ID NO: 210397
  chr5:149375680-149375774
  hypo

SEQ ID NO: 255207 - DNA, 42 bp, Homo sapiens
  chr5:149405660-149405702
  hypo
gggattacaggcgtgagctaccgcgcccggccccatcttgct

SEQ ID NO: 255208 - DNA, 51 bp, Homo sapiens
  chr5:149449459-149449510
  hypo
aggagccactccccacgctgttgtgggccctgcactcgtaggtttggttgt

SEQ ID NO: 255209 - DNA, 185 bp, Homo sapiens
  chr5:149497194-149497379
  hypo
ggaaccctccagtgggccctcgtcagcaacctcgggtttggggtcaggcagggggatgatatagtcgttgtcaccctcattgggctgcacggcagtatagaggacggagctggtgtccaggggagatcggaggccatggaacccaggcaagcgggcctgggaccgaaggatggctgggtggtcac

SEQ ID NO: 255210 - DNA, 39 bp, Homo sapiens; identical to SEQ ID NO: 210398
  chr5:149501436-149501475
  hypo

SEQ ID NO: 255211 - DNA, 143 bp, Homo sapiens
  chr5:149502537-149502680
  hypo
aaggaggggaaggagcggtgctcctcaggtatcccaaagattcagtccctggcctccctcctggtacctgggcagggggagcccaacgggcagagcattgctgtagagctccgcgctgggcgggcggcgcttgtcggagtggt

SEQ ID NO: 255212 - DNA, 126 bp, Homo sapiens
  chr5:149503640-149503766
  hypo
gtttctaaaccccaccgccctctgggaccgcgcagtgagggcgctggagcgggtgggcacggaccctccagcaggagtgtgctgttgtgcaaggcctgaggggggggtaggcggggcctggccttg

SEQ ID NO: 255213 - DNA, 229 bp, Homo sapiens
  chr5:149523408-149523637
  hypo
ccacccctgcaccacgaacctccccaccagcctcgggatcactctaagggctacagaaagagagcagcccggcgcagcccactcggtgttggagccattctctgtgccacgctgcttctaggcccggggtcctctttatgtttctccaggtacctacaaagtcccctgaacaaagcagcagaaatcgactaagatggggcctggcgtgtgctcccgctgctctggaagt

SEQ ID NO: 255214 - DNA, 187 bp, Homo sapiens
  chr5:149573355-149573542
  hypo
ttaaaatatggtgcccggaacggaggaacaaaactccagcactggtgggtgaaggagacctggctttcgcatcaggaagccttgggctccagacctagttcttccactcaccaacctggtagaaacctcgggtatgtcatgacacctctttgagcctcagttttcctcatgacgaaaatggagctta

SEQ ID NO: 255215 - DNA, 133 bp, Homo sapiens
  chr5:149637115-149637248
  hypo
ccaaactcacaggtcgaagatcaggtagtggtgtccctcctctgagatgctgtcatgtagtcggactgtgggcggggcaaggcagttggttacagtgggacacactgctgcacaggcccgccctccctctctc

SEQ ID NO: 255216 - DNA, 188 bp, Homo sapiens; identical to SEQ ID NO: 210399
  chr5:149725941-149726129
  hypo

SEQ ID NO: 255217 - DNA, 319 bp, Homo sapiens
  chr5:149754247-149754566
  hypo
aggagctgccccagcgccccctgggaagacagggcctgcagttgccaaggcccaggcggggaagcgggaggaggactcgcagagcagcagcgaggaatcggacagtgaggaggaggcgcctgctcaggtgaggcagaggggaggggtggagagtagccccatgcctaaaccccagcacctgcatgggtgtggccacctttgccacatccagctcctgtctccacacgtccaccctctgggctctcccctcatcctgtttctcactccaggcgaagccttcagggaaggccccccaggtcagagccgcctcggcccctgc

SEQ ID NO: 255218 - DNA, 147 bp, Homo sapiens; identical to SEQ ID NO: 210400
  chr5:149800713-149800860
  hypo

SEQ ID NO: 255219 - DNA, 209 bp, Homo sapiens
  chr5:149810733-149810942
  hypo
ggtggacttgggcacgtgaggtcgccggcgaagctgacaagagcaggcttgtgaactgcttgaggatgggtggagcagcactgggagcagcggcaggaggtgaggcagtggctggacaagatgcagccccgggtgcgagcatgcttgtccgcagagggagtgactccgtggggagggagagccaatgatgctgacgaggggaggcagca

SEQ ID NO: 255220 - DNA, 77 bp, Homo sapiens
  chr5:150014717-150014794
  hypo
atgccagccttccacgagtcccgtgtacctgcgggtgctcagtgtgcacatatttatgtgtacgtcctgccccctct

SEQ ID NO: 255221 - DNA, 54 bp, Homo sapiens; identical to SEQ ID NO: 210401
  chr5:150028668-150028722
  hypo

SEQ ID NO: 255222 - DNA, 32 bp, Homo sapiens
  chr5:150060537-150060569
  hypo
cttgtggattgggctgggtgcggtggctcacg

SEQ ID NO: 255223 - DNA, 39 bp, Homo sapiens; identical to SEQ ID NO: 210402
  chr5:150066938-150066977
  hypo

SEQ ID NO: 255224 - DNA, 184 bp, Homo sapiens
  chr5:150446152-150446336
  hypo
ccaccatgcttgaatcgcctccttgtcaggcactgcattaaatgtttcagatatacaatcttggaggagctgcacagtaactctaacatgcatactaatctcatctgcattttacaagggagaaactgaggctcagggcggttaagtaactcagccacgatgacccggccgcaataagagccaa

SEQ ID NO: 255225 - DNA, 37 bp, Homo sapiens
  chr5:150452468-150452505
  hypo
acaaagttctcatgtagaaacgtgtgcttgagggctg

SEQ ID NO: 255226 - DNA, 99 bp, Homo sapiens
  chr5:150834191-150834290
  hypo
cctcttgactctccacgtactgatcctagccctgcctgacctttgaggccccaaataacaagtctaatccatgtgacagcttttttttttttttttttt

SEQ ID NO: 255227 - DNA, 186 bp, Homo sapiens
  chr5:150911166-150911352
  hypo
gaacctgccttgctcgttcccgctgaccacgcggtagccggtcttctctgcgcccgggcgagtgagggtggccagctgcagcacctccgtgccaggtggggcgtcctcgggcacctgcacgctgtgctcggtgttcaggaacacgggcaggtagtcttctaggcccaccaccgagactgtgacggt

SEQ ID NO: 255228 - DNA, 479 bp, Homo sapiens
  chr5:150945538-150946017
  hypo
ctctccagaatgagcgcccctgtcatcaggtccacccggaaggtcccatgggcgccatccatcagaacatatcgcacttcacctgcggggcccaggtcaggatcagaggcatccagaaatgtcaagacagtcccggggggcaggtcctctggaaccttcagcctgttgtgttctgtgatgcactggggagagttgtcgttgacatcctccaatgtgattatcaggtcagtgacagagaagagctggtggcctttgctgggctgatccctggcctccaccttgagtatgtaccgaggctctgattcgcggtccaggtgtcctgtaacaaccagttccccagtgagagggtggagggagaacttctctgtgggacttagcagggtgtagcgaaccctgccattgtcttccgagtcagcatctttggttgtcagctctgcaattgtggttccaacttctgtgtcctccgagatggttaactg

SEQ ID NO: 255229 - DNA, 98 bp, Homo sapiens
  chr5:151082162-151082260
  hypo
tgggagggcagccacgggagtgggtctgggtggggcccggtgccgtgggatgcccgggagtatatagatccatttcagaggctcgccaaccccttcac

SEQ ID NO: 255230 - DNA, 39 bp, Homo sapiens
  chr5:153454424-153454463
  hypo
taataatattattgaccaggcgtggtggctcgcacctgt

SEQ ID NO: 255231 - DNA, 145 bp, Homo sapiens
  chr5:153675965-153676110
  hypo
aaattaagaaagaaaacatttgggaagagctgatttgccagacatactagaattattaacactgggctaaccagcaagacaagagtaacgagcagtggagacattaataataataataacctgcatctgtcgaacgctaactatg

SEQ ID NO: 255232 - DNA, 213 bp, Homo sapiens
  chr5:153734233-153734446
  hypo
gggtgggggggtatcgttggggagaggagacagttaaggacattacagaaggcacacatctttgtgtctagtacgtctttatatcatgacactcacacatctgctgtaccctgtgctttactgggtgggagaaaaagagatgccattgtagctcttatagccccaggcatggaaactgtacgtgaccctgggtatatccgtgtgatcctgtca

SEQ ID NO: 255233 - DNA, 142 bp, Homo sapiens
  chr5:153785959-153786101
  hypo
gattatgtgtgggttcgcagaaccacagagatgcctgaatcaggtgcggccttttattatggtgactaacaaccctcaattacttgcagaccacatttaaaatatttgttcagtgggccgggcgtggtggctcatgcctgta

SEQ ID NO: 255234 - DNA, 36 bp, Homo sapiens; identical to SEQ ID NO: 210406
  chr5:153798341-153798377
  hypo

SEQ ID NO: 255235 - DNA, 97 bp, Homo sapiens
  chr5:154071648-154071745
  hypo
gccctgctggtccctttcgaaggaaaccttcgctggctccctagtgccctggaataacactgaaaccccttagaacggtggagaaggcctatctcca

SEQ ID NO: 255236 - DNA, 266 bp, Homo sapiens
  chr5:154209728-154209994
  hypo
ccttgttgtgtaggaaaaggcgagccagactcagggaacagtgggacccacttcccggcgctgtgcaagtcagagttccttgtaagcagggtctgggcctcacttatcatggatttgccctggtgcctttcactattggtcgaattgagtatttcggaaggagaacttgtttaaaagacagccaccgcccacacattcagaatccatactatccgtctattacagtggagttatccattgttttcgcagctgtctccctctctcat

SEQ ID NO: 255237 - DNA, 34 bp, Homo sapiens; identical to SEQ ID NO: 210407
  chr5:154218388-154218422
  hypo

SEQ ID NO: 255238 - DNA, 67 bp, Homo sapiens
  chr5:154318107-154318174
  hypo
atgtgccagggcactttgctagttgtggaggtgttttaaagatatgcacaagaggccgggtgcggtg

SEQ ID NO: 255239 - DNA, 43 bp, Homo sapiens
  chr5:155438698-155438741
  hypo
cggcctctgaatgtgctgggattacaggcgtgcgcctcggtgc

SEQ ID NO: 255240 - DNA, 42 bp, Homo sapiens; identical to SEQ ID NO: 210408
  chr5:156485285-156485327
  hypo

SEQ ID NO: 255241 - DNA, 102 bp, Homo sapiens; identical to SEQ ID NO: 210409
  chr5:156485567-156485669
  hypo

SEQ ID NO: 255242 - DNA, 83 bp, Homo sapiens
  chr5:156558376-156558459
  hypo
gtacctacgctatgcggagatgtgtattatgtttaccattgttaaggaaattgagttttatggaagttttttcttttttgaga

SEQ ID NO: 255243 - DNA, 155 bp, Homo sapiens
  chr5:156811486-156811641
  hypo
actcaaatcctcagcggaggacagaaggtggcctctcttctggcaaaacatggtaagtatttttggagcacgatgcaaagcctcatctgcacagacgtcatgctgaggaagccaccccagcccggcccccgcatgccaccaacctccttctgaaa

SEQ ID NO: 255244 - DNA, 255 bp, Homo sapiens
  chr5:156874152-156874407
  hypo
ataggtaagcaccaacgtatttaatgggctggctacagaataaacagctacatttttctttggggagcaaaatgcagataattatcaccacttaagctttagtgcaactgtgtaaaaaggcgcggctttttattggcccagcgcctttgtgtgcaaccaatcctgaggtgggcggctgtgtccccgccctggtgggcggagctcttcccagcccaggggcctttgcccatcaggcggttccgcctggcactggct

SEQ ID NO: 255245 - DNA, 253 bp, Homo sapiens; identical to SEQ ID NO: 210410
  chr5:156895563-156895816
  hypo

SEQ ID NO: 255246 - DNA, 421 bp, Homo sapiens
  chr5:157078068-157078489
  hypo
tgggcaacacagacgcagttttgaaaacccgactcccctgctgtctaatacctgcatctgagggcaacacggtgagcgggacatctttggtttcaatttttacagaaggctccagtagggactgcattttagtaggcactggtgtcagggggaccttggtcaatcttatcagctctgaaggcggagctccctgaaactggatccgggccccaggggggaccgtgtggagcgtcaaagggatcctaaggtcttgctggtgcggcccaaaggcaccggacgttggggccaagatgacctccgcgctgccatgaaccaggccattggacgcgggctccgcgccgagcctgcagtcctcgaggagtctctcgggttcctccgttttgatcacaccttctcggatggctgccgggcttttgcctgc

SEQ ID NO: 255247 - DNA, 142 bp, Homo sapiens
  chr5:158139222-158139364
  hypo
cattgcggcagagccgtatccgttcatgctcgtggtgacggagttatagttggtctgctggggagtggtgctcggcacgtacccgtgtggtgatacgctgcttgagttgcgggtgaaacctgaggggcgggggcaaaaccgg

SEQ ID NO: 255248 - DNA, 31 bp, Homo sapiens; identical to SEQ ID NO: 210413
  chr5:158884900-158884931
  hypo

SEQ ID NO: 255249 - DNA, 193 bp, Homo sapiens
  chr5:159489227-159489420
  hypo
attcttcctctcgtcggcagtttgaatatttgcagtcttagcttggaatggtctttctgcactagagggaaacctcctttagtgcagaccagcctaaagccaagccattgctgcctgaggaagctgccatctctggagcacggtgacatgccaccaccctggacctattcccatcccccggagcactgtggca

SEQ ID NO: 255250 - DNA, 41 bp, Homo sapiens
  chr5:159658703-159658744
  hypo
tgaaagtctcattcattccagaacttcgcgagcttggcaag

SEQ ID NO: 255251 - DNA, 99 bp, Homo sapiens
  chr5:159659075-159659174
  hypo
atggctactctgcttgtccccgggtccagggatctccagcgatgtaatcgaaaaggcccgcaacttcaagatcgtcacggaggtgcagcaggatgggca

SEQ ID NO: 255252 - DNA, 44 bp, Homo sapiens; identical to SEQ ID NO: 210415
  chr5:159669397-159669441
  hypo

SEQ ID NO: 255253 - DNA, 32 bp, Homo sapiens
  chr5:159670915-159670947
  hypo
gcgtgagccactgcgcccggccagggctcttc

SEQ ID NO: 255254 - DNA, 424 bp, Homo sapiens
  chr5:159679760-159680184
  hypo
aagcaagaccacttcgggaagcagcagcacatgacatatctaaaaggctgaaaatggttttaggttcgaaaacaaaggcaagacagccacccactgtgcctcgcaaggcaaacactcaggcatacacaccaactcaggcccctctgcatagagccagggaaagaaaagcacccaatatgggatcctccgggggtcctgagaacacgccaggctgcccctcctttttcagcggtgtagctgccatcagcaaagaatagaaaagtctttaatgctaaaaactggacatgcttgagatcagtggtctgtgtccagttcccactctcctggcctcttatcaagtctttctcgattcactgggcccctgtgtggggggacggccaccaagccatccttttgtaccctagccacacgtggcagacgtttc

SEQ ID NO: 255255 - DNA, 406 bp, Homo sapiens
  chr5:159686736-159687142
  hypo
gctccaacttggggacgtggtcttcccgatcctcgaacttacctgtcggggagcaggggaagcaggggttactggaagacatttacctgaacccaggaagctaacggcccaccttacagtgcctggacattgctggcaaagaagacagaaagcagacaggccagactgcggaggaataggagcacacattccagatctgtcaaacctaggcttgaatccacaagccatcacttcccactgggggatcatggctaggtgtctcaacctctctgtgactcagtttcctcatctgtaagatggaacctatacttcataaggcttttgttagagtcaatgggaaaatgcaaaccaaatgctcagacaagcctctggaacacaaagcagccgatagcggtcagcagcagca

SEQ ID NO: 255256 - DNA, 460 bp, Homo sapiens
  chr5:159691933-159692393
  hypo
aaattttaaatatacgaaaagagagagagaaatgttactataatgaactcccttgaatgttattacccagtgccaacagtcatcagcatttacactgcctttaaaaaagcccgaaaacttaaaacaaaaaggtaaccagcacagaacaaggttctgtagaaattcagcattctctcattcctgttgcccaggcttgagcgcggcccacccccaactagacagaccgtgttctgcactgtgccccacgaatgcccccaaaagtccttcatgcgtgggaagatgcctactgatggacccattcagggctacctgctgccctttcaggtgcttaacccaggctcagagattaggccaaagtttcctggctaaagagaaacaggttttaaagccacagctggctacttttcttccctaaagaaatgcaatgccggccaggtgtggtggctcacgcctgtaatcc

SEQ ID NO: 255257 - DNA, 439 bp, Homo sapiens
  chr5:159707382-159707821
  hypo
aaaatgttgatgctaaaaaacgctcagtgaaggatgaacatataagacgtgcaaagatcgtcaaaatgtaaagtgatttggaagcagccaggcgcactgagcgggaggagaccgcacaagcgcggaggaagacgtaggttttcgcttacttgcaagcaggaggcaggagacggccacggtgtagagctgcttggaggtggtgacgttgtagcgatccatgaagtggtccagcaggtagacggccaggtgccgggctgcagggcagagctggcagtggctgctcagcagggtcaggatgtccacgaagaaccggcggctcttcaggagtggggagtgggctcggaaggtgggcagcttcagttcctggaggacaggcggggcggaggggtgacggtcagggctgcctcctgagagtctcggctgtcccaggaaatgggac

SEQ ID NO: 255258 - DNA, 568 bp, Homo sapiens
  chr5:159776168-159776736
  hypo
gcatgtctatacctcgttggggtcatcctggtcggcatagattaggaagcccgtaaagaggctgtctgtccagtaagggtcatagaagagcccgttctgctctgagtagaagatctgcagccaaacttcgtcaccctgcttgagagccaggatggtggagcctgaggccacatcgtggttgccggtgttggcatcaaaggtccggatgcggtactggccgttgtgcaccaggccgatggccaggtgcttgttggccagcgtgatgtcgtaggtgaagtagtagatcccaggcacgccgcagacgaacttgccgctggaagcattgtagtggccaccctcgttcatcagaatcttgtcaaacttgatgggcagccgctcccgtgggtagctcttggtcactgccaccgagaaagctgacttggtatggccactgccacagctgcaggggcctgggaggcctggctcccccttcttgcccttgggccccttcttgcctggtgtgccatgcttcccgggggtaccgttgacccccttggggccacgggggccagcccgcccaatggccccg

SEQ ID NO: 255259 - DNA, 32 bp, Homo sapiens
  chr5:166374191-166374223
  hypo
cttaagaaatgttgctacatcgggctgggcgg

SEQ ID NO: 255260 - DNA, 103 bp, Homo sapiens; identical to SEQ ID NO: 210420
  chr5:166477138-166477241
  hypo

SEQ ID NO: 255261 - DNA, 229 bp, Homo sapiens
  chr5:167531535-167531764
  hypo
ccatcacatccaagcgaccgggtatgtgtccaagtgacagaaatgcggatttactctcttgacctcacactgcgcctcccgtgccctcagatgtgcagtgcaaatggcagctccttgtcttcttataaacctgccagtctgcatcaggcatctgaagacatccttgcagtgaatggaggaatcagtcagcatgcgtttgcaagagcgtttattccgcagccctcacaat

SEQ ID NO: 255262 - DNA, 155 bp, Homo sapiens
  chr5:167536298-167536453
  hypo
agtcacttttgataaaatagcgtaagaagaatcgccaccgcctattgaagatcaactacatgctgggcactgtgcaaagggttttaagtgaatcctctcatttcatccttgtgtcatacgtcatgatcgtctccgtttcacagctaaagaaactg

SEQ ID NO: 255263 - DNA, 56 bp, Homo sapiens; identical to SEQ ID NO: 210421
  chr5:167652913-167652969
  hypo

SEQ ID NO: 255264 - DNA, 48 bp, Homo sapiens; identical to SEQ ID NO: 210422
  chr5:167671586-167671634
  hypo

SEQ ID NO: 255265 - DNA, 32 bp, Homo sapiens
  chr5:167680720-167680752
  hypo
cgcctggctacgcactcattatttataagcag

SEQ ID NO: 255266 - DNA, 536 bp, Homo sapiens
  chr5:167689119-167689655
  hypo
gtcattactaaaaagctccacgccagcatccgagagaaagcaggtcactggtttgccaccaccacgcccatcattggcaaaggcatcatgtttgccatcaaagaagggcgggtgaccacgggcgtgtccagcatcgccagcgaagatagccgcaaggtggcatctgtgctgaacaacgcctactacctggacaagatgcactacagcatcgagggcaaggacacccactactttgtgaagattggctcagccgatggcgacctggtcacactaggcaccaccatcggccgcaaggtgctagagagcggggtgaacgtgaccgtgtcccagcccacgctgctggtcaacggcaggactcgaaggttcacgaacattgagttccagtactccacgctgctgctcagcatccgctatggcctcacccccgacaccctggacgaagagaaggcccgcgtcctggaccaggcgagacagagggccctgggcacggcctgggccaaggagcagcagaaagccagggacgggagagaggggag

SEQ ID NO: 255267 - DNA, 35 bp, Homo sapiens
  chr5:167698411-167698446
  hypo
gaagtgggctgggcgcggtggctcacgccttaatc

SEQ ID NO: 255268 - DNA, 149 bp, Homo sapiens
  chr5:167729413-167729562
  hypo
aaatagttaaatagataaatcgcattatgactgggggtttgatgttctctagagctcttttaggaaggtggagggacagacctggtgacacctgtcgacagtggtggtgcggacctagatttgaagccgggagaccttgaggcctttag

SEQ ID NO: 255269 - DNA, 102 bp, Homo sapiens
  chr5:167825008-167825110
  hypo
gtaccaggcacagtgcgaaatatctcatgtgtattatctcgtgtctatgaagtaactaccgtcatctgcattttattatttttatttatttatttatttatt

SEQ ID NO: 255270 - DNA, 42 bp, Homo sapiens; identical to SEQ ID NO: 210425
  chr5:167847701-167847743
  hypo

SEQ ID NO: 255271 - DNA, 178 bp, Homo sapiens; identical to SEQ ID NO: 210426
  chr5:167853641-167853819
  hypo

SEQ ID NO: 255272 - DNA, 44 bp, Homo sapiens; identical to SEQ ID NO: 210427
  chr5:167897879-167897923
  hypo

SEQ ID NO: 255273 - DNA, 237 bp, Homo sapiens; identical to SEQ ID NO: 210428
  chr5:168112661-168112898
  hypo

SEQ ID NO: 255274 - DNA, 42 bp, Homo sapiens; identical to SEQ ID NO: 210429
  chr5:168124523-168124565
  hypo

SEQ ID NO: 255275 - DNA, 83 bp, Homo sapiens; identical to SEQ ID NO: 210430
  chr5:168184345-168184428
  hypo

SEQ ID NO: 255276 - DNA, 44 bp, Homo sapiens; identical to SEQ ID NO: 210431
  chr5:168189441-168189485
  hypo

SEQ ID NO: 255277 - DNA, 245 bp, Homo sapiens; identical to SEQ ID NO: 210432
  chr5:168189515-168189760
  hypo

SEQ ID NO: 255278 - DNA, 82 bp, Homo sapiens
  chr5:168192429-168192511
  hypo
tgtgatattttatacgagtgggagccagaaatgttaataacggcgtatgtacataaccgaaaaagttcgttccccagtcaga

SEQ ID NO: 255279 - DNA, 345 bp, Homo sapiens
  chr5:168195071-168195416
  hypo
gtctggcaggtggtgggctgcggtgctccagagcagaggagaggtgtccagcggtggtggcggcggtggcgggccatgctgcaggagagcacggtgctttccgcggtgcttgacagaaccatgttccgtttccatcgttccaccacatggttagatcaagcacaaaggaaagccccgcagcgactggtcagagtcaaggtcaggaagcagcgtcagagagaggacaggagcgctcagaggaagcagcgtggagaagcggaagccggagcaggcccccactgagcgtgattagtatcaggagtggggttccactggaacacttccgaagattgcagccctgctgcc

SEQ ID NO: 255280 - DNA, 305 bp, Homo sapiens; identical to SEQ ID NO: 210434
  chr5:168199738-168200043
  hypo

SEQ ID NO: 255281 - DNA, 125 bp, Homo sapiens
  chr5:168244376-168244501
  hypo
gtgtgaactggccaactgtccgtcgctgtcgcagccaatccgagagccaggccaggtggcagtcgcagtacaggtggttggagtggaggcgcctgggagagggcgggacagagagaaggcatggt

SEQ ID NO: 255282 - DNA, 111 bp, Homo sapiens
  chr5:168250182-168250293
  hypo
ggtttgacaagcagcgtagagtgctgcactttgggcgtgaggtagggagaaaatgggagagatgcacagacttcttactcacagagttcggatcttcggcatgtggttgaa

SEQ ID NO: 255283 - DNA, 188 bp, Homo sapiens
  chr5:168273345-168273533
  hypo
tcaccacatcttctcgacccctaattcttctggagcctttattcacacgggtttgctaagcctctttttcatagatttcttgcagtgttggggccgccgactccctgcagaggttctatgaaggcagtctagtcctgctgcccagcttctagatttatcatcagcttagaggccggtgaatcaacaac

SEQ ID NO: 255284 - DNA, 185 bp, Homo sapiens; identical to SEQ ID NO: 210436
  chr5:168284804-168284989
  hypo

SEQ ID NO: 255285 - DNA, 152 bp, Homo sapiens
  chr5:168296874-168297026
  hypo
gtgcctggggactgcgtacagagagaactttaaaggagaatgttaacaatggcaaataatagctgtcggtgtaaatggacacatcgtaacacatccatttatagagctgaatgcttgtggcagacacagaagtgctccgtgccggcacggca

SEQ ID NO: 255286 - DNA, 95 bp, Homo sapiens
  chr5:169116210-169116305
  hypo
gtcaggtcccttggcagtaacgggctgccactcttcttcccacagtgagaactacctagtgcgatggggcagccggggcttccctaaggagattg

SEQ ID NO: 255287 - DNA, 174 bp, Homo sapiens
  chr5:169157436-169157610
  hypo
gatgaatttggacagcgagtcagaggctaccatgcagggattattctaggcacattgcaaactgctcagaggggatttaactaaaaacgcttgtatggcaggtagcacgtataatacttgggtgacaagaagggtttgtgtcatggaccacacgtgtgtcgtaacctctacaag

SEQ ID NO: 255288 - DNA, 319 bp, Homo sapiens; identical to SEQ ID NO: 210437
  chr5:169484411-169484730
  hypo

SEQ ID NO: 255289 - DNA, 950 bp, Homo sapiens
  chr5:169659749-169660699
  hypo
ccgctatcctgtgcgactcaaatgcagataagggttgcaaaagcctggcacactgggggtaaggaatgtcagtgctttttccgccaacgtggccgcgcgagtcagttgtaacccggcatccagaaccttctccgtaggggccttgcctgggactacaactcccaggatgccgcaggcggagaagctggccaatcagggggcgcggcttcgccttcaccgtcggctccctgctcctgtcagaacctcggtgacggttggccaggtgggtagtgacggctgctcggtcttgaaggatcctaatctggtttgggagggtgaagaccgctgaaatttccaggctgcccgaggctccaccttccaccacccaacgggtgggcggtgggccgggctggcctcggagcctctccctgggtgtcggttgggccgagaaggggacggttggctgggtgggcctggcggctggtggctgtccgtaggccggggtcactctgagggcattttacattaccctaatcctgtccacttggcaagaaacttagtaagccccaaaggttcattccaaatcctgtctgggagggcgaggactgtggaaacttccagatgcctcaggctccatctttagctgttgagcgggtggttgggccgctcatggccccaaagatctggggggtcttcatgggcagttgggtcgctgagggccctaaagatctggggctcctcccaggtgtcagttgggccaaggaggaggctgggctttcagagtagaacctgcggtgctaacgatggctctgcagggctgcgggctgagggcctgggcggcgtcctgtggcccggagatggcgctctagtggtatcaggccttgagtcagcgacatcctggcttctgaccccccattcctatggcccctacagtctggtctccgcttccccactcccggtgaattgctgtt

SEQ ID NO: 255290 - DNA, 33 bp, Homo sapiens
  chr5:170060060-170060093
  hypo
aaaggacatcctcctttgagcagggggagagca

SEQ ID NO: 255291 - DNA, 84 bp, Homo sapiens; identical to SEQ ID NO: 210440
  chr5:170863092-170863176
  hypo

SEQ ID NO: 255292 - DNA, 185 bp, Homo sapiens; identical to SEQ ID NO: 210441
  chr5:170883647-170883832
  hypo

SEQ ID NO: 255293 - DNA, 178 bp, Homo sapiens
  chr5:170894273-170894451
  hypo
taaggactgtggcccggatcagtggttctcacctggggcgattttgttccccagggccatttcggcagtgcgtggagacaacgttggttgtctccaactccccagttgtcacaactgggagccgggggactgccactggcatctagtggagagagtccagggacgctgccgaacatcc

SEQ ID NO: 255294 - DNA, 39 bp, Homo sapiens
  chr5:170937770-170937809
  hypo
attacaggtgtgagccaccgcacccggccaactttgagc

SEQ ID NO: 255295 - DNA, 206 bp, Homo sapiens
  chr5:170972877-170973083
  hypo
ctctgaggaaagttcgtcattgctcttctaccactgaggaccagcggctcagaggtcagttccttgcccacggccacatagccagccggtctcaatccaaaacccagggttctaaatcctcgggattactgagcagcggtgtgtccagaactgtgctgttcaccctgagaggggcaaagggaaatattacccgggccaccctgggg

SEQ ID NO: 255296 - DNA, 131 bp, Homo sapiens
  chr5:171095093-171095224
  hypo
ctccggcctcggggcgggcgtccgggcccgcgccgtctgaggttagcgggagcgcgtaccctgggaggtggccagaagccctacattgaaatatcacagtgggtcagagcaggggtcgcaaactccagtgc

SEQ ID NO: 255297 - DNA, 154 bp, Homo sapiens
  chr5:171209464-171209618
  hypo
agtgccggccttgccgggcagttaggagaattagatgaaataacgtgtggaagggacttaccctgggtcaggcgcacagtaggtacttcgttcatgacacccactaattccgatacccttccctagccaccccggacctcggcttcttcaaaac

SEQ ID NO: 255298 - DNA, 461 bp, Homo sapiens
  chr5:171351590-171352051
  hypo
accgaacatgggtaggtaaaacgctgtaatactgtagccctccaccctctgccggtgccaggcagcagccccgcatgacaggaagcagccacggggccaggccagcccaggagccgtgggccagagcagggcgacaggattaaatgagctgtaacataagtgggctgaaacacgtcccacccccccacccccgctgattggtagtgctgcagagaggagagaagagctacaacccttctggggccccagacctcgccactcccagagccagagttgcgacatgctgtaacaccctctttggggtcacgcggatgctggtgtctccaaaagtttcaagtgccaccgcattcccccttgtctagatgccggtgcccaaggcagaagcaggctacagcacgcctggccccggcacagactgagtgcgggatcagggccagggcgctaagagcagcccaccaggc

SEQ ID NO: 255299 - DNA, 42 bp, Homo sapiens
  chr5:171395984-171396026
  hypo
cggaaggggccgggcgtggtggctcatgcctgtaatcctagc

SEQ ID NO: 255300 - DNA, 266 bp, Homo sapiens
  chr5:171470998-171471264
  hypo
tgcgggggccagcacgcatcgcagcctggcagtacagcctgtgcttttccatgcctccggtgccaacaccccgcacgtgccacaccaactgctccacctaacatgctcagtggcacaggctcaggcagcaaacgtgttccaacccacctgggcagaagaggccaggccagcagaccaagtcctgtgtgtacgcgtatgtgtgtgcattcacacccatgtgcaggaagggggacgcgagatggcatgaaacacgggagaagcagaat

SEQ ID NO: 255301 - DNA, 314 bp, Homo sapiens
  chr5:171478660-171478974
  hypo
tgggtcacgagggacgttgcaaaggggctagtgacagagaagaaacccagcagaaggtgggcctaggaggacaaggcaggcgaggaagagagtgactggcagcactggctgccaccaggaggtcaagtccagccagccgtatccatgcgagtcagccaccaggatgttggtattgaccatgccagcagcggctgcagtgggctgagaaaggaatttctcagtgggtggaggaagaaattgtgacagggcttcgcagagaaagagagagacagggcagtaaagaaagatgtgggactgagcgagggcatggggtt

SEQ ID NO: 255302 - DNA, 218 bp, Homo sapiens
  chr5:171479925-171480143
  hypo
aagttaccttcttgcgcggccgaagcttgtcccgccattccttcaggttctggttatggctctcatccagggccttcagtttctgggtttcgtgctctaccaggaggtggcacttttcattctggaacagattccaggcagaacaggtgagaaatcagaagacgcaggccctgaagactgagacacacctcacgctgtggctacgagggcaccagcat

SEQ ID NO: 255303 - DNA, 276 bp, Homo sapiens; identical to SEQ ID NO: 210442
  chr5:171523262-171523538
  hypo

SEQ ID NO: 255304 - DNA, 81 bp, Homo sapiens
  chr5:171529693-171529774
  hypo
ctgacccatggcacagaaaccgctgacaaccttgacaagagcagctgtgatagagtggacgggtttaagagcaaattcagc

SEQ ID NO: 255305 - DNA, 209 bp, Homo sapiens
  chr5:171533431-171533640
  hypo
agggaaaaagaggcacgaagggcccgggggggctcagaaacgcctgaagacccccaggccccaacctctcctttggagctagcagcaccaggagaacgctaccactgcacctccccagccccgtccaccacatattccagccctaatcccggcgcaggcaccccggcaggtggccctgcccctgcccctcaccacttagagggcgtgag

SEQ ID NO: 255306 - DNA, 48 bp, Homo sapiens
  chr5:171533670-171533718
  hypo
tagcaggacccgcatggggttgagctcgtggtgtggcggctcgatctg

SEQ ID NO: 255307 - DNA, 42 bp, Homo sapiens
  chr5:171534420-171534462
  hypo
actgttcaccttcacggtccccatccccggccctcaatacat

SEQ ID NO: 255308 - DNA, 45 bp, Homo sapiens; identical to SEQ ID NO: 210445
  chr5:171724015-171724060
  hypo

SEQ ID NO: 255309 - DNA, 506 bp, Homo sapiens; identical to SEQ ID NO: 210446
  chr5:171766370-171766876
  hypo

SEQ ID NO: 255310 - DNA, 72 bp, Homo sapiens; identical to SEQ ID NO: 210447
  chr5:171769329-171769401
  hypo

SEQ ID NO: 255311 - DNA, 92 bp, Homo sapiens; identical to SEQ ID NO: 210448
  chr5:171777275-171777367
  hypo

SEQ ID NO: 255312 - DNA, 526 bp, Homo sapiens
  chr5:171808283-171808809
  hypo
ccccaaactctgcccgctcttgctcctgtgaccccaggacactcccagcaccttgggctgatctcttttccccactgctatttctccgttagccagatcccttcctgctttccccaaagcacccgggccggccagagtgttggtgcgtaagtgcgggtaagcaggcggtgctagagttttatgtggtgtgcactgtgtggctggggctgctggctgtgtagcgacaggcgtctgggcaagtggcctgtccactgcagggagaagtgacagggaggcagggctgtggtgggcattttggagagcttcggagcctggctggtcaggatgaaatcccggccccgttgctcaccggcagtggggtcttcgttggtttgggttgctcccgcattcacatccctggcagttcccgagcacacccacctccacctctgtggacagaagctagatgaatctacggctcagcccctgcctcacgggctcagcctgctcagttccgacacacctcgataagtgctgtgggcaggtg

SEQ ID NO: 255313 - DNA, 201 bp, Homo sapiens; identical to SEQ ID NO: 210449
  chr5:171821579-171821780
  hypo

SEQ ID NO: 255314 - DNA, 229 bp, Homo sapiens
  chr5:171846001-171846230
  hypo
cggctgacagctaacgcgcttactgagccaggtgcgtccgcttaaccagcacaataaatgcacgaggaaggcactttcattcctactatgcagatgaggaggctgaggctcagaaacatacagcggtgaccccaagctgagccctgaacaggcaaagctgagatttgcacccaggtctgtctgactgaaagccaaggtcttaagccttaggctgcgctggaacagggaa

SEQ ID NO: 255315 - DNA, 44 bp, Homo sapiens; identical to SEQ ID NO: 210450
  chr5:171858873-171858917
  hypo

SEQ ID NO: 255316 - DNA, 136 bp, Homo sapiens
  chr5:171859487-171859623
  hypo
tgcacgttgggtgacgcaaatttttcaccgctctgcacgtgcccatgtccgaaaatgcccacaaaagtgcttcgagtatcgcttttgagttacaaataaattttagcaagtaggcaaattcgcaaacatgaaatct

SEQ ID NO: 255317 - DNA, 187 bp, Homo sapiens
  chr5:171867143-171867330
  hypo
tttcaagtgagggcctctctcgtgttgacagagctgtccagagtgaatggagccgccaacaagagcacccactacgcgcaaggcagtagcatcaaagctgtcttcaaggagcacgcggtcgagatggcaaagtagcaatcctgcacgtcctcctacacaatcacccgcctgggtttctgccactcca

SEQ ID NO: 255318 - DNA, 56 bp, Homo sapiens
  chr5:171890094-171890150
  hypo
gaggcaccagggcacgtggaactttgcagggatcgtgggaacgctggctttgactc

SEQ ID NO: 255319 - DNA, 71 bp, Homo sapiens
  chr5:171909811-171909882
  hypo
cctactcaccctcccgcatcgcctcttcccgctgctgctcaagctcatatgtcttacgctccggaaccggc

SEQ ID NO: 255320 - DNA, 333 bp, Homo sapiens; identical to SEQ ID NO: 210451
  chr5:171916860-171917193
  hypo

SEQ ID NO: 255321 - DNA, 284 bp, Homo sapiens
  chr5:171981548-171981832
  hypo
cagcttaagtcgcccgttataaatgtctccccggcacagagttcaagtttctcacgtataatccctgcccccattaggcccggtaatgcctgtgagcaaggatgtataatacctctcccccatcggctgccagctggccctcaagatttacgtgtggctcctgtttttcctcatgcaaacgctgcccgtcggttccttccatctttcctaataagtcatcttcctcacccttggtaatctctctcacttttccctggaccgcctccagccggccttcgtttatg

SEQ ID NO: 255322 - DNA, 65 bp, Homo sapiens
  chr5:172016615-172016680
  hypo
caagcacagagctgacgtgctgtctagtgaccctaggcacaagaaggctgcgatgagccttatgg

SEQ ID NO: 255323 - DNA, 32 bp, Homo sapiens; identical to SEQ ID NO: 210452
  chr5:172062315-172062347
  hypo

SEQ ID NO: 255324 - DNA, 377 bp, Homo sapiens
  chr5:172074242-172074619
  hypo
cagagagggaagagggagggcgccaggtcgcagcccgacaggtagcacacgctcacctgggcagtgtcgcggggtggtccgagcttctgcacacctgccctgcactaggccctttattccatcccattgaagccgtcatgagagccttgcgaggcagtcttctcatgtcacagaaggggaaactgaggctcagaggggtagtgagacctgcccggcccaggtggccaggaagtggcagagtgaattggatcccaggcacgctgggctccacaccccttcccctccatcccacggggcactgcaccctggggcctcttgcggctcctcttgctgacttgctgctgccccttgtcctcgtcctgagcacctgagcccca

SEQ ID NO: 255325 - DNA, 94 bp, Homo sapiens; identical to SEQ ID NO: 210454
  chr5:172097651-172097745
  hypo

SEQ ID NO: 255326 - DNA, 39 bp, Homo sapiens; identical to SEQ ID NO: 210455
  chr5:172105004-172105043
  hypo

SEQ ID NO: 255327 - DNA, 483 bp, Homo sapiens; identical to SEQ ID NO: 210456
  chr5:172113599-172114082
  hypo

SEQ ID NO: 255328 - DNA, 293 bp, Homo sapiens
  chr5:172117802-172118095
  hypo
cccagaggccccgccggttggtgatcaccctcaggtcctgccagggagacacagtgaggaggttggctaattgctgctttcaggccctggaaatcagtcgccaaggcccaggagaaccccggtgagtccgtccagttgaggcagaggcaataacctcccattgctcggccctgcgcctgccccagtcctggcagggggcaccggctcaggaacatgcggcctcctggcatttctcggtatttaactgtctcgctgtcttatccgagtccctaatgaaacgacttgtgtgacaa

SEQ ID NO: 255329 - DNA, 231 bp, Homo sapiens
  chr5:172123413-172123644
  hypo
acgcggcgcatccccggctcccaacacagggtctaccaaacaggagagtcttagtgtgtacacccctcacccacacccagcgtggaatttctggcattagcacacctcccttccacaaagaatgaaccggagtggtgatctgctggtggggtcgtgccaggcctcggggctggcccaggcccccgccccttgcttgtcttggttcccagtcaagagcgctggccccaggcc

SEQ ID NO: 255330 - DNA, 124 bp, Homo sapiens
  chr5:172191067-172191191
  hypo
agcgttgtctgatgcgcgcccagggtgtcactttggtgaggcagcccacttttgtgggcgctcaagcacgagcgcccctccggagcgctccagagccactccggaggggcgctcatgcttgagg

SEQ ID NO: 255331 - DNA, 120 bp, Homo sapiens
  chr5:172235651-172235771
  hypo
ggttcatgccattctcctgcctcagccaccacgcccagcccctaaattctttttttatttgatttttgttttgttttgttttcttttcttttcccagatggggtatcgctgtgttgtcca

SEQ ID NO: 255332 - DNA, 199 bp, Homo sapiens; identical to SEQ ID NO: 210457
  chr5:172264179-172264378
  hypo

SEQ ID NO: 255333 - DNA, 97 bp, Homo sapiens
  chr5:172307699-172307796
  hypo
tggctttctcttctgtaaagcgaacgggttggacacagtgatctcagaatccctgagagagctgaccgtgaggagcgttgagggcagggggccctat

SEQ ID NO: 255334 - DNA, 208 bp, Homo sapiens; identical to SEQ ID NO: 210458
  chr5:172346278-172346486
  hypo

SEQ ID NO: 255335 - DNA, 434 bp, Homo sapiens
  chr5:172353789-172354223
  hypo
gcacagcagacgcacgcacgcagtggataccagctattaccattattgttgctctcatcacagccacatcatcatccttagttgaactaattacctaagatcccacagggagctatggcagaaccaggatctgttctgcctccaggtcgcaccgtgagaacaggtctgtgggtggcccagtcagctgtgaccacatggctgcctcccccacacctcactctcctcctgctcagactcctcccatcgatagtggctcctcctagagtcctcgccctccttagctccctggcaccttggcccagatcaaagagaaccgcacatctccacacgcagacaggagagcacgcatacctttcgtgcacaccaacacacatgagctcacatggccccagacacgtgcacagaatgggcccgggaggcctgtgtgctcaagc

SEQ ID NO: 255336 - DNA, 209 bp, Homo sapiens
  chr5:172366892-172367101
  hypo
tccctgggagccctcggagggcggggtggggccaggatggaagtggaggcacctgctgtggcttctctttctctctttttaaaaatcaaacacttgcgtgcaaagcccctaaacggcaaatgggggcctctgcaaatagctccttagaggggctgcagatgaagaggggcttaggtcgggatgtcgtcatgtggcggctgcggggctgg

SEQ ID NO: 255337 - DNA, 132 bp, Homo sapiens; identical to SEQ ID NO: 210459
  chr5:172367589-172367721
  hypo

SEQ ID NO: 255338 - DNA, 34 bp, Homo sapiens; identical to SEQ ID NO: 210461
  chr5:172454588-172454622
  hypo

SEQ ID NO: 255339 - DNA, 319 bp, Homo sapiens
  chr5:172461480-172461799
  hypo
ttagctgccttaaacgttaacagcacatttgaatgccttattctacaatgcagcgtgttttcctttgccttttttgcactttggtgaattacgtgcctccataacctgaactgtgccgactccacaaaacgattatgtactcttctgagatagaagatgctgttcttctgagagatacgttactctctccttggaatctgtggatttgaagatggctcctgccttctcacgtgggaatcagtgaagtgtttagaaactgctgcaagacaaacaagactccagtggggtggtcagtaggagagcacgttcagagggaaga

SEQ ID NO: 255340 - DNA, 243 bp, Homo sapiens
  chr5:172724559-172724802
  hypo
tgggccggcttctccgctgcccactcccgcctggtcattccgtgcaggggcatctcctgactgctcttcgcaacaaaccttgcaattttctgtcttgaatctgtttcctgtgaagcccatcgaagaccactgccttctcgggcaggcctccactgccagctccagctgcctccccaccgtgagtcccctggcctggggacagatacaggctcattcccgagtagcctccgatattgattggct

SEQ ID NO: 255341 - DNA, 504 bp, Homo sapiens
  chr5:172744595-172745099
  hypo
gtacgaggataacgcgggcgcgctcccttgagtacgtgtaagtgcagaattcaccaggcacccctgagaccccacggccccaggggtctccatctcacctgtccgttccgcgaacacacacctcgatgaagtccacagtccccacagaatcctgcgtgtgacatcccccctctctaatggtaaatgttttggaatgtccatagataagaaaatggacggcgtggaggaaagatttcgtggccaggcctttcatttcacctccggatatcagaatactcagactgttcgtcttcccactcgctgcttccggaaggtccctgagccccaaggcccccgactctgcctcgggcatgggcgtttgggtggctcttgctacctcgctcacccttggcacctcggccagtctccctactgctgggctctgggaggtgatgtcctgcttccccgtggtgggccctggagagcttggttctgtccacctggggctggcgctcggggggcgcc

SEQ ID NO: 255342 - DNA, 196 bp, Homo sapiens
  chr5:172765671-172765867
  hypo
acatggggaaaggttcgagggcaaggagagatgatctatggggtgcgcaagtggggatggctttggtgtgggtgggaagggtaggggcttggagctaggtgtcgagggattcgagtctcagccttgatgtggattagctgtgtgaccatgaccagattacttaacctctctgagcttcaatcgggtcaacataggc

SEQ ID NO: 255343 - DNA, 279 bp, Homo sapiens
  chr5:173180489-173180768
  hypo
agtgtccctggcttcggcaggcagtgcgggagcgtaaccggatctgcttagagaggccccagcttgcgccattcactgggccagaaacctgagctgctcctgagagggctggaaaacagcctggggcttggagattggctcacactatcccagctattccaacgcagactaaatggcttctggcccttgttaatggcgccatctcagatcagtgccaggggaaccactggtcatttgggggcactggagggagcagggtagaggcgtggggtgatggtg

SEQ ID NO: 255344 - DNA, 137 bp, Homo sapiens
  chr5:173383099-173383236
  hypo
gcggtgaccgccctcggcatatttcattccgctggaactaaaggataactgcagtgctcattttcaggcctcagaataagtgcactcttctgttcattctgaccccttcctcaacctcttcacgctggcatgtcctt

SEQ ID NO: 255345 - DNA, 77 bp, Homo sapiens
  chr5:173389973-173390050
  hypo
ctcttgagaataggcgccactggctttgaataaattctaagaatttagaaaatgaacatttgcgccccactaggaac

SEQ ID NO: 255346 - DNA, 154 bp, Homo sapiens
  chr5:173396938-173397092
  hypo
tcaaaatacaggttgcgagtcagcagcgctgggagcctgagactacatctctaccaagctatccagtgggctccatgctactgcttctccatagaagttagttcttgagaaagccgtgaacgttcagacctgggagtaacgctgtcagaatgag

SEQ ID NO: 255347 - DNA, 57 bp, Homo sapiens; identical to SEQ ID NO: 210466
  chr5:173415949-173416006
  hypo

SEQ ID NO: 255348 - DNA, 246 bp, Homo sapiens
  chr5:173416551-173416797
  hypo
tcgagagttcagagcggcaccagacagtcggcgcgtgcaggtggtgcagcggggcagggcgggaccgggcgcggcggggcgggacggggcggagcgggctcagctgctgggcgccatcttgcggcacgcaggaggctgggggcagctttcctgtcaggccgtgttgcgagcacgcgcaggggcgaaggagaagcccagtaattcccttcagagggccagctgtggccggcacgggcacctgacata

SEQ ID NO: 255349 - DNA, 34 bp, Homo sapiens
  chr5:173539168-173539202
  hypo
gcagccctgggacccggtgcgactcctgcacctg

SEQ ID NO: 255350 - DNA, 35 bp, Homo sapiens
  chr5:173978713-173978748
  hypo
gaaatgggcataagcgcttgcgtatgtctataagc

SEQ ID NO: 255351 - DNA, 40 bp, Homo sapiens
  chr5:174029708-174029748
  hypo
attgcaggtgtgagccaccgtgcctggcctctcctatagt

SEQ ID NO: 255352 - DNA, 149 bp, Homo sapiens
  chr5:174350058-174350207
  hypo
agcgcagcgtggacttggtgtcgccgcttttggcatggcggccttttccggcccggctgggccaatcctgttgctgaacccgcaggaagatcccgggtttcagaaggagggggcgcaggttcgcaagcgcacaactctgtggaaaaaaa

SEQ ID NO: 255353 - DNA, 43 bp, Homo sapiens
  chr5:174667550-174667593
  hypo
tagaattgtaaggccgggcacggtggctcacgcctgtaatccc

SEQ ID NO: 255354 - DNA, 78 bp, Homo sapiens
  chr5:174920753-174920831
  hypo
aaaagtacaattaccgatagagagaatgaacctgagaagcttgccggggtgaagaacagaggtcggcaaactttttcc

SEQ ID NO: 255355 - DNA, 198 bp, Homo sapiens
  chr5:175110260-175110458
  hypo
tccttttgcctggactctaccgcatgcaagatcaccatcaccgtggtccttgcggtcctcatcctcatcaccgttgctggcaatgtggtcgtctgtctggccgtgggcttgaaccgccggctccgcaacctgaccaattgtttcatcgtgtccttggctatcactgacctgctcctcggcctcctggtgctgcccttc

SEQ ID NO: 255356 - DNA, 166 bp, Homo sapiens; identical to SEQ ID NO: 210469
  chr5:175139689-175139855
  hypo

SEQ ID NO: 255357 - DNA, 271 bp, Homo sapiens
  chr5:175329248-175329519
  hypo
cgcctggcaccgatcgcccctggcccaggtgatgaaggatgctggacttgtgaaagaaattcattaactggtgtgatgtgtcagtgtgacagatttgagaaagacgggggtggagggtcggggggcggaagtaatataacagttgaactgggtggctattgttaaacccacttgatctggaaagcaataacaaaaagctaagcgtgattaatcagcaattaaaggctaacgtgaaagccagaggcccttctgttggcgtttaaagaggctc

SEQ ID NO: 255358 - DNA, 190 bp, Homo sapiens
  chr5:175387362-175387552
  hypo
caggaaagtgtctccgcgtcacagggacatgcagttacatgaaggatctgcatggctggatgctggacaatgttcaccacaacgtgactaacaggggcatgcattctttacatagtggaatttcaagttctttactttcctcttcgaagttttctatacagttttaatctttttacgaagagtgtcaaag

SEQ ID NO: 255359 - DNA, 53 bp, Homo sapiens
  chr5:175559713-175559766
  hypo
gcatgtgtagcagtgggctgcgagtaggagccgggttcaagtaggagtagggt

SEQ ID NO: 255360 - DNA, 142 bp, Homo sapiens
  chr5:175578296-175578438
  hypo
ttattacttttaaagtttgtttaggctcagaccctcgctctgtcgccagtgctggagcgcagcagcacgatgctagctcactgcagcctggacctccggggccaccacgcctggctgatttttcaaacgtttttttagagac

SEQ ID NO: 255361 - DNA, 240 bp, Homo sapiens; identical to SEQ ID NO: 210470
  chr5:175777488-175777728
  hypo

SEQ ID NO: 255362 - DNA, 631 bp, Homo sapiens
  chr5:175831152-175831783
  hypo
ttgctgggtgtgactcgccacatagtagctaatagggcccaaagtcacttctgtgacgcatagtttgtgtgcctgcttgtcttcctctcaagacaagactagagactgggtccccagctccggttgcccccaggtctcatggcccgccttcctctgggacgcacccccacacaccaccctcagctcgcctaggggctgggtcaggagtttgtgagaagcgtccggggctgcagagcacttttttccacagccctttggggcagcggagcggagcctctaattcgcattttacaaatgagaagccaggctcagagtagttaagtgactagcccacagccagccagctgggaaaaagcagaaagtgaagtccaggtcttctgactccatctaaacctccgctgcagcctgcagtctgggtgtgggaacagccttaaggaaactcagcccccacggtgtcctgccccagtcccaaggtgccaagcctggccaaactgggcccacatctccgccacctgccaccagctgcaaggcccactgatgcactctagtgggggctatgcagggctcacccgaaacctttggcctctcctggcacgtccctttgtgcagcaggtcccgggctccggtgaac

SEQ ID NO: 255363 - DNA, 268 bp, Homo sapiens
  chr5:175832699-175832967
  hypo
tggagggcacgggacgagcgctggacactccatcagaggggctgggctttacatcccccttctgccactcactggactcgcgacctttgagaagtcccttccctgggcagcttggctttcaaacctgttaaatgagtgacaatatcctactaccggtgggaagtgaggcttacgagatgctatggtaacactctgcagcccatagagggcgtgtgcgtatgagggacagcatggctgctgtggcctgctgttccggtgtggcagggcc

SEQ ID NO: 255364 - DNA, 36 bp, Homo sapiens; identical to SEQ ID NO: 210473
  chr5:175871772-175871808
  hypo

SEQ ID NO: 255365 - DNA, 36 bp, Homo sapiens
  chr5:175872857-175872893
  hypo
aacagggccaggtgcgatggctcacgtctgtaatcc

SEQ ID NO: 255366 - DNA, 36 bp, Homo sapiens
  chr5:175879333-175879369
  hypo
caggcgtgagccaccggacctggccagcaggtaaca

SEQ ID NO: 255367 - DNA, 77 bp, Homo sapiens
  chr5:175971759-175971836
  hypo
aggctgtgagtctgtgacatcacggggatattcttgggctggttccttgtctgtaagagcaacgaagggactttgta

SEQ ID NO: 255368 - DNA, 204 bp, Homo sapiens; identical to SEQ ID NO: 210474
  chr5:176003232-176003436
  hypo

SEQ ID NO: 255369 - DNA, 162 bp, Homo sapiens; identical to SEQ ID NO: 210475
  chr5:176012687-176012849
  hypo

SEQ ID NO: 255370 - DNA, 76 bp, Homo sapiens; identical to SEQ ID NO: 210476
  chr5:176016153-176016229
  hypo

SEQ ID NO: 255371 - DNA, 62 bp, Homo sapiens
  chr5:176035935-176035997
  hypo
tcgtccccttctctcgtagtgccctcagagcagcgaagtctcctgctcgggggtgtgggggg

SEQ ID NO: 255372 - DNA, 97 bp, Homo sapiens; identical to SEQ ID NO: 210478
  chr5:176066073-176066170
  hypo

SEQ ID NO: 255373 - DNA, 51 bp, Homo sapiens; identical to SEQ ID NO: 210479
  chr5:176077110-176077161
  hypo

SEQ ID NO: 255374 - DNA, 187 bp, Homo sapiens
  chr5:176081965-176082152
  hypo
accccagccgggagcgctgcggggtgcccttctcctgctgcgtcagggaccctgcggtgagtggggctgggggaggagaggtaagggactttccagtgcacagactctggagaaacctcccacagggccccgctccgctctgccctgctctgggggcgtggatgctgggggacgtcattttacatgg

SEQ ID NO: 255375 - DNA, 55 bp, Homo sapiens
  chr5:176175541-176175596
  hypo
cccgtggaggtgtccgctctcagacactgtgacgccctcacggccaaggtcagag

SEQ ID NO: 255376 - DNA, 170 bp, Homo sapiens
  chr5:176225693-176225863
  hypo
caggaattggttccaggactcggggagccgcgcggggcaggagccaggcccacagacagcaagcagcgttctgcttggctgatccacgatgtcggggctgcggcatctccgcttccgcccggagagtgacggcgtccgcaagctcatgcgaggggggttattttactaac

SEQ ID NO: 255377 - DNA, 96 bp, Homo sapiens
  chr5:176285035-176285131
  hypo
tgttctcacacgcccgtccgtcagtggccccagaggcagcagcggtaggcaccccaccccgaggccccagttgctaatgcccgcattaagcagcct

SEQ ID NO: 255378 - DNA, 328 bp, Homo sapiens
  chr5:176295608-176295936
  hypo
ctggagcagggcatcgtgctgccctgccgtccaccggagggcatccctccagccgaggtgagggctcctctagtgcccacgtctggacctgggctcctgcctggtcaccctggcaggggccactctgggcagggccagcatgggctggcagtacatggcagggctccctcccctaggtggagtggctccggaacgaggacctggtggacccgtccctggaccccaatgtatacatcacgcgggagcacagcctggtggtgcgacaggcccgccttgctgacacggccaactacacctgcgtggccaagaacatcgtggcacgtcgccg

SEQ ID NO: 255379 - DNA, 132 bp, Homo sapiens
  chr5:176296713-176296845
  hypo
ctctcaacgggggcgctttctgtgaggggcagaatgtccagaaaacagcctgcgccaccctgtgcccaggtaccagcggccaccgcctcccgcatcgttcctcaccacgccatctccgtgccctggctccat

SEQ ID NO: 255380 - DNA, 119 bp, Homo sapiens
  chr5:176314523-176314642
  hypo
tggccatggccttccgcatctgtgcctgaaccgcagccagttgatcatggttcaaccggaatggggccagggtctcctccagcaggcgccggtgggcagccagacgggcagccacggca

SEQ ID NO: 255381 - DNA, 187 bp, Homo sapiens
  chr5:176315297-176315484
  hypo
gccaactaatcatgcggatcacgtttccacaatacctggggtgccgctcacacactcggcctccggtggccacagcaacctggagtgtttgttgctcccggctgtgctggaggcaggagagaacagcggccagggcggcagcacagagctgggcagcccgcgtgcacacggccgcacagacgtgctg

SEQ ID NO: 255382 - DNA, 190 bp, Homo sapiens
  chr5:176520327-176520517
  hypo
gacaggtactgggcgcatcccccacctcacatgtgacagcctgactccagcaggcagaaccaagtctcccactttgcagttctccctggagtcaggctcttccggcaagtcaagctcatccctggtacgaggcgtgcgtctctcctccagcggccccgccttgctcgccggcctcgtgagtctagatcta

SEQ ID NO: 255383 - DNA, 164 bp, Homo sapiens; identical to SEQ ID NO: 210481
  chr5:176544212-176544376
  hypo

SEQ ID NO: 255384 - DNA, 422 bp, Homo sapiens
  chr5:176558644-176559066
  hypo
tcacacagggcaacgccaaaaatggcctttctcccaggtgggctcaaagttaacagaaggcagtgagtaaacagtccactggggcaataactatgcacatttactaagccatgggaagaatagtagtcacgtggccctcgagggcggtgccctcagcttgagatggagttaactccaaatctaatcacagaaggctttctggaggaggcggaatttttatggcggccggatccggctttctctgaacagcgagaaggcgcttagcgccctagggaccaggtaactcctgaggtgagcttcttggtggggatcaagcccagggggcgacggagtccgggctgggggaagggcccgaggggctggagtcgcaagttcaggcccagcttgggctccctgtcccgcccttccgctgtcttggggga

SEQ ID NO: 255385 - DNA, 87 bp, Homo sapiens
  chr5:176596459-176596546
  hypo
tgctctcaattggtcgttgtcaacttcccatggccggctactactcctcatcttcaagggtctcgcctgcttcgcaaaacttcttga

SEQ ID NO: 255386 - DNA, 147 bp, Homo sapiens
  chr5:176602186-176602333
  hypo
tgtatttattatatcattgatttagttttgggcaaatgtggtcacagaagatttggacaaatgttgtcacaaaaggttatgcttaattttccgtaatttatttcggcagtgagtaggaagaaaatttgaatgcgtatatgttacaga

SEQ ID NO: 255387 - DNA, 76 bp, Homo sapiens
  chr5:176611704-176611780
  hypo
tgtgtgggtgtgtgtgtgcacgcaaggatgggatctcgccaaagttgatcttgaaatcctggcctcgagcgatcac

SEQ ID NO: 255388 - DNA, 92 bp, Homo sapiens
  chr5:176613630-176613722
  hypo
gaagatggtagtgacgagcttttctgggttagtttaatataaagtgatacgtcactgtcagtgaaataaggaatataaggtggccgtggtgg

SEQ ID NO: 255389 - DNA, 97 bp, Homo sapiens; identical to SEQ ID NO: 210484
  chr5:176663884-176663981
  hypo

SEQ ID NO: 255390 - DNA, 76 bp, Homo sapiens; identical to SEQ ID NO: 210485
  chr5:176674064-176674140
  hypo

SEQ ID NO: 255391 - DNA, 162 bp, Homo sapiens; identical to SEQ ID NO: 210486
  chr5:176694903-176695065
  hypo

SEQ ID NO: 255392 - DNA, 101 bp, Homo sapiens
  chr5:176698049-176698150
  hypo
agtataaggaataccgcaggtctgagcctgcctaagctctgagattctgccttaatcagggggtttctaggtgcctctgacttcttcgagcttgtattttt

SEQ ID NO: 255393 - DNA, 152 bp, Homo sapiens; identical to SEQ ID NO: 210487
  chr5:176757377-176757529
  hypo

SEQ ID NO: 255394 - DNA, 339 bp, Homo sapiens
  chr5:176764095-176764434
  hypo
tgagctgggctgggaaccaacgcctggcccggcccactcaccagacaggtcgccggtgccggcggaggccccgaagtagtagccggtgggcaggcgcactcccgtgatgtcaatgcagttcttccactcgttcttgtcctccaggtcggtcatcacctgcagggcccagcacgctaagcacctcgcaggacagcagcctgccctcctgagcctctgtgggaccagcacagggccaccagctgccacccccaccgcctagcctgctcaccgtcagacggccccgggagtagcgcacagccaggaaggtgtcgtgatcgcggttgcggaagtcagccgtgc

SEQ ID NO: 255395 - DNA, 42 bp, Homo sapiens
  chr5:176780528-176780570
  hypo
tggtcatatatttttcgttcgcttttttattattaaagtcac

SEQ ID NO: 255396 - DNA, 719 bp, Homo sapiens
  chr5:176794805-176795524
  hypo
tccgcaagtccttccgccggggtgagggcaggagcgagcaacagagatgtggggaaggcgggagtttggttaaatttggggagtgcccccttcctcctacgtggcccacagtctgtaagtctgtgaaaattgaaacccaggtcccagtgaccaccacactcccctgggtggttcgggtcttgggctagacctcagacgtttggaaatctccaacggtggtgtcgctcccagggatttacacctgggcccctgcaggatggctccaaacaaggcccaccagtggggaacaggcttccgcagaggatgggtgagggcggggggctgttcgcgttcatcgctccctcttcactagagctgggcgggactgcaaacgccgccttgcgccgagagtctcagggctccctcaactcctccgccagcctggaccttggcttcctagccttcgtcagcagcaaatctgaggtgagccgactgttggggaagacaagatgctctatgggctagagtcactactcaggcccatttacgtggtggccctcattccaagttgctgtccttactgcgtctcccagcttgctctgcgtagccaacccttcagcctccttacttgtctcactacattggtccccatatatgtcatgggtacacatcctcagttggcaaatgtgtgcacatgtgcagcacccaggtgtgtatacacagcacgtgtgtgggaatca

SEQ ID NO: 255397 - DNA, 31 bp, Homo sapiens
  chr5:176865066-176865097
  hypo
acaaagaaaactaaagcaagcggctgggtgc

SEQ ID NO: 255398 - DNA, 149 bp, Homo sapiens; identical to SEQ ID NO: 210491
  chr5:176901647-176901796
  hypo

SEQ ID NO: 255399 - DNA, 196 bp, Homo sapiens
  chr5:176911111-176911307
  hypo
ctgttccggatgggcgtcttgcaggcagcacaggtaaagcagtgcacgtgccaggtcatcttcagggcgtgcatgatctcctggaaggaggtcccagtcactcggcaggctcaggcccctcctgccctgccctgggtcacgggaacacaggagggctggccgcaagccctgttccttctcgcggtaaacactacat

SEQ ID NO: 255400 - DNA, 856 bp, Homo sapiens
  chr5:176918898-176919754
  hypo
gcggagggtccgcggcgggggcggaggcctgggcagagacacagccgggcagggcgggcgggcagggtaaggtgggggcctgggtggaagtggggcgcctgcagcagaggacagcggcagctccagccccccacccccaccccaccccctacatctatttggaggctacggggagaggacgactcaggtttcaaggggcccatttgggagtggcgatctcagtccacgcaggaccgagggctgaccgagtgcgggcgagcacgcagcgccggcggcgggaggcagcaggcggacagacaggcggacagacaggcggacatgcgtggtgccaggaccgtgcagcagcccctggctcaactccagggccctagacccgccttagctccggtttctgccctccactcccggccagggattggggtaccgagaatgtgccaggagggcgagcaggcctggccgtccaagcccacaccgcccaccgcccggatgtcccggccagcctcgtaccttctgcggtttgctctgaaccggctgggccctggaggagaaggaaagcgtgacagcgggccgggcccgcagggatccccactgccagcgcgggcgcacccatccatgtccacccgcatacctgctgaggcccaggctgaggcgctccccgcaggcccggatcttgttctgagcttcgatgtgtgtgaggctacccgcattctcgccatcgatgctcagcacccagtcacccacggccactccggcctgcgccgctttgcccccaggagtgagctgtggagagagaagcaaagtgaccgaggccctggaccctgcagacccaagccaggctgacggtggtaacactgcc

SEQ ID NO: 255401 - DNA, 86 bp, Homo sapiens
  chr5:176922892-176922978
  hypo
cacaaaaaatgtacgccatgctgtgcctcaattccaatccctgcttcaccatggactcgatgagcgagccccgccacctctccatg

SEQ ID NO: 255402 - DNA, 279 bp, Homo sapiens; identical to SEQ ID NO: 210493
  chr5:176965874-176966153
  hypo

SEQ ID NO: 255403 - DNA, 43 bp, Homo sapiens; identical to SEQ ID NO: 210494
  chr5:176976123-176976166
  hypo

SEQ ID NO: 255404 - DNA, 544 bp, Homo sapiens
  chr5:177031060-177031604
  hypo
tcccaggtgcttggggtagacgagttatgtgcagcctcctcgtggggaggccagagaacgggtctgtcacagggccagccctgccccgccctcctgaccctgtcccgcgcttgctccaggtccgggttgctctccggcggcctccctcggaagtgttccgtcttccacctgttcgtggcctgcctctcgctgggcttcttctccctactctggctgcagctcagctgctctggggacgtggcccgggcagtcaggggacaagggcaggagacctcgggccctccccgtgcctgccccccagagccgccccctgagcactgggaagaagacgcatcctggggcccccaccgcctggcagtgctggtgcccttccgcgaacgcttcgaggagctcctggtcttcgtgccccacatgcgccgcttcctgagcaggaagaagatccggcaccacatctacgtgctcaaccaggtggaccacttcaggtagcgcccgcccccaccctctcccctcggcacccctgcccgggctcaggcttctcaggccc

SEQ ID NO: 255405 - DNA, 186 bp, Homo sapiens
  chr5:177310252-177310438
  hypo
atctgtgacactcttcgtaaaaagattaaaactgtatagaaaacttcgaagaggaaagtaaagaacttgaaattccactatgtaaagaatgctcctgttagtcacgttgtggtgaacattgtccagcatccagccatgcagatccttcatgtaactgcatgtccctgtgacgcggagacactttcc

SEQ ID NO: 255406 - DNA, 31 bp, Homo sapiens
  chr5:177387550-177387581
  hypo
agaacgtactgcaggagaaaacaggcctggc

SEQ ID NO: 255407 - DNA, 33 bp, Homo sapiens
  chr5:177387670-177387703
  hypo
gtgatgaggtgcgccactcactgtgtgacttca

SEQ ID NO: 255408 - DNA, 265 bp, Homo sapiens; identical to SEQ ID NO: 210497
  chr5:177393139-177393404
  hypo

SEQ ID NO: 255409 - DNA, 120 bp, Homo sapiens
  chr5:177482544-177482664
  hypo
agagcagggtgtcagcaagaaaacctgtgagcctttcctttcgctgctgcggccgcagccatgagcatgctcgggcctcagaagaggctcgcctctagtgtcctccgctgtggcaagaag

SEQ ID NO: 255410 - DNA, 201 bp, Homo sapiens; identical to SEQ ID NO: 210498
  chr5:177482724-177482925
  hypo

SEQ ID NO: 255411 - DNA, 94 bp, Homo sapiens
  chr5:177525841-177525935
  hypo
tagaaaaatcaccatcacagcggcggagtaaaacttgccgcaggcaagatccaccaactgacgcaagagagtcggagaaagatatttgcatact

SEQ ID NO: 255412 - DNA, 130 bp, Homo sapiens; identical to SEQ ID NO: 210499
  chr5:177548899-177549029
  hypo

SEQ ID NO: 255413 - DNA, 103 bp, Homo sapiens
  chr5:177571342-177571445
  hypo
tcgtgcctgctatgcgccacaccacactcatttagagcatgccatgcccgtcccacctgttctgcctcgtatgcctccctgacctgtgtggcctatggaaaag

SEQ ID NO: 255414 - DNA, 48 bp, Homo sapiens; identical to SEQ ID NO: 210500
  chr5:177637070-177637118
  hypo

SEQ ID NO: 255415 - DNA, 307 bp, Homo sapiens
  chr5:177650747-177651054
  hypo
gagccctcacctgtcgccaacagtcttccctctgttgtcaccgtaggtaacacacctctctctcctatgtctgcgcctccactccatctccaccatactgcccccgtcaggcctccccacagctcacttggggcctgctggccacttcacggtcacctgacctcaagccgccgcattccaatccatcctccacatagccctggagtcagagagcagccccggccccaggtcttagcgctctcctgcttaagactctggtggttcccgggggcctccagggcagaactgctgccgcccagcatagttc

SEQ ID NO: 255416 - DNA, 409 bp, Homo sapiens
  chr5:177651332-177651741
  hypo
ggagggcagggcctcgtttggttttctctctgggttcccagcatctagcacagtggcggtgacaacggaggtgacattcactgttggctggattggacaggcgcggacacggttaccttcctgcccttctcctgtgcactgctgaccacacgtttcacctcgttggcataggccatagctgggttggggtggtcctcccggtaggggccccggtaggtgtctgggagaggtgcctgtggggagtgacagcgccatgttatccgggcttggggacaggcaccgacctgttgttgagttgggcagtgcataccacgtggacccactccttctggccatccaggttgcggaacttgtagggactgatgtcaatcagggagctcaggtggccgtgatacgcactggggaggag

SEQ ID NO: 255417 - DNA, 213 bp, Homo sapiens; identical to SEQ ID NO: 210502
  chr5:177653975-177654188
  hypo

SEQ ID NO: 255418 - DNA, 120 bp, Homo sapiens
  chr5:177680784-177680904
  hypo
tttttatttttttaacatcatgccctgcatggactatggctgcccgctgcccatcaaactgagtcggcatctcagtctggcatccaaagtccatctctggctgggcgtggtggctcacgc

SEQ ID NO: 255419 - DNA, 297 bp, Homo sapiens; identical to SEQ ID NO: 210503
  chr5:177708331-177708628
  hypo

SEQ ID NO: 255420 - DNA, 162 bp, Homo sapiens
  chr5:177735754-177735916
  hypo
agagccagtcacaccggatgactggccctggttattaactaagccccaggtttggggggcaggtcagcactctcggggggggctttcctcctctctgggcctgttttcaatgagagcgaggtacgggaacgggagccccccggcacacgcagcaccatgttc

SEQ ID NO: 255421 - DNA, 125 bp, Homo sapiens
  chr5:177737219-177737344
  hypo
ccaccaacagagaggccaggcgggcttggagactggattgcaggagccgcaggagtgggggcaggacggacggcctctcctgagtctctggactatcaggtgccgagagcccaccatgggcagtg

SEQ ID NO: 255422 - DNA, 349 bp, Homo sapiens
  chr5:177746584-177746933
  hypo
catgcaacatgcgccgtccgctcccagccgagctgacccttgcaggccttggacagggaactctcggggttcctcggaaccgtggaccagcgccctcctgagggaagagtgcagcagcccggcatggcccagttttaacttccacgtctcctggagcttgagtgggcactgggttgaccgactgtcacggtttgctggggactgaggggtttccctgggctctcagtgctgaaatcaggtcagtcttaggcaaactggaactgcgggtcactccgagggcatctgtaagaagggaggcctcccccgccctatctgcccactgcttccctgcacccggccgcatgcccct

SEQ ID NO: 255423 - DNA, 207 bp, Homo sapiens
  chr5:177749734-177749941
  hypo
ggtcattccagggacacccacgggaggccctgcaggcactagggaccgggagttgggtcagccctgtccctggggttccatgcgcagcaacactcccaacacaggcatgcaccacaacgcagcatgggaaggcaggctggggacaggcggatagctcggtgggctgtgcccccagtgggtccactcgaggacatgctgtccctggca

SEQ ID NO: 255424 - DNA, 160 bp, Homo sapiens
  chr5:177778269-177778429
  hypo
ggagagcaggctcagcctcccgtgctggcagttacctggcggatgaggacggggagcaggaaccacattttctcccgctgtagaagcaaacctttggatgagcaataacgggtgtgcacagtgtgactggtgccttggcgagccttgctggggacctgtc

SEQ ID NO: 255425 - DNA, 189 bp, Homo sapiens
  chr5:177794189-177794378
  hypo
tggaaaccaccaatggcatccgctccgagtcttccgatgatgtccagatgggagctgctgcgcttagtgcattttctatcattaagctgacgggagctccacgtctgagaggggcgtttggccttgggtgggtcacgcctctctgtgtgcccgtttctcctctggagcggcaagaagcagcagccagag

SEQ ID NO: 255426 - DNA, 158 bp, Homo sapiens
  chr5:177802448-177802606
  hypo
tcagaacttggcctttctctcggaaccctgcaatgactttctgtctcacacagagtcgatggtctcacctcacgatggcccaaaaggccctgcgtggtcccgccctgcccctccgacagcctcgttcctgctttcccgtcttacttctctcccacctt

SEQ ID NO: 255427 - DNA, 150 bp, Homo sapiens
  chr5:177808937-177809087
  hypo
tgcctggaatttttggatcaaattggcctgtgccccctccggtgggaatcctaggcattctgagggcaggttagtcttgccctcgagtctccatgtgagatggtctgaccaacagagatgcctatttctgggtttcggttctcagtccgc

SEQ ID NO: 255428 - DNA, 90 bp, Homo sapiens; identical to SEQ ID NO: 210504
  chr5:177852084-177852174
  hypo

SEQ ID NO: 255429 - DNA, 210 bp, Homo sapiens
  chr5:177852474-177852684
  hypo
aaataaagccaatggtggctgtttcccgcgctcacctctgtttcagtttcctcatccgcaaaaaggtggatctgaacattgacaccacagggcagttttgagatgtatggaaatcaaacgagatatcagtggtgcaaccggccaacacacgtctggcattcagtggtactcaatgaatgcagagtttgggtctgccggcaactggagggg

SEQ ID NO: 255430 - DNA, 113 bp, Homo sapiens
  chr5:177853494-177853607
  hypo
cttccacctgcgatcgcgctctgtgctgccatccgggcgcagatcctgctctggctgtggtccatccctgtagatgagccgccagaagtggtggatgccgcacaccaccccct

SEQ ID NO: 255431 - DNA, 461 bp, Homo sapiens
  chr5:177862607-177863068
  hypo
tacaggatgcatctcgtgggcttcccgggcagctgcagaatttctgatgaggaaaagcgagggggagggaggtgatctggtttcagggtgttgagagggaaagctgcttttgaagccgcaattgcatgcagggccctgtttaccttagatggtatgttttggaggtggccctggagagggcacccccatccccctcaacttcccggacctgtcactgaggactgagtcagatgacgcgcagaatcgtctaacacgatgcttgccacataggtagcacagaaaatgttgatgccacatcattttaggactgtttgactcttgcccgggatgagtttacagaacaagagggaggcagccacacagcggtcattacaagtgcgccaaatgtgctgggcatcgtgggcatgcacagcaagcatgcttaattctgcctgggcactgaaggccgacttcacggagct

SEQ ID NO: 255432 - DNA, 228 bp, Homo sapiens
  chr5:177868496-177868724
  hypo
aattcaaggcctctcggtacaggcgcacaggggcttgctgatgaagctgaccccaaattataaagacagagatggggggatgcggggctagagtttcaaagggctgccttaatggttcttaagatcccatttcaccctgatgtttggagaaagacaaacacaaacatgcttttgaaacaaacaaaatagtcaaggaacccctaacagacgacacggggtgacgacgcg

SEQ ID NO: 255433 - DNA, 53 bp, Homo sapiens; identical to SEQ ID NO: 210506
  chr5:177875102-177875155
  hypo

SEQ ID NO: 255434 - DNA, 37 bp, Homo sapiens
  chr5:177882256-177882293
  hypo
cgcacgggcctgcccgtgggcccgccctaaacctttc

SEQ ID NO: 255435 - DNA, 196 bp, Homo sapiens
  chr5:177882638-177882834
  hypo
ggcatctccgccatcgcttctgtgtgtttcctctctgccacgcggacggaccgcacctcaaggccgagagctggcacctatcccctgcccacccatcccaccaggctccacgaggaggtcagagcggaggaccagccctctacagtggccctatgtctgacactggctccctcagctcgcccgcccatcaggagga

SEQ ID NO: 255436 - DNA, 33 bp, Homo sapiens
  chr5:177883394-177883427
  hypo
acagtcaaaaaactcgagagtttggccgggcat

SEQ ID NO: 255437 - DNA, 195 bp, Homo sapiens
  chr5:177890948-177891143
  hypo
gcctcccggccgggcgtgagcacaaccacaggctcatggggagaaatctgccgcctccccaacaccagttggcaggagctgttcacctacccccttttactgccgtaacatacacataacacaaaatgtaccatcttaactacgtttaagcgtacagctcagcggcattaagtgcatccgcgataccttgtggcc

SEQ ID NO: 255438 - DNA, 439 bp, Homo sapiens
  chr5:177892707-177893146
  hypo
tccccgcggggtggcggtcacgtcctcacgagatggggaggcagagtgatcgtgctacacacggtaaagaagtagactgtcctggggattcaacagcagtgagtcctctgagggactggcgtgcaggggcagggagatgtggggtggtcagtaccaaccagcggtggtgtggactcgccgcttgcctggcttcctgcctgctccggatggcgagtctaactcagcgcacacttcaggacacaaaacacagtagagcctcggggtgagtgcacctcaaggccatcgtgtccacatcaccctggtccctcagtctcccctctgcgccacctctttcctgaatcccatcctggtgaacgacccccatgaatctcatcttgggagacacacatcggcctccaagccgtgggcctcagaggcattgcaacgcaaactcactccc

SEQ ID NO: 255439 - DNA, 151 bp, Homo sapiens
  chr5:177961363-177961514
  hypo
cacccccgccttcacggtgaggattttgctgtacgaattcgcagggacataaaactctgtccatcacatgttgtaagggagggggcactgggctcagccccatcgctcactggccaagtcagaaatagcgcacagaggccagggcggtggc

SEQ ID NO: 255440 - DNA, 36 bp, Homo sapiens
  chr5:177964385-177964421
  hypo
cacagatggggaaaccgaggccgggtggggctgggt

SEQ ID NO: 255441 - DNA, 40 bp, Homo sapiens
  chr5:177969295-177969335
  hypo
tgctgggattacaaaagtgagccaccgtgcccggccctgt

SEQ ID NO: 255442 - DNA, 36 bp, Homo sapiens
  chr5:177970115-177970151
  hypo
ttttttttttgagccggagtttcgcgcttgtcgccc

SEQ ID NO: 255443 - DNA, 95 bp, Homo sapiens
  chr5:177981479-177981574
  hypo
ctcctggtgtgctttaagtggagccaaccctttggttacacctttgcaaaccacctggcggtgactgggccagccgtcaccggaagagtctggtc

SEQ ID NO: 255444 - DNA, 116 bp, Homo sapiens
  chr5:178002879-178002995
  hypo
actcacatacaccaggtgttcggaatatgaccgtagccacaactacttcacaatcttccaagcgagcaagtcaatccattgattcctctagtagcgatggataaaaacccaactca

SEQ ID NO: 255445 - DNA, 87 bp, Homo sapiens
  chr5:178039469-178039556
  hypo
tgttcatcatcatacgttgcacttccaaagtcaacaactttgatatctgtgtttttcagtgtgcgttcatcacgtttctagagagac

SEQ ID NO: 255446 - DNA, 240 bp, Homo sapiens
  chr5:178108495-178108735
  hypo
agagcaaaactctgtcccctcaaaaaaaaaaaagtagtaagaacatttaacatgaaatctatcttcctgacaaatgtttaagcccacaacacagtattgtcaatataggcacggtgtcgtgcagcagctgtctagagcatactcatctggcataaccgaaactgtacacctgctgagcagtacacctccatttacgccgccccccagcccctgacaaccgccattctaccctctgtctct

SEQ ID NO: 255447 - DNA, 34 bp, Homo sapiens
  chr5:178113316-178113350
  hypo
ctgtgatggaagccccatcacgtgaccgggcgcg

SEQ ID NO: 255448 - DNA, 34 bp, Homo sapiens
  chr5:178113590-178113624
  hypo
acagtctgggctcgaaactccatctcaaaaaaaa

SEQ ID NO: 255449 - DNA, 214 bp, Homo sapiens
  chr5:178146440-178146654
  hypo
ggggtgcagcaggacgctgctggagtgtttcgtaagaattgacatataagataggatgtgaaaggaatcgccataggctagatgaaggggtagcacaagggctgaaggcagcacccaagtctttgaatgcaagtcagttttccagacttatttgctgaagtatccacccccaccttatcctatagctagtcagagtaaaagctccacctataaa

SEQ ID NO: 255450 - DNA, 31 bp, Homo sapiens; identical to SEQ ID NO: 210507
  chr5:178195542-178195573
  hypo

SEQ ID NO: 255451 - DNA, 85 bp, Homo sapiens
  chr5:178196657-178196742
  hypo
aaggctggcggcaacgaccacgccggcaagagcctccctagtccccgccacatcatcatcatcagggtgccgcatcatcaccctg

SEQ ID NO: 255452 - DNA, 317 bp, Homo sapiens
  chr5:178220778-178221095
  hypo
gacgttcagaacagcgcctggccccagcaggatgagggaagcaattaagcagccatgaaacagaatgaggtctgggctgacgcggaaccgcctccaaagaaggaggtctgggctgacgcggaaccgtctccaaagaaggaggtctgggctgacgcggaaccgtctccaaagaaggaggtctgggctgacgcggaaccgtctccaagacattgttcatacaaagcaagcatgcagcataaccctgtcagtccagaggaaaggacagatatgtaaacacacacgctcacacacacatgcccatacatatgcacacacac

SEQ ID NO: 255453 - DNA, 37 bp, Homo sapiens
  chr5:178226974-178227011
  hypo
attattgttattttttaagacggagtctcgctccgtc

SEQ ID NO: 255454 - DNA, 184 bp, Homo sapiens
  chr5:178259507-178259691
  hypo
ctcccatcaccaccaccaaccgcagccaggcaggcctcagtggcaaacgctccagcctccagcatgcacaagtggtccccgcttctcgtcctctagccggtcaggagcagctcttcctgccggccatccttctaccgctccggccgccctcctacactctgccgcacactgcattctccctcac

SEQ ID NO: 255455 - DNA, 166 bp, Homo sapiens; identical to SEQ ID NO: 210509
  chr5:178289146-178289312
  hypo

SEQ ID NO: 255456 - DNA, 84 bp, Homo sapiens
  chr5:178292218-178292302
  hypo
ctggattggaatccccgctctaccactgaacagctgtgtgactttagacgaattttttttttcttttttgagatggagtctcat

SEQ ID NO: 255457 - DNA, 45 bp, Homo sapiens; identical to SEQ ID NO: 210510
  chr5:178295550-178295595
  hypo

SEQ ID NO: 255458 - DNA, 376 bp, Homo sapiens; identical to SEQ ID NO: 210511
  chr5:178295949-178296325
  hypo

SEQ ID NO: 255459 - DNA, 43 bp, Homo sapiens
  chr5:178298335-178298378
  hypo
tctgggactgttcttcgtggcagtcatgcgtccatgtggctca

SEQ ID NO: 255460 - DNA, 37 bp, Homo sapiens
  chr5:178369101-178369138
  hypo
cttgttaaagagataattctcggccgagtgcggcggc

SEQ ID NO: 255461 - DNA, 134 bp, Homo sapiens
  chr5:178397976-178398110
  hypo
ctgtttcccatcaccggggccagcagttcacatgtgaggccacgcctggcaccagatgctgttgtaagaactttgcgtatattcattcatttaatcctcacaattgcatgaaaccgttacgtccatcctgtttt

SEQ ID NO: 255462 - DNA, 116 bp, Homo sapiens
  chr5:178411213-178411329
  hypo
gcaagcccagggctgcacagcggtaaccaccaaaacggcccacagatgccgcagcccgtggagtggggagcgagcgagcacgcctcactcggaacggactcctgcaaaataacagc

SEQ ID NO: 255463 - DNA, 180 bp, Homo sapiens
  chr5:178411695-178411875
  hypo
gggacactcaggccctgttacgtggaggaagacgggagcacctcctagtcacggagaactgcatgacccgaggcacgtggcgtgtgtggaacgaatagagaaggggctcgccgggagtggacagcaccgggagtgctccaaacgggtgagcaggtgttcgcactgaggccaccctccacc

SEQ ID NO: 255464 - DNA, 113 bp, Homo sapiens
  chr5:178416036-178416149
  hypo
atgctgtggagggcgtgggcaatggcgtacaccgcatcaatcacaaactgcaccttgccctcctgctcgtaggtggagtcccggccgatgcgttcctcgcctgtcctagggat

SEQ ID NO: 255465 - DNA, 50 bp, Homo sapiens
  chr5:178426059-178426109
  hypo
gccaccaggcctatcggattcgggctccaccctcgcgacctcatctaacc

SEQ ID NO: 255466 - DNA, 88 bp, Homo sapiens
  chr5:178478897-178478985
  hypo
tcttcaaagggagctgctccacaggcttgtgtgccgggaggaacaggggaccttgctttgcattgtgcatcgccgcgctactgtttta

SEQ ID NO: 255467 - DNA, 102 bp, Homo sapiens
  chr5:178540329-178540431
  hypo
ccagcgggccactacgctcaccccggtcagccgcctggccctggaagacgatttgagttcatcacctccacttcattgtactcatctcggcaacgggtcagt

SEQ ID NO: 255468 - DNA, 225 bp, Homo sapiens
  chr5:178551041-178551266
  hypo
ctgggaggggacaccgggagcctgcgcctggattcctcccaacctccttgcctgtgacttttctttttcccgattctactctgtatcctttcaccgtaagcccctgcaactgcaagtcccgcttctgagtctgtgagtccttctagtggattactgagcctgagggtggtcttggggagcccctgacacacgctcctccagctctgccagcgtgggccctgcatg

SEQ ID NO: 255469 - DNA, 640 bp, Homo sapiens
  chr5:178551488-178552128
  hypo
tgggcctcggagcccgggctaccctcagtttcctgggattccagaccccgtatcatgcagaagcctctgcctgtgcagtgaagacacacattccactggtttcttagtacagcactgaccacgtggcagccactggcgccgtgaaacccacaggatgtggctcaggacaggagctacatccaggcccacgggccgaaaggggaatgctctggtcacctcagtcccacccaagctcagtttgggagctgaggacacgggatcaggggattgcttacctgggaccagggcccggctcgccaatgatcagggcagagctcgctgctgcaggcccggcggctctcaggccgggcgtcattgcagtgcttggcatgcacggagcgggtggtggtgttgtgtagcggctgaatgcagcgcacggagcgcacctgcatgcctgtccaccctcagttttggagctgaggacacgggatcgggggattgcgtacctgggaccagggcccggctcgccaacgaccagggcagagctcgcggctgcaggcccggcggctctcgggccgggcgtcattgcagtgcttggcgtgcacggagcgggtggtgttgtcgtgtagcggctgaatgcagcgcacggagcgcacctgca

SEQ ID NO: 255470 - DNA, 82 bp, Homo sapiens; identical to SEQ ID NO: 210515
  chr5:178564804-178564886
  hypo

SEQ ID NO: 255471 - DNA, 215 bp, Homo sapiens
  chr5:178576386-178576601
  hypo
tgttgtgtaagccacccagtctgcggtatttctgttagagcagccgaagctgaggaagatggagtgtgagctgtcctggcaccgtggaaggctgcggccggggcagactctaagtcactggtggccgcaggaaccaggagccaggaggatggaaggagccacgcagtggtcctcctgtcccaactgggcaagacggtgcctaacctggaaatgga

SEQ ID NO: 255472 - DNA, 255 bp, Homo sapiens
  chr5:178580404-178580659
  hypo
tcctcacactgtcccgggagctgcccctacaccagcacgcctccccccagacctgggagggtcccggctgcagggctgcacactcaccgccgtgcacatcatgtagcccaggccgaagtcaaagcggcattgctcgttcatggagtagtgcagtcccgggagctggggcagcgccggccagtcgtgggcgaaggggtcatccagcaggcagtcataggagctgtgggggacacacggtgccgcgagcagccttca

SEQ ID NO: 255473 - DNA, 38 bp, Homo sapiens
  chr5:178585237-178585275
  hypo
ttacaggtgtgaaccaccgcgcccggccttttgtctct

SEQ ID NO: 255474 - DNA, 255 bp, Homo sapiens; identical to SEQ ID NO: 210517
  chr5:178585631-178585886
  hypo

SEQ ID NO: 255475 - DNA, 178 bp, Homo sapiens
  chr5:178589360-178589538
  hypo
gtggggggcctgcagcggctggagcccccctgcactacaggagaccccccaccaaggattaaaggaggatgagaccactgtcgagctaagactggggctgcagtctcatctgaaggctgtaccggaggcgggtcagctcccaggctcattcaggtggtcacggcgggccccagctgag

SEQ ID NO: 255476 - DNA, 157 bp, Homo sapiens
  chr5:178650423-178650580
  hypo
tgcactcacacgaacgcactcacacacgcacactcacacacgaatgcactcacacacaaatggactcacactcacatgcacactcatacgaatgcactcacacacatgcactcacactcacacgaatgcactcacacacacgcgaatgcactcgcac

SEQ ID NO: 255477 - DNA, 152 bp, Homo sapiens
  chr5:178651186-178651338
  hypo
ggtggatgctgtgcgcttactgcagccatgcggtgggtgcacgctaccaccgtcttctcctctttttcttgggagctgtcgccatggctcccggcacaccctgacatccgtaggcgccatcctgacaacacgctgccggccgcaggcctcac

SEQ ID NO: 255478 - DNA, 120 bp, Homo sapiens; identical to SEQ ID NO: 210519
  chr5:178652528-178652648
  hypo

SEQ ID NO: 255479 - DNA, 137 bp, Homo sapiens; identical to SEQ ID NO: 210520
  chr5:178665271-178665408
  hypo

SEQ ID NO: 255480 - DNA, 329 bp, Homo sapiens
  chr5:178734177-178734506
  hypo
ctgcagagctgccccggcccacgcgcccctgccctgctgtgctccgccatctgccccagcagtgctgtgagagcatcgcaccctgcaagcctcagccttcagggacggcaagacctggggcccacaggaggtccaccggccctctcagggctcgagcacccggccaaccctgggtggccactgctcagcactccaggacagctccatgacacagaagcagctctgcccatgagcattcaacagcccggtccggggggcaccaccacgcaggggcttcccgggtcatgctgcaccatccactaatagcaccatcacgtatgccaggctgg

SEQ ID NO: 255481 - DNA, 109 bp, Homo sapiens
  chr5:178735325-178735434
  hypo
ccgccttggggatccgtggagctcagcggtgcccagagagagcactcgaaatgccagctggaaaggtcacgcacgccagctggaaggggagccgcgcagcccctgggca

SEQ ID NO: 255482 - DNA, 133 bp, Homo sapiens
  chr5:178742628-178742761
  hypo
gtacccaggaccgcccatggcacgcagaggaaaactgaaacaacgatccttccagagacaaagcacagccccagatggccacaggaactggccgcccccaggagctgctgagcacaaacgccactggagagag

SEQ ID NO: 255483 - DNA, 166 bp, Homo sapiens
  chr5:178801533-178801699
  hypo
gaggacttggaggacgtcagggcagaaggcacagaggacgtcgggacagagggcacggaggacgtcggggcagaggactcagaggacatcagggcagagagctcagaggacatcggggcagagagcacagaggacgtcggggcagagggcacggaggacgtcgggg

SEQ ID NO: 255484 - DNA, 146 bp, Homo sapiens; identical to SEQ ID NO: 210522
  chr5:178854898-178855044
  hypo

SEQ ID NO: 255485 - DNA, 164 bp, Homo sapiens
  chr5:178857574-178857738
  hypo
cgtggagctctggccgtggcacctcacagcccaagcccagcacagctctctgcagaggtgaccgcattgccagcatggaacctgttcctacagacacttgtccacgagtttacacgcacggagaccactgctgcaagaagcctcatacacgtgtccacgggaaa

SEQ ID NO: 255486 - DNA, 36 bp, Homo sapiens
  chr5:178882638-178882674
  hypo
ccagccccggaaaacggagtccgcctgagccacggg

SEQ ID NO: 255487 - DNA, 35 bp, Homo sapiens
  chr5:178975530-178975565
  hypo
ccagtaaagactagtagggccgggctcagtggctc

SEQ ID NO: 255488 - DNA, 251 bp, Homo sapiens
  chr5:179004521-179004772
  hypo
ccgggtctccggacggaaattgccgaagactagcggaggctccgaggccgggcgtggtggggctggaggggagggcgggggtggggagtttcggccgaaagagcaaatccggggctggaggggagggcgggggtggggagtttcagccgaaagagcaaatccgggttggactgtgtgattgggcccggtggtgtgggcagggcaggttaggtgtgtccgctcctttcacactcaccggtggtcgggcggcg

SEQ ID NO: 255489 - DNA, 162 bp, Homo sapiens; identical to SEQ ID NO: 210523
  chr5:179023533-179023695
  hypo

SEQ ID NO: 255490 - DNA, 175 bp, Homo sapiens
  chr5:179026668-179026843
  hypo
gggaggaggctctgcgatcctggatggagctgactgcagcctggggcgctctggggggctcctcccacgtggggatggcgtgccctcttctcaggcccctgcgctgccgagcgctgcaggaaaactgagcccaaagcagacctcccctcggcacctgccccggaggggccttcag

SEQ ID NO: 255491 - DNA, 46 bp, Homo sapiens; identical to SEQ ID NO: 210524
  chr5:179030602-179030648
  hypo

SEQ ID NO: 255492 - DNA, 120 bp, Homo sapiens
  chr5:179064356-179064476
  hypo
tccgtctcaaaaaaaaaaaaagaaacacaagtaaggaaactgaatttgttatccatactttccgaaaagaaaaacccaggcctggatgatttaaccgcttagtattttgttttattttat

SEQ ID NO: 255493 - DNA, 32 bp, Homo sapiens
  chr5:179076781-179076813
  hypo
aaagctcccagggacgacgcctccgggagctt

SEQ ID NO: 255494 - DNA, 43 bp, Homo sapiens; identical to SEQ ID NO: 210525
  chr5:179106627-179106670
  hypo

SEQ ID NO: 255495 - DNA, 34 bp, Homo sapiens
  chr5:179110846-179110880
  hypo
ttttttggcattggcttctcgccgcataattatt

SEQ ID NO: 255496 - DNA, 50 bp, Homo sapiens
  chr5:179225523-179225573
  hypo
gcacctccacagacgtgttgaagagcttgtcctccgggtgctcgatgttc

SEQ ID NO: 255497 - DNA, 149 bp, Homo sapiens
  chr5:179234922-179235071
  hypo
ttacaggcgtgagccaccacgcacggcccatttgcgttctaatttcaggcgttcctcaatcctctgtggaaccaggaagggcgcaaattataaagggactggcccagcgccgcctctgggcaggctttgggcagcgcctggcccgctgc

SEQ ID NO: 255498 - DNA, 203 bp, Homo sapiens; identical to SEQ ID NO: 210528
  chr5:179293876-179294079
  hypo

SEQ ID NO: 255499 - DNA, 148 bp, Homo sapiens
  chr5:179343374-179343522
  hypo
aaaaaaataaaaatataaaataccaatttgatttagcgtgtagctcgaacggattggatgtgagggtaataaaaacatgagaagagcttataaagccaatagaaaatgtcaagcttgtaaaattcagtaatctcgtttttaaaaatac

SEQ ID NO: 255500 - DNA, 150 bp, Homo sapiens
  chr5:179358103-179358253
  hypo
taagataaaaacatggtgaccgcatgactgattggcattttgatgacgtccacgcaaagctggattcctgtgacagtgtttcccgcctgaagtaccgcacatctgaactgggactgtaacactgatggcgatacagtgtggggtgccaga

SEQ ID NO: 255501 - DNA, 139 bp, Homo sapiens
  chr5:179393861-179394000
  hypo
agaggtgagatccccgaagttcgaagtggctcaaggccaagggagttgtcgccggcgaggtcgccgagggctgatcttcggttaacagcttgggttctggtgagcctttccatatcgaatgctacgttatcagtacatg

SEQ ID NO: 255502 - DNA, 213 bp, Homo sapiens
  chr5:179401180-179401393
  hypo
tctctgtctctatggaccctcggctgcagtggagcctcagacatctgcagcggccggccccccgctttagctcctgaagtggcatggaaacatacgttcatccacgcggcaactccacttctgaaaacgtacttctaacgactacacactccgatggccgacctttaagaggtctaataagaccaggtgacagttcctcggtttctaagacct

SEQ ID NO: 255503 - DNA, 520 bp, Homo sapiens
  chr5:179401683-179402203
  hypo
cagtacttggagggcgatggctttgaaagagagttttaaaaactggactgggaaatgcgagtgtcacgagatgccggcgagtggagacagaacactggaaggagcagccagccaagagaacgaggccccgaggaagggagagagcaggcacgcagcggcgcggggaggagcggcatggaccgcagcagacggcctctccggcctgcgcacccgggtcagcacgctgagggaattaaacccattgcttcctctgggcagtcaatggtgaagcggtcctctgagagtgaagaacaagcgtgtgagttaaggtgttgaagtagagtgaacacacctgcaggtgctgctgtgccgaatgcggagcgccagccaggcggggaggctctgtcttgccaagtctgttcagagtcccgtgggaagacggtgagggaacagaaccgcttagcaacatgaggtacagaaagccacagcaggtaacaccgactctgggcttcaaagacaataggggcggggaggcgtccca

SEQ ID NO: 255504 - DNA, 345 bp, Homo sapiens; identical to SEQ ID NO: 210533
  chr5:179402748-179403093
  hypo

SEQ ID NO: 255505 - DNA, 234 bp, Homo sapiens
  chr5:179448857-179449091
  hypo
gactttcccaataacgtcctttacagcagcccaggtccgagtcacatgctacactcagtcgtcacgtcatagccatctccgtcagtctgcaactgtctctcggtctttcttggtgtttgtgaccttggcactttcgaagactacattcggcccagttgatctgtcgaaggtatttccctgtggctagattcaggtcaggtgccgctggcagtaacaacacggaggtgaggctgc

SEQ ID NO: 255506 - DNA, 170 bp, Homo sapiens; identical to SEQ ID NO: 210534
  chr5:179473085-179473255
  hypo

SEQ ID NO: 255507 - DNA, 188 bp, Homo sapiens
  chr5:179503669-179503857
  hypo
agcctgcatgcctctcggtggggatgtgtctgcatctctgagagtgtccttcggagtgggatgctgtgtcatgtgcaggcatgtatttcgtgttggtaggcactggcgccatattttcaagctgcccccttcctccccacctgagcctcttttatctgtgtcttccctccccacgcccacctcctgct

SEQ ID NO: 255508 - DNA, 41 bp, Homo sapiens
  chr5:179545455-179545496
  hypo
gtggtgagttccccacgctggaggcacgcaagcaaggagac

SEQ ID NO: 255509 - DNA, 149 bp, Homo sapiens
  chr5:179546908-179547057
  hypo
tgtctgtggccaggcgctcgggacttcagacccctgtgatgcgcagaaccacaccatgtccttccccagccatcctgggctgcagctggctccctggggggctcaggccaggcttcgcccaggctcggccctctcgcctgcagccagcg

SEQ ID NO: 255510 - DNA, 147 bp, Homo sapiens
  chr5:179547319-179547466
  hypo
aactcctgtgtccatcgccacgtcgcatggggccgcctcctctctactcttctccgcaggtgtggacccctcatgaacatgtgccccatactcagtctcagcacctgctgcggagagcccagcctggcccagcgctgcctccagcct

SEQ ID NO: 255511 - DNA, 160 bp, Homo sapiens
  chr5:179564199-179564359
  hypo
tagagccctaccgacgcgtgtgcaatagaggcagcccgcaggacccggccaggactgggaaggtggagcggatgtgctgggggaaggaagcccaccagaggcagcaggccctcccggccacagatgggtcctactgaccgggctccggatactcaggtct

SEQ ID NO: 255512 - DNA, 379 bp, Homo sapiens
  chr5:179564663-179565042
  hypo
gctcgatgaagaggcgagagctcagcaggaaggtgaagatgtaggctttctgggggacacacgagaaagagggcacaggctcaggagggcaccaggaggggcatgcttcccagctggccctgtaccctggcccaaggtcacgcccaaccctgatgccccccgtgcgtggtggaggagagcccactctcctgcccgctgggtggatcacccacctcggggtagtagtcggctgtgggcaccaggtgctggatcagtgtttccagggaggctgaggatggcgctccatccaggaggggctgcccagcctgttcgccatctgtgggctcggtggggggtgggctgaggctgcctggggtgaccatgtcggaggcactcagcg

SEQ ID NO: 255513 - DNA, 115 bp, Homo sapiens; identical to SEQ ID NO: 210537
  chr5:179643356-179643471
  hypo

SEQ ID NO: 255514 - DNA, 105 bp, Homo sapiens
  chr5:179666255-179666360
  hypo
aaccaacattagcacgttgcaagcattcgctgaggccagtgagcattgactgaggccagtgagcacgctgtgtgcatgcactgctgagcacgggcacacacaggt

SEQ ID NO: 255515 - DNA, 123 bp, Homo sapiens
  chr5:179708845-179708968
  hypo
ccgaggtgtgttagcgtgccagccagggagtgactccagtgacgccacagcgcttagatgctggacaaacagctgctcatacaacccgcaccgcaggagtctcagtcccgtgttacctgggag

SEQ ID NO: 255516 - DNA, 164 bp, Homo sapiens; identical to SEQ ID NO: 210538
  chr5:179726331-179726495
  hypo

SEQ ID NO: 255517 - DNA, 193 bp, Homo sapiens
  chr5:179731619-179731812
  hypo
tgcactccccacaggcggcccgggggagggtgtgtggtcacagccactcactggccagaccatccatcactggtactggcagacagtggtgaggtgggcatgcatggggaaaagcaggagagagctggcccagtccagtggagagccctcacctggcgggccgtgacttgctgcagggcgttctggcatttgg

SEQ ID NO: 255518 - DNA, 31 bp, Homo sapiens
  chr5:179742137-179742168
  hypo
tttagttgtggtagtaacaccgtggtcatac

SEQ ID NO: 255519 - DNA, 183 bp, Homo sapiens
  chr5:179743760-179743943
  hypo
tacagccacggcagcgtggtagctggttccacagccaatcacgatgagccgtcggcatcgtcgaatctccttcaagtggtccttcaagccacccaggagcactgcagggcacacgacaaggcgttaatgctgagtctacacagtcaccgcattccctgagactaggctcgggcggaggctccc

SEQ ID NO: 255520 - DNA, 311 bp, Homo sapiens
  chr5:179762746-179763057
  hypo
ggaacctgctttggcgggcactggccctgacacagctcagggtgaggtggaaccatggggacggggaagcatgccacataccgttgcctttgtctgagcgctgagggtggctgttgacagcactggggaccccgtgggtggcccagcgcgtgtgggcaatgccgaagtgtgtctcaaactccacttttaagtccatgctgtcttgttctaaatgaaaggaaaatcagtttgccgcacttgaacaacaagcctcgacccaggactgtgagtgcaacctggtgtcgttacccaagtcacgtcacccacaccga

SEQ ID NO: 255521 - DNA, 94 bp, Homo sapiens
  chr5:179796987-179797081
  hypo
aaaaaaccttttgtccatcacaaatgtgtaagagtcggcctgggccagtgggagggacgtcagggcagtcagggccaggcggaagggaagtgtg

SEQ ID NO: 255522 - DNA, 132 bp, Homo sapiens
  chr5:179806435-179806567
  hypo
ctccaggtgttgtccggcctctgctcggagctgcaagctcagtgccccctctcccactccccggccactctcctgttcagtgtcttcactgcagctgcacagaacggctggcccctgcgtgtttctgctcca

SEQ ID NO: 255523 - DNA, 157 bp, Homo sapiens
  chr5:179824174-179824331
  hypo
tggctccatccaagcgagctggcaacggtgggtaagagagggagcctgccagggaggtgcagccgctgcttcacagcctcatctcagaagcagcacccgtggctgtttgccttgctctgtttttgtgttttcttttgttgtcgttgttgttgttttt

SEQ ID NO: 255524 - DNA, 157 bp, Homo sapiens
  chr5:179824631-179824788
  hypo
tcatgtttaaggctgaatgatactcgatcgtggctctgtgccacctttgtttattcgttcacctgtggacagacacgtgggctgcttccaccttttggctattgtgaagaacgctgctgtgaatgcgggcttacacgtatctcttttggatcctgct

SEQ ID NO: 255525 - DNA, 160 bp, Homo sapiens
  chr5:179855729-179855889
  hypo
tgtacccaatagcccgtgaattatgagtttttcctgtaagccggtgagaacagtgttcccagccctgtttgggtttcaggctgtgtccaggccgtgctccctgtaacccttccatgaggttcttgccctggccatgggtagtttccgcatatgcgtgtgc

SEQ ID NO: 255526 - DNA, 234 bp, Homo sapiens
  chr5:179866444-179866678
  hypo
gaccccgtctgggtcggcactgcctgagggcagccagcactgaggcgggtcgtgaccccgtcggtgcctgtgcagaaaggaggctcgctgcagaagggaagaaacctgtgctaaccctgccccgcctcctgctggctctgtgccctggggcctgtcagtaccggatcccagccttgctttcctcactggtaaattagggatctaacgcacagtctgccacgaggatgggattga

SEQ ID NO: 255527 - DNA, 60 bp, Homo sapiens
  chr5:179923390-179923450
  hypo
accgggtttgtgtgcgtgtgagagcgcatgagtgtgcgacctaatcgctagaggtttgtt

SEQ ID NO: 255528 - DNA, 38 bp, Homo sapiens
  chr5:180030298-180030336
  hypo
ctcctcgggccccccgctcaggccgccgccgcctccct

SEQ ID NO: 255529 - DNA, 314 bp, Homo sapiens; identical to SEQ ID NO: 210540
  chr5:180036577-180036891
  hypo

SEQ ID NO: 255530 - DNA, 384 bp, Homo sapiens
  chr5:180038083-180038467
  hypo
acccttgatgttggggtgaggggacactggtgggtggacaggactcaaaaacaagcacgcagccaggccacacggccgtggaaggaccctgcagtgggtcatttaaagccactctgtgctctgagtttgtgcacactggcctctgacgtcgcatgatttgcttttccccgatgacgcagagggataaaatgcaccttgtccacatggctttctcccaccctactcctggacctgcaggacagctgacctggcggccaggctgtggcgctgcaggcttggcgggctgtcctcagcgtcagcctgggcgatgtgtagggccatggtggacacctgcgagaagctgccctcttctgagctctgagagctgcgcggggccatgcagac

SEQ ID NO: 255531 - DNA, 216 bp, Homo sapiens
  chr5:180039813-180040029
  hypo
gttccgacagcgcccggccttccctcctggtgtcctcctggtgcagctgtgctacagactacccgtgtatcttgagggtggtgcccaggcctgtcctactggccctggcttccctgatgccaccttctcatggacacaacccccacgcccccgacgcttgctgtccccaaaacctgcagggccatggggaggctcacatggcgggagtggccagct

SEQ ID NO: 255532 - DNA, 112 bp, Homo sapiens
  chr5:180043366-180043478
  hypo
actgcccttgcggacgtagtcggggtctttgtagatgtcccgggcaaggccaaagtcacagatcttcaccacgtcgctttccgacagcagaatgttccgagcagccaggtct

SEQ ID NO: 255533 - DNA, 83 bp, Homo sapiens
  chr5:180043957-180044040
  hypo
tcttccatggtcagcgggctcagccacaggtcctcagctacacagtggagccaggtgggctcaggaggcgcctcctccgcggc

SEQ ID NO: 255534 - DNA, 194 bp, Homo sapiens
  chr5:180047132-180047326
  hypo
ggcaggaggtgtgggttgggcaggctggtgctggcctcacccaggtgcagccgctctcgggggaattcccactggctggcatcgtaggacaggtattcgcattgctcctccagaggcacctccccggggtccatgatgatggacaggtagcccgtcttgatgtctgcgtgggccggctgcggggaggggacagg

SEQ ID NO: 255535 - DNA, 321 bp, Homo sapiens
  chr5:180047650-180047971
  hypo
gaagacagcgatgacgccggtaccgacaaggatcacgatctccatgctgcccttatcctcggagcctgcgtgggcagaaaggggccggcgtgtgtgtgtgtgtgtgtaagagcgtgcacctgcaggcagcaccccttctggtggccacgacttgcccaaggtggccacaagaaagcgttaactggggacgggaagggagttgaggggtgcagcctgaggccagaccttccacggccacgctggcggaggagttgacgcagcccttggcgttgcacacgctgcacagatagcgtcccgcatcctcctcgcgcacgcgctgga

SEQ ID NO: 255536 - DNA, 378 bp, Homo sapiens
  chr5:180055790-180056168
  hypo
gggaggacgctgcccgtcttcccctatggtctgttttgcccctggacttggaagggtatcggcggggtcggtggggagccagggctgttaccactggaactcgggcggggggtacgctgccagcttcacgggcagcttcaccagctcgtctcctgccgtggcctccaggatgggtcctttgagccactcgacgctgatgaagggattttctgccggacaggagaagtcactgtaaatccaggactgacccgtcgtggactgaccagggactccccccacggcccctgcagccccggcagccggacatccgcagactggggctggccatgccgcccggtgcaggagctgggcagctcctctgctcgtggccctcccttc

SEQ ID NO: 255537 - DNA, 152 bp, Homo sapiens
  chr5:180056384-180056536
  hypo
tctgctgggagcgtcgctcgggcacccacttaccccgctctgcctgcccgcacccagggaagccccgcgtcagcaggcgggctcctgcacagctaccccaccgaaggcacacctcccagcccagccagcggtggctccggaagccctggacc

SEQ ID NO: 255538 - DNA, 189 bp, Homo sapiens
  chr5:180057546-180057735
  hypo
agtctcacctctcacgaacacgtaggagctggcggccgtggtgccctcgatgcgtgccttgatgtacttgtagtagcagacgtagctgcctgtgtcgttggcatgtacctcgtgcagcagcaacaccttgcagtagggcctggcgtctgtgccctcgcagtctcgcaccacccccgtgtcctcgctgtc

SEQ ID NO: 255539 - DNA, 42 bp, Homo sapiens
  chr5:180093828-180093870
  hypo
cataaacactacaatcaatgcggcattttaccctgtacaaga

SEQ ID NO: 255540 - DNA, 35 bp, Homo sapiens
  chr5:180098113-180098148
  hypo
aggaaaagccgtgccgacctcggtgtggctagagg

SEQ ID NO: 255541 - DNA, 91 bp, Homo sapiens
  chr5:180111761-180111852
  hypo
atgaattctatccacgacccatccatcttgctgacggccgacctgagcagctacctgagagctggcagcgctcgctcgatgaaggccgccg

SEQ ID NO: 255542 - DNA, 610 bp, Homo sapiens
  chr5:180218495-180219105
  hypo
cttaaatgccactcggaaaaatcaaaaagataaatgcacctaagagggaaacacaggcaggccgatgcagcctggggactgtggtcccacctcagctcatgatgtggcaaggaggggcccaggaaggacaggcaggtgctaattccagctaggatcatagccctcccacgtcagtgggggcgccaggtggacacggcggccccggaactggaaggtgacaataccccggtagccagctctcggaacccccgacttaaggtcatccatgacacccagagccttggcgaaagccttgaagctgtccctgcccgtatactgcacccgcacctcccccagctccttccggtcattggtcctcactttctccacctgcagctggggagcaccgtagacgcgggcgaggaaatctcggtcataggcctcccgctgcaggtaagacaggtccagctgggtgaagtgcacaaactgctggttcagcttgataaacttgaggtgctggtcaaagaactgcccgtggctcacacccttgcggccaaaggtcatcgttcttgagatctcagggcgtatgcaggcccgcccctgccgctgctccggccgccgcatccagtcg

SEQ ID NO: 255543 - DNA, 444 bp, Homo sapiens
  chr5:180219601-180220045
  hypo
tgtccaggcagcgccgaacagtgctgcggtcacaggcgatgaccaggatgggaatcaccgccggcgcgggggtcacaggcacacgcggctgggcgggaggggccgcggtgggcaccctcccccgctggctcgacagggcatccccgatctgctgcagcagcccacgctgccgctccagctccacctcggcgtcttgggccaggcgaatcacttcccgggtgaggctggcggggtcgccatcgagagcgctgactgagggtggcctgccaggtgctgggcgcgtccagaagaagaggagcagcagggcattccaggccacaaagaggatagcgccccacagcacaagccctgcagactgcttcttcagcatcctggcccccaccggggagggcaggccaggggacggttcaaggctgccctgggcttgcccggctcccttgcccg

SEQ ID NO: 255544 - DNA, 142 bp, Homo sapiens; identical to SEQ ID NO: 210545
  chr5:180255234-180255376
  hypo

SEQ ID NO: 255545 - DNA, 450 bp, Homo sapiens
  chr5:180326121-180326571
  hypo
ggtacatgacagctgtgtctcgatggagtagactctcagaacagcgcagtttgccctccgctcacgcagagcctctccgtggcttccgcaccttgagcattaggccagttctcctcttctctctaatccatccgtcacctctcctgtcatccgtttccatgccgtgaggtccattcacagaacacatccatggctctcatgctcagtttggttctgagtctcctcaagctgggatcaggtaagactcatctttgtttcctccttactaactaacagtttgagttctttagctacaatggttgcagcataatggaatgaaggcatctttgtcgtttccattcctttggcttctcctagcctcagcctggggaaggatcaggcgctgtggaaacaattatagtagcccccaaataatggaaacacgggtgttgaagacgcaccgtgatcgtt

SEQ ID NO: 255546 - DNA, 78 bp, Homo sapiens
  chr5:180502178-180502256
  hypo
ccagtcatgatggcacgtgcctgtggtcccagatatttggacggctgagctgggagggtcggttgagcccaggaggtc

SEQ ID NO: 255547 - DNA, 104 bp, Homo sapiens; identical to SEQ ID NO: 210549
  chr5:180657110-180657214
  hypo

SEQ ID NO: 255548 - DNA, 432 bp, Homo sapiens
  chr5:180661378-180661810
  hypo
ggtgggtgctgcccgtgaatcaacccatcataaggaaaaggtgggccctgggggttcctccgtgggcagcggggatgccagctcctcgcgccatcaccatcgccgccgccggctccacctgccccagcagcccctgctccagcgggaagtgtggtgcgtgggcaccaacggcaaacgctatcaggcccagagctccacagaacagacgctgctgagccccagtgagaaaccaaggcgctttggtgtgtacctggactatgaagctgggcgcctgggcttctacaacgcagagactctagcccacgtgcacaccttctcggctgccttcctgggcgagcgtgtctttcctttcttccgggtgctctccaagggcacccgcatcaagctctgcccttgattatcctgccacccgcaggggcccctctgtcagca

SEQ ID NO: 255549 - DNA, 43 bp, Homo sapiens
  chr5:180680861-180680904
  hypo
cttgttacacagaaggctgacgtgggagcatcacttgaacgta

SEQ ID NO: 255550 - DNA, 120 bp, Homo sapiens; identical to SEQ ID NO: 210553
  chr5:180681264-180681384
  hypo

SEQ ID NO: 255551 - DNA, 172 bp, Homo sapiens
  chr5:180708832-180709004
  hypo
gagggcggcctgagcggtaggaggggggctggagcagtaagagggcggcctgagccgtaggagggtgggtggcagctggagatgctcttgaccggctagaggtctaggagaaggtggggaccgtgtccaacactcgtggctggagccttggccaccgcggttctcctggctg

SEQ ID NO: 255552 - DNA, 139 bp, Homo sapiens
  chr6:223799-223938
  hypo
tgctttacacctggcgatatgagacagcctgtcgtgccaggctgagacctgcatgtcactgcgctgagtgctgtcggcaattatgacacagtggcgtgtgtgtatctaaacagagaaaaggtgccgtgaaagaacaata

SEQ ID NO: 255553 - DNA, 176 bp, Homo sapiens
  chr6:226031-226207
  hypo
ggggctccccaccatgctggcggcctggggcctggacagagccaactggggaaagtgcctcgcaacagaccaacctggtgagggaggcggggggagcacatggcgcaacccaccctcctaccatccacattgcaaagccccagcgattcctgggcgtcacttttccacccccaccc

SEQ ID NO: 255554 - DNA, 60 bp, Homo sapiens
  chr6:356759-356819
  hypo
gtgctaatcccagcaagagccgccttcccagcttggcccgaggagccacatcaccacgca

SEQ ID NO: 255555 - DNA, 42 bp, Homo sapiens
  chr6:358267-358309
  hypo
tggtgggtgctttctgttctcgatgctccatctctgtgaaag

SEQ ID NO: 255556 - DNA, 54 bp, Homo sapiens
  chr6:373252-373306
  hypo
gaaggtggtggatgtgtgcccggcgagggtggcggctggaaggtctgctggtgc

SEQ ID NO: 255557 - DNA, 160 bp, Homo sapiens
  chr6:394827-394987
  hypo
cactgtttaaaggaaagttccgagaaggcatcgacaagccggaccctcccacctggaagacgcgcctgcggtgcgctttgaacaagagcaatgactttgaggaactggttgagcggagccagctggacatctcagacccgtacaaagtgtacaggattgt

SEQ ID NO: 255558 - DNA, 213 bp, Homo sapiens
  chr6:402006-402219
  hypo
caattctggttttcagcagtcgcctcttaaaacagttccatttcattgcactatgatctcgacaaatacgtctgctgatgtggcggctcttttcaggttcccagaaaaatcataaaggttggaagcatattgttaacattcttggttgtcaggtgtgtcaccctcatgcagatgctggcccacgagtgagacggagggtggagtggactgtac

SEQ ID NO: 255559 - DNA, 131 bp, Homo sapiens
  chr6:504235-504366
  hypo
tcgcctgcggcctcgcagtctcttccttaaatgggaggtcagacggagaaggtgaggcagaggccgtcagagaggggctccgtgtgcatccgttatggaagcggctgaggcctcgcggtgatggcagaacg

SEQ ID NO: 255560 - DNA, 148 bp, Homo sapiens
  chr6:550598-550746
  hypo
atgatactcctccacgtttcgtgaataaacggccagaaggaaaacagtgaataagcactggaaactcgcccaggtgagggagggacgaggacgctacattcccctccagtccccgggcctggagtcaccatgacgcagtccctgtaag

SEQ ID NO: 255561 - DNA, 78 bp, Homo sapiens
  chr6:625318-625396
  hypo
agcggtgttattccgcgcttgcggcaaagagaacacactttcttgatttggcggatggaagacggaggggggaggcca

SEQ ID NO: 255562 - DNA, 214 bp, Homo sapiens
  chr6:736613-736827
  hypo
acaggcgtgagccaccgcgcccggcccagctgtgctttttatgggcaacaaaaattgttttcagaattgaaattgcccttgatattttgacatgggtttgacgtctgcaaagttatttcatattacactaaaaaatgtcatggaaagagtacgccccgtgtacccaccacgcaactgaacagtaacacggcacggggagcgtgggaggctccgg

SEQ ID NO: 255563 - DNA, 148 bp, Homo sapiens
  chr6:968511-968659
  hypo
aatacccgcgagttactgaccctttccatgagaagacccgatgacccgaaagttactacccttccctaggatgttctgcataaaccgccccttaactcgcatgttcctaggacgttctgcataaaccgccctttaacccgcatgttcc

SEQ ID NO: 255564 - DNA, 115 bp, Homo sapiens
  chr6:972333-972448
  hypo
gtgtgtggaagacccgcccgactacacagaccacaaaaccatgcctcatgagccctctcagctggtgacgtgttcaggccaggcaaaatcaatagagttacgtgtcttgcccctg

SEQ ID NO: 255565 - DNA, 39 bp, Homo sapiens
  chr6:999947-999986
  hypo
gcagcgataataggcgtgccagcccgcacgactgtagga

SEQ ID NO: 255566 - DNA, 577 bp, Homo sapiens; identical to SEQ ID NO: 210557
  chr6:1080628-1081205
  hypo

SEQ ID NO: 255567 - DNA, 224 bp, Homo sapiens
  chr6:1082985-1083209
  hypo
tgaaggattaatgcagacaacgtgggcaaagcactgggcgcagatcctggcagttagcaagggcttgggaagcaccggactctctcactcgctgtgagttatgcattggcactcacatgttttgttggcttataatcctcgcacggtgttaaaacctaggtgctgtcattatgcccactttacaaatgaggaaacagaggcccggggatgcaaagtaccttgtt

SEQ ID NO: 255568 - DNA, 255 bp, Homo sapiens
  chr6:1097959-1098214
  hypo
cactgcaagctccttggccccgccagggctgtcttcccccagctttcagtgggtagtgacggccccgtgaccatcactgcatcgggggggagttgaccccgccagggctgtcctctcccagctttcagtgggtagtgacggccctgtgaccatcactgcagaccccgccagggctgtcctctcccagctttcagtgggtagtgacggccccatgaccatcactgcactggggacgcttgaccctgcagtggcttt

SEQ ID NO: 255569 - DNA, 105 bp, Homo sapiens
  chr6:1408644-1408749
  hypo
cagctccccatcaacgcttcctgcgtcgggctcaagccagcgttgtggaaaaaaagcatagcatggttttttcacgttgtcaagagcgttctgaggcctgccctt

SEQ ID NO: 255570 - DNA, 285 bp, Homo sapiens
  chr6:1446292-1446577
  hypo
ttactgggccatggcgtctaggaagtttcttacctttctgagacctcttgctgttctccaaagcagcggcccgctttgccttcccacggggagcgcgtgggagttgccgtcgcccagggtcccatcatcagcacttgctcttttccatcgctgtgtcgttctggcttttttctcaacccgctctagcaggcttgtagcagcgtctcattcccctaatgggtaatggcgtggagcatctttccatgagtttattggccatttatagatcttcgttggggaagtgtc

SEQ ID NO: 255571 - DNA, 351 bp, Homo sapiens
  chr6:1515495-1515846
  hypo
atgggtccctcatgcagagacgttgccacgttcatcccggggctggagctgctgcttcacactgacttacacggtgagcagcggcggcaggggaggaggtggaacccgcggcgagctgctgcttcacactgacttacaccgtgagcagcggcggcaggggaggaggtggaacccgcggccggagacacacgccgtggggtcggtcaacacacactcacgcacttgcacacgctccaaggcccggaaggaagctgaggccggcccgcctcccgccaaagggccgaggaatcccgccacctaacggcaggggcaggggccacagctggcaacgcctactttaattttaaaaat

SEQ ID NO: 255572 - DNA, 323 bp, Homo sapiens
  chr6:1523633-1523956
  hypo
ctcagctggcagaggtgcaccgccttgcttggtttccactcctcttgaaggaagaggtgctggcatctgcaccattcttagcgtcggcactgctttgcaccccccggctggccagcgcgggatgtgggtggggaaatagccactacagtccggagtctccccactccctccccaggcccacttccccgacgaagtttcactccattgttcctgggcatctccaggggtgtctagtttgaacaagaaaaggaatgttctggatggctggtcctgggcgctcaccgggaatgaacgtgagccactctttcgcacacaggccactc

SEQ ID NO: 255573 - DNA, 74 bp, Homo sapiens
  chr6:1574420-1574494
  hypo
tgcataaacctcagcgcccctcacgccagccttgggggacatgcctcaccaaggagaagcgttgccttctatgg

SEQ ID NO: 255574 - DNA, 100 bp, Homo sapiens
  chr6:1587933-1588033
  hypo
acaccaggcagcgccggttctagtcttgactccggcacaattccccaggcagtgagacttggctcacctggcttggcagctgcagcgttacaacccatga

SEQ ID NO: 255575 - DNA, 172 bp, Homo sapiens
  chr6:1631279-1631451
  hypo
ggaaggaggtggcaaaaccccgaggacaggagataaagcgcctttgagtggaccgattagggactcttgtgacatcgctggcaagtggcaccctggatacaagaggaaggccgctgtgctcttgccacttagggctttctaccctcaaagcgctttatagacatcagctaat

SEQ ID NO: 255576 - DNA, 73 bp, Homo sapiens
  chr6:1666397-1666470
  hypo
tgaagcagcaaaggccgtgagagtccctgagggtcaagtcgctctgagatcctagagacgggagtcctgctct

SEQ ID NO: 255577 - DNA, 159 bp, Homo sapiens
  chr6:1679665-1679824
  hypo
gctgaacaactggcatggtgctctatcttcactgccaggccaggcaagggggccccagctaatgctgctccgtgctgatctgctctctgctcctcatacctgttggtatcgaccttgtaagaaggttcagatccatgagtggcccgtgatgactgaaca

SEQ ID NO: 255578 - DNA, 182 bp, Homo sapiens
  chr6:1702254-1702436
  hypo
tctcaaatgacgcacgcctctcttgggtattatcgaactagaaactggaatgccccctttaagacaaggaaagtttggaagaaaggcgccacaacgccagtcagagctggcggttttctcagcaatgcctgatgcaagctcgagctttgacagcagtagctggactccgactcttcgtaaag

SEQ ID NO: 255579 - DNA, 327 bp, Homo sapiens
  chr6:1708418-1708745
  hypo
gctcaccatccacagaaaagcgtgaaacaaaatgcggcatctgggtatatctcaaaggtagggaaggaaacaactcgaaggctgtaactttcccgacacttgagacgtcactcctttgcaaggcagcattcccagcaggcagcgaagcgtgtttggagaagctggagggcagatgaggagtggagggaaggcgggtagggggcttgcactcgaaaccacctctgaaggcgttgtcaatacagcaacagcaacgaggacaaacatgccacacggtgggtccaagtctgaactgcccggggctaagtcagtcaccgcacaatcgagtat

SEQ ID NO: 255580 - DNA, 353 bp, Homo sapiens
  chr6:1726568-1726921
  hypo
ggcaccaggcattccatgagcgcatttgcccagccagccagccaaatgtggccacgcactgggtggccagagagtccttaccacttcagttggccggtagtacttgagatccacagtcacgtgaactttgccggtctctttacatctgcccacttcattttcattctttccttcccacctgtaaggaagataaacactgaatcagctcctaattgcttgggaacatttggccatgctgtagcaccttgggatgccccagccctctccccgcaggagcgcttaagctcattaaccacagcagcacaggctgatgctccagctgattattaaagcaacggcgactttcaaagcct

SEQ ID NO: 255581 - DNA, 101 bp, Homo sapiens
  chr6:1874237-1874338
  hypo
ttgcaggaggcagacggaccagtgggaggaagggtgaccactgcctcgaacagggcaccggcctccagagacgacctgcttggaggcgtgccaccccacgg

SEQ ID NO: 255582 - DNA, 150 bp, Homo sapiens
  chr6:1923749-1923899
  hypo
cagctggtcttgctctctcacgtgctccctcccacaaggggttgagcgcagcaggctgagtaaatggagcttgttcctgccagcgcacagagcagcagccagccggatcccgcactcgctcactcacgcgctccctcctacaagcggttg

SEQ ID NO: 255583 - DNA, 281 bp, Homo sapiens; identical to SEQ ID NO: 210566
  chr6:1953249-1953530
  hypo

SEQ ID NO: 255584 - DNA, 179 bp, Homo sapiens; identical to SEQ ID NO: 210567
  chr6:2108903-2109082
  hypo

SEQ ID NO: 255585 - DNA, 96 bp, Homo sapiens; identical to SEQ ID NO: 210568
  chr6:2233026-2233122
  hypo

SEQ ID NO: 255586 - DNA, 68 bp, Homo sapiens
  chr6:2244787-2244855
  hypo
acacctctaagaggcgaccctcacaaaccagccatgcttagcctgagacattccgaagacctcctctt

SEQ ID NO: 255587 - DNA, 121 bp, Homo sapiens
  chr6:2377321-2377442
  hypo
gcagaaatgccatgcgcgcccctccgaggacggggcagcgtgtttgaagagtcaccatggtagtgatattttatgagcatgagtcacttgtctgtttttcagggagcgctttgctcggccc

SEQ ID NO: 255588 - DNA, 573 bp, Homo sapiens
  chr6:2434635-2435208
  hypo
actgggctcggggccgcccctgcccctggtccttcagtgttgctcaaactagaaacagaagccatgctggaagacagagctgctgacctaagcccaaagcccaggtaaggtgcagacaacaggcaggcactggagtggcaaggaccatcacgtggttcctgggtccatgcgtgttctgcccgggcgacagctggcactctgaaacaccactcacagctccagtcctggccctgccgccacgttagcttgtgctctcatgcagtcactgaccctccccagacctccgtgtttttatcaggagaatgagaagctggatgtcatcgctcctttgcaatgattctgaggtactgcatttagggagaaaaccccaccacacacatgctcaatacaaaccctatttctgggggtagatttgatttaaaacgtcaccataaaccgtttaaagcatccagtaatttactaataatgcgtttcctgatgaggggagggaaggccgcggtttcaatctctcctactgattcagtgtgtgctgttccctaaaataaaaatcagcttcatcgaaagctgctgaaa

SEQ ID NO: 255589 - DNA, 167 bp, Homo sapiens
  chr6:2447382-2447549
  hypo
agaatacctgtattagtttacgttcccaccaacggtatgcaaaggttcccttttctccacatctgcacggttcagttcagctcctaagggagcagtgacaccggcagctgaggaagcgtcatggattccagcttcactgattgtccgaaagccagtggggcatccct

SEQ ID NO: 255590 - DNA, 151 bp, Homo sapiens
  chr6:2510117-2510268
  hypo
tcaccatgtggaccccaggacgccaccgcgtgatgcttctccacctgcgctctgtcgttcgccgcctgagttaccagccgagcgttgccgcctagcttgatgacagaggcttaaacaatatcagaatgacgtggtaatgctgaatcataag

SEQ ID NO: 255591 - DNA, 140 bp, Homo sapiens
  chr6:2530903-2531043
  hypo
agggtaccatccttcgggacacagcatagggattaaaccagcaacccttgtatcgcgcatgctgtttccccagcaggggaggaagggctgctgctacacagcggaggcagcaggaatatgtgcagcgctcaggccatcca

SEQ ID NO: 255592 - DNA, 385 bp, Homo sapiens; identical to SEQ ID NO: 210569
  chr6:2559179-2559564
  hypo

SEQ ID NO: 255593 - DNA, 67 bp, Homo sapiens
  chr6:2697706-2697773
  hypo
agcagggcggcatcggtccacaggcgtgtgccggctacctgggcatgagtgcgctctcgccctgcgt

SEQ ID NO: 255594 - DNA, 395 bp, Homo sapiens
  chr6:2701264-2701659
  hypo
atgtgtgtgtcaaccgacttcaaatggaatcacagctcctcatgttcatttcattaaaatgagtcttactttgtaaaatttccctttcataacgcaagtccaaaccttggaatgttttcgcatgaagtttacagtgtttcttcatcacccaataaaactctttgatttcttcccgccgcagacagttttaagagccttcatttcacatggggttctcggtatgctttttaatttttattttaagatcattttttatcacttcatctcctgtctcccactctgagcctaagttcagttcggcctccccgagccccactgcctccctgcagtggggcacgccggccgaggctcagaggggcttggtgtttcctaatgtgaggcgaggtgtggtcccc

SEQ ID NO: 255595 - DNA, 56 bp, Homo sapiens
  chr6:2780602-2780658
  hypo
actttggttccaagcgctgcctcttcgtgggtgagcacactcgctgcatgacctag

SEQ ID NO: 255596 - DNA, 79 bp, Homo sapiens
  chr6:2870699-2870778
  hypo
ccctccacacttcccggtaagagggagccggctctggcctggccacctcagagagtggctcacacagtgcagcggcggg

SEQ ID NO: 255597 - DNA, 289 bp, Homo sapiens
  chr6:2891875-2892164
  hypo
agtttggcagatcacgcagacaatattgggaaaagtcagccttgaacaaaagttcgatcccaacgccaagtgcctgcacagtgtgcgtctgccgcatcgccaactcagaaggtgaatatgagaggtggaagtggcactcgagttctgcccgcaaaggtgtccctgggttcttcccgcagcccgggtcttaccgtgctgagctccacgccgtcgtcaggcagcagcaccagcaggctcagctccttcctggcgtagggcagctccagcagctgcgcgcgcacctcgccca

SEQ ID NO: 255598 - DNA, 33 bp, Homo sapiens; identical to SEQ ID NO: 210570
  chr6:2906982-2907015
  hypo

SEQ ID NO: 255599 - DNA, 92 bp, Homo sapiens; identical to SEQ ID NO: 210571
  chr6:2907135-2907227
  hypo

SEQ ID NO: 255600 - DNA, 63 bp, Homo sapiens
  chr6:2907533-2907596
  hypo
ggttgtgtgtgtgctcgagtacgtgtgtcgaggttgtgtgtgtgtgctcgagtatgtgtgtcc

SEQ ID NO: 255601 - DNA, 256 bp, Homo sapiens
  chr6:2920900-2921156
  hypo
acggttgctgtagatgcgggcggcgagcatgtcaggacttcccctcctcctatccggtgactccttggaccacatcaacccagagcaacaagacccattgcccctgctacctggggcccgcatggcatgtctgagcaatgaccccatcctcgctgcccgctgcccagctggcggaccctgccaggttcttactgcgatggccactccccaaccaccacacccgcagcacctccacgctagtggctcctccccaccc

SEQ ID NO: 255602 - DNA, 180 bp, Homo sapiens
  chr6:2939519-2939699
  hypo
aaaaaaaaaaaaatcaaagcggaagcagcacttgatttttgaagtctcctgcttgaccctcttccaagcctactttctccaatgaactttcacattgcttaaaataaatgttcccttgcctgtctctcatttgaattctttccttttaaaagtacaaagtgagaagtgacagcatgctgg

SEQ ID NO: 255603 - DNA, 202 bp, Homo sapiens
  chr6:2985173-2985375
  hypo
tcccaggactttgccgaagggagtggcgtccatttgcatgaggagctcaggaaaactgctcctcaggtgccgagttagagacacctagtgagcttcaccagagtagttttgaccagggatacaacaaagctcctaaaactgaaaaagcacgaaaacaaaaatggttgtgaacagggctcagcgatgacgaggctacattcag

SEQ ID NO: 255604 - DNA, 43 bp, Homo sapiens; identical to SEQ ID NO: 210573
  chr6:2986010-2986053
  hypo

SEQ ID NO: 255605 - DNA, 328 bp, Homo sapiens
  chr6:3053001-3053329
  hypo
cctgaccccacgggcgtggcttggccaggcagctcaggacttgcttctccccacggcttggcccccttctcaggtcgctctcaatctatggggaacctagagggaaggaggctgcccatggcgcacaccgtggagggaccctgaggacagcggagagcaggtctaaggtgaggcaggtgctctcaggttaaagataggggaagaatctgaagcactattgcagacgggcccccaggagggttaaaggtcaaggtggaggcgaaactaagattggaaggtgagtatgcagcccagagtcatggaggttccagagcgggtgatggtttct

SEQ ID NO: 255606 - DNA, 158 bp, Homo sapiens
  chr6:3065504-3065662
  hypo
aaaaaaaaaaaaaaaaaaaaagacacggctttctgaggtgccgtgcggctgtggcgggggtggctgggggtgcgggttgtgttcattgtccaaggctctccagtgctttgcgtggcgttttggggagcacagatgaggtgtcccgacagtggggagtg

SEQ ID NO: 255607 - DNA, 383 bp, Homo sapiens; identical to SEQ ID NO: 210574
  chr6:3115566-3115949
  hypo

SEQ ID NO: 255608 - DNA, 128 bp, Homo sapiens
  chr6:3132220-3132348
  hypo
ccttgcctcggtcaccgcagtgggaactcactgtgtgcagttgctctgactttcctttcttgatgaaagcaagagtctctcagtagcgcagcactctttactctctgacgtctcgctacttcccctcc

SEQ ID NO: 255609 - DNA, 40 bp, Homo sapiens
  chr6:3177387-3177427
  hypo
ttcaccgccagcttgcgcaggtctacgttcagctggcccg

SEQ ID NO: 255610 - DNA, 40 bp, Homo sapiens; identical to SEQ ID NO: 210576
  chr6:3179684-3179724
  hypo

SEQ ID NO: 255611 - DNA, 215 bp, Homo sapiens
  chr6:3193808-3194023
  hypo
cggcctgcagacagcgtgtgcttggggctcccgtgccgtgcagcaaaagccggatccgggagctcagtgctgaggccggcagtggccacagtcacccagcactgtctgcggggggcgtgtgaagtctctccagttcgggggtaggagggcgacactgaaaggcctattgttgctgcccaactcggtaacatggatttcatcggcgattatgcagg

SEQ ID NO: 255612 - DNA, 44 bp, Homo sapiens
  chr6:3194436-3194480
  hypo
ctgggattacgggcgtgagccacggcgcccggcctacatttaaa

SEQ ID NO: 255613 - DNA, 352 bp, Homo sapiens
  chr6:3195390-3195742
  hypo
gacaaggcccagggccggcatgactctgggtcacaaggtctattcatcttggtgtggcttctttgcttattgtgctccgtcctgtgatggtctctgcagggggccacagagacgtaaagaacttgctctcctttccctgttgcaagagacaggtctaggttgaaggactaagtgagcgagggaaatgagggtcacggcagcccactcccttaccgcctttaacaatttgatctccatccaaccgaagcattgcctctatactttactgagaagctcaaaggcactttgcttttatgagctgctctcttccgaaataaatattaatgacattcaagctcgtgggtgttgctga

SEQ ID NO: 255614 - DNA, 218 bp, Homo sapiens
  chr6:3218509-3218727
  hypo
cgcttgtatcttcccgtcttaacccctcaaggctcgcctctctcagctgtccttccagattttcagccacttctgaacatgggcatctaacatgttctgtggcgctgactttccctccagccctcagacttgccttagtccctgttgtctgccagtttttccctggacatcgtcctctgagagaccatgcagtcccatggccgcgcatgaccagtatg

SEQ ID NO: 255615 - DNA, 149 bp, Homo sapiens
  chr6:3250843-3250992
  hypo
taagccatgggctgcggagctggagagaataggacgctggacgcttctgctgcacaggtgggactatgacgaagaaccagccaaggagcctgagaaggagggacctggagggacgaggcaccaagacagagcagcgccccagaaatcaa

SEQ ID NO: 255616 - DNA, 178 bp, Homo sapiens; identical to SEQ ID NO: 210578
  chr6:3263636-3263814
  hypo

SEQ ID NO: 255617 - DNA, 44 bp, Homo sapiens
  chr6:3263844-3263888
  hypo
gcccggaagccagaagtgtggctggcctgcggggggtggagaag

SEQ ID NO: 255618 - DNA, 90 bp, Homo sapiens
  chr6:3267969-3268059
  hypo
gtaaacttatgtacaatgtacgtgtaaataaatggattgaatttcagtttgtcatcaggccgcgctcccgttttgtttttaaggggttaa

SEQ ID NO: 255619 - DNA, 68 bp, Homo sapiens
  chr6:3269488-3269556
  hypo
taagaccaggactcgaagcagagtgagaggcctccctccacccacctcggggcgagtgaagacacagc

SEQ ID NO: 255620 - DNA, 248 bp, Homo sapiens
  chr6:3273206-3273454
  hypo
ctggctgcgtgttcggtccctggtctgtaaacctgtgcccaagctgccccagaccctggagccccgggttccgcaggccgggctacatggccttcatgccgttggccgtggcaccctcgggcagtgtgtcacccgcggctgcggcatcgtggaggcccgagtagtccttgagctcggcgttggtgagcagcagtggctgctcccccttcttgtgcggcagcagcggctggcgcgtgtagtgctccccg

SEQ ID NO: 255621 - DNA, 96 bp, Homo sapiens; identical to SEQ ID NO: 210579
  chr6:3281277-3281373
  hypo

SEQ ID NO: 255622 - DNA, 533 bp, Homo sapiens
  chr6:3285282-3285815
  hypo
ggaagcacagcccacgcgcttgggactcacctgagtctgggtgctggctgtactttccaatcactggacccgcagacatgatcgcacccacacggacaagggccaagcaagcgagaagagagaagagagcacattaggtgtggagttagcctagcgtgttcccatgcgacttggttcaagcaaactcccttccgtgtctgggatggcgctggccgccggggcagtggaattcatactgcgctaaacaaagatctttttgttaggaagacaggagtgagaccctgctggcctcagagcctgaggagaaaatggaaccttcacagtgagaccccagcaggtgcaaagggtgagcttccttgcatgtaaagtcacccacaggtcactgccgcctgcattcaagctgcgtcaagtgctgtggggtgcccctgccagccccagctctgctcctcacggctgcttggtgttcgcctggggctcctgtgcattcctgctcagggccaaaggggcaccacaacacccgggggctgaggcac

SEQ ID NO: 255623 - DNA, 36 bp, Homo sapiens; identical to SEQ ID NO: 210581
  chr6:3289595-3289631
  hypo

SEQ ID NO: 255624 - DNA, 152 bp, Homo sapiens
  chr6:3290703-3290855
  hypo
atgcacacattcatacgcatgcatatacgtgtgcatgttttagttaacagaagtccttgggggctggacaatattttggctccaagggatgtgagcaactataaagtcatgagactgagtttcttgtgcggctccagcggctctgaaagccc

SEQ ID NO: 255625 - DNA, 120 bp, Homo sapiens
  chr6:3302110-3302230
  hypo
ggaaaatccaaaatgcggcatatttgagtatggacatttgagtggtgccattttgccttcaagataaagcccttgtaaaacgagttggaagaattccttctgtttcgtttttttggggaa

SEQ ID NO: 255626 - DNA, 265 bp, Homo sapiens
  chr6:3307210-3307475
  hypo
cagcgtctgcagcgcggtatggatacagcaatggaggggcacaaggattcctcctctagggtaagtaggatgcttgccaacttggaggattttagagcagatgtttgctgatgggccatgaacatgctgagcagacggcatacggcagcgctacgacatgcacaggtggcacttggttactgacaagctgagggtaggcacaaaacctgcactctcagtggcatgtccaggcaggtgtcctcactggctccgggtctcagttcat

SEQ ID NO: 255627 - DNA, 69 bp, Homo sapiens
  chr6:3312767-3312836
  hypo
aatgaaacaagtcgcgacaccttagccaattctgatggctgagtgaggctgtcccggtcgcactcagga

SEQ ID NO: 255628 - DNA, 69 bp, Homo sapiens
  chr6:3315028-3315097
  hypo
tggagtgtcttctccgggccagtgtcctttacggcagcacaatctcacgtcctccgcgctagggtttac

SEQ ID NO: 255629 - DNA, 157 bp, Homo sapiens
  chr6:3315694-3315851
  hypo
ctatctgttcacatcgtggaactggacaggaccatcagatctcacaggcccttcgaggatggcatctgtttcatttcactacacagtctcgaaccctatttcatgtaagaaaagtgtgtgttcggctgggcatggtggctcacacatataatcccag

SEQ ID NO: 255630 - DNA, 76 bp, Homo sapiens; identical to SEQ ID NO: 210582
  chr6:3316815-3316891
  hypo

SEQ ID NO: 255631 - DNA, 200 bp, Homo sapiens
  chr6:3321383-3321583
  hypo
atgcatatgttttccgtgcgttatttcagtcttcaaaacaaccccatgaaataagaactattatgacccactttttacagacatgagacaacgcgggctcagagaggtgtgaggcaggctggaggcagcacagccagtcactaggccagctctacccagactgcagagctggagctgtaagcgggaagcagagcaccttg

SEQ ID NO: 255632 - DNA, 178 bp, Homo sapiens
  chr6:3322742-3322920
  hypo
acaagagctggaggcggccccaggagaggagctcagttcgggcagcggtggctgctgagtggcctctctggcaggtggccttttcccatctgctattgctggccccctgctgctgccgaggtcctcataacacagtgagcaagaaccaggctctcggggaaaccgcacctgcaccctc

SEQ ID NO: 255633 - DNA, 527 bp, Homo sapiens
  chr6:3328432-3328959
  hypo
gttgtgagaatgaaacagtacgtagctgagactgaactgaggcatttgtttagtgaatcaacagggaccatgactaagtctgagcacagaggccgcccggaggctttgatagaaaagtggcattgttaggaggccacagctctgggagatacgcttttcggaagtcgtcagattcttacaaattttcaggaggaaaagcacattgcgcttcccagggtagacactttatgtgacggaggaggaaggcctgagggagtggggtgtgggggtttgatgtgtcacgtggcggggctgcagtcttaggcatttgctcaaacaggaaccccggtgctgccaggagagagctgactttgagcgaggggcttctagataatttgggtgggtctcgcctcatctgttgaaagacctgaacatagggccgaggcttccttgaggaggaagaagattccacctgtggacggcagtgcccgcccccatgccctggagtcctgatggctggccctcccgctggcccctcatggatgtca

SEQ ID NO: 255634 - DNA, 260 bp, Homo sapiens
  chr6:3333098-3333358
  hypo
cccatggaacttgaagaaaccgctggttttatgtgactgtcccgtgatgtcgttcacatgttccttcatgccctggtttaatctctaaactggaagctccacctaatgtctggtgagacccaggttcaggtttttggaagagcgtatcgcagctggtgcctgtgcgtcacggtgctgccccgcaggaggtcacctactgggaatgacgctaccactgacccatggagcaaagcggcggcgcctcagcctcccatcctaga

SEQ ID NO: 255635 - DNA, 210 bp, Homo sapiens
  chr6:3346366-3346576
  hypo
agcccaagcaggctcctggacgttcaagggcacagactctctttgaatgtgcacgatgccaatctgacaggccagcgccacctctgctcgggtcccagctcaacgtctctgctgacctgctcacacgttcatgtacctctaaaacccagcattgcacgtctgaagctgcaatcacccctgcccctctccgcacaaaagccagcccttcca

SEQ ID NO: 255636 - DNA, 329 bp, Homo sapiens
  chr6:3405476-3405805
  hypo
agtgcgagactgtctcaaaaaatttaaaaaaaaaaaaagtttgtcaaaggccttcggtaaactctgactcatttccttggtggaaatagccttgtgagtggagttggtcccaccaggagaagggctttttgccctgagaacttgctgctactgggaaggcccacgtatctgaagatggggaaaccgggtggagacaaagagacgaccgagcacgtattcatgcgaaactttcccttcacccaaatgcagagcaaatgtttgctccccagaagcccacaaggtagctgaagccatttctagttgacatcggcaatctccattctcttcat

SEQ ID NO: 255637 - DNA, 556 bp, Homo sapiens
  chr6:3441846-3442402
  hypo
aagcgactcctctgcgcccctgcaccttgtcctgttcttgggccaaggcacctcacagtgcactgcacctgccctcctgggatgtgctcggttcaccccccaccctcagctcccattccctgccccgctcatcctgtgccgcatgccagggatattcaatttcccaaccgtctccggctacatgaggagctcccttctccagggcagacacgatcttctacccatctgtgacaccagcccagggcagatgttctgagaggaagacagggacaccacgcaagcagctgcagcactgcctctgaaggggagggcacgggagggatggagggattgtccggaactgtcttcaagaaggagggcatcacccaagttcccagccgcacatgcaccatagccaaggggtagaggcgacccaagtgtctgccgatgggtgaacaaacaaacagaatgtggtgcaggcacacaatggcgtattcctcagtctaaggcaggcaggaaacgctcacacacgctaccacatggatgagccttgaagacatcacgctgagcgacatga

SEQ ID NO: 255638 - DNA, 46 bp, Homo sapiens
  chr6:3445257-3445303
  hypo
tgggggtggggcacgcttcccagtgttctgcgtctgtcctcacaat

SEQ ID NO: 255639 - DNA, 43 bp, Homo sapiens
  chr6:3450542-3450585
  hypo
tttattatttttttttgagacggagtctcgctctgttgctcag

SEQ ID NO: 255640 - DNA, 42 bp, Homo sapiens
  chr6:3450825-3450867
  hypo
actgtgcccggccgtcagttcggtattaggaaaagaatttaa

SEQ ID NO: 255641 - DNA, 216 bp, Homo sapiens
  chr6:3468953-3469169
  hypo
gtcctggctccaccttctcccgcttgccctgtcttgctgcagacacgttgctttgcatcttggacagaaccagaaacgtgacacattcctaataaccttaataatcctcacagctagcatttcttgagcacgcgatcacctttccacatatctcatctcacttaaggtaccctacgcgaaggaaggatcattgcaccattacggagacgaggatac

SEQ ID NO: 255642 - DNA, 96 bp, Homo sapiens
  chr6:3471226-3471322
  hypo
ctagctttcgaagacgggtaaggtaaaagaaccagaaaacaaagtcgaaatggtgtccccttcctgtaggctcgcttttctttctttctttttctt

SEQ ID NO: 255643 - DNA, 272 bp, Homo sapiens
  chr6:3515169-3515441
  hypo
acaggcggcttctgcgaagggccagggatgatggaggggaattggatcctggagcaggaaagtagggcatggttaggggctgatggagacctgcagtcgcatggaaggaaggcagagtctcagggcaaggggtgcccagcgagcctgacgctgggggtgcaaggaagccaagcatcggaggtgactccaagttctggacacagggacggggaaaaaagtgtcattatcgaagatggggtatacatcttgggaaaaggctgacttctatgtat

SEQ ID NO: 255644 - DNA, 139 bp, Homo sapiens
  chr6:3540898-3541037
  hypo
cccagtgtcaatgccgcatgacgctgaggccaacccagggctgcccttgcctgtgtggctgtgccccccgggttgacatggccactcctgaggctggggagtgagcacttcttttttcttttttgagacagagtcccgc

SEQ ID NO: 255645 - DNA, 100 bp, Homo sapiens
  chr6:3543266-3543366
  hypo
tcagtacttgggagcggagggttgttttcttcaggggcggtgttgtataaaatatacgtatttaacattagacctacactcggttcggtgagtgtctcat

SEQ ID NO: 255646 - DNA, 140 bp, Homo sapiens
  chr6:3572618-3572758
  hypo
gccacagccagccacgtgcttactgtgtgctggcgttgtgctacttgaggaaggaattctgtttccattttacagttgaggaaacagaggttgagaaactggctccagggagaagcaaagctcttggattacttccaagc

SEQ ID NO: 255647 - DNA, 256 bp, Homo sapiens
  chr6:3578544-3578800
  hypo
gtgctgggattaaaggcgtgagtcaccacacctggccgatagatgtattttttatctcattagaaacagcccaccttcctgggttatagaaagaagcagaggccgagagccgtcgaccctcccagctcccgcctgtgttctcttcttggtcctctcccatcctgaatcgacaaccagcaaatatgacaatccagatggtggtcctacccgacttaagcctctctgggcctcacgttggaagcgcccctttgctccc

SEQ ID NO: 255648 - DNA, 221 bp, Homo sapiens; identical to SEQ ID NO: 210589
  chr6:3579860-3580081
  hypo

SEQ ID NO: 255649 - DNA, 71 bp, Homo sapiens
  chr6:3590114-3590185
  hypo
ccaagtctgaaacacgggctcgggcttctgactccatgtcagggcgtttccacggccggctccacaggagg

SEQ ID NO: 255650 - DNA, 476 bp, Homo sapiens
  chr6:3593169-3593645
  hypo
ccagagcccactaacgcagtgggggccccggggttttaccaactggtccacttggccctattatttctcttcattctttgtgagccatgtggctcctcactggtggctgctgctaatattttagacccaccatttgtgtcctacaccttcgaaactgcaggaaagtctccgggggagtgggggcaacgggctctcccccccgcaccccattaatcgtatcttgctggaaggggctgcaaagcggtgcttagggaaacctctatttccaccgataaccctttccctcaaaaatacatactccttattttgctgatgatgaaaaccaagtttcaggttgttgaagagatttgccttagatttcctcttgagaagacagtagacgggaaataaatccagccggaaacccattcaactaaccaacactgcctctttgcatgtttgtgcatgtaggtaaatacatccgtagatttatttaa

SEQ ID NO: 255651 - DNA, 517 bp, Homo sapiens; identical to SEQ ID NO: 210590
  chr6:3618095-3618612
  hypo

SEQ ID NO: 255652 - DNA, 43 bp, Homo sapiens
  chr6:3633705-3633748
  hypo
ctgatgtgccaggacggtaatgtgttcccgaggacgatggaag

SEQ ID NO: 255653 - DNA, 34 bp, Homo sapiens
  chr6:3646462-3646496
  hypo
aaggtggccgggcgcggtggctcacgcctgtaat

SEQ ID NO: 255654 - DNA, 390 bp, Homo sapiens; identical to SEQ ID NO: 210591
  chr6:3646960-3647350
  hypo

SEQ ID NO: 255655 - DNA, 132 bp, Homo sapiens
  chr6:3654812-3654944
  hypo
ccttcgcacaccagcggtcaagtgacaatgcggggcaggtcgctccacgggccgctaggcatcttcctgtgacctcctctggccagagcccctgggtgccaccactgcacagaaacacgtcttcagatttct

SEQ ID NO: 255656 - DNA, 198 bp, Homo sapiens
  chr6:3711994-3712192
  hypo
gaaactttgtctcaaaaaatcataataaaaatgaataaacaaacacgtaactaagagaattacaacaaaattacttcactatcgaagtatagtcacaattactaatagcaagcaagtaacaacagaatggcacttggacctatctggatgagataatcagggaagggagtgaatgcagtcaatcgcggttgccaagag

SEQ ID NO: 255657 - DNA, 339 bp, Homo sapiens; identical to SEQ ID NO: 210592
  chr6:3724299-3724638
  hypo

SEQ ID NO: 255658 - DNA, 577 bp, Homo sapiens
  chr6:3724871-3725448
  hypo
cctgggagccacctcggggctgcctcctgtgccgcccccagtgactgaaggtggccctggcccgtggacaactgtgggaactcagccatctctggaaagctttgccatgaccaagatgactgcacagtccaggcccctggccggacacacaacaaggcagggcgagcatatgtcccccacaaacctagtacatcgtgcgaatcccgctgacctcaagggacagggctgtgaagacagctttaaggcatttggataagaaaggctgaggctgcagaggaaggcctcccctctgactccatggccaggcctggagtgtggtgtcagcccccgcctcggcttccctatgctcacggtcctggcaacacgaggctgggacagaggccgcggcacaaagagccctagctgtgggtgggaaagctatggggggctcacggagacagagcagctctccaacttcatccagggaatgaaatctcttccccagaccagggctggatggaaacccaagggggaaccttgggcgtgccgaaaggttcaagccagtcgagggacagagccacagcgccacctcaaacag

SEQ ID NO: 255659 - DNA, 432 bp, Homo sapiens; identical to SEQ ID NO: 210594
  chr6:3725748-3726180
  hypo

SEQ ID NO: 255660 - DNA, 115 bp, Homo sapiens
  chr6:3734363-3734478
  hypo
aacatgagactctacgtttctccctgttaaatttcgtctcactatgctcgccccttagggtccacgtgggccatgtgttcatacacatcgctgatagagacgggaggccagggca

SEQ ID NO: 255661 - DNA, 129 bp, Homo sapiens
  chr6:3738059-3738188
  hypo
ccagggaggaaaaaccggggccactggagcccatgaaagccttctttctcctgattacacctgcacacctccactccgtccctatcgcctggtactaccagggagggaacaaaacggctaagtgagaca

SEQ ID NO: 255662 - DNA, 127 bp, Homo sapiens
  chr6:3784841-3784968
  hypo
gagtcagagggtcacgttccgtcatacagagcggtgcccagtgttttcccgtgacagtggcactgttcgttcaccacagtcaccctgtaaccggcagcggtgctgttgacttcgtcatgccaaggga

SEQ ID NO: 255663 - DNA, 52 bp, Homo sapiens; identical to SEQ ID NO: 210595
  chr6:3821400-3821452
  hypo

SEQ ID NO: 255664 - DNA, 35 bp, Homo sapiens
  chr6:3850718-3850753
  hypo
tggagctgcgctccgccggcgtggagcagctcatg

SEQ ID NO: 255665 - DNA, 325 bp, Homo sapiens
  chr6:3880043-3880368
  hypo
tgtgtcagtccttgcgtgattagtaacaaacaactgtgagcacctcagagatgttcgacgcttgaaaagttgggttctgggggagatccctgggatggaggtgacggtcccgcctctgatcagaggaccgcggctccctggatggatctcatccccacacccggcactccagtttgatcctggcattttataggtgcagaaactgagaagccacgcgactgcccgtggtggcagatattgaccatatccacttggtactgctttctagcatacagttcagtgtttcacagctccaggcacacacaactcagccatctccctcctc

SEQ ID NO: 255666 - DNA, 67 bp, Homo sapiens
  chr6:3900289-3900356
  hypo
tctgggcaccagcgcgagccgtgctgtggctcccctgtgtccatctgcaggacggacagctctggtt

SEQ ID NO: 255667 - DNA, 36 bp, Homo sapiens
  chr6:4008152-4008188
  hypo
caacgtagccaggatctgtctcgggggacagggaaa

SEQ ID NO: 255668 - DNA, 187 bp, Homo sapiens; identical to SEQ ID NO: 210596
  chr6:4020369-4020556
  hypo

SEQ ID NO: 255669 - DNA, 154 bp, Homo sapiens; identical to SEQ ID NO: 210597
  chr6:4061559-4061713
  hypo

SEQ ID NO: 255670 - DNA, 101 bp, Homo sapiens
  chr6:4189172-4189273
  hypo
gcccgcgagggggcgcgagtgggtgccagggcgcagtgggaagggggccgcggagcccgcgaggcacatgcgcagtgcaggaccccgccattttgtcttca

SEQ ID NO: 255671 - DNA, 187 bp, Homo sapiens; identical to SEQ ID NO: 210598
  chr6:4254744-4254931
  hypo

SEQ ID NO: 255672 - DNA, 201 bp, Homo sapiens; identical to SEQ ID NO: 210599
  chr6:4494278-4494479
  hypo

SEQ ID NO: 255673 - DNA, 368 bp, Homo sapiens
  chr6:4549977-4550345
  hypo
ctggccagtggtttccggggcgcactggggcttgcggggtccccggagcaccgcctgaaacgcaccaaagaaccccactctcctcgccccttaagaaaatcaggacaaaccagctgccactcaggcagagaactcaggaaggcccaaggagaccaagacgcggcacggctgcaggagaaagctcagccttgtgcagtccagaaatcctgccttgaagctcacaggggcccaacccagctgccccagaaacacggagacgctctagagccgcatggaacctcagcacaagaacttcaaaaaggacaaacccaggtgacccttgagcccgtactcaaggccaggcatgcgtaccacattctgtgagggca

SEQ ID NO: 255674 - DNA, 433 bp, Homo sapiens
  chr6:4559571-4560004
  hypo
atccatcacattcacatgctcgcacatgctcacttccactctcacactcatgctcactcacgcacactcacgttcacacgcacacacgcatattcacactctcgtgcactcacactcatgcacactcccattcatacacagttttgcgagtgtacttctggagtgctttgctggcagctctaggaaggaaagagagacgctccaattaggtctggagaagaacgagggggcatggcgagagggcccagcgggccgccactccattccagaaaggagtgcccctgctttccctggggctccctgcaccagctggtatgtggcgtggcatggcacggtatggtgtggcagggtgtggtatggtatagtctagtgtggcatgcgctggtatggcatagtctagggtagtgtggcctgatgtcgttcggcgtagtat

SEQ ID NO: 255675 - DNA, 68 bp, Homo sapiens
  chr6:4563333-4563401
  hypo
gtggacctggctggggtcaacgtctcttcgtttgacttggatacatcgatcctttccatctgtctcat

SEQ ID NO: 255676 - DNA, 42 bp, Homo sapiens
  chr6:4689095-4689137
  hypo
gcatgggctttgaaatcatgcgtaggtttgaccaccaagtat

SEQ ID NO: 255677 - DNA, 95 bp, Homo sapiens
  chr6:4724690-4724785
  hypo
aagcaacctgctcgcgtccggaatcggtgggttcttggtctcactgacttcaaatgtgatgccgcagaccctcgctctgagtgtcacagttctta

SEQ ID NO: 255678 - DNA, 61 bp, Homo sapiens
  chr6:4782240-4782301
  hypo
ggagcctctggatacgcccttctgtgtttcagacccttaggctctgcgtggaggtgggtgg

SEQ ID NO: 255679 - DNA, 140 bp, Homo sapiens
  chr6:4836442-4836582
  hypo
tcggccatcttggctcctccccaaggcttaggtttctaagtcagccacaaatgctacccaaaactacataaagaagaaaaaagttgcatagaaccaaaaagtgagttttaattatttattttatacgtgtgctttcagaa

SEQ ID NO: 255680 - DNA, 112 bp, Homo sapiens
  chr6:4854165-4854277
  hypo
tttgtaaaattttgttttcccgaaattcagcacagatgggcttctgtgaaggtgttgtcctgattctctgtgcagaggtgagctcctgctcgtggtgagtccccttgaagtg

SEQ ID NO: 255681 - DNA, 70 bp, Homo sapiens
  chr6:4854537-4854607
  hypo
tttcctcaaaactcagcatccgcagttcacatcaccctgtttatgttacgcagtttcatactagtcatgt

SEQ ID NO: 255682 - DNA, 128 bp, Homo sapiens
  chr6:4858682-4858810
  hypo
cagcactgctattgtccagccgtccagtcacctggatgagcaaaccagagctcacggagcttaaggaacctgcccagagccacacagccccagccacgggatcgagcgccaccctggccagcctgtct

SEQ ID NO: 255683 - DNA, 42 bp, Homo sapiens
  chr6:4872578-4872620
  hypo
tggtacattaggtttaaaagcgaacacgttggcagagttttt

SEQ ID NO: 255684 - DNA, 146 bp, Homo sapiens
  chr6:4874011-4874157
  hypo
gttttattgtgaataggctccgagagcctggtttgaaaccgccaagtaggaacatcgcacaggggacaccttcacatgcgccgcagctgtgcagatttcacctcctgccactgcttgctcattctggttcccgccttctgcctgtc

SEQ ID NO: 255685 - DNA, 110 bp, Homo sapiens; identical to SEQ ID NO: 210606
  chr6:4874532-4874642
  hypo

SEQ ID NO: 255686 - DNA, 41 bp, Homo sapiens; identical to SEQ ID NO: 210607
  chr6:4889732-4889773
  hypo

SEQ ID NO: 255687 - DNA, 573 bp, Homo sapiens
  chr6:4905023-4905596
  hypo
gctttgggcctcatcgtacagctacaggttgtacttaggacccgtgttagccacttagactacagctgtgcactgtgtccccctcatccccaccccgacctccagctgagaaataattatcacagagtccatgcactgaaatggaggtgtttaatcacaagaacacctccgcagtgcctgtgtgatcggccgtccctatgtgagctgctgatctcagagacagcattaggatggcgaccactgccccagacggcccagtgctctacccctagcgtgatctgaactgctgaagtcagagaagtccacgttggataaacaaagccagcccagtagtaacctggctgtcacagtgaccgtgtgtccgtcttactgaacctgggtttacgtgactaggatgctgacacaagtgagtttgcgcatggcttgctgttctcttcaaccctctccagcctgaataggaatgttaaacccactcaggaattctcgttggtctaaaggactgtgttcattggtctttgacactccgtcaaccaacttagcggggttgacctgagccttcggacacgatgtgcc

SEQ ID NO: 255688 - DNA, 198 bp, Homo sapiens; identical to SEQ ID NO: 210609
  chr6:4909052-4909250
  hypo

SEQ ID NO: 255689 - DNA, 91 bp, Homo sapiens; identical to SEQ ID NO: 210610
  chr6:4909755-4909846
  hypo

SEQ ID NO: 255690 - DNA, 31 bp, Homo sapiens
  chr6:4910086-4910117
  hypo
atgagccaccgcacctggccaaatttcatac

SEQ ID NO: 255691 - DNA, 142 bp, Homo sapiens
  chr6:4910917-4911059
  hypo
gggaaaaggtgtctccgtgggcctggaaggattagtcgggtttttataaagcagcagtgttggaagcgatggtttggatagaaggcatgaagtgggtagtggagtgtttctgatggtttatacacctctagaccttacctga

SEQ ID NO: 255692 - DNA, 202 bp, Homo sapiens
  chr6:4932008-4932210
  hypo
gagcagggacctcactggcacgaggagccaacacagttttaactcaggagtctgaaggccaagttcagtagtcttggtcagcgtgagccaaaatgaatccatttttaaattagcagaaccacggatagttcgtagggactatcgcctcaaagaaaatgctgaagctgtttctgagactcacgtataaaggctgcatgggctc

SEQ ID NO: 255693 - DNA, 48 bp, Homo sapiens
  chr6:4936320-4936368
  hypo
gctccatgaaggcacgtgggaaatgtgtgtgcacgcgctttgctttag

SEQ ID NO: 255694 - DNA, 452 bp, Homo sapiens
  chr6:4948976-4949428
  hypo
accctgctctaactcaagagcgaagagcctgcatttcactcggcgtgaattctacactttctgagcagagtatctgacgaagcctctctacagaaagtgaataaacgttgttcagatgacttcgacaactcttgttgaaagtgactatgcagatgatgtaaatgatgtcgttcctttcatgagcctttggtgtacttgagctttcagcagcctgaggcaagactggacaagtgtggttttccccactttgcatgtgcagagctctgccaggaggataagctaaaggaatcacattatcaagataaaaagaatatgcaaatagtgcaggctgtgtggcctctcctttcttacagcaggccctccgctgtaggcgagggctacgtaaatcagccaaggagtctcttccagtttagccttcctggtgcccagtagacattcatggagtgcatgga

SEQ ID NO: 255695 - DNA, 277 bp, Homo sapiens; identical to SEQ ID NO: 210613
  chr6:4950659-4950936
  hypo

SEQ ID NO: 255696 - DNA, 276 bp, Homo sapiens
  chr6:4951176-4951452
  hypo
aaaaaacttgcaaaccctcatgaggagcctgtccccagccctgttttccagcctctgcctgcatgggaggggcagtgagtcagccacgtgtttgctttgccgcctctgcctgtgtgctctccaagctgcgggtttcacatgcagtaaacggcatcaagacattgacagaaggtgtatgggcagtcttacactgtctcagcgacttcagggccaaaactgtcttttgtgattttgcctcttttggaagtggaagccacctaccgaaattgtgtttta

SEQ ID NO: 255697 - DNA, 113 bp, Homo sapiens
  chr6:4954218-4954331
  hypo
aaaatctggggctcggcccaggggatggactccatgttaaagtacttgcagaggaagatcgatgagttctgagtgtcgggctgcccactggtgacaccgggatcgggctgagc

SEQ ID NO: 255698 - DNA, 33 bp, Homo sapiens; identical to SEQ ID NO: 210614
  chr6:5003274-5003307
  hypo

SEQ ID NO: 255699 - DNA, 206 bp, Homo sapiens
  chr6:5107468-5107674
  hypo
ctgttacagcctgcagcccacgttaagtttgggtggactgcctcattgcgtaaaacctgggggagtgggagaagtctcctctggagctgttatcttgccggcaatttgatgccttcagcacggaggttcaaatctggacttcggttccaagtagcagttgcttaaattaagtataaatcagcagtgccgtgcgttagtagcgtggt

SEQ ID NO: 255700 - DNA, 149 bp, Homo sapiens; identical to SEQ ID NO: 210615
  chr6:5108213-5108362
  hypo

SEQ ID NO: 255701 - DNA, 83 bp, Homo sapiens
  chr6:5413099-5413182
  hypo
gacttgtctgtactcgcctcgccgtagcttagatgtagtctagagcaggttgctctttccgataaaaacgggccaacaccttc

SEQ ID NO: 255702 - DNA, 223 bp, Homo sapiens; identical to SEQ ID NO: 210616
  chr6:5507940-5508163
  hypo

SEQ ID NO: 255703 - DNA, 132 bp, Homo sapiens; identical to SEQ ID NO: 210617
  chr6:5510683-5510815
  hypo

SEQ ID NO: 255704 - DNA, 126 bp, Homo sapiens
  chr6:5537758-5537884
  hypo
agatgtcccgggcctcctctcgagttggagatgtcccgggcttcctctcgagttggagatgtcccgggcttcctctcgagttggagatgtcccgggcttcctctcgagttggagatgcagacaaga

SEQ ID NO: 255705 - DNA, 141 bp, Homo sapiens
  chr6:5556543-5556684
  hypo
agtatagaaatcagggtcatcgtggcgcattcaacgaacttaactatattggtcaaaaggaaacatgcgctgttctgagagcggcagccacagtcctcctgattctcagtcccttgtaccgtcagtttccatcttcagctt

SEQ ID NO: 255706 - DNA, 154 bp, Homo sapiens
  chr6:5663764-5663918
  hypo
cagagaatgtgtttcgatgagatcagaagcaatccactaaagaaaaagtggagaggacttgagagcttaaaagagcggagaggagagatgtgagaaaacctaaaaaaagacaaaagttggtgtggaagaaggggtggcgcgggctccatggcag

SEQ ID NO: 255707 - DNA, 156 bp, Homo sapiens
  chr6:5746473-5746629
  hypo
catgaacaaagacagtgacacgatggccacgtggtccttagatggtgcgtggaagaggggattttaaagagcgtgtgtctgtgtgtgtgcactgttactccatacggatggtatctgctttatgtgtttgacaacggcaggtttttgtctgcttgc

SEQ ID NO: 255708 - DNA, 440 bp, Homo sapiens
  chr6:5783577-5784017
  hypo
gtttggactttggagtcaggcggttcaagttcaaatccagtgtccttgagcacccgctaagctccctgagccacacctaagagttaaatggcacagtgtgtgcaaaagctgctaaaatcaggccgagaagtcgacaatgaagggaagacggaagggattgtgaggtctgggaagtgtctggaaaaacgtcgcatcgcagaaggcctgtggtgttaggatatgcgttttggtttttgtccaggttcctggctcccagcacccacattccttgttagaatgctggggcgccttaggactcaggaaacagaatctctctctgaccttctgctgtttttctttcacttgcccacggcgggatgctaatctgtttgtggatcaaaaaaccctcactccacagaaagtcctgccccataccctagaggaaggaatgctgcttagag

SEQ ID NO: 255709 - DNA, 128 bp, Homo sapiens
  chr6:5784047-5784175
  hypo
tgctgggtttaagtcacacgctttctgtccggtcacacttccgcgtggttgtcaagcatgcccgtgcatcggagcctccataaaaacccacgaggacagggtccgggagcttgcggatacctgaaccc

SEQ ID NO: 255710 - DNA, 73 bp, Homo sapiens
  chr6:5839914-5839987
  hypo
acagctgaggggagcaggtacgtgggccctgcttggggctcatgggaagaccggagggaattacatgggattc

SEQ ID NO: 255711 - DNA, 177 bp, Homo sapiens
  chr6:6045510-6045687
  hypo
aaatgagagttgggacgtgctaagcagcacgctggtagcatccttcttacctacgtgcactgaagccctggatgcacctatcaatcatgcttctttacctactggtgcgccttacttaagtcaactaagaaataaagcaaaattaactataaaatcacaactcggaagcactatgaa

SEQ ID NO: 255712 - DNA, 113 bp, Homo sapiens
  chr6:6167628-6167741
  hypo
acacatgaacactaagtctgcgtgcctttgtctctgttccaggatgagacgctaagactgaccttgatgatgatctcagggatggttagcacggtggacttttgcttggccag

SEQ ID NO: 255713 - DNA, 207 bp, Homo sapiens
  chr6:6199260-6199467
  hypo
gtgttgtggctggagcatagcgtgtttgaacattcaggttcataggagaacggtgatggcaggcaatgcacgaaactaacaaatacatataacacttccttagtgcgaagtggtgttctaaaaccctcatggatgttaacacatctgatgtccctagcaccctataagaacagtactattggtcgggcgcagtggctcacgcctgta

SEQ ID NO: 255714 - DNA, 57 bp, Homo sapiens
  chr6:6250343-6250400
  hypo
aactcctgagaaatgacattcgcccccgcttgtgtcgctaattaaaaatcattttga

SEQ ID NO: 255715 - DNA, 340 bp, Homo sapiens
  chr6:6614432-6614772
  hypo
tccaagttcacagccgcagaagaaccacacccaaaattgctgagagtgtgaaccttgactgccttacaaacacagaccgcaaagggaggtaaagcttattcggctacaaaagatgttgcttgtctcttaagtagttccttcattgacgccaaatgtcttttatttataatcacgtctctttttttttttttttatttgagtgtatgcttgcattcccaccttcaaatcattgctctccgcccgagcacagagctcccgcgagcctgcaggcagcccaggactcctgcgcataccaggctctctggtcttggctctcccagccccacgccgcccactcaca

SEQ ID NO: 255716 - DNA, 128 bp, Homo sapiens
  chr6:6737010-6737138
  hypo
ttgaaaagcaatctcgattcccggccagactccctgcccacgtgttccccacccgcgtccccacagctccgtccgcctgctctggtcaacaccacagctgggccctgccccttcggaagctgatgctc

SEQ ID NO: 255717 - DNA, 208 bp, Homo sapiens
  chr6:6745316-6745524
  hypo
taatagtaggttcacgctctcactgactcaatagccaagccgcagaccttcatggtgtgcgttacagctcataaagggaacatagacctaaacagcaaacaacaacaagatttaccgcagaacaaaagaacagaactcgcacaatataaacacacaccacaaaagaaaaccgaccaggttataattgctagcgcggcagcctgctttt

SEQ ID NO: 255718 - DNA, 92 bp, Homo sapiens
  chr6:6753685-6753777
  hypo
tgtgtgccagaagggcggcacacctgagagggcatggaacttcctcgccgctcccccataccttgccttccacctggcggttcctcagctgt

SEQ ID NO: 255719 - DNA, 136 bp, Homo sapiens; identical to SEQ ID NO: 210621
  chr6:6780550-6780686
  hypo

SEQ ID NO: 255720 - DNA, 193 bp, Homo sapiens
  chr6:6824564-6824757
  hypo
ggagataaacagatgcgtggcattccacagctctgaggaaagatgccccttgaagctagggagaagcttttgtccatgctgccacctttaggggctttctcagaaattcccactcctacgctcagtgacgggatcatcagagcctaacagcttcttggccatggtcgtgcacagccatcgccagccaccctgg

SEQ ID NO: 255721 - DNA, 197 bp, Homo sapiens; identical to SEQ ID NO: 210622
  chr6:6898399-6898596
  hypo

SEQ ID NO: 255722 - DNA, 130 bp, Homo sapiens; identical to SEQ ID NO: 210623
  chr6:6901361-6901491
  hypo

SEQ ID NO: 255723 - DNA, 38 bp, Homo sapiens
  chr6:6934020-6934058
  hypo
catgagccaccgcgcccggcccataatagaaatatttt

SEQ ID NO: 255724 - DNA, 98 bp, Homo sapiens
  chr6:6969970-6970068
  hypo
tcttttccaagatcttacagtggaccataaccctaactcggctctgactgcaaagcctttcttcatctctggcccctcccttccgtggccctgccagc

SEQ ID NO: 255725 - DNA, 85 bp, Homo sapiens; identical to SEQ ID NO: 210624
  chr6:6971301-6971386
  hypo

SEQ ID NO: 255726 - DNA, 93 bp, Homo sapiens
  chr6:6982819-6982912
  hypo
ccattgcaacgcagacgccaaatattagcacaagaagtgccatcacagtcactctgagaagaaaggtgtattaaccatcggtcaatggagaaa

SEQ ID NO: 255727 - DNA, 136 bp, Homo sapiens
  chr6:6984868-6985004
  hypo
gctgaaacagcacacgcgcagagaggcttcaagggtacttgtattgggaaacgttgatgcgcccagtacagtcgggaaacaaaaggagatgaagctgagaaggcagaatgtggccagatggcgtttggactttgtc

SEQ ID NO: 255728 - DNA, 94 bp, Homo sapiens
  chr6:7058379-7058473
  hypo
agtgccaggattatgggcatgagccaccgtgcccagccagtctgtatttttaataagctttacaggtcactccggtatggatcattttggggaa

SEQ ID NO: 255729 - DNA, 98 bp, Homo sapiens
  chr6:7132660-7132758
  hypo
agtggtgggattagagacgtgagccaccacgcccagccactttttgttctttttaagcattttattcactgatgcctcccaagcgcttgccatagtgc

SEQ ID NO: 255730 - DNA, 336 bp, Homo sapiens
  chr6:7204199-7204535
  hypo
gtggtggtggctgcagtgtccggtgcatttcaccaggagcatcctgcgagccctgggagctgcctggctgacggcattcccacagcgagcctacagactgtgggtttacacttcatgccaggctgactttagatttttctaagggctggctttggaggtcagcacaggtgcttacgcattgtctaaccttcctccacaccctgggagagctggtgtgacctgccttccggacaagcatgactgaacccatacaacacctgaattactagaaggtgcctctgtactttacaggtggggccacaccaggaattgctcagttgccgccttgctgtcctc

SEQ ID NO: 255731 - DNA, 117 bp, Homo sapiens; identical to SEQ ID NO: 210626
  chr6:7204766-7204883
  hypo

SEQ ID NO: 255732 - DNA, 82 bp, Homo sapiens; identical to SEQ ID NO: 210627
  chr6:7230353-7230435
  hypo

SEQ ID NO: 255733 - DNA, 225 bp, Homo sapiens
  chr6:7237763-7237988
  hypo
tgatggtttaagcgctcgcgttggggcttgcagaatgctgtaggtcctgagtgcgcaggtaactcactgtggttacaggtgcttttacaaatccccttctaaagcagttattcgtggcagctaccaaataaatagaatcatttgctactttctatatagatggctggccaacaagtgtttttgaaacctgcgttattataaaatactaaacgggcccgttttcct

SEQ ID NO: 255734 - DNA, 156 bp, Homo sapiens; identical to SEQ ID NO: 210629
  chr6:7246886-7247042
  hypo

SEQ ID NO: 255735 - DNA, 209 bp, Homo sapiens
  chr6:7247340-7247549
  hypo
actcccccaaaagcgtggccagcaaggcagacaagaggaagaaggtctgcagcgtgtgcaacaagcggttctggtcgctgcaggacctgacccggcacatgcgctcccacacaggtaaccagggcaggccaggtccccggcccaacaagaggaggcgagccgggcacctctcctaggagctcccctgaagcggcgctggaggccaccga

SEQ ID NO: 255736 - DNA, 112 bp, Homo sapiens
  chr6:7267437-7267549
  hypo
gtctctgctgcaccgcttaggagatggcatcaccctgagcaagggaccctggcggggaccactgggcggcgtgacccaggctcacccatcttcagatcggggcactgggtgt

SEQ ID NO: 255737 - DNA, 180 bp, Homo sapiens
  chr6:7268060-7268240
  hypo
tgcagcttcctgggtcggctccctgagattctgctggagtaggtatgtgtgtgtgttctgggtggttctgatgcgtgtggctcacaggctgagtgtgcgatgcctctctctgcctgtgactctgtgtgcacgtgtgtgcctctgtcaggtggcaagtgagcactgcgtctccgccctctc

SEQ ID NO: 255738 - DNA, 134 bp, Homo sapiens; identical to SEQ ID NO: 210630
  chr6:7269314-7269448
  hypo

SEQ ID NO: 255739 - DNA, 55 bp, Homo sapiens
  chr6:7271971-7272026
  hypo
ggtgcctctgggatacgggtgtttggctgggtctaccgttcgctggagagagtgg

SEQ ID NO: 255740 - DNA, 102 bp, Homo sapiens; identical to SEQ ID NO: 210631
  chr6:7294551-7294653
  hypo

SEQ ID NO: 255741 - DNA, 170 bp, Homo sapiens
  chr6:7415147-7415317
  hypo
gaatgtgaatcatcacgtggtccagcgtcttcacactgtcgacactccccacccgttagtcacttagtagccttcttggctatcagttcagctgctgtgatgttgtggtgcttgtgtgcaagtaacccttactttgcttaataatgaccgtaaattacaggagtagtgat

SEQ ID NO: 255742 - DNA, 202 bp, Homo sapiens
  chr6:7691935-7692137
  hypo
gctgtctcagatttctgattcctcattcctatttggccagcctgggtcaggtgtccaccttgggatgagcagaatgcactaacacagataaggctgcctgccaggcccctccgtgtggtgagatgacggcctggtaagcacgtagttcttagagcattgaggctaagatggcccccactgaaggcaccgtgaaaaggggatt

SEQ ID NO: 255743 - DNA, 37 bp, Homo sapiens
  chr6:7767221-7767258
  hypo
tttgttttttttttttgagacggagtctcgctctgtc

SEQ ID NO: 255744 - DNA, 79 bp, Homo sapiens
  chr6:7879856-7879935
  hypo
tcacaggtggtgagcgataaaaggtagcttccatatgcaggtggcactacttccgcaggagcaccgtgggctcctggag

SEQ ID NO: 255745 - DNA, 322 bp, Homo sapiens
  chr6:7880271-7880593
  hypo
gaatgctccttcccactcaacgcacacatgaatgcaaccaaccacgcgattgtgcagaccttggtgagctctcggagactttgttttgtaagtgggagtaagccaagaccaggtgtcatttctaaggtaccttctccccttctgttttggaacaggttcaccttatgaaccccgagtatgtccccaaaccgtgctgtgcgccaactaagctaaatgccatctcggttctttactttgatgacaactccaatgtcattctgaaaaaatacaggaatatggttgtaagagcttgtggatgccactaactcgaaaccagatgctg

SEQ ID NO: 255746 - DNA, 389 bp, Homo sapiens; identical to SEQ ID NO: 210633
  chr6:7882610-7882999
  hypo

SEQ ID NO: 255747 - DNA, 559 bp, Homo sapiens; identical to SEQ ID NO: 210634
  chr6:7883236-7883795
  hypo

SEQ ID NO: 255748 - DNA, 534 bp, Homo sapiens
  chr6:7884119-7884653
  hypo
acccaagcacaggaccgacttgctggcatggccctttcagaaaggaggttatgttgaaatgattcttagattcagccactgcattttataatgctggcttatgtgtgaaaaatgagcgactcgggtatttatggcaaaggctacagaccactggtcaatcatcaagagtcgcggtgtgggaagccccacagtctatggcgtggggtctgttacttcacggccttgttactcagacagcaaggcctgaaaacctgcactgaaacatggatactaactacaaagcgggcgaagaagaatgccttccctttgagagaggatctcttttgcttctccaaacaaacaactcaaagggacataaaaaccacattgttgagaagatgagagcagagtgagttatcgtggttgaggcacagttcccttgggatctgcccccatactgagagctcccataagcatccatccaagtacccaccgaatacttgctgcagatattccgttcagcagtgcagtctacttcggcgatcttgacccccg

SEQ ID NO: 255749 - DNA, 203 bp, Homo sapiens; identical to SEQ ID NO: 210636
  chr6:7885608-7885811
  hypo

SEQ ID NO: 255750 - DNA, 355 bp, Homo sapiens; identical to SEQ ID NO: 210637
  chr6:7887534-7887889
  hypo

SEQ ID NO: 255751 - DNA, 890 bp, Homo sapiens; identical to SEQ ID NO: 210638
  chr6:7888466-7889356
  hypo

SEQ ID NO: 255752 - DNA, 69 bp, Homo sapiens; identical to SEQ ID NO: 210639
  chr6:7889726-7889795
  hypo

SEQ ID NO: 255753 - DNA, 217 bp, Homo sapiens; identical to SEQ ID NO: 210640
  chr6:7890517-7890734
  hypo

SEQ ID NO: 255754 - DNA, 151 bp, Homo sapiens
  chr6:7891503-7891654
  hypo
tgggtgaggtcgaacgtggacggtctccaagttcgtccagtgaacattctacaaggctctaccccatctctttgcagaacgggctctggggctgccaattcagatttggccatctcttcaaaataaacaaagcagccgaggccataattta

SEQ ID NO: 255755 - DNA, 122 bp, Homo sapiens
  chr6:7891859-7891981
  hypo
aatcttgacagtttcggaatgttcaaggcccagagccagctgctcccaggttggagccagggctttgcagtgaccacaccacggagcgaagaacttgataaagtggtcgcctggagtggaga

SEQ ID NO: 255756 - DNA, 97 bp, Homo sapiens
  chr6:7892315-7892412
  hypo
aaaaaatgaagggacgcttgaatgagcctcggcacttggcagccctaaggaatggacggacccaggctctgcctgtcatggtcgaccacatcccaaa

SEQ ID NO: 255757 - DNA, 195 bp, Homo sapiens
  chr6:7893046-7893241
  hypo
tgtaaattgcccagtctcgggtgtgtattcatcagcagtgaaaacggactaatacaagtggtttccacaaatgtcaggcaagtgccttcttggagaagggagggcgggctgtgccctgcatgggacacgggaagctggcagttttatttcttgaactggacagtagttacagtgtgaccacgctataaaaattca

SEQ ID NO: 255758 - DNA, 271 bp, Homo sapiens; identical to SEQ ID NO: 210641
  chr6:7893706-7893977
  hypo

SEQ ID NO: 255759 - DNA, 210 bp, Homo sapiens
  chr6:7898572-7898782
  hypo
gccaccacacccagccgagttgagagagtctttgcaggtgagggatggaagcactgaatcagcagccaagtttctgattaggtcatcagagaagatggggcagagcggaagagccgcacagacacactggaaactggcaacagtaagcggcaaagctccaaaaggaccaccacagaccaccttcaaatcagtgggcgcttagctgataca

SEQ ID NO: 255760 - DNA, 300 bp, Homo sapiens
  chr6:7911688-7911988
  hypo
tactgtgccctcatttatgccggttactaaaatgaatgacagcacgcctgctatggctgaactcagcctgtggaatggcccgaaggcatccctgcccagcgactcataactcgcacctgcacacacaccttacagcagatggtaatcgaaagctccagccctaccccggggatctgaagctaaattagaatcaccgggttgctctccgggatcctgcctgctctttgattatcctcaatccaggaagccccaggtagttaactcctggcttggcaacaggggacgcgcccactgtctcac

SEQ ID NO: 255761 - DNA, 202 bp, Homo sapiens
  chr6:7919989-7920191
  hypo
caaaggacttagagcgaatgaataagaaggcagtacagaatgagaacactggcttttacgaatgagaagggaagtcatcggagggttttcagaagaaacacgacaggatctggcttccaattatttctacagcatggctctgagagctgtagcgaggaatgcgaagggggcaaggatagaagggaggcgaccactccgggag

SEQ ID NO: 255762 - DNA, 90 bp, Homo sapiens; identical to SEQ ID NO: 210643
  chr6:7976897-7976987
  hypo

SEQ ID NO: 255763 - DNA, 46 bp, Homo sapiens; identical to SEQ ID NO: 210644
  chr6:7986658-7986704
  hypo

SEQ ID NO: 255764 - DNA, 180 bp, Homo sapiens
  chr6:9041150-9041330
  hypo
agggtgcgccaggtcccccagcagtgccggccgacggtgagtctccccaccaccccccaccgccgtgggctcctgcgcgacgcgagtttccccgacgagcgcagccccctgattcagggcagccaattccatcgatctcccaaggactgaaaagtgccggcgcatggcgcgggaagggca

SEQ ID NO: 255765 - DNA, 492 bp, Homo sapiens; identical to SEQ ID NO: 210645
  chr6:10319602-10320094
  hypo

SEQ ID NO: 255766 - DNA, 43 bp, Homo sapiens
  chr6:10491329-10491372
  hypo
gggattacaggcgtgagccaccgcacccagccagcatctccct

SEQ ID NO: 255767 - DNA, 99 bp, Homo sapiens
  chr6:10527664-10527763
  hypo
taaataaaataaaataaaaagttgcttgtctactacatacagacaatgctaggagccagaaacatgaggaatacatgagctcggcgccaatggaacatg

SEQ ID NO: 255768 - DNA, 148 bp, Homo sapiens; identical to SEQ ID NO: 210646
  chr6:10538235-10538383
  hypo

SEQ ID NO: 255769 - DNA, 41 bp, Homo sapiens; identical to SEQ ID NO: 210647
  chr6:10539696-10539737
  hypo

SEQ ID NO: 255770 - DNA, 31 bp, Homo sapiens
  chr6:10542886-10542917
  hypo
ttcatccgtgttatcgcgtgaatcagtactt

SEQ ID NO: 255771 - DNA, 35 bp, Homo sapiens
  chr6:10549001-10549036
  hypo
ttttttttttgagacgaagtctcgctgtcacccag

SEQ ID NO: 255772 - DNA, 257 bp, Homo sapiens
  chr6:10560601-10560858
  hypo
gcatgagccactgcgccgggctgagctcttctattttcaatgtcatgttttaagaggaaaaattcttctgtccgtacagggtaaacatctttttgcaaacgtgcaagtgcaggtggtgctgttcatttcttccctcaaagcgaccgcctccctttctcctaaataccttaaattaaaatgtgttagcaagaccctgtgcaggcatttcaggtttcccaaaacacccccaagagcaatgtgaccgagaaaatgattag

SEQ ID NO: 255773 - DNA, 84 bp, Homo sapiens
  chr6:10595775-10595859
  hypo
ctgggattacaggcgtgccactctgcccggccggttggttgggttgctttcttttcttaagccgtaccatgttccagaaaggac

SEQ ID NO: 255774 - DNA, 180 bp, Homo sapiens; identical to SEQ ID NO: 210648
  chr6:10693035-10693215
  hypo

SEQ ID NO: 255775 - DNA, 120 bp, Homo sapiens; identical to SEQ ID NO: 210649
  chr6:10693275-10693395
  hypo

SEQ ID NO: 255776 - DNA, 35 bp, Homo sapiens
  chr6:10700561-10700596
  hypo
attacaggcgtgagccaccgcgccctgccaaaaaa

SEQ ID NO: 255777 - DNA, 87 bp, Homo sapiens; identical to SEQ ID NO: 210650
  chr6:10735102-10735189
  hypo

SEQ ID NO: 255778 - DNA, 250 bp, Homo sapiens
  chr6:10785248-10785498
  hypo
cgtatacaatttcccgtcaccctagtgtcaggcacagaaaataggtatttgtggagacatgcctgtgtctcagccagaacagacttgtgcagtggctaagcacctcgctagctgtttagtggtgtttgttagtattaagactgactctctgcctgttggtccctaactcccacagtcctgtttctgtgtacggactgaggactttctgcttcgaggcttagttctgtctcattcccgaggcctgtccctg

SEQ ID NO: 255779 - DNA, 83 bp, Homo sapiens
  chr6:11029460-11029543
  hypo
aaaaaaaaaaaaaaaaaaaaaggtaggctggcattcagtgtggttcactgcaaagggcaggagttttacgcaggttctagttt

SEQ ID NO: 255780 - DNA, 90 bp, Homo sapiens
  chr6:11052342-11052432
  hypo
atgggatctccttatgttgcccagatggagtcctgaactcctgcgctcaagggatcctcctgccttagcatcctgcggagccaggattac

SEQ ID NO: 255781 - DNA, 464 bp, Homo sapiens
  chr6:11273700-11274164
  hypo
tgaatcatgacaagtgccaccgatgctgaggtgcgaacggccggggactgcgcctatctgtgtgcgttcacctgtgttgccctccacacagtccccgcctgtggtctagccttctactccctttccggccggcagattccgtcttgccagtggcttgatatgacttcatttatttgaggttgtgagtcaatgttatcaagatccgaattaccctgggcattgttcatacaatggaaggccgaaatggacacccatgacatgtagggcaaccgtgagtagagcctcactcaatatgagattgttccctggaaaattcctgtgttcacccgacagcaagtgattcagatgtcaagattaaggaaaacgactatgggggtggacaggtactttgacgtactctgacctctttttataggattggtttcttcttcattagcattttcccaagtcgagcaaagaaatgt

SEQ ID NO: 255782 - DNA, 60 bp, Homo sapiens
  chr6:11288375-11288435
  hypo
gctcagtcaaaattacgcaggctggttcagctgcagttcaagtggcgtatggcgtgtggc

SEQ ID NO: 255783 - DNA, 65 bp, Homo sapiens
  chr6:11324665-11324730
  hypo
tcatgcatggtgccaccccacgtgcagggccagcttcatggcacgtcacctgtgtgcttgcatag

SEQ ID NO: 255784 - DNA, 63 bp, Homo sapiens
  chr6:11633530-11633593
  hypo
gcgctcctcccaggcggctcaggctcaatgaccttgccgccaagcatccgctgtgcccagctt

SEQ ID NO: 255785 - DNA, 105 bp, Homo sapiens
  chr6:11711665-11711770
  hypo
tccgtcatttgactcggagcatgtcattttctcccattttagaccgtgtacagtcaaaccctgtgaaaggactcacagatagcggccctgcgtgtatgagtgggc

SEQ ID NO: 255786 - DNA, 47 bp, Homo sapiens
  chr6:11789746-11789793
  hypo
cttgactggatcaccgatcttatatttcaaggggatttacaggaatt

SEQ ID NO: 255787 - DNA, 73 bp, Homo sapiens
  chr6:11789823-11789896
  hypo
tacacttgctctctgtctatttactcctcctccttctcactaccgctcccaccttcagcgcgccattcaacag

SEQ ID NO: 255788 - DNA, 116 bp, Homo sapiens
  chr6:11926204-11926320
  hypo
gctgcccactaagccgtcatcccgtggcgctgcacccactgcttctccccagctcctctgcataggtctgcccttcactcccacgcagaacacgtggctcacgagatgttctgatg

SEQ ID NO: 255789 - DNA, 37 bp, Homo sapiens
  chr6:12029574-12029611
  hypo
tcttttgtggacagcgtgttgccgcgattgctttttc

SEQ ID NO: 255790 - DNA, 646 bp, Homo sapiens
  chr6:12222841-12223487
  hypo
caggcaagcctaaccctgcccgggcctgtgtctgatggcgaggcttggtatatactacaagcaccttgtcattagggttttatcgtgctatggatatgctaacgatacatttataaacaaagtttctaagtagtgcaattgccgaggaaaaactgattgatttatacaagtgtggattttttttagacatcccgttccatgccttagggtttctagtgttctctagctgggcaagtccagactcactttggtcttgttctgggtgttttccgaggctgtgctcgctctgtgtggatgacatgagtgtgtgtggagtttatggctgtgataaaatacagctctggcatttgctgtggttccctatcgaaagccacgctttctcggcactggttgcctcccactgtagaatctgaaaatctcagataatcacattcctggtgtgtttgtagctcagcagaggaatggcacccaatcctgggcaaaggaatgtgaaggtttctggaaaacaggttttcttccccaattttcaaagagaggtttcttccggtccctgccttcgttcgagggagcacgtgatacttggcactgcaaccacagtcttgtgaacctgtgggagcagcaccaaggaccacgaagaggctgcccc

SEQ ID NO: 255791 - DNA, 95 bp, Homo sapiens; identical to SEQ ID NO: 210652
  chr6:12287832-12287927
  hypo

SEQ ID NO: 255792 - DNA, 154 bp, Homo sapiens
  chr6:12287987-12288141
  hypo
ggcgcgcgcgcgcgcgcgcaggcacacgtcttgcaaattcaggattcaaagagacaggggcaccattatatttggcacggtggggcccttccaggtctgaaatcctgcattcttccttactatttactttccccgagctcgagaagggccaggt

SEQ ID NO: 255793 - DNA, 82 bp, Homo sapiens
  chr6:12288540-12288622
  hypo
tgttgggggggaggcgctgcttggaacctgtgaatgtgacatcagctctcctctcctctcccaaggtcggctttggagaggg

SEQ ID NO: 255794 - DNA, 265 bp, Homo sapiens
  chr6:12338229-12338494
  hypo
cacttacattactacggtatataggcaatactgtaggcaattagaacaccgtgttaaggatttgtgtatctagacagagaaaaggtacggtaaaaatacagtatgaggatctcacaggactctcgtgtatgcggtcagcattgactgaaatatcacgtggcatctgaccgtatttacaataacgggaggcagtggacactatctgactcctgaaatcagatcacctaggtgactccttcaaaactgtggatgtttggctgggcgt

SEQ ID NO: 255795 - DNA, 82 bp, Homo sapiens
  chr6:12456683-12456765
  hypo
tacttgagaagagcaagtccgcccttgggctgagttcaagtttgcttctaaagaaatagtgtgggagcgattaagcaggaag

SEQ ID NO: 255796 - DNA, 105 bp, Homo sapiens
  chr6:12965812-12965917
  hypo
gaacatacagtgagcgtggctcaggcatgagtgatagtgctgttggccgtgtggcttcaatgttgatgaatcaacggtatgtgttaaatccggcatggttcaaca

SEQ ID NO: 255797 - DNA, 296 bp, Homo sapiens
  chr6:13295931-13296227
  hypo
ctgtggccagtccccgcagtgtggcaggcctgccactgtgcgaccgaggccgtcatgcatgaagcacatctggggctttatggctcaacacctgagcctcctggaaggccttggccgcctcactgaagccccagcgtaccggctctgcaaggccctggggttaaaatagcaaaaatgccatctggcaagaggctggctttgttcagactgtgtgctgcgttgtcgctggggtggtggggacattttccaagccaccattagaatatgagctgtcacctgggcgagccccactcccc

SEQ ID NO: 255798 - DNA, 183 bp, Homo sapiens; identical to SEQ ID NO: 210653
  chr6:13296596-13296779
  hypo

SEQ ID NO: 255799 - DNA, 258 bp, Homo sapiens
  chr6:13318558-13318816
  hypo
cacactcagaagcacgtctgcctgaggctgcagtaaaggtgtctcagcttggaacacagacaagctgagtagcggtgaggcggaacctataccctgtcatctcaattcctaatctaatttaatttgatatataatttaagaacttgtgtagtactatcaacttcactttgccaataagtgaaatttaaagatgattgcttaaattattccaattattttttagggaccttctctctcgataaacgtaagaaatataaa

SEQ ID NO: 255800 - DNA, 135 bp, Homo sapiens; identical to SEQ ID NO: 210654
  chr6:13333029-13333164
  hypo

SEQ ID NO: 255801 - DNA, 100 bp, Homo sapiens
  chr6:13351756-13351856
  hypo
aacagcataacagccgtctgccgacccctgacaggcttaggaaggagccctttcataccgctacagctccgtgttagcggccgcccgtggagagggaact

SEQ ID NO: 255802 - DNA, 172 bp, Homo sapiens
  chr6:13386517-13386689
  hypo
aggagcctcctatccgtcaggtccaaatcccccttttcatttataagcaagcaaactgatacacctgtgcactagatacacaccgcgtaggtgaaagctgactccaggtagcacctggcctgactgtgaaggaatctcgcgtacttcggaggacatgcggctgtccctgcca

SEQ ID NO: 255803 - DNA, 83 bp, Homo sapiens; identical to SEQ ID NO: 210655
  chr6:13397453-13397536
  hypo

SEQ ID NO: 255804 - DNA, 389 bp, Homo sapiens; identical to SEQ ID NO: 210656
  chr6:13456727-13457116
  hypo

SEQ ID NO: 255805 - DNA, 387 bp, Homo sapiens
  chr6:13510021-13510408
  hypo
gtcgtgattaaaagcgataaagtgtattcactcagtgggatactaagtagcaatgagaacgaattaactacaactactagagatgatagacaaatctcacaatcagtgaaagaagccaaacacaaaagagttcatactgtgtgatttcatttataggaaaccaatttatggcgacatgggtcagaatcacatgcgaaacacagggctgattgggaggagttttgagcttcccttctggggtgctagtcgtgtttttttcatctggattattagtcacacgggcgtatttactttgtaatagtttgccaaggtgtgatgattggtgcacttttctgttacatacatacgtattttagacaatctccctctgtcctccagggtggagta

SEQ ID NO: 255806 - DNA, 37 bp, Homo sapiens; identical to SEQ ID NO: 210658
  chr6:13631319-13631356
  hypo

SEQ ID NO: 255807 - DNA, 84 bp, Homo sapiens
  chr6:13780584-13780668
  hypo
cctagtttgaggcacgaagaaggatactacatcagtctgaaaacagtctgggcatgccgggcgtggtggctcatgcctgtaatc

SEQ ID NO: 255808 - DNA, 210 bp, Homo sapiens
  chr6:14002319-14002529
  hypo
aaaaaaatggtgaagtttaacgttagtcggttttactaataactgtattacaaaagcttggtactacatgaagtgtaataattggagctattcaagtaacggaaggtgttgccccgagaacagtgaggtcccatcactggacgtgttccacggagactgctgaaggtgagaggtgacagcgggctggcagccctggctcgctctcggcgc

SEQ ID NO: 255809 - DNA, 89 bp, Homo sapiens
  chr6:14002889-14002978
  hypo
agtctccctcccgcccgcccgcggtgggctcctgcgcggccctagcctctcagacgtgtgccgtccccgctccacggctcccagtccca

SEQ ID NO: 255810 - DNA, 100 bp, Homo sapiens; identical to SEQ ID NO: 210661
  chr6:14099382-14099482
  hypo

SEQ ID NO: 255811 - DNA, 41 bp, Homo sapiens
  chr6:14116492-14116533
  hypo
aaaaaaaaaaaaaaaaaagagggtctcgaaaatgttagtac

SEQ ID NO: 255812 - DNA, 40 bp, Homo sapiens
  chr6:14130664-14130704
  hypo
cagaaagcaagccgcgcacggtggctcacgcctgtaatcc

SEQ ID NO: 255813 - DNA, 94 bp, Homo sapiens
  chr6:14139162-14139256
  hypo
aagagataataacagcgacttctggacgtagagacagcagagcgaggccatgtgttcaacctaacagcacagtgagagtcgagagtcttggaat

SEQ ID NO: 255814 - DNA, 156 bp, Homo sapiens
  chr6:14203367-14203523
  hypo
gtccacatggcaaatcattacgcaccaactcgtcactctccgacgctgcagtaaactgcctgcacttgccacctcttcgtctgcggcccggctcataagccttcttcttgatcacttggtttcttgcctactgtcgggtggaaggaggccacagac

SEQ ID NO: 255815 - DNA, 172 bp, Homo sapiens
  chr6:14273201-14273373
  hypo
gcccactggaccctacgctccttgagaacaggggtctcccttgttctttgttacatcctcaatgccaggcatgataagggcttgatgaagctttgtccattggatctttctgggtttgccagccttcctcgtctacaccacagccacggtctcgtatcgacaggatctggat

SEQ ID NO: 255816 - DNA, 144 bp, Homo sapiens
  chr6:14274907-14275051
  hypo
gcagagtgcagtggcggagcccacgctggggtgcgtgtctcaacaactggcctgggtactgctttgagcctcagtgatgagtcactttattcattcatttatatggcaaattgtatgaagcacctgtgacgtgcaggcagtgtt

SEQ ID NO: 255817 - DNA, 434 bp, Homo sapiens; identical to SEQ ID NO: 210665
  chr6:14282463-14282897
  hypo

SEQ ID NO: 255818 - DNA, 148 bp, Homo sapiens; identical to SEQ ID NO: 210666
  chr6:14324570-14324718
  hypo

SEQ ID NO: 255819 - DNA, 36 bp, Homo sapiens
  chr6:14726132-14726168
  hypo
cgtgagcccaagaacgaccttcgtattcaagtggca

SEQ ID NO: 255820 - DNA, 136 bp, Homo sapiens
  chr6:14772274-14772410
  hypo
aaaaaattcaagggcacagactgcgccctgctggctctacacctatagcatctcgtcctgcccttcccgagtctgtggctcttgggagtctcattccctcctttccagggtgtgcttcccccgtgggtggtctcac

SEQ ID NO: 255821 - DNA, 36 bp, Homo sapiens
  chr6:14777340-14777376
  hypo
tgggccaggcgcagcggctcacgcctgtaatcccag

SEQ ID NO: 255822 - DNA, 36 bp, Homo sapiens
  chr6:14916087-14916123
  hypo
gcatctcctctgcctcggcgcccactctggcggcgt

SEQ ID NO: 255823 - DNA, 31 bp, Homo sapiens
  chr6:14930077-14930108
  hypo
ttttgttttttcttttgagacggagtctcgc

SEQ ID NO: 255824 - DNA, 32 bp, Homo sapiens
  chr6:14934115-14934147
  hypo
attactgggattacaggcgtgagtcaccatgc

SEQ ID NO: 255825 - DNA, 81 bp, Homo sapiens
  chr6:14941362-14941443
  hypo
gtgctgggattacaggcatgagccaccgcgcccagccgaggagtgcattattccactgtcgcatgcatattcaaaggctca

SEQ ID NO: 255826 - DNA, 87 bp, Homo sapiens; identical to SEQ ID NO: 210667
  chr6:14966820-14966907
  hypo

SEQ ID NO: 255827 - DNA, 102 bp, Homo sapiens
  chr6:14986858-14986960
  hypo
cttgagagggccacatgtacggtgtgtttattgaagttgtgcgcatgttgacttgaggtgtcttttgctcaccagtcgagcgttcctggagggaggtcatat

SEQ ID NO: 255828 - DNA, 39 bp, Homo sapiens; identical to SEQ ID NO: 210668
  chr6:15083849-15083888
  hypo

SEQ ID NO: 255829 - DNA, 209 bp, Homo sapiens; identical to SEQ ID NO: 210669
  chr6:15227670-15227879
  hypo

SEQ ID NO: 255830 - DNA, 42 bp, Homo sapiens
  chr6:15263032-15263074
  hypo
tataggcgtgagccaccgtgcccggcccgtttggctattttg

SEQ ID NO: 255831 - DNA, 43 bp, Homo sapiens; identical to SEQ ID NO: 210670
  chr6:15282318-15282361
  hypo

SEQ ID NO: 255832 - DNA, 43 bp, Homo sapiens; identical to SEQ ID NO: 210671
  chr6:15282481-15282524
  hypo

SEQ ID NO: 255833 - DNA, 120 bp, Homo sapiens; identical to SEQ ID NO: 210672
  chr6:15283483-15283603
  hypo

SEQ ID NO: 255834 - DNA, 38 bp, Homo sapiens
  chr6:15469670-15469708
  hypo
ttctttcttttgtgacggagtctcgctctgtcgcccag

SEQ ID NO: 255835 - DNA, 149 bp, Homo sapiens
  chr6:15501255-15501404
  hypo
aactgcccaggaccggctggccaagctgcaggaggcctactgccagtacctactctcctacgactccctgtccccagaggagcaccggcggctggagaaggaggtgctgatggagaaggagatcctggagaagcgcaaggggccgctgg

SEQ ID NO: 255836 - DNA, 128 bp, Homo sapiens
  chr6:15503289-15503417
  hypo
gtttaaatccaccccgtcaagggtatttctagatttcatcacggaaatatagtggagctctgcgtggtggccatggcgaagcccccagcagccgtgtgcccacgggtagggaccgtgagcacgcaact

SEQ ID NO: 255837 - DNA, 192 bp, Homo sapiens
  chr6:15512506-15512698
  hypo
tgtcgtctgcttcccgggatcctttgtgtccaaagtgtgctgtgggtacagcgtgtctgaaaccgtgcactttgctaccacccagtggacaagtatgggctttgagaccgccaaggtgagcagagccggcctcctcccgcttgctgcccccgcatccctgtgagtgccgtgcgtgagcgcacacagaagcat

SEQ ID NO: 255838 - DNA, 672 bp, Homo sapiens
  chr6:15513371-15514043
  hypo
tgtctgcagggaggccggtgtggggtgcgtgtgtcccctctgctggtgagcatggcaggccgtcactaaaggtgcgggccgtctcccgtgtctggcagggatacagagctgcggcagcgcaggcagctgttcgaggctggcctccactcctccgcacgctatggcagccacgatggcagcagcacggtggcggacgggaagaaaaagcctcgaaagtggctgcagttggagacgtcagagaggaggtgtcagatctgccagcacctgtgctacctgtccatggtgagcccgcctggccctgccggcgccctcgcatgtagtgcttggcctgagagctccggggttgcccccagaagagggagggcgctctctgcccaggagacctgctgtgctcccatctctggagccggctgtgggacctcggcggagcttctggccgccggaggtggctgcctcacccacagtgaccaggccacacagaggctgtccctctgttctgcccacgcgtggccctccctcggtcctgcagtgcgtccttcctccctggggagcaggtggcctccctctccgccctactttgtcactccagcccccacgcactctgctcttacccattctttctgaggcagtgaggggcgggtttccagtactgggcagcgtctgccattccct

SEQ ID NO: 255839 - DNA, 41 bp, Homo sapiens; identical to SEQ ID NO: 210676
  chr6:15518530-15518571
  hypo

SEQ ID NO: 255840 - DNA, 53 bp, Homo sapiens; identical to SEQ ID NO: 210677
  chr6:15523495-15523548
  hypo

SEQ ID NO: 255841 - DNA, 300 bp, Homo sapiens
  chr6:15525179-15525479
  hypo
tgttttgagtaggacgctcagcctgtctcaaagaggccaacattcctgcagcaacagttagcgaccttcctccctgccagccacagctctgcttcctgcctacaggtgccctgaaccttcccggcaggcgcactcctctaattgcaagtggagtttccactggccttggaacatttctcgggcctaacggcagaaggggtttgacctacatctgtaagctgtaagagctccctgcagtggaagcacagactaggagaaaacaaaacccagcccaccagcagacggcgaccccatgaaaca

SEQ ID NO: 255842 - DNA, 41 bp, Homo sapiens
  chr6:15530495-15530536
  hypo
tctgcacagacgtgcgatgagatgcccgattcccgtgtgtg

SEQ ID NO: 255843 - DNA, 31 bp, Homo sapiens; identical to SEQ ID NO: 210678
  chr6:15907074-15907105
  hypo

SEQ ID NO: 255844 - DNA, 268 bp, Homo sapiens
  chr6:16197031-16197299
  hypo
aaccaagccgaggccgctccacagagaaagcatttagaccacccctagccaaagggaaatcagaatcgcccatcccagcagttcagaattgagttctgatgtgtccggaattgatgggttgtctcactgacttcaaggaaaaagccgcagatctccgtggtgggtgctaaaattcttaaaggtggtgtgtctggagtatgttccttttcatgttcagacgtgtgcagtttacgggggtggggaggttctaggtctcgctggctcagga

SEQ ID NO: 255845 - DNA, 146 bp, Homo sapiens
  chr6:16197607-16197753
  hypo
agcccctcactgcccggggtggcagagcaggctggctgctcccagtgcggggcggtggggggggcgcagtggggcggggggggggcacgcccacccggaactctagctgattggtccactttacagacagtcgattggtctgtttt

SEQ ID NO: 255846 - DNA, 120 bp, Homo sapiens
  chr6:16218402-16218522
  hypo
accggggttgctggtggagctgcctgccagtcccgcaccgtgtgcctgcacaccggggctgtaaatggagctgcctgccagtcctgcatcatgtgctaagtccctcattgcctggggcta

SEQ ID NO: 255847 - DNA, 146 bp, Homo sapiens
  chr6:16298907-16299053
  hypo
ccggtctgctcgctgaatttctaatgagcttgaattacaggaagtaaaaataaattttccacttacagaccactaaccagtttagagcaaatctgtaaggagtgtatagattatgccacacgagcgcatgaagctaccacatgttt

SEQ ID NO: 255848 - DNA, 139 bp, Homo sapiens; identical to SEQ ID NO: 210679
  chr6:16322047-16322186
  hypo

SEQ ID NO: 255849 - DNA, 45 bp, Homo sapiens
  chr6:16733498-16733543
  hypo
aaccacaagtcagccaggcacggcagctcatgtctgtaatcccaa

SEQ ID NO: 255850 - DNA, 42 bp, Homo sapiens
  chr6:16841589-16841631
  hypo
ttgcacctttaggcaaaacacgtctcttcattcctttaactc

SEQ ID NO: 255851 - DNA, 168 bp, Homo sapiens
  chr6:17032419-17032587
  hypo
aaaaatagacccgccgcctcaccaccgtgcaaaacaggcgccggcccgctgctgtgcgctggttgcagcatgaattcgctgggcagggatttgcagtatagacgtagagttgttctggcctctgatgctgcgcccgggccttaaatggaatcgcggtctgtgataact

SEQ ID NO: 255852 - DNA, 204 bp, Homo sapiens
  chr6:17508425-17508629
  hypo
tacaactggggtgtacgcagagacacctggaagactagcagccattcagagtgctgctgaaagtatagatgagtctaaaccaaggggctttgcctggtgaaccagcgtgaaaggaccttgcgttcgacagcacaagtaatagatcccagagtaacttaaactggagtcagaatagaaaataggcccaaacggagacatggcaga

SEQ ID NO: 255853 - DNA, 120 bp, Homo sapiens
  chr6:17756939-17757059
  hypo
caaaaaaaaaaaaaagaatcttcatggtcacctagcgatgatttcctttgtatcctattagatgttacaaatcttctttaaatggatcgtagccttgttccttaaagaacgtagtgtcgg

SEQ ID NO: 255854 - DNA, 42 bp, Homo sapiens; identical to SEQ ID NO: 210683
  chr6:17761882-17761924
  hypo

SEQ ID NO: 255855 - DNA, 76 bp, Homo sapiens; identical to SEQ ID NO: 210684
  chr6:17788886-17788962
  hypo

SEQ ID NO: 255856 - DNA, 95 bp, Homo sapiens; identical to SEQ ID NO: 210685
  chr6:17797155-17797250
  hypo

SEQ ID NO: 255857 - DNA, 254 bp, Homo sapiens
  chr6:17799566-17799820
  hypo
accggggcagccaccgtagactcacactggtcccagaatgtgtattgacagaagacaaaatttgagaggtttaagggcagccccgttgcttctttaatttttacctgaagagataaacaatacaaataaaactccaatgaacactaaacattctttcatttcagctacctcaaatttaagagtaagcgatgaaacaaattggtcatccatttgacatgtgaaaatattatatctgacaccgtgacactaagggt

SEQ ID NO: 255858 - DNA, 67 bp, Homo sapiens; identical to SEQ ID NO: 210686
  chr6:17800168-17800235
  hypo

SEQ ID NO: 255859 - DNA, 94 bp, Homo sapiens
  chr6:17801739-17801833
  hypo
aacaacaaaaacaacaacaacaacagcaacaaaactcactaataacagcatagaatagttgctataatagatatatgtgcgagttgttatggga

SEQ ID NO: 255860 - DNA, 51 bp, Homo sapiens
  chr6:17837137-17837188
  hypo
tctcgacttcctcccgcagttctcggatcacttttgcgttggggtcctcat

SEQ ID NO: 255861 - DNA, 36 bp, Homo sapiens
  chr6:17934558-17934594
  hypo
ttgcttaagtgcagacgagagcggctgaacaccatc

SEQ ID NO: 255862 - DNA, 329 bp, Homo sapiens; identical to SEQ ID NO: 210687
  chr6:17940369-17940698
  hypo

SEQ ID NO: 255863 - DNA, 38 bp, Homo sapiens
  chr6:18024631-18024669
  hypo
ttatgcagggtctcacgatgctgcgtgtagatattcac

SEQ ID NO: 255864 - DNA, 120 bp, Homo sapiens; identical to SEQ ID NO: 210688
  chr6:18030874-18030994
  hypo

SEQ ID NO: 255865 - DNA, 98 bp, Homo sapiens
  chr6:18035943-18036041
  hypo
tcgagtacataccaggtactcgataaatctcaagtaatatgtgaatgaacaaataaacgtttacttatttcatgagcggactttgtgtacaaagcact

SEQ ID NO: 255866 - DNA, 104 bp, Homo sapiens
  chr6:18129286-18129390
  hypo
aagtgagaccctgtctctacataaaagtaaaatcaaaagtctctggagagaattgtgttggtccagctcgggttagttgtccattcaaccggtgatacaggcag

SEQ ID NO: 255867 - DNA, 40 bp, Homo sapiens
  chr6:18205884-18205924
  hypo
accttcaccaggtgcgcttgggttttgtgaaaggtgtgct

SEQ ID NO: 255868 - DNA, 87 bp, Homo sapiens
  chr6:18220400-18220487
  hypo
tttcacctgtgttcctacttcgtttaatatggtttagaagtacacgtctcattgtttcatctaaaatatagttaccgtttttgttta

SEQ ID NO: 255869 - DNA, 77 bp, Homo sapiens
  chr6:18220965-18221042
  hypo
tttcctttgctgctttgatgcgattattacctcaccttttcctttttttttttttgagatggagtctcgctgtgtcg

SEQ ID NO: 255870 - DNA, 76 bp, Homo sapiens
  chr6:18247862-18247938
  hypo
caacaatttagaaagcgaattttaaaagtgagtataaaatgctctcgttttttttttttgagacggagtttcgctc

SEQ ID NO: 255871 - DNA, 98 bp, Homo sapiens; identical to SEQ ID NO: 210689
  chr6:18250345-18250443
  hypo

SEQ ID NO: 255872 - DNA, 41 bp, Homo sapiens; identical to SEQ ID NO: 210690
  chr6:18259258-18259299
  hypo

SEQ ID NO: 255873 - DNA, 33 bp, Homo sapiens; identical to SEQ ID NO: 210692
  chr6:18275933-18275966
  hypo

SEQ ID NO: 255874 - DNA, 38 bp, Homo sapiens
  chr6:18294411-18294449
  hypo
gggattacgggcgtgagccaccgcgcgtggccaggcat

SEQ ID NO: 255875 - DNA, 251 bp, Homo sapiens; identical to SEQ ID NO: 210694
  chr6:18368662-18368913
  hypo

SEQ ID NO: 255876 - DNA, 43 bp, Homo sapiens; identical to SEQ ID NO: 210695
  chr6:18458440-18458483
  hypo

SEQ ID NO: 255877 - DNA, 180 bp, Homo sapiens; identical to SEQ ID NO: 210696
  chr6:19676997-19677177
  hypo

SEQ ID NO: 255878 - DNA, 42 bp, Homo sapiens; identical to SEQ ID NO: 210697
  chr6:19677237-19677279
  hypo

SEQ ID NO: 255879 - DNA, 38 bp, Homo sapiens
  chr6:19828887-19828925
  hypo
gttgaggctgggcgcggtggctcaagcctgtaatccca

SEQ ID NO: 255880 - DNA, 83 bp, Homo sapiens
  chr6:19892212-19892295
  hypo
tttgcgccttagaacgccgaagttttctgaattaaaaaaataataaaaaccagcctggccaacatggtgaaacctcgtctcta

SEQ ID NO: 255881 - DNA, 143 bp, Homo sapiens
  chr6:19892475-19892618
  hypo
gagactctgcctcaaaataataattaataataaaaataaggtaacagcacagctcacatcagtgaacataggtgtgtgaacctgcttgtcttggctttccagcaggcagatgtccagggacatgcggccggaagaaccggatt

SEQ ID NO: 255882 - DNA, 35 bp, Homo sapiens
  chr6:19967405-19967440
  hypo
gagccaccgagcccggcctcaatccacatttctaa

SEQ ID NO: 255883 - DNA, 66 bp, Homo sapiens
  chr6:20124517-20124583
  hypo
aactgcctcccattacgtgttgagcttctttgatgaagtgatccaaaacgtcgttctggctaagcc

SEQ ID NO: 255884 - DNA, 41 bp, Homo sapiens
  chr6:20228878-20228919
  hypo
ggattacaggcatgacccaccgtgctcggccacattcacga

SEQ ID NO: 255885 - DNA, 32 bp, Homo sapiens
  chr6:20239105-20239137
  hypo
tctccaactgagagtgacagcgtgctggcagt

SEQ ID NO: 255886 - DNA, 120 bp, Homo sapiens
  chr6:20239437-20239557
  hypo
gggcagcagctactgtgctcaatttgtggccaggccttagctgccttcccgcggggcagggctcgggatctggagcccgcctgcgcctcccccgccactccgtgggctcctgcgcggcca

SEQ ID NO: 255887 - DNA, 43 bp, Homo sapiens
  chr6:20395766-20395809
  hypo
gatcaggatattgctgggcacggtggctcacgcctgtaatccc

SEQ ID NO: 255888 - DNA, 362 bp, Homo sapiens
  chr6:20479819-20480181
  hypo
taatgctgaaggatcgctgtgtttgtccatctgggtgtggacggatgatcacggcaggtgaagagagtgtgcatgacaacccagcctacaacgctagaatcctggctctagggaatgacaagatgctgagtggggtggagcagaggggtgagagctggcatgagcctgcagcatttggcaggccagcccacaaactgcctcccttcttgttcttgtccatatgaccggtgacgagagatcgcactttcttattacaggcaaagcgaaggctggagctaggagaaagcggtcatcagtacctctcagatggtttaaaaacccccaagggcaaaggaagagctgcactacgaagtccagatagt

SEQ ID NO: 255889 - DNA, 91 bp, Homo sapiens; identical to SEQ ID NO: 210699
  chr6:20640182-20640273
  hypo

SEQ ID NO: 255890 - DNA, 205 bp, Homo sapiens; identical to SEQ ID NO: 210700
  chr6:20686905-20687110
  hypo

SEQ ID NO: 255891 - DNA, 273 bp, Homo sapiens
  chr6:20691377-20691650
  hypo
ctgccatttgtaaacggccattcattgtcctgtctcttgcctttggctctttccagtttttcttcccaaatctttggactagttcctgcagaaaatatgaattcacagtggtgccctctgggcctgggcatctctgggccggcagaccctgagcagcgactgctgctgagagcaggtgtgtgtacagatggcatggtggggccagcctgccttctgcttggtgatgttggagagggtgattgataatagagcttacaccgagtaatggtctga

SEQ ID NO: 255892 - DNA, 150 bp, Homo sapiens
  chr6:20745519-20745669
  hypo
gagaatatttctatcgtacaccatgttgcaaaaggtaaacaaattcacaaagtggagcagtgtcacagtaacagtgggatcagtattgagggcaaggcttgaggaacgctctccttctcctgtttgcccctacttcgaacatttcttctt

SEQ ID NO: 255893 - DNA, 180 bp, Homo sapiens
  chr6:21202326-21202506
  hypo
aataaagggaataccgcttcactctggcaatagtaccgcttcactctggcaatagcaacaaagacaatactattgtctgtgttctcactgactgtggcactggattcttgtgtccgacagcagtgataattcacatgtgcttcacaagtgcccatgaaggatctgcgtgcatggccgtct

SEQ ID NO: 255894 - DNA, 181 bp, Homo sapiens; identical to SEQ ID NO: 210701
  chr6:21277794-21277975
  hypo

SEQ ID NO: 255895 - DNA, 280 bp, Homo sapiens
  chr6:21342661-21342941
  hypo
caccctaaactcagcggcctcatgttcacagactaagaagcaaacagcaaagcacagaaacaagggatttcttcccggaaagaagaatgttccccacttagtagatggatgagtagtgggataagagccctaactccaggagccagattatggtgtatcgctaaggtctgtgtttcagtcgctccagtcatgaactgctaacagcatctggcgtccataacccttagtagaggaatgtttgccggcctatttgtggagcgtatctctgagtgcacactta

SEQ ID NO: 255896 - DNA, 95 bp, Homo sapiens
  chr6:21406919-21407014
  hypo
aagcatttcacacaattccacgccactcttactttctgttttagcctgtttccagcctggatcttcacatttccggctccccagccaacacacct

SEQ ID NO: 255897 - DNA, 87 bp, Homo sapiens
  chr6:21423807-21423894
  hypo
tgtacctgggagagcggcagcagctacaccggaggagctcccgccctaactgggaaggggcggagctcccgcttgtccctggctcct

SEQ ID NO: 255898 - DNA, 206 bp, Homo sapiens
  chr6:21423954-21424160
  hypo
acccaggagggcagatcctacctgctccctgaccccccgaagagcacagggaggctcagatccacagccttagagcaggaggcctgggtctgcagccgggttgggtgggctgcagtggcacccggggtgctcctgccccaactcgaaaggggtggggctcccaccggctccatggagtgtgcagccccagccgtgcctttctgctg

SEQ ID NO: 255899 - DNA, 33 bp, Homo sapiens
  chr6:21494919-21494952
  hypo
cctaggggttttgagcagcggagcacctgagcc

SEQ ID NO: 255900 - DNA, 93 bp, Homo sapiens; identical to SEQ ID NO: 210702
  chr6:21570592-21570685
  hypo

SEQ ID NO: 255901 - DNA, 187 bp, Homo sapiens; identical to SEQ ID NO: 210704
  chr6:21602324-21602511
  hypo

SEQ ID NO: 255902 - DNA, 120 bp, Homo sapiens
  chr6:21622714-21622834
  hypo
tatgtagttaaatactgaaatttacaaacatagggtaaaattaagcagtgccatgaaacactattacaacaggaaaaattaattctattgcccccgttccttaaaaaattagataagtaa

SEQ ID NO: 255903 - DNA, 44 bp, Homo sapiens
  chr6:21633880-21633924
  hypo
aatatgtgtttagccgggcgtggtggcatacgcctgtagtccca

SEQ ID NO: 255904 - DNA, 54 bp, Homo sapiens
  chr6:21918789-21918843
  hypo
gttgaagtgagggaggggttcgccctaggtaccgatgcttggattatgaagaac

SEQ ID NO: 255905 - DNA, 34 bp, Homo sapiens; identical to SEQ ID NO: 210705
  chr6:22037569-22037603
  hypo

SEQ ID NO: 255906 - DNA, 70 bp, Homo sapiens
  chr6:22294673-22294743
  hypo
gtagtgggacaggacgacggcgcggtcaaacaggtctcgaagggtcacctggcatcgggcagccccgccg

SEQ ID NO: 255907 - DNA, 36 bp, Homo sapiens; identical to SEQ ID NO: 210707
  chr6:22331079-22331115
  hypo

SEQ ID NO: 255908 - DNA, 254 bp, Homo sapiens; identical to SEQ ID NO: 210708
  chr6:22349413-22349667
  hypo

SEQ ID NO: 255909 - DNA, 367 bp, Homo sapiens
  chr6:22569529-22569896
  hypo
cacaaccgccacccggccatcccagctatttcctccagcattctagacatcatggcgtccgagggtgggtccaacgggcttcgagtgttcgggagataatgcacacttcgcagtggatcttctcggggccccgagcgttgcccgcccattaggtggcgccggtcccctcgaacaggtcgctcaacaactcccgcccagcagccgcccttactgcgcgcgcgcagacttcggcgtctacttccggtgtggcccaggcggggtccgcagaaccagctatgtcggcctacggcatgcccatgtacaagagcggggacctggtgtttgccaagttaaagggctatgcccactggccggcgaggatagagca

SEQ ID NO: 255910 - DNA, 32 bp, Homo sapiens
  chr6:24035312-24035344
  hypo
ttacaagcatcaccgtccgcctttatctcggc

SEQ ID NO: 255911 - DNA, 43 bp, Homo sapiens
  chr6:24343551-24343594
  hypo
caggcgtcagccaccgtgccccgcctaaatattcttgaggaaa

SEQ ID NO: 255912 - DNA, 161 bp, Homo sapiens; identical to SEQ ID NO: 210709
  chr6:24425299-24425460
  hypo

SEQ ID NO: 255913 - DNA, 230 bp, Homo sapiens
  chr6:24432978-24433208
  hypo
gcaaccagtcagttctgccacggcagcacgacagcagccacgcgcagtccacagcagacgagcccggctatgttccactacagctgtgtgggcgctgaaactgcactgccgtttaaacttcatatgttacaaaacattctgttttgatttcttttcaaccatctcaacatgagctgacttttttagttcatggctttacaaaattaggtggcagacgacttggccccaac

SEQ ID NO: 255914 - DNA, 34 bp, Homo sapiens
  chr6:24476567-24476601
  hypo
cttccacaccacccgctgcgctgctgtgtccctt

SEQ ID NO: 255915 - DNA, 125 bp, Homo sapiens; identical to SEQ ID NO: 210711
  chr6:24523039-24523164
  hypo

SEQ ID NO: 255916 - DNA, 161 bp, Homo sapiens
  chr6:24647204-24647365
  hypo
ctactcgtatttaccgaagagcctcagacaagttacctaatctagataaacctgtttcctcaattataaaatgaagataatagcattcatataggatgattctgggaatcaaataagataatgcacatttaaagagtaaaaaccagctgggtgcggtggct

SEQ ID NO: 255917 - DNA, 120 bp, Homo sapiens; identical to SEQ ID NO: 210713
  chr6:24662784-24662904
  hypo

SEQ ID NO: 255918 - DNA, 80 bp, Homo sapiens
  chr6:24761526-24761606
  hypo
ctgcagggatggggcggggccaaggggggtatcccatgcccccaaggggagcgtggttcgggggagggaacatcccaggc

SEQ ID NO: 255919 - DNA, 79 bp, Homo sapiens
  chr6:24847769-24847848
  hypo
atagagctctagcacggccttgggactcggcctgagggagggcaggtcactgaaggagcggctgcggtgcagcttggca

SEQ ID NO: 255920 - DNA, 41 bp, Homo sapiens
  chr6:25023690-25023731
  hypo
gcccctaggacttggcgatgcagtggcggacaaattcacac

SEQ ID NO: 255921 - DNA, 69 bp, Homo sapiens
  chr6:25103772-25103841
  hypo
tggtgagaggttagcgagagaaaagactgcaacaaggattctcttcgtattattcgaaccgaaattgct

SEQ ID NO: 255922 - DNA, 173 bp, Homo sapiens; identical to SEQ ID NO: 210714
  chr6:25153408-25153581
  hypo

SEQ ID NO: 255923 - DNA, 358 bp, Homo sapiens
  chr6:25218503-25218861
  hypo
agggaggtagcggacgctggagcttcttaggccagaagtccaggggcaggggcatggtgggggcgcctttctcaccccgagaaaacgcagcggtggtcacggggaggggcgccaccatgcagcacccaggcctggattccagctagcagtatcagccttctctcactttcgggcagcgacaccgctggtgtagaccgtctcaggtgcgtcttcgttcagctctactgtcctcagccccagcttgggctcgccctcagcctgctggagctgttggatgtgttcaggcctccaggcaccctggcctccccccacccgccccgcgaagaccgagggaaagcagacgcgtctccgcggcaac

SEQ ID NO: 255924 - DNA, 815 bp, Homo sapiens
  chr6:25726843-25727658
  hypo
ctatctgattggctgatggccgtctacccaatcagaaagtcgtactagaatcgcctcatttgcattcacgccacttcccattgtccaatcagattttggataccgaacgcggcgtttgagggccgtgcctataaataccgcatctttcatcctccagttctgtttgtttacttggcgagacttggagctgaggtcatttggagctgtttaatactgaagagctgttgagcactggaaagtgctgtgtaaccctggaaaagaaccgtgtaacgctgcagaagtgtgtggtagctatgccggaggtgtcatctaaaggtgctaccatttccaagaagggctttaagaaagctgtcgttaagacccagaaaaaggaaggcaaaaagcgcaagaggacccgtaaggagagttattctatttacatctacaaagtgctaaagcaggtccatccggacactggcatctcttcgaaagctatgagcattatgaattccttcgtcactgatatctttgagcgtatagcgagcgaggcatcacgtttggctcactacagcaagcgctccaccatttcttccagagagattcagacagcagtgcgcttgctactgccgggagagctggctaaacatgctgtgtctgagggcaccaaggctgtcactaagtacaccagctccaagtaagcctgctaagtaaacgtcatttctaacccaaaggctcttttcagagccacttaaacatactgaaacagctgtgggcttcgtttttgtgtagtttctaaccgtaagggttttttttttttttgaggcggagtctcactc

SEQ ID NO: 255925 - DNA, 180 bp, Homo sapiens
  chr6:25727898-25728078
  hypo
gccactgcgaatatatccaaatcagctgtgggccgagggtagacgaactagttgcagcaagacaatccttgctaggcaccgtgactcgcctgtaatcccagcacttgcagaggtcgaggctggcggttcatgaggttaagagacggagaccatcttggccaacaaggtgaaactccgtct

SEQ ID NO: 255926 - DNA, 54 bp, Homo sapiens
  chr6:26018520-26018574
  hypo
caatgttttagagcgatgtgtctcgcgaatacctttcacgtcaaacaagaatga

SEQ ID NO: 255927 - DNA, 221 bp, Homo sapiens; identical to SEQ ID NO: 210717
  chr6:26025541-26025762
  hypo

SEQ ID NO: 255928 - DNA, 98 bp, Homo sapiens
  chr6:26047695-26047793
  hypo
accgcgcccggcctccttgaagccattcttacgtcagattggctggcaacgaatgaagtacacatgatcacatatgcaaatcacgtaacttattatcc

SEQ ID NO: 255929 - DNA, 36 bp, Homo sapiens
  chr6:26095303-26095339
  hypo
taaaagcacttacttcgtgtccgactcttctgagca

SEQ ID NO: 255930 - DNA, 108 bp, Homo sapiens
  chr6:26190082-26190190
  hypo
tggcatgcaggctagatagtgctactgagggaactaaaagtatatgaaagttacacatttagaggtcaaattaggataagatcaccgagggccgattgaaaacatgac

SEQ ID NO: 255931 - DNA, 36 bp, Homo sapiens
  chr6:26214612-26214648
  hypo
gccggcgtgagccaccgcgcccggccaagagaaaaa

SEQ ID NO: 255932 - DNA, 34 bp, Homo sapiens
  chr6:26226775-26226809
  hypo
cgcccggccttccggctgatatcttaaaagaact

SEQ ID NO: 255933 - DNA, 96 bp, Homo sapiens
  chr6:26294597-26294693
  hypo
gcataggactcctgcgacccttgcataacttgtagaaaagattgtactgggactccttgctctggaatggtgtcccaggcgcgtttagcagccaag

SEQ ID NO: 255934 - DNA, 160 bp, Homo sapiens
  chr6:26386083-26386243
  hypo
tcacttcttcagaagcacacgcattcctcagctgaggccatgagcaggggaaaatagttaatcccggaaaagaaagtcttatgcctgccttggcactgaactgtgcacgtctgagagtgaaaggagacactgtcaaaaattgtcccggggcaatcagaat

SEQ ID NO: 255935 - DNA, 110 bp, Homo sapiens
  chr6:26423339-26423449
  hypo
cagaaggaggagtaccgagggagaaccacctttgtgagcaaagacagcaggggcagcgtggccctgatcatacacaatgtcacagccgaggataacggcatctaccagtg

SEQ ID NO: 255936 - DNA, 120 bp, Homo sapiens
  chr6:26549975-26550095
  hypo
tctgaccctcacatctgaggcactgagcatggaagagttggaaagaagagggagggaaacttatttttctgtatctgttcttgcaccactaccttcttttctcaatagttgttgtgttac

SEQ ID NO: 255937 - DNA, 72 bp, Homo sapiens; identical to SEQ ID NO: 210720
  chr6:26970361-26970433
  hypo

SEQ ID NO: 255938 - DNA, 34 bp, Homo sapiens
  chr6:27102663-27102697
  hypo
ttaccggcgtaagccaccacgcccggcccactct

SEQ ID NO: 255939 - DNA, 133 bp, Homo sapiens
  chr6:27428733-27428866
  hypo
atggtcactaattatcgacataattctgtgtgcctagtcactgattaatgacgttattctgtgtgcccagtgcactgggacaagatgtaccaaactgtcaacatcgtttaaagaaacacggaaatttatgagt

SEQ ID NO: 255940 - DNA, 159 bp, Homo sapiens; identical to SEQ ID NO: 210724
  chr6:27441962-27442121
  hypo

SEQ ID NO: 255941 - DNA, 42 bp, Homo sapiens
  chr6:27631247-27631289
  hypo
aaaaggggaaggtttgtgtccgggcgtggtggctcacgcctg

SEQ ID NO: 255942 - DNA, 120 bp, Homo sapiens; identical to SEQ ID NO: 210726
  chr6:27770799-27770919
  hypo

SEQ ID NO: 255943 - DNA, 43 bp, Homo sapiens
  chr6:28031402-28031445
  hypo
ccagactgggcgacagagcaacgtctcaaaaaaaaaaaaaaaa

SEQ ID NO: 255944 - DNA, 109 bp, Homo sapiens
  chr6:28192714-28192823
  hypo
aggaggggtaggtggggtttgacattttactttattaattttggtattgtctgagggtttttaaaccataaataatgtattaattttaaaaatgcttttaaaaatcatc

SEQ ID NO: 255945 - DNA, 155 bp, Homo sapiens; identical to SEQ ID NO: 210729
  chr6:28327739-28327894
  hypo

SEQ ID NO: 255946 - DNA, 233 bp, Homo sapiens
  chr6:28397694-28397927
  hypo
ggacgcacttcggccggctcctctgccgcctctctaggattcttggaggatccatcaatctcagtggttcatttgtgcacaccacctggctcacctttgtgagcgcagaagccgcctcaaaaaggctgaggccgacaggggtcgtaacctcttgtgtccagcagccactcagtctgggctgacttctctctctcccctgctgaagacacttgactgctcgcactggatcctcc

SEQ ID NO: 255947 - DNA, 31 bp, Homo sapiens
  chr6:33549226-33549257
  hypo
gccaaggcaagaggatcgcttgaggccaggt

SEQ ID NO: 255948 - DNA, 417 bp, Homo sapiens
  chr6:33578945-33579362
  hypo
catccattcccagctttggccgggcagccagggcaaggactggctgggagggccttagtcctgccaaggtggggtggggtgcggctagaggccaggcccagcccaggtggacttgacgtcatgcttttcacctctgtctctgtcagacaaagcctgctccttcgtgcctggccctgcccccggggaagttttccatgctgctctcctttctcaacaggatcacagggctgatgcttcccctcccaacccacctttcttgttggcaggtgaagtgccaaggcctgcgcacactcacagagacctgcgccgcttccctcctcgtgcagggtcccccttcggagtctggagaaaggaagaatggccagaggccactccctctccttgggagctcctgccgggatgccaacctgggcttca

SEQ ID NO: 255949 - DNA, 40 bp, Homo sapiens
  chr6:33597878-33597918
  hypo
accatcgagatcctgtcaaggtactcgtgttacattttct

SEQ ID NO: 255950 - DNA, 76 bp, Homo sapiens
  chr6:33606110-33606186
  hypo
attggtggtcaacctaaccttcagcggctctctccttccaggaggaggtcgtgacggaggtggggctgaaaatggg

SEQ ID NO: 255951 - DNA, 246 bp, Homo sapiens
  chr6:33609019-33609265
  hypo
ttacctgtgagggctgagaccgactgacagtcagacagacaggtcctgggcgtgttgggcagggtgggagcaggcagcaacacgctgggcctgctgccaccaagtctgcccgcgtggctgctcctctggggagagcttagctgggattgtcctcgcgggggatgctggaaggggagcgggatttaagacaatccggcggcatccttggctggctggctggcggccggggtccttgcccatcacttg

SEQ ID NO: 255952 - DNA, 266 bp, Homo sapiens; identical to SEQ ID NO: 210733
  chr6:33638299-33638565
  hypo

SEQ ID NO: 255953 - DNA, 37 bp, Homo sapiens
  chr6:33645952-33645989
  hypo
caggcctcaccttgacgctgaccgtgacacttcacct

SEQ ID NO: 255954 - DNA, 124 bp, Homo sapiens; identical to SEQ ID NO: 210734
  chr6:33653397-33653521
  hypo

SEQ ID NO: 255955 - DNA, 245 bp, Homo sapiens; identical to SEQ ID NO: 210735
  chr6:33674159-33674404
  hypo

SEQ ID NO: 255956 - DNA, 67 bp, Homo sapiens
  chr6:33684640-33684707
  hypo
agtaatcgagacaccgaattgcacatttaaatcgcttgcaagtaaaaaatatcgttttgtaatgctg

SEQ ID NO: 255957 - DNA, 139 bp, Homo sapiens
  chr6:33687282-33687421
  hypo
tgcagctcaaacaccacctccgcaatcaccccatgaggcggtgagccctcgctgccgctcctctctgggtagcactgcacagctgagcagatggtcctcatcccctcttgaagcacccgtgagattttcataaggaggt

SEQ ID NO: 255958 - DNA, 253 bp, Homo sapiens
  chr6:33694498-33694751
  hypo
caaggatacgatgccgcttgttctctgggtactcggagcacaggcgggtcaggtgggcctggtggcattgcaggccccacgggttgaagctcttcctctcaacctggtttccgttggtgtcttccaccagcgagaaggctggagtgttgaggtggggctcggacctcagaagagccttggccgggctgcggcggagtggagcacaggacggtcagagcagaggtctggggaagggcgccgctgcctgtggctg

SEQ ID NO: 255959 - DNA, 141 bp, Homo sapiens
  chr6:33701973-33702114
  hypo
ccgtctcaaaaaaaaaaaaaaaaaaaaaagagaattcctgaccctcaccccaagaccccaggggattctgattcacaggtctggcatggggcgtggggacctgtgcgcctttgtgcacatacacgccggattctagtaaag

SEQ ID NO: 255960 - DNA, 41 bp, Homo sapiens
  chr6:33740514-33740555
  hypo
ggaactccacagctcggtcccagacacgcttcatgcgcctc

SEQ ID NO: 255961 - DNA, 152 bp, Homo sapiens
  chr6:33745239-33745391
  hypo
gcggcatccccagccgtccagatctcggctcctcccaacctcattctggggctttcatctcctcccttgtgaaccagaacacagtgtttcatacatatatacatgccggggccctttgtattccgagatgctgctgccgataatgatttctg

SEQ ID NO: 255962 - DNA, 97 bp, Homo sapiens
  chr6:33745989-33746086
  hypo
aaggggagggaaggcggccgaggacttacaccagaagaagatgagcacgttggtgacagcagtgagcaaggcccggctcaggcggcagccaacaccc

SEQ ID NO: 255963 - DNA, 143 bp, Homo sapiens
  chr6:33748502-33748645
  hypo
tgaatggtaatcatacgggggagaagggacagcatgtttctcctgaaagccgaaggcaagacgagcaaagtgaaccaagggagaagcaggtaacaggcacacctacagtgcagcagtcaggagtgagccgccccactgcacat

SEQ ID NO: 255964 - DNA, 83 bp, Homo sapiens; identical to SEQ ID NO: 210738
  chr6:33771001-33771084
  hypo

SEQ ID NO: 255965 - DNA, 343 bp, Homo sapiens
  chr6:33802493-33802836
  hypo
cagtgggaaggcgccgttcgaggcccgcgggggtaggagcgagcggcgagggatgcccttggccagcgcctccccacaggtgagcaggcccaggcgctgtgcggaagccctgctgggaattggtcagtgttgctgcttcagcatcaggaacagccttctctgcagccctggatttaaagggtcagagccagggtcttccccaaccctgggcacatcagagcctggcgggcgccctgcagaaggctggcaacccttgatggtaggggcaggtctctggccaggcctcagcccccgagtctgtgcaagtcagtggagctcagagccgcggcgtgtctggacacgt

SEQ ID NO: 255966 - DNA, 78 bp, Homo sapiens
  chr6:33871408-33871486
  hypo
ttttcaccggtcccgttccctctaccaccaaccttgtcatttgacttgagtatcctggtcttcgtcatttggcttgac

SEQ ID NO: 255967 - DNA, 107 bp, Homo sapiens; identical to SEQ ID NO: 210739
  chr6:33907853-33907960
  hypo

SEQ ID NO: 255968 - DNA, 170 bp, Homo sapiens
  chr6:33914100-33914270
  hypo
tttagtgcgctctacggtgtctcggcagaggttaacacacggaatacatctgaattgcgttccaagtttggacaggccaaactgccttgctttatcaggcaccgagccggagatgcgagcagtgacttccagggctcctcaggctgctgcctgcacggccatttccacct

SEQ ID NO: 255969 - DNA, 383 bp, Homo sapiens
  chr6:33955434-33955817
  hypo
gcagaggcgatgcccgatacacatgcatagaatatgagtcaacactgctgtgcgcatgtcaccctcacggccactctggaggcaggcgcttttgtcatcaaacccatttcacatgtgagggcgctgaagcccaaagaaagcagcgcctcactctgctgcctcatactctgttaaaaggagaatcatgccaacctccagaaatgaggcgggaaaatgactgcgctccgtgacctgtcaattaccccctggagacagccagcagctgtcctcatccctaggctgcggtcagagaaacatggaccccgagaggttaagggcttgcccaggtctggagctctggtctgtcagggtcctggacaccagagcttcgggatcagctggag

SEQ ID NO: 255970 - DNA, 40 bp, Homo sapiens; identical to SEQ ID NO: 210740
  chr6:33962224-33962264
  hypo

SEQ ID NO: 255971 - DNA, 35 bp, Homo sapiens; identical to SEQ ID NO: 210741
  chr6:33985261-33985296
  hypo

SEQ ID NO: 255972 - DNA, 311 bp, Homo sapiens
  chr6:33995832-33996143
  hypo
cccacctgctgcaaaaggagcggggcctggggcccgagagggcagaacggggccaggcactcacctggggcctcaaggttctcgcagagctcagacttggcctctccgttgggccggaagttgcccttctgcgtgaacttgttggacatggtggccgccgtaacgacggctttgaggctgcgcttgcgcttgggcacgttctgctccgggtggaagaggatgatgtagactttgggcatgtagagcattcccagggacaccgaggcgctcagactcaccgagaccgtcagcgtcgtcgtctggatgtacag

SEQ ID NO: 255973 - DNA, 104 bp, Homo sapiens; identical to SEQ ID NO: 210743
  chr6:34100884-34100988
  hypo

SEQ ID NO: 255974 - DNA, 180 bp, Homo sapiens
  chr6:34170821-34171001
  hypo
ccgcagccacagtttgggtggctgtagccccgcccaagagggcggggcttctgtcggctccatggagccggaggcccgggtctgcctccgtttggtttgggtggccatggtttgggtggctgcagcggcaccccagggcgctcctgcccccaactcagaaggggcggggctcccactggc

SEQ ID NO: 255975 - DNA, 256 bp, Homo sapiens
  chr6:34208661-34208917
  hypo
gagtcccgggacagcgctggtagggagtcaggtgggtgtccaaacctttgcttcacttggtttaccctttggggctagggaggtgcctggagtttcattcagcaggcgagaccatgcatggagggtgcagaatgattctgcgcagtaagcgtgtgggtgtgtcctcccacctgtgtgtactcctgccccacttgcaaccctggtcagatctctatagagaccccaggagagaaccgggggccgaggaattcaagat

SEQ ID NO: 255976 - DNA, 120 bp, Homo sapiens
  chr6:34219816-34219936
  hypo
gggattacaggcgtgagccaccgcgcctggctaacatcttttaactacttaaagaaaaaactctcgatctagaatattggggaaaaaaaatctgtcaaaaacaagaaataaagatgtttt

SEQ ID NO: 255977 - DNA, 41 bp, Homo sapiens; identical to SEQ ID NO: 210746
  chr6:34231475-34231516
  hypo

SEQ ID NO: 255978 - DNA, 32 bp, Homo sapiens
  chr6:34395946-34395978
  hypo
aaaaaggccgggcgcggtggctcacgcctgta

SEQ ID NO: 255979 - DNA, 31 bp, Homo sapiens
  chr6:34396518-34396549
  hypo
gcgagactccgtctcaaaaacaaacaaaaag

SEQ ID NO: 255980 - DNA, 76 bp, Homo sapiens; identical to SEQ ID NO: 200413
  chr6:34405060-34405136
  hypo

SEQ ID NO: 255981 - DNA, 39 bp, Homo sapiens; identical to SEQ ID NO: 200414
  chr6:34405256-34405295
  hypo

SEQ ID NO: 255982 - DNA, 213 bp, Homo sapiens
  chr6:34503446-34503659
  hypo
gccttcctgcgtctcgcctggctctgaatgcatttctgtgtgggacccgtgggagggctccttggggagaatttctcaggggcatgggcaggaccggagctctgggttcttggctgttctgccagccccaagcccagcccttgctctagctccctgactccccctgcatccagccccaggggatctcttccggggtatcgcagaagtcccagg

SEQ ID NO: 255983 - DNA, 243 bp, Homo sapiens
  chr6:34507099-34507342
  hypo
ccacaggtggatgggctgcccggagcatgatgagtccacctcgctgtcggtccagctctcctcactggtcgaggctgggtggccagggagggtggcggtgagtgggaatgggaggccagtcccggcttcattggcagccacccctccaccccacccgagcccccgcctccaccctgccgctgcctggctcaccacagtagtgaatcgccccaggtgaagtccgctctttcatccaggccgctg

SEQ ID NO: 255984 - DNA, 243 bp, Homo sapiens; identical to SEQ ID NO: 210750
  chr6:34512043-34512286
  hypo

SEQ ID NO: 255985 - DNA, 42 bp, Homo sapiens
  chr6:34513308-34513350
  hypo
gaagggggactggagaggtgcgcaagcactgaaaccccagga

SEQ ID NO: 255986 - DNA, 200 bp, Homo sapiens
  chr6:34513709-34513909
  hypo
cgcacacacacacaaagaatacgtcaagccagaggcagaagattaccaacagatatacgctcctaataatacagagaaccagttagggaggaggaaaggaacagataaacctgttaagggcaagttaatttgtgtcctttctcgagggttatttatagtttcaagcagtggttctccaaatgtgccgtctgggccagcag

SEQ ID NO: 255987 - DNA, 193 bp, Homo sapiens
  chr6:34518768-34518961
  hypo
aactgaataaactgctttgccgggccctcccagctggggcagccagcattattcccacttgacggacaagggcgctgtgacctgctacggggcacctgtccatgcgtgagtgagcagggactcgaactcaagactcggctccaccctcctttctgctggtgctggcagacccggcatcttctagctcctaagg

SEQ ID NO: 255988 - DNA, 591 bp, Homo sapiens
  chr6:34519689-34520280
  hypo
agcaactacaattccgctcaaccttcagggctttccagaaattgccattcacgtcttccttcagccctggttgagcccatgtgtatataaatacatttcacttctcagtgcccccgtcaggcctcttagccacaccaaggctgccatacccccaccacctgcacatccccgctttgccatgatgcagcccgggtcacatggctgcccctctctggcacagtctcgtcctcacccccaaatcgccggtacactccttgaagggccggccacagtaccttccctcttccctaccctcctccagccccgcatacgccgtacctcccagcttgccacaggacaggggtcgtgaggtttcctgggtctcttgctccccacagccctgcccagcagggtcgttgagggcatgagaacacacggatgtcaccggagctctgctgctcctgcctgaggccccttggccgatcctcttggcctcagcctcttcagcagtgaaacagggactcataaagacagctgtgtgtctggattttgaagtcaccaggcaggacagcgatgtgagaaggcttcactgtctcccgagaggtgtgtgtc

SEQ ID NO: 255989 - DNA, 146 bp, Homo sapiens
  chr6:34520752-34520898
  hypo
caaccagtctcaggcgctggagccccgggctgggcagtccctccagccacgtctcccctgtgccagagctagagggagaaggaggggggtctttatcctggtggtgcgccgtcataatcctggggaggtcccggtcccatccgacc

SEQ ID NO: 255990 - DNA, 115 bp, Homo sapiens
  chr6:34524257-34524372
  hypo
aggggactcattcattcactcgctcattcactcgttcattggttgctgcatagccactcagctcatattacgtgcaaggcgccagagatacgtcgagtgggtccagggctggggt

SEQ ID NO: 255991 - DNA, 42 bp, Homo sapiens
  chr6:34535914-34535956
  hypo
tcactgcgcccagccatatccggcattatgaaacagtcctcc

SEQ ID NO: 255992 - DNA, 89 bp, Homo sapiens
  chr6:34563973-34564062
  hypo
ccttctgactactccgggaggcttgctggtggcacagcaggacccgtcagcatgagagaaggacttctgtaagatgatttaacattggt

SEQ ID NO: 255993 - DNA, 118 bp, Homo sapiens
  chr6:34618502-34618620
  hypo
cagggttgagctatctaccacgcctggccaggaatttaattttaaacagtgcgcaacgttcgccttcttcgggaaagctattgggacaactatatgcgattcctatcagtctcatctg

SEQ ID NO: 255994 - DNA, 100 bp, Homo sapiens; identical to SEQ ID NO: 210753
  chr6:34683317-34683417
  hypo

SEQ ID NO: 255995 - DNA, 206 bp, Homo sapiens
  chr6:34690600-34690806
  hypo
tcactgtgggctgaaactcctaggctcaagtgatctgcctcccaaagtggaattacaggtatgagccactgtgcccggccctcaacccctgtaataataggtctttgcaatgccttacccttgtaccttttatggcatctttttaaatttgggattcttcccccaacaccaccaccccctgccgccggtggcgtttttttgttttt

SEQ ID NO: 255996 - DNA, 36 bp, Homo sapiens
  chr6:34723874-34723910
  hypo
ataattattacctgccgggcgcggtgggtcacgcct

SEQ ID NO: 255997 - DNA, 37 bp, Homo sapiens
  chr6:34726098-34726135
  hypo
tttttttttttgaaacggagtttcgctcttgttgccc

SEQ ID NO: 255998 - DNA, 36 bp, Homo sapiens
  chr6:34854519-34854555
  hypo
ggcgtgagccactacgcccagacaaattttctcttt

SEQ ID NO: 255999 - DNA, 35 bp, Homo sapiens
  chr6:34870302-34870337
  hypo
gcgtgagctaccgcgcctggcccaagtttttcttt

SEQ ID NO: 256000 - DNA, 88 bp, Homo sapiens
  chr6:34953050-34953138
  hypo
ggcctgtatgtgacccggggcttacacctcctgggggctgtgttggctggctggcccctgaggtgatggggcacggggaagggaagtg

SEQ ID NO: 256001 - DNA, 204 bp, Homo sapiens
  chr6:35019282-35019486
  hypo
gcacgctgcatggccgtggagaacagcttttccagtgcagactctaaagaaatggaaactacactttggttcattcacagattcattcaataggttctctatttaccatgtgccaggcccagcgggtgacaaggcaaataaaatacgcttgatgccaaccctcattggtgtctacagtgttaagctctgcgtgtgagtagaata

SEQ ID NO: 256002 - DNA, 108 bp, Homo sapiens
  chr6:35027133-35027241
  hypo
gacccccgagccccggcccatgtgccccattcagccccttgctgccttgagcctctgagcacaaagggccggtggccatggtttgcttattccgggactgctggggga

SEQ ID NO: 256003 - DNA, 81 bp, Homo sapiens; identical to SEQ ID NO: 210754
  chr6:35033867-35033948
  hypo

SEQ ID NO: 256004 - DNA, 201 bp, Homo sapiens
  chr6:35044731-35044932
  hypo
ttgggcaggtccagcgtggagtagggagggagtgctttggaaatgctagatagataaaacgtggaaagatgctcatcctcacctctggatgagatgatcctactccgataagaaatgtgcaaattgaaactgcagggagactctttccctgctgtgttgctgatggtgtgggggatctagcactggcgtcactaagaagag

SEQ ID NO: 256005 - DNA, 95 bp, Homo sapiens
  chr6:35045149-35045244
  hypo
tgggcccacatgcactgctgcggaacaatctcctgtgtatattccgtgataagaacaaggcaccgagcgtgtgcgagaatggcatttgtgtgaaa

SEQ ID NO: 256006 - DNA, 180 bp, Homo sapiens
  chr6:35045559-35045739
  hypo
atctgttagattaacgggattaacagagaccctaacatgcaggttgtgagcatgaagtgggatgcgccaggtgaaagctctcggccctgtcatatagtaagaaaggagcaggagcaccagcctccgcccccacatccttgcatcgtgcttagcgctgcaggtgggcgctccgtgtgcctc

SEQ ID NO: 256007 - DNA, 44 bp, Homo sapiens
  chr6:35048225-35048269
  hypo
gtaactagagcagccgctccccgagccctcgggtgcactgggcc

SEQ ID NO: 256008 - DNA, 324 bp, Homo sapiens
  chr6:35048591-35048915
  hypo
gtggacggtggctgcgtggtgccacctgtctgacacccctgtggtgttggccccttcgctccctgctgcttctcccggtgccgctgcctgtgccgtcctaaccagtggggctggctgatacctgtagtcgggcactgggccgagggttgcaagttccacctggatttttccctccacagtgccaagatttgctctcccagacgtcatccccactgagtcagaatgattcctgcactgggcggtcggcagatctgctgctgcctccaggggacacaggcaggaggcgccatgacagtctccatgaccctgcggcaccctcccgag

SEQ ID NO: 256009 - DNA, 287 bp, Homo sapiens
  chr6:35109282-35109569
  hypo
ctggaactgctgagacgaggccagagcatgcatggggcttttcttcaggctgtttggacagccgagaagccgagccacacccaggagggttgtttcacagcgtgtgccgcaggggcgcaggggccgcgctctttcctcacatgtgggagaagcggaggagccgccagggctggggccaggctctgcccactggggttccgcccgttgtcgccctccgcctcctgggctctagcccttgcctttcttgactctaagtctactctgtcgcccttgcagtgatgtgaaga

SEQ ID NO: 256010 - DNA, 270 bp, Homo sapiens
  chr6:35149810-35150080
  hypo
caaatgtttcttgagcgctggcaacgtgccaggctccttgctgggccccaaggagggagccacaaacacggacaaattccaggacctgctggagctgttctcgggctctaacgtgaggcaaaactgtgcacaaatcctggggcactctggacactgagctccggaccccgtgcaggcggtagtcgcctctgcgcggagtaggagctttgtgggcctcccacccagcatcaggagaatcagggcccacgtggcgggcgagggatctgcgac

SEQ ID NO: 256011 - DNA, 33 bp, Homo sapiens
  chr6:35357350-35357383
  hypo
aagtgctaggattacaggcgtgagccaccgcgc

SEQ ID NO: 256012 - DNA, 696 bp, Homo sapiens
  chr6:35374508-35375204
  hypo
aaccacttacttacacctcccgaaactgagaacagttttaccggttctggtgaaaaaaacccactaccagctcatatgtgggagtgggagctgaggctctgctgagtaacacggcccagtgcacacagctgtcagggcctggcccggctcgagtcctgctgtgtccgaagctctgccgttttctgcttcgtcctctagcatgttctgagatgccctgttgggatcctcaggcctgtcacttttgtcatctgcaaggggggcctataaggccttaatgggggctggcgaggcttgagtgggagcgtgacgcatagtgggagctcagtcagctccctcccctccctccaggatttggtcctgacagggagctccatcaggtcttccccagggtcaccagaggctcagatgctgtgttgtcaagtatatataccaggcagtattgtagcttttcctcctctgttactgcctgctaagcggggaccccacatcttcacgtcctcctcttcctggctctcatcaccacagcctggtgtgcattgccccgtgtccactgacacccacgccacatgggtccaaaaacagagtgtgttctcattgcctcatcccactcaccctgggctctgccgccactgcgctgtggctctcgggggtcccaccatctgacccttgtcacccgtgctgctccttctcttggga

SEQ ID NO: 256013 - DNA, 861 bp, Homo sapiens
  chr6:35454054-35454915
  hypo
ttagggggcgagcccggcttgtttatgaggaggagcgcggaggaggatccagacacacaggcttgcgcgcccagactcgcccggccagcggctggcggcctccgacgtcaccaaaccggttgggtgagagggcagagagcagggggaagggccgcagtcccgcccgcgccccccggcacgcaccgtacatcttgccctcgtctgacaggatgatcttccgccggccgcagggcgggtagatggccagggcctcctggaagctctgctcgatgtccgggctccacacgccctccgcatcgttgtccagccccttgtccaggccctcgggcccatcctcccgggcctccccggggctgctgctggcgttccagctgttggacgctattgtgctggttgctctgggctctgggcctgagcccactgggcggctgagcctgggggacagacagacaggaactgggaccagggtcctcctcgaccacagcaatctcctatcccacagccgctggctctggagctccgcccccagccccaagcccaccctaggagcaggtgctccaggtggaacggaggtaaccagaggaacaaccacagcttgttcagagctgtgtgacctgggatgcacgcgctacttcacctctctaggcctcagtcctgtaaaacgagaaaagggtctccttgaggagacctccttgaggttgtgagggttaaaatgtaaatgagctcatgacaaagtaccaaccacatgcccagctcataatactcaagaaataggtaatcggtaacaacaatgcctcataccaacacagcacttttgtagggaaaaggcattttcatattcattcaaacctcacaaaacta

SEQ ID NO: 256014 - DNA, 41 bp, Homo sapiens
  chr6:35895201-35895242
  hypo
aggcatgagccacggtgcccggcccccaggtatttttttta

SEQ ID NO: 256015 - DNA, 54 bp, Homo sapiens
  chr6:35911713-35911767
  hypo
gaatccataggatggcgtctcctctccactgaccatgtccgagtctgagtctga

SEQ ID NO: 256016 - DNA, 38 bp, Homo sapiens; identical to SEQ ID NO: 210760
  chr6:35944304-35944342
  hypo

SEQ ID NO: 256017 - DNA, 50 bp, Homo sapiens
  chr6:36060522-36060572
  hypo
gtgtcagcatacgccggtgtcacgactcaagacatcggcacctcccgagg

SEQ ID NO: 256018 - DNA, 35 bp, Homo sapiens
  chr6:36092696-36092731
  hypo
aaaaaaaagtttccggaggtcagtaaggtgtccca

SEQ ID NO: 256019 - DNA, 130 bp, Homo sapiens; identical to SEQ ID NO: 210761
  chr6:36165692-36165822
  hypo

SEQ ID NO: 256020 - DNA, 191 bp, Homo sapiens
  chr6:36178134-36178325
  hypo
ctaaagacacaattttccaccgagcagctgtccgcctgcgggacctgggaggggccatcctacggcacgcccggcggcaggcagagaacatcggctatgaccccgagaggggcactcacctgcccgagtcacccaaattggaagacttttaccgcttctcctgggaagacggtgagaggcctggatgggtg

SEQ ID NO: 256021 - DNA, 258 bp, Homo sapiens
  chr6:36198230-36198488
  hypo
cccttgggtgtggaagacaccgtggacaagctcaagatgctggaaggccgcaagaccagcatccgcaagtcagtgcaggtggcctatgaccgtgcgatgatccacctgagcagagtccgggggccccactccttcgtcacttccagctacctgtaagggcagggctgggcctgcatccgcttgccctgcctccatcccgcagggcacagagaagcctcttctgcccctgccagatgtatggccggcagcttccccctc

SEQ ID NO: 256022 - DNA, 197 bp, Homo sapiens
  chr6:36214657-36214854
  hypo
cttaaatatgtcttcttgaacgccatcgccccatcccagactcaggaccagcctccccgcgctcactgctgtcactgctttccgcactccctgcggattttaggattttagctcccatctcgcgtcctctctccagctcctcctgccccctgcctggtggtttcaccatccacttaccagcccgccgatggtgccct

SEQ ID NO: 256023 - DNA, 210 bp, Homo sapiens
  chr6:36238215-36238425
  hypo
agaaagtcagaggccgaggagatggaagaacaggtgttcaagggggacccggacacccctcactccatctccttctcgggcagtggattcctctccttctaccaggcgggggctgtggacgccctgcgggacctggccccccggatgctggaaacagcccaccgctttgcggggacatcggcaggtgctgtgatcgccgccctggccatc

SEQ ID NO: 256024 - DNA, 81 bp, Homo sapiens
  chr6:36314473-36314554
  hypo
actaattaatcgccgtagatcgagggaaggagagcagcaaatggcctcagctgtgtgggtcccgctcggtcatggccggaa

SEQ ID NO: 256025 - DNA, 64 bp, Homo sapiens
  chr6:36336750-36336814
  hypo
tcggaagatcttggcgtccttgtcttcccacttgatgtagggctcatatcgggtatcaaggagc

SEQ ID NO: 256026 - DNA, 145 bp, Homo sapiens
  chr6:36339126-36339271
  hypo
ggggcctgcggcatcgcggggaaggaacagaccccctgggtcctgcagccgagctctgcacagtgacataagttgagggactcctccttgccaggggtccaccttgccaggccagggtcatccaggtggccgaagttgctggtaa

SEQ ID NO: 256027 - DNA, 83 bp, Homo sapiens
  chr6:36343600-36343683
  hypo
gcctaccagggttcccgcttagaggaaagcctgtgcgtttccctgacctgagctgggcgcacggtgccggaagtcgtccttgg

SEQ ID NO: 256028 - DNA, 101 bp, Homo sapiens
  chr6:36344553-36344654
  hypo
agaaaaaaaaaaaaaaaaaaggaagggatgttattgtttcccaaatgaggcagtgaggctcccagaggttaagtgactagcccacacgcatacaggcagca

SEQ ID NO: 256029 - DNA, 120 bp, Homo sapiens; identical to SEQ ID NO: 210765
  chr6:36392402-36392522
  hypo

SEQ ID NO: 256030 - DNA, 38 bp, Homo sapiens; identical to SEQ ID NO: 210766
  chr6:36406489-36406527
  hypo

SEQ ID NO: 256031 - DNA, 80 bp, Homo sapiens
  chr6:36545729-36545809
  hypo
cgtgcccggcctggcaacggtattctaacttgaacacagtgtcaccaaccactgtttgcgaacattcagacagcatcaac

SEQ ID NO: 256032 - DNA, 102 bp, Homo sapiens; identical to SEQ ID NO: 210767
  chr6:36599663-36599765
  hypo

SEQ ID NO: 256033 - DNA, 41 bp, Homo sapiens
  chr6:36600065-36600106
  hypo
acactttcacatctgggaacggctttgatcctttcacagcc

SEQ ID NO: 256034 - DNA, 130 bp, Homo sapiens
  chr6:36657808-36657938
  hypo
aagaatcaaggaaacgtttattttatatgtttatagtggcattacggatctttctcttccatcagtgcgtcctgggtcagaactggctcaaagctggaaactaggtaagagattgcgattttctgtctcg

SEQ ID NO: 256035 - DNA, 229 bp, Homo sapiens; identical to SEQ ID NO: 210768
  chr6:36713048-36713277
  hypo

SEQ ID NO: 256036 - DNA, 74 bp, Homo sapiens
  chr6:36831577-36831651
  hypo
acttgatccacactcgatgtcacccttctgcttgagttgctgtcttcctttggcttccacgactccacattctc

SEQ ID NO: 256037 - DNA, 45 bp, Homo sapiens
  chr6:36897107-36897152
  hypo
tgatgcctcacccacggcgtccttggttctcgcaggacggccagg

SEQ ID NO: 256038 - DNA, 148 bp, Homo sapiens
  chr6:36926814-36926962
  hypo
gctaaggaggtgccggaaggatttccccacgacctcctcgaccttttgcttggtccccacagcatctgtgggcatcctcacctcccttctctcacctgccctgcagagatgggacgaggagctggccgccttcgccaaggcctacgca

SEQ ID NO: 256039 - DNA, 177 bp, Homo sapiens
  chr6:36936701-36936878
  hypo
ctgatgacacccggcggaaaagcaggctggagcctcggaagagctggccctggaccagaaggaaaagtaaggtgagtgaaagggaggccacgcttccttgtccctccgagaggaaggccagtgtcaggcaaagaagggtccaggagctcaaagacccagctccggggtggacggcct

SEQ ID NO: 256040 - DNA, 257 bp, Homo sapiens
  chr6:36937179-36937436
  hypo
gccccatttcactgcgaggcaaatcaaggccaggaaaaggcaaggttctgccctcggccaaagcctggacccctgactgctgggcccaagagctccagctacggagaggtagcttcggtacagaacacgagaacccaaggttggtactgctgccagttccccacgtggcccagccccacccacaggctctcctgggcccaggaatgtcctgcaggagggaggagtcggtttccaatgccagccgccctaacaaccca

SEQ ID NO: 256041 - DNA, 111 bp, Homo sapiens
  chr6:36939067-36939178
  hypo
cggcagcctcacctcggcctttaagccacatacagaaaagcactcgaaaaacactttagacaaatctgttgactgctgttgttgctgatgtaagcacggcagcctctggtc

SEQ ID NO: 256042 - DNA, 97 bp, Homo sapiens
  chr6:36992805-36992902
  hypo
agccaagtcttcctcgcagtcacaccttgcggcacccagtgttcctctctgagtcttcccaggccccttttacccagcctcccggcatgatccatgt

SEQ ID NO: 256043 - DNA, 837 bp, Homo sapiens
  chr6:37023812-37024649
  hypo
gacatgggccacatcggccacatcttctgagctgcggggtggaggcctggctgcccacctgcattccttactctgcgtacccatgatctcatcccggccctcagccacccacagggcaggaggctttgccccattgtgcagatgagacagccatgccctgccctgggatggtcatttggcctgggctcagggcactctagtgggccccaggctccggcggggtgagtggaatgtggtcacggaggccaccccacgctgtcttgttgggtttaatgagccccattggtctgtccataccctgaataagctctggtctaccgaccctcctatgggctgctggggcgggggaggtcccagggttttccagattcagctgtcctccctctgcagtctcagggacccagacagggctggctgacaaacaggtcctgcccgggatgggcgtggggctgagcgagcgaaactccttttaggaaggaaatctcggccaggttgagaaaccagcatcttgccaaggcctagggggtgggggagcccaggtgagccgactcagtcctcaggaatgggtggggtctccaggagaggcgggcacttcctccgccccagcccagggtcctgttcaatccttattgaggagtttcctggcgacaggcagtgacctgtcggctgcctgtgtgggaagccgcttggcgtggccctccccatctcattagtggtgattcacctggactcacctggctgtcagggacctgtcccactgcccgctggaaccagctcagcaggcaccctctgaggggcagagacctcgttccctcagctccccgtcctccatggtgt

SEQ ID NO: 256044 - DNA, 94 bp, Homo sapiens; identical to SEQ ID NO: 210771
  chr6:37033766-37033860
  hypo

SEQ ID NO: 256045 - DNA, 118 bp, Homo sapiens
  chr6:37060659-37060777
  hypo
cacagactggcttccccagccgcctgcctgcaccgaagaaaggcccagacagtagtgggacaaaacggcaccccatgagggcccaaggggtgagtgcggaacatgggctgggatgcag

SEQ ID NO: 256046 - DNA, 40 bp, Homo sapiens; identical to SEQ ID NO: 210772
  chr6:37100545-37100585
  hypo

SEQ ID NO: 256047 - DNA, 31 bp, Homo sapiens
  chr6:37102029-37102060
  hypo
gaaccttggagaatcgcggtgtgcgactctc

SEQ ID NO: 256048 - DNA, 44 bp, Homo sapiens
  chr6:37131659-37131703
  hypo
taaaactgaaataggccaggcgcagtggctcatgcctgtgatcc

SEQ ID NO: 256049 - DNA, 162 bp, Homo sapiens
  chr6:37275432-37275594
  hypo
tatcagaaaatattacgcaaggtattcttatgagtccggttcaacaacaacaacaacaaggacccgaatcaggtaaaccagaggctttggaaaatagaaaggccatctgcagctgaggcgttggagcctcttggtccggccggtcaggttgaatcatgctgg

SEQ ID NO: 256050 - DNA, 38 bp, Homo sapiens
  chr6:37340458-37340496
  hypo
ttttagaccgggcacggtggctcacgcctgtaatcccg

SEQ ID NO: 256051 - DNA, 86 bp, Homo sapiens; identical to SEQ ID NO: 210774
  chr6:37352725-37352811
  hypo

SEQ ID NO: 256052 - DNA, 439 bp, Homo sapiens
  chr6:37358449-37358888
  hypo
aagcagggagtccacggaagggaaatacaggctcctcatttatttatttctcttctttttctccaaagcaaagagattgttctgaagaccgtgctctaagggcatttgaaagactgccaggtagtgcgagcctgagatggtctggaggattctctctagccgtgactccgctgctctgaaggtcaactgagaagtcttgtgggacagagacttgagttaggaagccctcagtcacttgccttccacggtggccagccctgctgccatcattggctgaagcaccaccaggattcacggcacccaactgcttcagggtacttcgtagactctgcctcactacatgtcgaaagagttatttgagttctcttctgtttttttttaatttgttgttgttgttactgttttgatacctcggaaacacctccgttgacagttgttt

SEQ ID NO: 256053 - DNA, 99 bp, Homo sapiens
  chr6:37450275-37450374
  hypo
gccttgcctgcctgtcgaagatggattaactccgcactcccctgggatcgccacatgaccacttcaagtccccaagccgcccttcgctgcacagactgc

SEQ ID NO: 256054 - DNA, 187 bp, Homo sapiens; identical to SEQ ID NO: 210777
  chr6:37450650-37450837
  hypo

SEQ ID NO: 256055 - DNA, 597 bp, Homo sapiens
  chr6:37460887-37461484
  hypo
gcctaggggcttgtcgctcgcctggacacacccccatgccaggtcagaaaggcgagggaaccgctgcagcccacgcgagtcccgacgccttcccgcgaggagacggaggccgagccagccttgcaagttagcgcccgagccagtccgcgcccgaagatgccagctgtccctgggccggaaggtggtgtggggtttgttttgtcttctttccccccgatatctattttttgataaactagcaaaagcttgttcatcgctgaaaggctcaaagcacttttcaagaactggcatccaccccgagccttatgaattcattaattaagatgctggcagacagccactccacacacgccgccatccagccgcgctaggtaatgaggttttagtctcctgacccccgtcaagtggcgcagagccagatgtaggctgccgcgagaaatcacctgcccaatggcgacctgtcgctctcgcctggcagcaggtgaggctcatttaatggtcagcggcccctgaacagtcctctgcgtgctgcgagcctttctcccagcccctggcttggggttcagggtcccagcaaggtggcgtctaaccgcctgc

SEQ ID NO: 256056 - DNA, 153 bp, Homo sapiens
  chr6:37605017-37605170
  hypo
aggccccctccctggcgggccggccctgcccctgggcaccccagctggcgggggtcagtctttggtacaatgtggacactttggtgtgccgggggcaaggttgggggggtggccacacagctctcatcatctctgcaacgccaagaggaagat

SEQ ID NO: 256057 - DNA, 36 bp, Homo sapiens
  chr6:37608135-37608171
  hypo
ttttttcggagggggcggtgcggggacagggtcttg

SEQ ID NO: 256058 - DNA, 103 bp, Homo sapiens
  chr6:37642012-37642115
  hypo
tgtgtctctgacctccgggtacaagggcgctgtcactgaatacagcaaccagccacagctgaaaggatcagtgtgcaggccgccaccccgccaccacaattga

SEQ ID NO: 256059 - DNA, 102 bp, Homo sapiens; identical to SEQ ID NO: 210780
  chr6:37721653-37721755
  hypo

SEQ ID NO: 256060 - DNA, 35 bp, Homo sapiens
  chr6:37776700-37776735
  hypo
attacaggcgtgagccaccgcgcctggcaatgaat

SEQ ID NO: 256061 - DNA, 36 bp, Homo sapiens
  chr6:37791849-37791885
  hypo
ccggtatatattaacgtcatatttttaggattaaaa

SEQ ID NO: 256062 - DNA, 197 bp, Homo sapiens
  chr6:37841059-37841256
  hypo
aaaattggaacctaaggagttaatgcagacacaattaatcattctttctgtgtgctaccccctagggtttggtcaataaatcggtatttttataatagaaggtaaacacagccctaattcatacataatcacttgtttgcttgcttgctagagcctgtcgaattttattgggatcatttatgcggttgtgattcttg

SEQ ID NO: 256063 - DNA, 82 bp, Homo sapiens
  chr6:38020518-38020600
  hypo
tccatgttgaccgccgggcgtggtggctcacgcctgtaatcccagagtgattacaggcacgaggctgaggcagggagatcat

SEQ ID NO: 256064 - DNA, 166 bp, Homo sapiens; identical to SEQ ID NO: 210781
  chr6:38084362-38084528
  hypo

SEQ ID NO: 256065 - DNA, 180 bp, Homo sapiens
  chr6:38101943-38102123
  hypo
accttttggtctcccgctgtacctgggtaatatgagacacagtggcatttaattctgttgacatgcacattccgttctcctgagtgctaattcatatcctcatattccttgaaaagttacctcctccaagatcccttattgcagttgacttccccttggtgctcccgatttattacacat

SEQ ID NO: 256066 - DNA, 233 bp, Homo sapiens; identical to SEQ ID NO: 210782
  chr6:38118812-38119045
  hypo

SEQ ID NO: 256067 - DNA, 104 bp, Homo sapiens
  chr6:38121253-38121357
  hypo
tagtaagggaaggcagcatacgtcccagggacagtgggtttggatctgtctagaacagcggtttgtggctgtggcccagctccgagagtgatatttgctctggt

SEQ ID NO: 256068 - DNA, 82 bp, Homo sapiens; identical to SEQ ID NO: 210783
  chr6:38122002-38122084
  hypo

SEQ ID NO: 256069 - DNA, 63 bp, Homo sapiens; identical to SEQ ID NO: 210784
  chr6:38134384-38134447
  hypo

SEQ ID NO: 256070 - DNA, 537 bp, Homo sapiens
  chr6:38141418-38141955
  hypo
aaaggaaactcccacgccctcaccctcctttgatcagggttgcaggttggcgccgaagacccaaggactgcagtgctgctcacgtgccatgccgtcctggggagactcccaggctgatgctgatggcgacagaggccggagctctggggacagcggaggggcaggcaatgttgtgcgcagttacccagggcaggcagcactggaatggaaatcactaagtaggagacggagccacatcaagccaccatcgtcaaatgaggtccttttgatgaggattaggagaaaagcttcttggaactgctatttttcagtccccagttgagtactgtggtgtgggggaagcacggagtcccagttctgcgttcctgacgctgatgggcaggtggctgcctctccaatgcttcgataaacacaactggaggggcagctaagccacggcagtccccggcaggtttggccacgccagaactcggtatatgtttatctacatggacttcggaacagtgaattagcagcgggcatagtaactatttcctt

SEQ ID NO: 256071 - DNA, 186 bp, Homo sapiens; identical to SEQ ID NO: 210785
  chr6:38646372-38646558
  hypo

SEQ ID NO: 256072 - DNA, 93 bp, Homo sapiens; identical to SEQ ID NO: 210786
  chr6:39127059-39127152
  hypo

SEQ ID NO: 256073 - DNA, 41 bp, Homo sapiens
  chr6:39154859-39154900
  hypo
acagcaatgacggccgggcacggtggctcacgcctgtaatc

SEQ ID NO: 256074 - DNA, 239 bp, Homo sapiens
  chr6:39158097-39158336
  hypo
cagcagcctccaccccactacggtttgtagtaggtgcccgacctgaccggcaggcccacagctgggatgcgggcgggccctgctcctgctgtggtacggaaacacctgaccccacgcacagcggtacctccccagacacttcagagctccctctccaaatgccgagctcagtaataccggtaaacttaaacagctgaggccccagacctcagagaaccgtgtgatactccaccaaatgg

SEQ ID NO: 256075 - DNA, 823 bp, Homo sapiens
  chr6:39158588-39159411
  hypo
cgtcccggtcatctcgggacaccctagggtgaggggggaagaggccatcaaaggtggggtggggagccggccctgcctcatgtgcccttggggctgttagccttgttgtactcattcatcagctgttcgtaaggcacagagagctcagactcagtgctggtgaaggtggactcggaggaggaggggaactcgcccatgttcaggggcgccttggcttcagccccctgctgggggctctcctcccctgccaagttgtcctctagcgaggacttggaggtctcctcgtctgagaggccagcctccgtgttcacgaaggtgatgctggcgtcctggaagatgagtgggtggtagtcctgggcgtcccatggctcgcattcctcgctgatgcggtccagctggttcatgaacacctcgggggcaggggagctgtcttcaggggcccgtgccacagcctcctcatctggggaccttgatacgtggcctttgctcctcagtgtctgtgacacctcttccaaggtgggcacccggttcttggagtagactaccaggggcaccagggaagggggcagtgctgggagcccaccgccttgaggccccagccctgggcccgggcccgtctccccacccccgcttgtcttcatggccttcttcccgatctgcttgatgaggtcgttgtaggtctcttccttcttggaaagaaagctgaagatgttgacgtccttggaggctgtgctccccttcacctgcagggccttccgggagtgtggggagctctcaaaggactccttccgtcgccgccgccgcttcttaatggctttgtgga

SEQ ID NO: 256076 - DNA, 103 bp, Homo sapiens; identical to SEQ ID NO: 210788
  chr6:39162023-39162126
  hypo

SEQ ID NO: 256077 - DNA, 66 bp, Homo sapiens
  chr6:39162448-39162514
  hypo
cacgtcaggcagagcggcaccccgaagagaccatagaaaacacagaagaggcgaccggcgggggtc

SEQ ID NO: 256078 - DNA, 42 bp, Homo sapiens
  chr6:39185583-39185625
  hypo
cctggggagcagggaggcatcggatcctttctgcctgaggcc

SEQ ID NO: 256079 - DNA, 37 bp, Homo sapiens
  chr6:39691931-39691968
  hypo
gaagcataaaaagtgctgggcgcggtggctcacgcct

SEQ ID NO: 256080 - DNA, 296 bp, Homo sapiens
  chr6:39895079-39895375
  hypo
acttctctgtgagggagatccgcaggtagctgtgctgccggccgaagctgtctgtgaggaaggcggagaagggggccgcatgctcccgcaggaactgcctccgcctggacacctcctgcgaggacagaccagggaggaagcatgggcccctgctaccgggctgggaagaggcacaaggagaaccgcctgccccctcccttactctgacatctgtgcggagcttccaactcttccacatgtttgggctctgcaatgttggggaagctgggattgtccctctcgttgagaaatcagct

SEQ ID NO: 256081 - DNA, 35 bp, Homo sapiens
  chr6:39907360-39907395
  hypo
aatcgtgccaggcgcggtggctcctgcctgtaatc

SEQ ID NO: 256082 - DNA, 184 bp, Homo sapiens
  chr6:40359821-40360005
  hypo
gactgtagccgcccggcacgacccctcccgccgccgcagcagcaaagtcccccatgtcgaaggagtggctgcgtttggccttgccctccaacggcaaggggagcaggctcctggcccgggccgcagggggccccagcagtggctctcggtccgagtggtggccccgggccgacgtcccagcccc

SEQ ID NO: 256083 - DNA, 321 bp, Homo sapiens
  chr6:40360223-40360544
  hypo
ccaggagctcgttgcgcaccaccaccttcggcgggccctgcggcggggccccggctggtgcgctgcttggaggcggtggctgggcgccgttggtctgcgagtacacattgctcacggccgctgccatcttgctgggggcctcgtggttgcagaccttgtagcgcaccatgaggatgacgatgaagaccagcagcgtggccacgatgatgcccccgatgaccaggatcatggtgccgcccagaatctggctgtgcatggactggcactgcgggtagtcagccttggtgaagaactgggcgcagcccacgatgttggtggccg

SEQ ID NO: 256084 - DNA, 720 bp, Homo sapiens
  chr6:40399974-40400694
  hypo
tgggtgatgagaggcggctcgcacacaaactcctcctcacgcacatgccagaagtagcgacccttgaggccccctggggagccacaggtttccaggtcatcgtcccgctcgagcctccgcagccagagaagctcacaattgcagtgaagtgggttacccccaaaactaaaggacaagggtggggcaaagggtgtggctgtcaaagccgaagcctgggagcgggcaaagatgggatcagggggcagcttctgcagccgattggaggtgagatccaggcgggccagtttctgcaggtctgcaaaggtgccctcggcgatgtgatccagcaggttgtggtccaggctcagctggtggaggttgaccatgcgtcgcacggagtcccacggcaggccatggaggttgttgtaggagaggtccagatcctccaatgtcagcaggaagtcctcaaaagcctcatctgcgatgccgcccagctggttgttgttcacgataaggtgctgcaggttgaccaggccccggagggtgtcctccccaaggcttggcagccgattgctgtcaagatgcagggagcggaggctctcgaggtccagaaaggaaaagggctggatgtggctgatggtgttcctggacagggtcaggtccaccagccccgtcatgttggcaaagtcctggcggctgatgtggatgatgaagttgccgcccaggcgcagctccactgtc

SEQ ID NO: 256085 - DNA, 31 bp, Homo sapiens
  chr6:40624387-40624418
  hypo
ttttctgggctgggcgcagtggctcacacct

SEQ ID NO: 256086 - DNA, 120 bp, Homo sapiens
  chr6:40846066-40846186
  hypo
aaaaaaaccaaaaacaaaaaaaacctcatccagtaccattgctttgaggttcaaaagcagacaaaactagtctatggtaatagaaatcagaataatagttactcaggccgggcatgttgg

SEQ ID NO: 256087 - DNA, 73 bp, Homo sapiens; identical to SEQ ID NO: 210793
  chr6:41001834-41001907
  hypo

SEQ ID NO: 256088 - DNA, 46 bp, Homo sapiens
  chr6:41303868-41303914
  hypo
gggcagacgctaaccgtgagatgccagtacccgcccacgggcagtc

SEQ ID NO: 256089 - DNA, 230 bp, Homo sapiens
  chr6:41490965-41491195
  hypo
tggtactctggcagcgagacacttcgaggttctccaaccactcggaggtgagtatgaaggcggtggccgtggcagcacccaggccatggaggtgggtggccaagcggcaagattaggggcgtggggtccagagggacccctctggggagctggggtcctgggtggccaagcaggaactgggccacagacaggagcatctccacctgagctggccacgccctgaacaggga

SEQ ID NO: 256090 - DNA, 158 bp, Homo sapiens; identical to SEQ ID NO: 210796
  chr6:41511550-41511708
  hypo

SEQ ID NO: 256091 - DNA, 337 bp, Homo sapiens
  chr6:41620830-41621167
  hypo
caaggatgatccagactgcccgctccgatgtgcttaactgtctgtgcctcggggtcatcacctagaaaatggagctgtggggacggattcgtgagcttcaggcacacagtgaacactcagcgtccctgctgctgccgctgccgcaggcccccacacccccggctatttcacacacgctcatccctcccctctctcacccgtccccctctccaccgccaccccgcagactgctgtgtccactgcatcctgtcctgcctgttctgcgagttcctgacgctgtgcaacatcgtcctggactgcgccacctgtggctcctgcagctcggaggactcgtgcc

SEQ ID NO: 256092 - DNA, 127 bp, Homo sapiens
  chr6:41709760-41709887
  hypo
gtggaagagattcattccatcgtggccatggaatgcaaagacaagtcggaggggactggggacaggtgcagggatggggtgtggtcgggtggctgggagaggattcgagaggaagcccaggaaggaa

SEQ ID NO: 256093 - DNA, 270 bp, Homo sapiens
  chr6:41715220-41715490
  hypo
ccagggtgtaccctgtgcttcgtgtatcgtttctgtgtatttttccttcttgagggtggccgcaacagactttcatcttattgactttttggttcaagcatcggaggccaggaggtgcaagcgataagagagaaagttgccgtaagatggagtggtgaagattacgtcttgttcccaaaccagaggcataatgtgtgcatttagggacgagggccagaaaaaggtagaggcagagtgctgggatagataggatctatagccagggtttcg

SEQ ID NO: 256094 - DNA, 82 bp, Homo sapiens
  chr6:41715520-41715602
  hypo
aatagttctttgttgtgggccccatcctgtgtactatagaatgtttaacagcattcctggcatctaccgactcgatgccagg

SEQ ID NO: 256095 - DNA, 80 bp, Homo sapiens
  chr6:41753206-41753286
  hypo
catgatggacaactctactgcggccgtcatcatgcagagttgctgcgcccgcgctgcccggcttgtgaccaggtacagcc

SEQ ID NO: 256096 - DNA, 1037 bp, Homo sapiens
  chr6:41773491-41774528
  hypo
cttgtgcagcagctcgcagagaaattcctgcgcgtcctgttggtcgtagccgcggaaggcagggatcaggctccacactgagtggagcatggcgaagggcgacactagggcccacttcccggaccacatgactcggaagagggtgtgcagttcacggcagagggaaatgtgctttgaactcggctccttgttctggatgagctccagactccgactaatggaggccctgccgttccagcagaagccctcccgctcgcatgcctcggccctgtcatttctcaaggacagctccgtggccgagctgttggttggcttgccagaaagctgagtcttcccgttggtggctttgggaaacagatgttccgttttggaagggtcaaggttgaggaaacattctcggaacttctggaggtggctgagcacctggaggatggagttcatgtagcaggtgttgcccaggttgcgcaggcccgtgacgcctggggccatggccggctggcgacgcagcttgagtgtggcggcgggcactctgcgtgaggtagggagggcggcggggcgcgaggcagccgggcccgcgtcgcggggcgtgtgcaggagcagccgtgcactcttgcgcggaggggtgctggccagctcctccagcagccgccgtttcacctcgcgccgccgcctccgcgcctcctccttcttgcgctccagggcctcctcctgccgccgctgctccagcttcgcctggccccgggagctcttctcgaaccacagccgcagcgtcctggccagcaggcgctgacgccggtaccacagagccgtgagcatctgcggctgtccctgaggagcgcgctgcggcaggaccacgtcctcacccgaagccatggaccgcagcgtccgcccacgtctcaccggcgtgtcctgtttctggccccggaccgccaggagggagcttcttagcagcttcaggtccccctctgggttatcattgagcacgtagtccttgcacaggtaacagaacacgtagagatcccggacttccatggcta

SEQ ID NO: 256097 - DNA, 200 bp, Homo sapiens; identical to SEQ ID NO: 210798
  chr6:41827196-41827396
  hypo

SEQ ID NO: 256098 - DNA, 42 bp, Homo sapiens
  chr6:41956742-41956784
  hypo
ctgaacttcattaaaatttaaaacctccgctccacaaaaggc

SEQ ID NO: 256099 - DNA, 47 bp, Homo sapiens
  chr6:42017469-42017516
  hypo
ccaagtgggccattgacaggcggggcggccctcagcacaaaatcacc

SEQ ID NO: 256100 - DNA, 203 bp, Homo sapiens; identical to SEQ ID NO: 210799
  chr6:42047606-42047809
  hypo

SEQ ID NO: 256101 - DNA, 44 bp, Homo sapiens
  chr6:42062061-42062105
  hypo
agcaagcctgagcaacacagcgacaccccatctttttttttttt

SEQ ID NO: 256102 - DNA, 367 bp, Homo sapiens
  chr6:42073935-42074302
  hypo
cctccagctcattccggatctgccgcacactgggagttggagagtcttggggaatgtagtccacagagggcagggtcaggctgggggcagcctctgtctctgtcaggctgctgccgccaagactcttttcaggaacacctgggggagtgtcctttgctggcaggctcaggagagtctccttctcaggcaggcgggggcccttcttgccctccttgctctgaggggccactgttgggcctggcctgtgactgaggaatcggtcctctctcctggagccacagagataggctgccagctcgttccgcagcttttccatctggctggggtccctccagtccacaggtgctgaagacgctgtgttctctgg

SEQ ID NO: 256103 - DNA, 162 bp, Homo sapiens
  chr6:42090713-42090875
  hypo
cctcatatgcatcaccctggcgatggcttgattcagactggggagggcaagagagaaccccagaaaacacaaccttgctgccacccactgttctatggacccagctctcagacgcagagggacaggccgggcgcggtggctcacgcccgtaatcccagaact

SEQ ID NO: 256104 - DNA, 39 bp, Homo sapiens
  chr6:42105772-42105811
  hypo
gcaacggatcgagactccgtctcaaaaaacccccagagc

SEQ ID NO: 256105 - DNA, 76 bp, Homo sapiens
  chr6:42110870-42110946
  hypo
gagaatgtgggatgacgaaatcttggcattctgtgtctgtacatcacattgtttttctttttcttttcttttcttt

SEQ ID NO: 256106 - DNA, 39 bp, Homo sapiens
  chr6:42510150-42510189
  hypo
tttgaggttgaggccgggtgcagtggctcacgcctgtaa

SEQ ID NO: 256107 - DNA, 180 bp, Homo sapiens
  chr6:42762703-42762883
  hypo
aaaaaaaagaaacttaccataagtcatgcaagagtctatttactgatctctccaccaatactcacaaagagaattacgcatgaacgacagtcaaggtaactgaaaagatctacatctattgttagaaagttgtctaacttgttttccaaaactttctgctattagatttaaaaacgtgac

SEQ ID NO: 256108 - DNA, 37 bp, Homo sapiens
  chr6:42773435-42773472
  hypo
gtgctaaagaggacaaggaacgggccaggtgcggtgg

SEQ ID NO: 256109 - DNA, 79 bp, Homo sapiens
  chr6:42813437-42813516
  hypo
agccactggcaggtgcgccggtttccaatacttaacaatacatcagaatcaactggaaagctttaaaaagttatagatt

SEQ ID NO: 256110 - DNA, 35 bp, Homo sapiens
  chr6:42951451-42951486
  hypo
ggattacaggcgtgagacaccgtgcctgcctggtt

SEQ ID NO: 256111 - DNA, 85 bp, Homo sapiens; identical to SEQ ID NO: 210801
  chr6:43057813-43057898
  hypo

SEQ ID NO: 256112 - DNA, 266 bp, Homo sapiens; identical to SEQ ID NO: 210802
  chr6:43096727-43096993
  hypo

SEQ ID NO: 256113 - DNA, 34 bp, Homo sapiens
  chr6:43104148-43104182
  hypo
aggttcaggtgggcccgctcgtctacctggtgtg

SEQ ID NO: 256114 - DNA, 31 bp, Homo sapiens; identical to SEQ ID NO: 210803
  chr6:43118951-43118982
  hypo

SEQ ID NO: 256115 - DNA, 91 bp, Homo sapiens
  chr6:43119822-43119913
  hypo
gatccacccgcctcggcctcccaaagtgagccaccgctcaaagacgtgagccactgcgcccagcccacccgccctcttctttaaccttcct

SEQ ID NO: 256116 - DNA, 130 bp, Homo sapiens
  chr6:43191028-43191158
  hypo
tggcctcctccctgcgcctcctgcgggccgactgcctcagcacgggcatggagctgctccggcggatccaggagaggctgcttgccatcctgcagcattctgcccaggtactgcccggcccagacccctt

SEQ ID NO: 256117 - DNA, 215 bp, Homo sapiens
  chr6:43230737-43230952
  hypo
atcgacaaggagacggagctcaaggacttccctccaggggctgagcccagcacatcgggcaccacggatgaggagcccgaggagctgcggccactgcccgaggagggcgaagagcggcggcggctgggggcagagcccaccgtccggccccggggacgcagcatgcaggcgctggcggaggaggacctgcagcatttgccgccccagcccctgcc

SEQ ID NO: 256118 - DNA, 250 bp, Homo sapiens
  chr6:43251540-43251790
  hypo
agacgggccagccccggtgtccccgctggagccaagccctgagaaagtggccaccatctcccccagacgccatgctatgccaggctctcgccccaggagccgtatccctgtcctgctctctgaggaggacacgggctcggagccctcaggctcactgtcggccaaagagcggtggagcaagcgggctcggccgcagcaggacctggcgcggctggtgatggagaagaggcagggccgcctgctgttgcgg

SEQ ID NO: 256119 - DNA, 65 bp, Homo sapiens; identical to SEQ ID NO: 210805
  chr6:43325214-43325279
  hypo

SEQ ID NO: 256120 - DNA, 101 bp, Homo sapiens; identical to SEQ ID NO: 210806
  chr6:43334539-43334640
  hypo

SEQ ID NO: 256121 - DNA, 83 bp, Homo sapiens
  chr6:43364279-43364362
  hypo
tagcacggggggaacgaactggtacatggggaactggtcaaacaagttttaaaaagcctcctgcttcccgcagaggtagccgt

SEQ ID NO: 256122 - DNA, 77 bp, Homo sapiens
  chr6:43424470-43424547
  hypo
aaagacaaggacccagaacataatttctagtttgtgcaggacaacagggcagaggtcaggaacgctagcgcccatct

SEQ ID NO: 256123 - DNA, 319 bp, Homo sapiens; identical to SEQ ID NO: 210807
  chr6:43456970-43457289
  hypo

SEQ ID NO: 256124 - DNA, 250 bp, Homo sapiens
  chr6:43478566-43478816
  hypo
ggccccaggggccacggctgggcagagccagcttgagctgctggggagaagggtaccccatagggtccctagggcaggggagcctcagatagatgcaaggtcctggtgccacaccttctcaggtacgcagggcactgttgacatctgagggtgtgtccgtgccgcgagactggggcagccaatacaaagaaggtgccagggccagggccctggagcactggtgaggacgtgaaggcggctgagccacact

SEQ ID NO: 256125 - DNA, 112 bp, Homo sapiens
  chr6:43639543-43639655
  hypo
cctcagaaggggtgaccccacgggcatgcgcaccctgttccagcgggggccttttttgtagatgggcttgacggagccaggagcccagcgcgtcaggtacctgtggagggag

SEQ ID NO: 256126 - DNA, 309 bp, Homo sapiens
  chr6:43641286-43641595
  hypo
tgcgccacacggagcggccagctggcagggggtgggccgggtggcctccagccagctctttgggaacaccccagctctagcaagaaccaagtctctttcctaaaccagccccttcctacctctcctgaaggggcagcaggaggagcgacacagcagcagacaaagcatggctccgccaggccccagcggagcctgggcccatgcatggcagcattaaacgagactcccctgcaagggaatccatttccttcgtagcctgaactccccctcccgctcagcgtggccttttgcaaccgactagcccccaca

SEQ ID NO: 256127 - DNA, 281 bp, Homo sapiens
  chr6:43706686-43706967
  hypo
ggatgagggtggggcgatgggaggaggtgtgctactcaacttctcaatggttgttgcatttctggaatttaagactccaaagcccatcctcccacccccactccactgtttaccttctggctttggtgatgggctgcaccttttctgaggacgctgtgcaggccaatgcgggtgggccagacagaacatgtctgaggacgggatgtggtccacggggtgccagtttgcaacctcctcatccagccaaactgtactttttgccattccgttgtataggactg

SEQ ID NO: 256128 - DNA, 307 bp, Homo sapiens; identical to SEQ ID NO: 210809
  chr6:43745061-43745368
  hypo

SEQ ID NO: 256129 - DNA, 337 bp, Homo sapiens
  chr6:43748286-43748623
  hypo
gacacgcctgtgtgcgcccgcgcatgcctccccagagaccacctgcctcctgacacttcctccgggaagcggccctgtgtggctttgctttggtcgttcccccatccctgcccaccttaccacttcttttactccccccaccgcccccgctctctctctgtctctgtttttttattttccagaaaatcagttcgaggaaagggaaaggggcaaaaacgaaagcgcaagaaatcccggtataagtcctggagcgtgtacgttggtgcccgctgctgtctaatgccctggagcctccctggcccccagtacaacctccgcctgccattccctgtaaccc

SEQ ID NO: 256130 - DNA, 391 bp, Homo sapiens
  chr6:43749537-43749928
  hypo
tttgctgtagcgctcggatccttccagggcctgggggctgaccggctgggtgggggtgcagctgcggacatgttagggggtgttgcatggtgattttttttctctctctctgctgatgctctagcttagatgtctttccttttgcctttttgcagtccctgtgggccttgctcagagcggagaaagcatttgtttgtacaagatccgcagacgtgtaaatgttcctgcaaaaacacagactcgcgttgcaaggcgaggcagcttgagttaaacgaacgtacttgcaggttggttcccagagggcaagcaagtcagagaggggcatcacacagagatggggagagagagagagaaagagagtgagcgagcgagcgagcgggagagcgcctga

SEQ ID NO: 256131 - DNA, 167 bp, Homo sapiens
  chr6:43752449-43752616
  hypo
tgaaggaagaggagactctgcgcagagcactttgggtccggagggcgagactccggcggaagcattcccgggcgggtgacccagcacggtccctcttggaattggattcgccattttatttttcttgctgctaaatcaccgagcccggaagattagagagttttatt

SEQ ID NO: 256132 - DNA, 83 bp, Homo sapiens
  chr6:43753108-43753191
  hypo
ccacatgctgcacgcgcatctcgcccccaggggcactgcctggaagattcaggagcctgggcggccttcgcttactctcacct

SEQ ID NO: 256133 - DNA, 76 bp, Homo sapiens; identical to SEQ ID NO: 210811
  chr6:43755593-43755669
  hypo

SEQ ID NO: 256134 - DNA, 195 bp, Homo sapiens
  chr6:43755969-43756164
  hypo
ggcaggtaggggcttttttcatcccatctggatttttgctggagcctttaaattggccgcctggcttctcctctggccttcctttagttgaatctcacacaactgccagagtgagcctgttaaaatgtgagttaagttttggcaccttttgactcaaaaccttccagagatagttttactcggagaaaaacccaa

SEQ ID NO: 256135 - DNA, 100 bp, Homo sapiens
  chr6:43814641-43814741
  hypo
tcgttggctgaaacatcattatgcggtacatgactgtataaaactaaataggtagtttcatgagagaaataatcagaagttactacgctgttttaactga

SEQ ID NO: 256136 - DNA, 33 bp, Homo sapiens
  chr6:43857893-43857926
  hypo
aagcctcatactgtccccgtgagttgggcaagg

SEQ ID NO: 256137 - DNA, 117 bp, Homo sapiens; identical to SEQ ID NO: 210812
  chr6:43890879-43890996
  hypo

SEQ ID NO: 256138 - DNA, 189 bp, Homo sapiens
  chr6:43891389-43891578
  hypo
tagttctgggtacctgcagacgtgggctctcttgcaggtttgaggtctgggagtggcccagccagggactctggatgcctttgggagggctccggtcccttccccgacatactcaccatggaagcaaccacgtagtgtccctgggcagccgggtgggtgtgagtcaccgggcaggccaaaccccaaatg

SEQ ID NO: 256139 - DNA, 165 bp, Homo sapiens; identical to SEQ ID NO: 210813
  chr6:43893235-43893400
  hypo

SEQ ID NO: 256140 - DNA, 92 bp, Homo sapiens
  chr6:43894169-43894261
  hypo
gctgttgccctccagcctgccgcgcttcccggggacctgcaaacgtccatcctttcctcggtcgattcctcgtccagcctgtggtccttggg

SEQ ID NO: 256141 - DNA, 50 bp, Homo sapiens
  chr6:43894752-43894802
  hypo
cccaatcccagtgccgggaagggggacagagggcccgggagctgcccccc

SEQ ID NO: 256142 - DNA, 55 bp, Homo sapiens
  chr6:43895090-43895145
  hypo
ggctcgaggtgtggcgacacagtcagggatgattgagactcggcaaacaggaata

SEQ ID NO: 256143 - DNA, 133 bp, Homo sapiens
  chr6:43917992-43918125
  hypo
cattcaactccgcctcgtttgttcaacaatcaagtattatgggcatgttctaggccagaccctccattaggttctgggatcgcaaagcagcctccaacccagctctggagaagacgcacgaaggcttcatgaa

SEQ ID NO: 256144 - DNA, 192 bp, Homo sapiens
  chr6:43990914-43991106
  hypo
ctggatgcccacctgcgtccggcggccaagccagcgggcctggcggtaatgcaattacagcaccattccattaaagggagcttgggttctttggggacaaggggaagggttccagaaggacaagcaggagaggacaaggacagggtcagagggaaacaaatgcaggagtgacacccacggccaagatagatc

SEQ ID NO: 256145 - DNA, 126 bp, Homo sapiens
  chr6:44030801-44030927
  hypo
gtgcctgtgtggggggaacaggaccgagcttctgccaagggcccgctgccggctgttgctgagcttgtgctcgccagaggggtgggggcggcaggcagacaatggaccccacggcccagcctcctg

SEQ ID NO: 256146 - DNA, 144 bp, Homo sapiens
  chr6:44077027-44077171
  hypo
cactgaggaggctgcgcacggggaggttggagcggaacggccttgggctcccacctgcacagtaggatctcacccccggattgaccccggccctggccctcctccacactcttgacacaggaggaggcacgcctccagtgaatt

SEQ ID NO: 256147 - DNA, 43 bp, Homo sapiens; identical to SEQ ID NO: 210814
  chr6:44086953-44086996
  hypo

SEQ ID NO: 256148 - DNA, 40 bp, Homo sapiens
  chr6:44089393-44089433
  hypo
tgactgggcatagtggcttacgcctataatcccaacactt

SEQ ID NO: 256149 - DNA, 34 bp, Homo sapiens
  chr6:44090098-44090132
  hypo
catgagccaccgcgccctgccagagagctcattt

SEQ ID NO: 256150 - DNA, 218 bp, Homo sapiens; identical to SEQ ID NO: 210816
  chr6:44120364-44120582
  hypo

SEQ ID NO: 256151 - DNA, 167 bp, Homo sapiens
  chr6:44121130-44121297
  hypo
tagagaaaaatgatacgggttttaagaagatgcttgttgattcaaatgactagatttccaatagtagaattcctgatgaggagagtagaatgaggggttgtagcggaggaagctgaagttctgtgatcacgctggggcacggggcactatcccgtcctggggcccgg

SEQ ID NO: 256152 - DNA, 32 bp, Homo sapiens
  chr6:44150584-44150616
  hypo
acaggcatgagccaccgcgcccggcctcagta

SEQ ID NO: 256153 - DNA, 36 bp, Homo sapiens; identical to SEQ ID NO: 210817
  chr6:44166169-44166205
  hypo

SEQ ID NO: 256154 - DNA, 564 bp, Homo sapiens
  chr6:44222494-44223058
  hypo
tttagacggccccgcgcgtagactctgagcaggagggcagcaaagaccacagccacccccagccctcccaccacagtgacagtgtggccatagagaaggcaggaaagaaggatggcaaaggcctggcggagggtcatgatgatggtgaagacggcagccccaaactgcccaatggtgtaaaagatgaagagctggccacatgcggagcagatggagagtagcagggcatgggcagcaaactcactgtgtcgccccatgaagcgggttccctccagtagggccccctgttctagcagtgagcccactgtgaagaggcaggagaagaaattgaccccaaacatcatctgcaccgatgacatcttataggcaaacagggcatcctgccagtttgaggtgaagctgtcaaaagcaatataacctgccagtaagatgaggcctgagagtgtggtggctggggagctgcggggctctggtccgctggatagcagaaacatgctgaccccaatggagatgagggtggctgtcaggtactcccagtgttcgtagctgcgccgagacacaagc

SEQ ID NO: 256155 - DNA, 237 bp, Homo sapiens; identical to SEQ ID NO: 210819
  chr6:44227780-44228017
  hypo

SEQ ID NO: 256156 - DNA, 170 bp, Homo sapiens
  chr6:44229401-44229571
  hypo
ttcctctgcctggctctggccgcccttccagcaggcagcgggcacaggccaagtgctggcgctggcaggccacatgaagggctgtgtcaccatgccggtcctgtagtgcccggctggcccccttcagcaccagtgcccgaactgcgcccggttggtccagatgtacagcc

SEQ ID NO: 256157 - DNA, 105 bp, Homo sapiens
  chr6:44250124-44250229
  hypo
tgagcacacgcaggcggctgtggctcagcagcttggcagcacctcgtgcaccacggtctccaatgaggttttgtgacaagtccagctcctcgaggactgggtggt

SEQ ID NO: 256158 - DNA, 31 bp, Homo sapiens
  chr6:44375066-44375097
  hypo
ctttttttttttttttgagacggagtcttgc

SEQ ID NO: 256159 - DNA, 127 bp, Homo sapiens
  chr6:44449535-44449662
  hypo
catacatttatattcggattagtgccgcacactcagtttggtgtcattttcctctgagcatcgtgagtattttcccatgacatttaatattttttgaaagcgtggtttgtaccggctgcgcataagg

SEQ ID NO: 256160 - DNA, 254 bp, Homo sapiens
  chr6:44451224-44451478
  hypo
ggagctccccccaccgcctcccaccgccctccccgcccaaccgtgagatgcagatacattgtactcaaaatgtctgagcgtggtgtaattttgttctaaatcagatgccattttaacctgtattataccacgggccagtggcatttcagtagagacacgtgtacagtaggggaatgctttcatctgaaaatgttctacgctgtacgtgtacttccctcaagtagcagcgcacctccttccggggctgagtttga

SEQ ID NO: 256161 - DNA, 534 bp, Homo sapiens
  chr6:44695620-44696154
  hypo
tgagcgagcacgcacgcgtacacacgaggcacgcaggtgggcatgcgtgcgttaggtgtacctgtacacttgctgctcccctgatgatttgctcaacagtgtctgcaattggcagccagaaggagtccgcaagaagcaggagggttcggacctgagaccgcgccacaggaggaaggccaggatctgggagcgcaaggtgagtgcaggggaaaacagcctgagcaggtcttgagccagcttcctgctgcctggggcaatgatggcgtcaggcctgtggaaataagcgccaggtttgaatactcaaggacagtaaagccaattaaacaagtgggtgcccctctctccttttctgattaggcctctcaggccttgcgccatctcgtgctaggatgcctcttcagtctctttctcactacttttatcctcacgctctcagctctggtcgtgtgccctgccttggggcagacacctcctggactgcaccctgaaatgaatgtctgaagcctagccctgccctccggaaagaacagccag

SEQ ID NO: 256162 - DNA, 42 bp, Homo sapiens
  chr6:45030134-45030176
  hypo
cactaaatggagcatcaaagcggatcagccttctaaagagta

SEQ ID NO: 256163 - DNA, 39 bp, Homo sapiens
  chr6:45492176-45492215
  hypo
tatctaaagcttatcgccatctcgcgctgtacccaaaac

SEQ ID NO: 256164 - DNA, 35 bp, Homo sapiens
  chr6:45492560-45492595
  hypo
tggtagaggctgggcgcggtggctcatgcttgtaa

SEQ ID NO: 256165 - DNA, 130 bp, Homo sapiens
  chr6:45544535-45544665
  hypo
tcaacaatgcccttttgatacgtcacagaagacggtaactatgacagcccatagaccacgcccactttacggccagccctctcagtccaggaacttgttgaaagttatcgtctcaaaaattctgtcacaa

SEQ ID NO: 256166 - DNA, 319 bp, Homo sapiens
  chr6:45608783-45609102
  hypo
ctcactttgtcggcggagggtcaggactggccctgtagtctgctcataggacctggctgtcacccacaggcaattcatcctgaccgcgtctgcaactgtgtatggaaaacaacagcagtcgctttaacagcaaaagcaacaaacacacaccaaacgggatcatccctgtgctcccaggtggtgggaggcagatacgggagggaggacacattttcctgcgatattgaataagatgagcaatggttattttgggccagtctccagcaagcatttggagagcgcctcagaactgcagatgaagccccggattgactttatt

SEQ ID NO: 256167 - DNA, 31 bp, Homo sapiens
  chr6:46951822-46951853
  hypo
tgctgtttttgctgttgttacggagtcttgc

SEQ ID NO: 256168 - DNA, 31 bp, Homo sapiens
  chr6:46952093-46952124
  hypo
gagccaccacgccccacccaacaaagggttt

SEQ ID NO: 256169 - DNA, 152 bp, Homo sapiens
  chr6:47084373-47084525
  hypo
cagggagaaagttggacacacgcacagaaagtggggcatagggctgggtagggaaactattgcagggtaatgacgtttctcgtccctcctcgggtccacctggctggcctgggtgtggcaagaatacttccgactcattcaaagaagcctca

SEQ ID NO: 256170 - DNA, 631 bp, Homo sapiens
  chr6:47201998-47202629
  hypo
tgctgcgcacggcctaaaacctgtacttctgactctcaagataagttcaactttaaatctttggatacagcaagcttggtaaataattttcaaaaatcttgccagactacattttatcaggccttccccgaaacacacatttgatagcatcatgaggataaagggtggccgatagctctccaccgggcagtgcgagctgcaaagattttggaggcgtgtcttcgccagccaatggcgaggttactctcgggccagcgtatcttgaagttttggactggtcttcctgggcaggtaattcagatgactcaactctcagctacaactggactgtggacggggagggacgaatcccaggggctctttggggggtttaagtgcgtgtgtgaggtctgctgcgatgcccgtacctttggtaataaaggaaccgttcctgctcagcgcggaggagccgctggatgtagagtcacagcggagaaggggctccgactcatccacgaagaagcccttgttcttgtcctgtggggaaggctccaccgtcaggagagcggaattctcaagtttcgcgttggggctggggatggggctcgggctaagcgggctggggctcatcgggagagctagtttgtcagtt

SEQ ID NO: 256171 - DNA, 80 bp, Homo sapiens
  chr6:47221022-47221102
  hypo
ttctccacaacatcgtttctccggtgctggcgcagggcgctaattagctgggcgaggctggcctcggggccccggatggt

SEQ ID NO: 256172 - DNA, 41 bp, Homo sapiens; identical to SEQ ID NO: 210827
  chr6:47412331-47412372
  hypo

SEQ ID NO: 256173 - DNA, 176 bp, Homo sapiens
  chr6:47539956-47540132
  hypo
gtatatcaagaagcaggggccgggcgcagtgactcatgcctgcgcccggatccactgcgatggtgtacaagtgctgggtgacgaattgttctgtatcttgttgtatttacatggtgcgacatttgtcaaacattactgaaatgcatatttaaaacgggttcattttattcattgta

SEQ ID NO: 256174 - DNA, 95 bp, Homo sapiens
  chr6:49221778-49221873
  hypo
ctgcctcagcctcccgtgcactcacatttctattacacacacacacaagcatgcatattttatttgaagtgttaaaaatgaagaaactggccggg

SEQ ID NO: 256175 - DNA, 144 bp, Homo sapiens
  chr6:49453725-49453869
  hypo
tgaagcatcctgtatcgtcacgggtacgtcctaaatccaatgacaagtgttcttataaaagacaagagaaggcacaaagacaaagaaaaagccacgtgaaacacaatagaaggcataaataaaaagccacgtgaaagcaaaggc

SEQ ID NO: 256176 - DNA, 98 bp, Homo sapiens; identical to SEQ ID NO: 210828
  chr6:49708447-49708545
  hypo

SEQ ID NO: 256177 - DNA, 224 bp, Homo sapiens
  chr6:52141055-52141279
  hypo
ttccacttaccctgccgtagacagggttggcagctgccaaaacactgcagcgggcattcagccgagcatggatgccagccttggcaatggtcactcgaccctgctccatcacttcatggatggctgtgcgatccatgtcagacattttgtcaaattcatcaatgcaaaccacgcctcggtcagccaggaccatggcccctgcttccagacggcgctctcctggg

SEQ ID NO: 256178 - DNA, 142 bp, Homo sapiens
  chr6:52171805-52171947
  hypo
cttaaactggaaaacctcggtatgtcaaggcctgcacttcatgtgtccgggcccagatgaactgaggactgacctcaaatgcctcgctcacctggctcccagctcacctgggagaagcgtttctgttcgcggaacctgaact

SEQ ID NO: 256179 - DNA, 413 bp, Homo sapiens
  chr6:52267886-52268299
  hypo
catagttccttgtccgtcttagctgcattcgtgtctcactgcggctttgccaattttcctttcttttctgcaggttgcataccctgtcctgagggcgcggcacggagtgcatgcgggccgctgccatgacgaccgccatcttggagcgcctgagcaccctgtcggtcagcgggcagcagctgcgccgcctgcccaagatcctggaggatgggcttcccaagatgccttgcactgtcccagaaacggatgtgccccagctcttccgggagccttacatccgcaccggctaccgccccacggggcacgagtggcgctactacttcttcagcctctttcagaaacacaacgaggtggtcaacgtctggacccatttactggcagccctggccgtcctcttgcgattctgggccttt

SEQ ID NO: 256180 - DNA, 296 bp, Homo sapiens
  chr6:52344289-52344585
  hypo
gcatattagtatgtcgtttaaagaaagctcattagtttctgtcataaatgcatacctgtgaatttatcattggagggttaatactattttactcctgattgcgtgagagaacatcaccaagctaagtgtgttgctaccttctctccagtgtttggtcaccggttcatcatccttgatacagacgagtatgttttgaaatacatggagagcaacgctgcccagtattcaccagaagcactcgcgtcaattcagaaccatgtccgaaagcgagaagcgcctgctccagaagcagaaag

SEQ ID NO: 256181 - DNA, 151 bp, Homo sapiens
  chr6:52409343-52409494
  hypo
gaaatgcatcctaacacactcggcactggcgtttgagtccatcttgctcgagtctacaaagaccggccaatgaccacctacgtgagggaacccgataagcagaacttcatgatgatgatttgattccagcgtcttaaaccaaggccaagaa

SEQ ID NO: 256182 - DNA, 97 bp, Homo sapiens
  chr6:52769065-52769162
  hypo
gtgtgacccactgctcctggcctgctccgtcttttacttcacctccccacgatctcacaaatgtccatgattagggagggaacgtcactggaggaaa

SEQ ID NO: 256183 - DNA, 43 bp, Homo sapiens
  chr6:52856825-52856868
  hypo
tacaggtgtgagccaccgtgccggctggttaataccatttttc

SEQ ID NO: 256184 - DNA, 65 bp, Homo sapiens
  chr6:52928942-52929007
  hypo
tcactctctcgctctctcccctccctcagcactttcacctccatttctgtgccaaagatgtacta

SEQ ID NO: 256185 - DNA, 91 bp, Homo sapiens
  chr6:53052068-53052159
  hypo
aaaggatagccaggacacttcgcagggcctcaagagcctccacctgtatttcttcctcattcctcccaagtttacttgtcgcaggtagaaa

SEQ ID NO: 256186 - DNA, 206 bp, Homo sapiens; identical to SEQ ID NO: 210834
  chr6:53111001-53111207
  hypo

SEQ ID NO: 256187 - DNA, 156 bp, Homo sapiens
  chr6:53139851-53140007
  hypo
acacctgttccccaagtccccgtctctaatacttacagtggccgcaggggacccagttcatcacaaaccaccagatgttcagcatcgaggcatggtggtagacgtgcaggaccgtgatctggtggttgttcttgcgcaggatgaagaagaaagtgt

SEQ ID NO: 256188 - DNA, 43 bp, Homo sapiens
  chr6:53154515-53154558
  hypo
caaaacaaacaaacagaaaaacgtgtagctaaaatgatatttg

SEQ ID NO: 256189 - DNA, 86 bp, Homo sapiens
  chr6:53188589-53188675
  hypo
aggctggtctcgaactcccgaccatctgaccgaccatcgggccatgcccgaccattacgggcatgggccaccgcacccggcccaat

SEQ ID NO: 256190 - DNA, 120 bp, Homo sapiens
  chr6:53219594-53219714
  hypo
gcttcaagaagcgtgcccctcgggcactcagagagattccgaaatttgccatcaaagaggtggaaactctaagtgtgcgcattgatagcaggttcaacaaagctctctgcgccaaaggaa

SEQ ID NO: 256191 - DNA, 708 bp, Homo sapiens
  chr6:53385075-53385783
  hypo
tagagcatcggtatcgatagtgctttgggagcactgcagatcctctgatctgccactgatgccaccatatgctagcaggtaaatgctgctttttgaaagtgcatgagggcgcaactgtcacagtcaccaggggacagcattccagaagctttggctactgcttacagggtcagaactgtgtggcaggcgtgctgctccctccaccctcgcctgcggcagacacggccacactgctggtctgtcatcacagtatcctggtctttcccactgagcccccactgagtgcactcaccacggtgcagccaccacagctgacagaagctggcatgcaactgtgtctgcagctctactgttacagagtctatcaagtgcagtctataaaagataaaccatctgtaacgtatgaggattgtaaggtggaatgcccgggtcgtgacttgctcttttcattacctgtatctctgagagatctgctggggcatgttaatataggaactaacctgggaaatgaagttattgtgcaaagagcctgattttcttctaatatagaagtagcctccttccggcgttttcgcatgttggcctcaactgtattgaactcggacattgttcctccgtagggctgtcctggtgtcccttcaatcatgtaactcccatactctggtctccaaagggtaggatggctacggaggagaaataacttagttc

SEQ ID NO: 256192 - DNA, 80 bp, Homo sapiens
  chr6:53406020-53406100
  hypo
aagaaaaaaagaaatgtagagaggtaccacaatggagaattagtatctgcatcccagatcaagggcgggaggtagaacaa

SEQ ID NO: 256193 - DNA, 87 bp, Homo sapiens
  chr6:53787620-53787707
  hypo
tcttcctctgctgtcgagacgttcctgtctgcttcccgggagcctcacgtgctccttgtcctaaccagcccccgcgcgccatcttcc

SEQ ID NO: 256194 - DNA, 99 bp, Homo sapiens
  chr6:55010120-55010219
  hypo
attccacgtatccacggaagatgtcctggctctctaatgaggcatacaaagtcgtctcataacattctttgtttttttttttgtttttttgtttgtttt

SEQ ID NO: 256195 - DNA, 112 bp, Homo sapiens
  chr6:56295532-56295644
  hypo
ttttgcgtccaggcgagaagagcgttccgggaaaggcacctcataactcactcagcacagcgcacacgcagagagctcgggcacttgatggggacacgggtggcagccacag

SEQ ID NO: 256196 - DNA, 74 bp, Homo sapiens
  chr6:56297181-56297255
  hypo
cgtccttctgctctgcgtggccgagccggccatagccaccgaagccccaggagaagactcgcttctgggagtcc

SEQ ID NO: 256197 - DNA, 147 bp, Homo sapiens; identical to SEQ ID NO: 210837
  chr6:56894236-56894383
  hypo

SEQ ID NO: 256198 - DNA, 142 bp, Homo sapiens
  chr6:57042600-57042742
  hypo
gtagccacagtttgcgcaaaattgctgttgtactcctcctaagtctcccagcagtttgccgtttcgatactgagactgcagaggtttgtgaggtgcccaagacctgggtactagctgaggatgcatgcgctccggttttgtc

SEQ ID NO: 256199 - DNA, 91 bp, Homo sapiens
  chr6:57085534-57085625
  hypo
ttttttttctgtggcgggggagcgatagatttgttctacatccttactgtagtggtggttacatgagtctaaaattcgcagaactgtacat

SEQ ID NO: 256200 - DNA, 155 bp, Homo sapiens; identical to SEQ ID NO: 210839
  chr6:57096923-57097078
  hypo

SEQ ID NO: 256201 - DNA, 91 bp, Homo sapiens
  chr6:57111928-57112019
  hypo
ggcgtgagccacaccgcgcccggcctggacttgatttcttgattgcctgcacctagagtatccatcgtctttcctacgtggctgggcaact

SEQ ID NO: 256202 - DNA, 144 bp, Homo sapiens
  chr6:57726146-57726290
  hypo
acactttcagttttcctgtacgcataattccttttcatttctccgacccttgggtaatgttgaattctcctgcacagccatgcgtgatagtgttgttaagaataaagtgagagtacgaggtcaggagatcgagaccatcttggc

SEQ ID NO: 256203 - DNA, 51 bp, Homo sapiens
  chr6:58002345-58002396
  hypo
gtgtacaccttctgcgatattgaaagtaatatcaccctctccccccatccc

SEQ ID NO: 256204 - DNA, 217 bp, Homo sapiens
  chr6:64150631-64150848
  hypo
caaaaccctggagccaggtccgttcagccgaccgtcaccatgaccaacgcagatagcgagggcggaaacctccgccaccagctggacagcaacaaacaggacctgagcctcagcaacctggatgaagacccggtcaaggagctggctgcccttccaaagactaccacactggatctgtcttgtaataaatgactattgtgccgggcacggtggctca

SEQ ID NO: 256205 - DNA, 96 bp, Homo sapiens
  chr6:64151088-64151184
  hypo
ggcaacaagagtgaaactccatctcaaaaaaataaataatgactattctcccgtcggatttctgtggcctcacacacctggcgaagctagacctta

SEQ ID NO: 256206 - DNA, 100 bp, Homo sapiens; identical to SEQ ID NO: 210841
  chr6:64354747-64354847
  hypo

SEQ ID NO: 256207 - DNA, 489 bp, Homo sapiens
  chr6:66497655-66498144
  hypo
tagaaaaaacacaacagggccggtctgggcagccgaccgctctaggggtccaccccagtcctctgcgcgcgccggctgccctggcccagtcgctgtggaccccacccaggcggcgcgcgcagaatcagttctgagcctcctcgcctcccggctctcccgcctgttgcgggtgtttatccggctgctgggcgacctttcccgggaaggaggctgtgccttcattcggtcacgccccggtctggggaggctcctccctggtgcgcagaaaccgcaggggcggggaggagccgggctctgcctgcgcccggggcagagcggggctggcaccgcgcaaggggccctgtttccggggagactgatttcggcctcctgacctcgggaccccttgactgtggagtgtcagacggaggaggacttagtgatcttgtccaaccccctccccgcttttcacaggttggggagatgggcgcctggagaatggaaatccag

SEQ ID NO: 256208 - DNA, 42 bp, Homo sapiens
  chr6:66948547-66948589
  hypo
ttaatttcattctgcgctacttggcaccgttgtaatcattaa

SEQ ID NO: 256209 - DNA, 42 bp, Homo sapiens
  chr6:69882240-69882282
  hypo
aaagaaataaacaggccaggcgcagtggctcacgcctgtaat

SEQ ID NO: 256210 - DNA, 41 bp, Homo sapiens
  chr6:70515895-70515936
  hypo
aggcatgagtcactgcgcccggcctaaatgttcactttttc

SEQ ID NO: 256211 - DNA, 62 bp, Homo sapiens
  chr6:71521663-71521725
  hypo
ggtagcgtataaagcgtggatgtgctggacaaagggatgattcacatcgctgggacaatatt

SEQ ID NO: 256212 - DNA, 38 bp, Homo sapiens
  chr6:71544653-71544691
  hypo
gagttattaaagaattgggccgggcgcagtggctcacg

SEQ ID NO: 256213 - DNA, 183 bp, Homo sapiens
  chr6:71556091-71556274
  hypo
gactggtcatggctcggggctataaaagtggtgccagcgaggagtaaagaggcttctggagtactggggcatgcctgttcagcctaagaacattccgatgccataaaaactaaaaatgaaaaggataagatgcttgggaaggcttctactttgcagcccctggattagcggaacatttggagg

SEQ ID NO: 256214 - DNA, 148 bp, Homo sapiens
  chr6:71874697-71874845
  hypo
gggactcgccgctcgcacgcccttgggcagcggcggggcgcctgctcttccttccgcttgcgctgtgagctgaggcggtgtatgtgcggcaataacatgtcaaccccgctgcccaccatcgtgcccgccccccggaaggccaccactg

SEQ ID NO: 256215 - DNA, 120 bp, Homo sapiens
  chr6:71955555-71955675
  hypo
attctgccttgtcccgccaccgatggcctgccgatgtctgctggtgtctgtgtgtttgcttttctgctcctcttgacgaccagccatttgtgtctgtgcccgctacggtctctcgggttt

SEQ ID NO: 256216 - DNA, 229 bp, Homo sapiens
  chr6:72806769-72806998
  hypo
acaaagtttgctgatgggtgcggtcatctctgctcctattgtcgcactaagttctgtgcgcgctgcggaggccgcgtgtctctacggtcaaacaacgtgagtattccatgaacataaggggcgttgtgaatgtggataaaaactattacgccttccaaacatgagaacacgtgcatcttagaaagcagacatgtgcataaacatacacgttaaaatgaacctccctcat

SEQ ID NO: 256217 - DNA, 65 bp, Homo sapiens
  chr6:73319961-73320026
  hypo
accagaaacaccaccggacattgcaaatatcatctgcggggcaaaattaccgctgttgtaaagaa

SEQ ID NO: 256218 - DNA, 70 bp, Homo sapiens
  chr6:73843279-73843349
  hypo
cagaagagctggagcttcaacgaccgaacccgcttccggccctcgctgcgcctcaaaagttctcagccaa

SEQ ID NO: 256219 - DNA, 242 bp, Homo sapiens
  chr6:73934979-73935221
  hypo
aaaacagatgaaggaggggacgtgggcaaaggccactcaccgaagatgagctcctcctggtcctcttccatgtggaacaccattggagaatgaaagttttcgggcagggtccaccacggctccttgctgagagcactcgttcccacggccatgctgtgctcccacctgattcagaataggggaaagtctaacaaactggttggcaaaagacttggaaaagcgaggaagggcctaggctctgt

SEQ ID NO: 256220 - DNA, 104 bp, Homo sapiens
  chr6:73940904-73941008
  hypo
gccaggaaacattaatattaaaaaaaaaaaaaactttccaaaatatctgtacaaagcatggatagttccataaaacggtcaaataatcacgaacactcccttct

SEQ ID NO: 256221 - DNA, 42 bp, Homo sapiens
  chr6:74016436-74016478
  hypo
aaaattttcacttagctgggcgtggtggctcatgcctgcaat

SEQ ID NO: 256222 - DNA, 217 bp, Homo sapiens
  chr6:74079517-74079734
  hypo
tgggaccagcagccgcggagcgcgctcgaggcggctttcgcaagacctcttccagacccaggcgcgaagctcgggctctcttttaccatattcgacccgctccgccccttccggcggcgcctcgcaccgcgtcggggtgagcgggtgcaagcgacgccccggcatagcggcaccattggacacttcctgcgctgcttcaatcgccgggattgcctct

SEQ ID NO: 256223 - DNA, 90 bp, Homo sapiens
  chr6:74097680-74097770
  hypo
ctcctgtgttccagcgattctcatgcctcagtgcctcagccatccgattacctgggacgacaggcatgcggcaccacaccaagctaattt

SEQ ID NO: 256224 - DNA, 207 bp, Homo sapiens
  chr6:74191759-74191966
  hypo
tagggtgtgatagccggaatcaacgccagtcttcgggtcagtcgcaagcctccctttgtggttagccgaacagaaggttacataggagtcttgattgatgacctcactactctgggcaccagtgaaccataccgcatgtttaccagccgagtagagttccgtttgtcactgcgccctgataatgctgacagccggctcacactgcga

SEQ ID NO: 256225 - DNA, 38 bp, Homo sapiens
  chr6:74234189-74234227
  hypo
gaaaagatgatggcccggtgcggtggctcacgcctgta

SEQ ID NO: 256226 - DNA, 77 bp, Homo sapiens
  chr6:75985977-75986054
  hypo
aaataaagtgtttacctgagttctatgagccgctctagcaaataaagcaaactcaaggagggcgtcatggaaacacc

SEQ ID NO: 256227 - DNA, 37 bp, Homo sapiens
  chr6:75995669-75995706
  hypo
gcttggtcctcataatttaccgttaagctgggctctg

SEQ ID NO: 256228 - DNA, 42 bp, Homo sapiens
  chr6:76468481-76468523
  hypo
gctttttaactagcttcattcggaggtgattagttaatatta

SEQ ID NO: 256229 - DNA, 35 bp, Homo sapiens
  chr6:76541353-76541388
  hypo
tgcctgtaatccaagcacttcggggagggcggatc

SEQ ID NO: 256230 - DNA, 177 bp, Homo sapiens
  chr6:79767963-79768140
  hypo
cccaaggtatttttgccatacgtatatatagggttctgtaccatctgttgtctccgacatccactacggatctcagaatgtatctcctgtgaataagggaagataaatgttcctctctccttgtcagcagtatttactaatctgaccatcaacgacgtggcctaaaatattatattt

SEQ ID NO: 256231 - DNA, 35 bp, Homo sapiens
  chr6:80380890-80380925
  hypo
gacatagatgaggtcaggcacggtggctcacgcct

SEQ ID NO: 256232 - DNA, 41 bp, Homo sapiens; identical to SEQ ID NO: 210857
  chr6:82588584-82588625
  hypo

SEQ ID NO: 256233 - DNA, 42 bp, Homo sapiens
  chr6:82936653-82936695
  hypo
acattttaaagcttatgtaacgctcctgactcagtatttgct

SEQ ID NO: 256234 - DNA, 43 bp, Homo sapiens; identical to SEQ ID NO: 210858
  chr6:83901419-83901462
  hypo

SEQ ID NO: 256235 - DNA, 85 bp, Homo sapiens
  chr6:84513479-84513564
  hypo
ctcctcctcctaagctgtaactctattcatttcttatatacgtggctggttctgggtcccttgcggtaaaatgatgtatctggtt

SEQ ID NO: 256236 - DNA, 105 bp, Homo sapiens
  chr6:86302345-86302450
  hypo
tcaattttaacctttcggaatatttcaggtttttttggggagggtggcatcaagtcctcttaagaatattatagggatgtggccgggtgcggtggctcacgcctg

SEQ ID NO: 256237 - DNA, 77 bp, Homo sapiens; identical to SEQ ID NO: 210859
  chr6:86325374-86325451
  hypo

SEQ ID NO: 256238 - DNA, 82 bp, Homo sapiens
  chr6:86653351-86653433
  hypo
tgggattacaggagtgagccaccgtgcccggccaacagcaactcttacctaaattcctagcgtaccttatatgttttggact

SEQ ID NO: 256239 - DNA, 46 bp, Homo sapiens
  chr6:86915708-86915754
  hypo
ttgaactgaacaaaggatgacgaacgcaggaataaagacaaaagag

SEQ ID NO: 256240 - DNA, 81 bp, Homo sapiens
  chr6:87725863-87725944
  hypo
atctagatcacccaggagaacgtcagcagatctctagcaccagggaacggaaggcagcacgcatcctggggctgattctgg

SEQ ID NO: 256241 - DNA, 120 bp, Homo sapiens; identical to SEQ ID NO: 210860
  chr6:87890686-87890806
  hypo

SEQ ID NO: 256242 - DNA, 31 bp, Homo sapiens; identical to SEQ ID NO: 210861
  chr6:88039271-88039302
  hypo

SEQ ID NO: 256243 - DNA, 101 bp, Homo sapiens; identical to SEQ ID NO: 210862
  chr6:88280033-88280134
  hypo

SEQ ID NO: 256244 - DNA, 35 bp, Homo sapiens
  chr6:88461840-88461875
  hypo
agggggagggagccgaactgtgttttgcgccctac

SEQ ID NO: 256245 - DNA, 120 bp, Homo sapiens
  chr6:88553999-88554119
  hypo
acatattattggctgaaatgtctcttactttttttttttttttttttaaatctataggtttcccgtccagcttttcttttttttctttataatttatttgttaaagaaaccaggttgttg

SEQ ID NO: 256246 - DNA, 120 bp, Homo sapiens; identical to SEQ ID NO: 210863
  chr6:89376382-89376502
  hypo

SEQ ID NO: 256247 - DNA, 200 bp, Homo sapiens
  chr6:89376682-89376882
  hypo
gggaaaggacatttagtatcagcaagaaattttacagttattagaagcagtatggaagcctcggagggtggcagtaatgcattgtaaaggacatcagtgagtcaccacttctgttgccttagggaattctggagcagactcctaagctcgcagagcagcatccactcccttccgagcatcagtcacggcccctctgctct

SEQ ID NO: 256248 - DNA, 150 bp, Homo sapiens
  chr6:89554102-89554252
  hypo
cggcttatttctgacgctaaatggttcctgtgttttgtcaatgagcccagtcttcattttttcgtgtcgaggacttataatttctcgttctatacactgcagacgaacattaaaatcacaatctccaacgggctgtgactgaattaaata

SEQ ID NO: 256249 - DNA, 35 bp, Homo sapiens
  chr6:89857377-89857412
  hypo
atcagttgaggtctggagttcgagacccgcctggc

SEQ ID NO: 256250 - DNA, 120 bp, Homo sapiens
  chr6:89857592-89857712
  hypo
cagagcgaggcctcctcttaaaaaaaaaaagagcggcggcttcatgtcagagtttgagcactgtagaaccgccaaaaaaaagctaaactttgagaaatgtacactctttttttttttttt

SEQ ID NO: 256251 - DNA, 195 bp, Homo sapiens
  chr6:89913946-89914141
  hypo
tttctgccaggactcgactgatgcacagggacacatcagaacagatgcacaaggattatgtcatctgtagaaaatggagcagagacaggtgtgcgctctgcaggcgtgggcagagctaagactggggagtggcatgcgcttcaggcgatgggccatcacagttgatgggcagcgtgaggccgaaggacaccgggg

SEQ ID NO: 256252 - DNA, 63 bp, Homo sapiens; identical to SEQ ID NO: 210865
  chr6:90052741-90052804
  hypo

SEQ ID NO: 256253 - DNA, 182 bp, Homo sapiens
  chr6:90095593-90095775
  hypo
cctgaatgaacttacgatcctctcaggcatggggagtctactcagaggatggttctcgagcatgggctcagaatgatattatcgggaatagtctttgtaacacttcagccctaacagctctggtgctcctagaagggccaggtgtgcttagcggggcgatgcacacccgcagctggccaacc

SEQ ID NO: 256254 - DNA, 95 bp, Homo sapiens
  chr6:90359813-90359908
  hypo
tgggcttggtccttcgaagccaaatcttgtctttccgaaattgactagcaatgtatggaatgactttccgtatgtttagtcgtttcccagttcga

SEQ ID NO: 256255 - DNA, 221 bp, Homo sapiens; identical to SEQ ID NO: 210868
  chr6:90367696-90367917
  hypo

SEQ ID NO: 256256 - DNA, 35 bp, Homo sapiens
  chr6:90522085-90522120
  hypo
ctgagctcagccactgcacccggccaggaaaaaat

SEQ ID NO: 256257 - DNA, 259 bp, Homo sapiens
  chr6:90644560-90644819
  hypo
gcaggcatgcgacacgcacaaggaacaggtctccgacacgggagctgcatgtgccgtaacatgaatgcaatctggcaggcggcgtgggcatgtgtgtcggaaagagagatttacaccgggaaagggcacctcctaaaatatttataaatttatcaagaaaatatgttttaaaaatgaaaaataaacagatgtacaagtgcaacttgagagaaatacattatgcgagtttgcaacagctgagtggcgggtgtgtgggaga

SEQ ID NO: 256258 - DNA, 104 bp, Homo sapiens
  chr6:90685940-90686044
  hypo
gggtgctctttgtacgcaagagcgtgaagccggatgggagagaaagaaaggaagacaaaaataaagcgtaaaaatgcaggcacattagccgcaggcaagctccc

SEQ ID NO: 256259 - DNA, 45 bp, Homo sapiens
  chr6:91291934-91291979
  hypo
attaaaacaagactcggatctcatttctaacgtgttgccttagcc

SEQ ID NO: 256260 - DNA, 44 bp, Homo sapiens
  chr6:91304006-91304050
  hypo
tacaagaagttaaacatggccgggcgcggtggctcacgcctgta

SEQ ID NO: 256261 - DNA, 41 bp, Homo sapiens
  chr6:91316404-91316445
  hypo
ttacaggtgtgagccaccgcgcccagcctggtagccaaatc

SEQ ID NO: 256262 - DNA, 94 bp, Homo sapiens; identical to SEQ ID NO: 210870
  chr6:96085019-96085113
  hypo

SEQ ID NO: 256263 - DNA, 34 bp, Homo sapiens
  chr6:96552675-96552709
  hypo
gattacaggcatgagccaccgcgcctggccacac

SEQ ID NO: 256264 - DNA, 82 bp, Homo sapiens
  chr6:98148229-98148311
  hypo
ctttcctactgccacgttgccaccaaatatgggttaagggcattagaaaagaaatcccacatgcagccgggcatggtggctc

SEQ ID NO: 256265 - DNA, 146 bp, Homo sapiens; identical to SEQ ID NO: 210873
  chr6:100841322-100841468
  hypo

SEQ ID NO: 256266 - DNA, 404 bp, Homo sapiens
  chr6:105750346-105750750
  hypo
ttctgcagcgggtacggccgctccttccgcggctgctgcttggtcttcaggttctcctcgtgcttgctgggccagtggcgcaggcgcatgttttctcaggccgcaggtccaggggcttgtacctcttgcccttgtagaatttcctgaggttttctttgtgtgagtctggttaattacggtgagaacacgggcaatggaattgtggatgacacggatcttagagagcttggagaccgcgccgcctgtcagtggcgatgcgcagctgggacagctccaccttcaggtcgtccagctgtttgagcagcaactctttctccttcccgtgaaggtcccgagacttgatcttagccattgctgcacaggccgcccccgccgcctgctccgagggctaaatactctctttt

SEQ ID NO: 256267 - DNA, 165 bp, Homo sapiens
  chr6:106456821-106456986
  hypo
tagtcttcccgcagcggtggccaggtccatggccaggcattgtctctgactcctaagaccccagcaactgaacacaggcccctcacggcagtggttatattctgccacgttctatgtctaccctttcgctcacgcccccttctgtcttagcgctcttgcctccct

SEQ ID NO: 256268 - DNA, 32 bp, Homo sapiens
  chr6:106582673-106582705
  hypo
tgaacaagcccactcgccgtcagagtcccagc

SEQ ID NO: 256269 - DNA, 34 bp, Homo sapiens; identical to SEQ ID NO: 210879
  chr6:107010364-107010398
  hypo

SEQ ID NO: 256270 - DNA, 77 bp, Homo sapiens
  chr6:107078765-107078842
  hypo
tatgttatcattttaaattgcgtcgaatcaaatttgttctttaaaaaataaatatgcccggcgcggtggctcacgcc

SEQ ID NO: 256271 - DNA, 53 bp, Homo sapiens
  chr6:107537665-107537718
  hypo
gactccatctcaaagaaaaccaaaaaaaacaaaaaacaaaaaacaaaacctgg

SEQ ID NO: 256272 - DNA, 120 bp, Homo sapiens; identical to SEQ ID NO: 210880
  chr6:107562426-107562546
  hypo

SEQ ID NO: 256273 - DNA, 36 bp, Homo sapiens; identical to SEQ ID NO: 210881
  chr6:107563806-107563842
  hypo

SEQ ID NO: 256274 - DNA, 90 bp, Homo sapiens
  chr6:108274499-108274589
  hypo
cccaaaactgtactacgggggtcctcatcttttacttaaaatccttaagaacaaatgtgcttcagaatttttcagatttgccccgtccgg

SEQ ID NO: 256275 - DNA, 44 bp, Homo sapiens; identical to SEQ ID NO: 210884
  chr6:108984287-108984331
  hypo

SEQ ID NO: 256276 - DNA, 31 bp, Homo sapiens
  chr6:108997762-108997793
  hypo
taaactagaagagcatcgacacatacacata

SEQ ID NO: 256277 - DNA, 72 bp, Homo sapiens
  chr6:109038593-109038665
  hypo
gggtgcccgaggcttcggtgtgctgaggccggggcagctgctggacttcgggtcttcggtgcggaccctgga

SEQ ID NO: 256278 - DNA, 99 bp, Homo sapiens; identical to SEQ ID NO: 210885
  chr6:109053387-109053486
  hypo

SEQ ID NO: 256279 - DNA, 42 bp, Homo sapiens
  chr6:109057731-109057773
  hypo
attcctgttaggaatattctcggcccggtgccgtggctcacg

SEQ ID NO: 256280 - DNA, 162 bp, Homo sapiens; identical to SEQ ID NO: 210886
  chr6:109058636-109058798
  hypo

SEQ ID NO: 256281 - DNA, 86 bp, Homo sapiens
  chr6:109059835-109059921
  hypo
gaaagagagggcttccgagaggaaaaagaaccagagaagagccagttggccatggatgtgccggatttcatagtcaggcttgagga

SEQ ID NO: 256282 - DNA, 120 bp, Homo sapiens; identical to SEQ ID NO: 210887
  chr6:109059981-109060101
  hypo

SEQ ID NO: 256283 - DNA, 39 bp, Homo sapiens
  chr6:109551797-109551836
  hypo
aggcatgagccaccgcgcccagcccggagaactctttta

SEQ ID NO: 256284 - DNA, 139 bp, Homo sapiens
  chr6:109647760-109647899
  hypo
tgcagcaaagcggacgccttcctccatggaatgtgctgatttcagacggggcatcagccaatgtagaaaacactaacattttttcttggaactggattgtgatgagaggtgcttgccgtgaacataagctactatcttt

SEQ ID NO: 256285 - DNA, 143 bp, Homo sapiens; identical to SEQ ID NO: 210889
  chr6:109798005-109798148
  hypo

SEQ ID NO: 256286 - DNA, 91 bp, Homo sapiens
  chr6:110437730-110437821
  hypo
agaggccggtaagcttgaactgctcagtaaggtctattccctctataaattccacctcttggggaaggacgtagtagaacaaaaagcagca

SEQ ID NO: 256287 - DNA, 68 bp, Homo sapiens
  chr6:110670276-110670344
  hypo
ggcatcccaaacagcgaacgtgaaacatgacctagacgatgtccatttagacacggatgattgaaggg

SEQ ID NO: 256288 - DNA, 135 bp, Homo sapiens; identical to SEQ ID NO: 210890
  chr6:110768071-110768206
  hypo

SEQ ID NO: 256289 - DNA, 44 bp, Homo sapiens
  chr6:110798286-110798330
  hypo
ttaaaaggtacatttaaggccgggcgcacttgctcacgcctgta

SEQ ID NO: 256290 - DNA, 86 bp, Homo sapiens
  chr6:110817991-110818077
  hypo
accgcacccggcctgtcttggtaaattcttttatctccccgccacctgtccagatagtcgtcgctcgcctccgacactttcttcat

SEQ ID NO: 256291 - DNA, 121 bp, Homo sapiens
  chr6:110842271-110842392
  hypo
tggcctgtctcacccgcaatcacacctcaccatcctagcctagtgccggctctcagccggtgtttaagggagttgttcagtaaaggggccctccccggcaccgcaccgcccagctggcctt

SEQ ID NO: 256292 - DNA, 48 bp, Homo sapiens; identical to SEQ ID NO: 210891
  chr6:110843341-110843389
  hypo

SEQ ID NO: 256293 - DNA, 187 bp, Homo sapiens; identical to SEQ ID NO: 210892
  chr6:110872232-110872419
  hypo

SEQ ID NO: 256294 - DNA, 425 bp, Homo sapiens
  chr6:110966935-110967360
  hypo
caggtggtgtccacggtaatgcatggacaatgagcggctgttttccagtttctggcctctggtgcctatctagagacggagggatggccgcgcacgacgcgccgcgcttcctcctgaccttcgatttcgaagagactatcgtagacgaaaacagcggcgactcagtcctgcgaactgtgccgggacagcaggtgcaggagagcctgcgagccaccgaccgcgagggcttctacaacgagcacatgcagcgcgtcttcaagtatctgggcaagcagggtgtgcggtcgcgggacctgcgtgccatctacgaagctatccctttgttgccaggcatgggcgacctgctgcagtttgtggctaagcaaggcacctccttcgaggtgattctcatctctgatgctaacaccttcggcatggagagcacg

SEQ ID NO: 256295 - DNA, 82 bp, Homo sapiens
  chr6:110968047-110968129
  hypo
ggaaggggctccccggcaggtgagagaaggaaaatctcccactgctgtaattgctgcctcgggccgcgtgaccgcccgcctc

SEQ ID NO: 256296 - DNA, 120 bp, Homo sapiens
  chr6:111014240-111014360
  hypo
aaaagatattccacacaaatgtaaagcaaaagtgagcaaaagcgttaaaatctgacggataggagacaggactaatgtggaactcccacttggacagacagaacagcgtgtggagactca

SEQ ID NO: 256297 - DNA, 86 bp, Homo sapiens; identical to SEQ ID NO: 210893
  chr6:111022042-111022128
  hypo

SEQ ID NO: 256298 - DNA, 45 bp, Homo sapiens; identical to SEQ ID NO: 210894
  chr6:111085015-111085060
  hypo

SEQ ID NO: 256299 - DNA, 177 bp, Homo sapiens
  chr6:111244972-111245149
  hypo
gactaccagcaaaggcgcaaaggtgttgaagggctcattgacatcgagaatcccaaccgggtggcacagacaaccaaaaaggtcacacaactggatctggatgggccaaaggagcttttgaggagagaacgagaggagattgagaagcagaaggcaaaagagcgttacatgaaaatg

SEQ ID NO: 256300 - DNA, 104 bp, Homo sapiens
  chr6:111546768-111546872
  hypo
agtaaaagtacacacagtttaaaagtaaacatgtttacttcggataattctaatccttttagctgcatttaagaatattttaatttatacgaatgttacttgaa

SEQ ID NO: 256301 - DNA, 41 bp, Homo sapiens
  chr6:111579404-111579445
  hypo
ccaaaaagcgccacaacactccagcccgggcgacataggct

SEQ ID NO: 256302 - DNA, 32 bp, Homo sapiens
  chr6:111581423-111581455
  hypo
tcctacgtctccttcgtcggatgggaaggttg

SEQ ID NO: 256303 - DNA, 138 bp, Homo sapiens
  chr6:111581990-111582128
  hypo
gtcactgacttgtccggtcctgttgtaaatcctttgaagacatgaactaatttgattagattctgtgctcaggcttctctcgaagtacgaggtgcttgctgtgcacctgggcccatagtggtccgtggtcttggactg

SEQ ID NO: 256304 - DNA, 195 bp, Homo sapiens; identical to SEQ ID NO: 210897
  chr6:111673961-111674156
  hypo

SEQ ID NO: 256305 - DNA, 245 bp, Homo sapiens
  chr6:111750920-111751165
  hypo
cgggccccgctcccgccctcggctcgcctggcccagaccggaagcagcgccgcactgcctgggcctggcgcggggggtgagcacaggggcccggtcggacatggacaagaagcacaagcacaagaagctcaagtcggacaaacacctctaccaggagtatgtagagaagcccttgaagctggtcctcaaagcaggagggaatgaagtcaccgaactctccgtgggcagctcggggcacaactcca

SEQ ID NO: 256306 - DNA, 212 bp, Homo sapiens; identical to SEQ ID NO: 210898
  chr6:111751866-111752078
  hypo

SEQ ID NO: 256307 - DNA, 164 bp, Homo sapiens; identical to SEQ ID NO: 210899
  chr6:111766137-111766301
  hypo

SEQ ID NO: 256308 - DNA, 34 bp, Homo sapiens
  chr6:111860206-111860240
  hypo
gatcacgccactgcgctcccgtccggcaacagag

SEQ ID NO: 256309 - DNA, 156 bp, Homo sapiens; identical to SEQ ID NO: 210900
  chr6:111872274-111872430
  hypo

SEQ ID NO: 256310 - DNA, 161 bp, Homo sapiens
  chr6:111874466-111874627
  hypo
cctccctcaaaaggcgagccagcatgaccatacgtttctcatgtctacatccaaaaggtaatgcagatgttccaaacagctaagtattattccaagaagtgccatttttgtggaatcagaattgtgataggacgggctggacgcagtggctcatacccgta

SEQ ID NO: 256311 - DNA, 87 bp, Homo sapiens; identical to SEQ ID NO: 210901
  chr6:111886815-111886902
  hypo

SEQ ID NO: 256312 - DNA, 102 bp, Homo sapiens
  chr6:111955506-111955608
  hypo
ttccttgatgagtaacgttgttgagcatctttttctatgtttattggccatgaagagatcctcttttgtgaagggcctcttaagtcttttgccgaatttttt

SEQ ID NO: 256313 - DNA, 186 bp, Homo sapiens
  chr6:111993235-111993421
  hypo
cccccaatgaggacacggttccctggttgccactgccaaccagcaaggccccaacgcaggctctcggccacccttccagtcacatctccaggtgtgcccctgcacatggcatcttctcagattcatcctgtggtccctggaactgtcctcccaggcctatgtgccttcccacgtgccagaccttgg

SEQ ID NO: 256314 - DNA, 85 bp, Homo sapiens
  chr6:112021620-112021705
  hypo
ctagcagcacacagcgctccttaaacagcgctacaccagcagacgaccacacacacggtggaagatcagacgccacacacggaaa

SEQ ID NO: 256315 - DNA, 86 bp, Homo sapiens
  chr6:112128161-112128247
  hypo
cttccggaccccagcgctgattgtcctccacacgctatttgtttcattcagagtgctgagctctgatttcacgtttcccttggaag

SEQ ID NO: 256316 - DNA, 39 bp, Homo sapiens
  chr6:114153359-114153398
  hypo
gaacccaccagaaggaaccaactccggacatattactat

SEQ ID NO: 256317 - DNA, 34 bp, Homo sapiens
  chr6:116800745-116800779
  hypo
ttttttttttgagacggagtcttctcactctgtc

SEQ ID NO: 256318 - DNA, 40 bp, Homo sapiens
  chr6:116873934-116873974
  hypo
ctttattaaaaaccaaatatcggccgggcgaggtgtctca

SEQ ID NO: 256319 - DNA, 130 bp, Homo sapiens
  chr6:116905294-116905424
  hypo
aagagttttacttccgtacaagtgtgagatccgtaaattgacacagactaaaagagtgagtgagaatatatagatgaattaggttaaaagtttcccatataaccttttatactctcgaggtctaaacggt

SEQ ID NO: 256320 - DNA, 34 bp, Homo sapiens
  chr6:117100692-117100726
  hypo
tctggtgatccacccccctcggcctcccaaagtg

SEQ ID NO: 256321 - DNA, 62 bp, Homo sapiens
  chr6:117894655-117894717
  hypo
gtttcaagtcattacgtcctctgcaggctcggatcacagttttgtgacgatgcaaatgtatt

SEQ ID NO: 256322 - DNA, 44 bp, Homo sapiens
  chr6:118848429-118848473
  hypo
agtgctgggattacaggcatgagccaccgcgtccggctctactt

SEQ ID NO: 256323 - DNA, 83 bp, Homo sapiens
  chr6:118898186-118898269
  hypo
cagcctggggcagtaaggcatgtcaaaccctcttgctgctattcctagaagtgaaaagccctgcaggtcggcccctgagggct

SEQ ID NO: 256324 - DNA, 33 bp, Homo sapiens; identical to SEQ ID NO: 210903
  chr6:119023866-119023899
  hypo

SEQ ID NO: 256325 - DNA, 81 bp, Homo sapiens
  chr6:119162952-119163033
  hypo
tgctcaaaaagatacgtctactgagcaaaacaagagctatcttgcctttttttttttttttttgacacggagtctcgctct

SEQ ID NO: 256326 - DNA, 70 bp, Homo sapiens
  chr6:119240581-119240651
  hypo
aatgagaattagatcggataatgtacgtaaattacttaatgcagtatctagaagacggcaagtgctcagt

SEQ ID NO: 256327 - DNA, 92 bp, Homo sapiens; identical to SEQ ID NO: 210904
  chr6:119254299-119254391
  hypo

SEQ ID NO: 256328 - DNA, 32 bp, Homo sapiens
  chr6:119254691-119254723
  hypo
acacttatttcgtttggaaagagattgaggac

SEQ ID NO: 256329 - DNA, 86 bp, Homo sapiens
  chr6:119462544-119462630
  hypo
gcgttggcaccaaccggaggggcctggatgcagggctgctgcctgctgcatggcgtgggcggggggaggatccagggaatcctttg

SEQ ID NO: 256330 - DNA, 31 bp, Homo sapiens
  chr6:119482932-119482963
  hypo
ttcttagggttgggctgctgcggtggttttg

SEQ ID NO: 256331 - DNA, 31 bp, Homo sapiens
  chr6:119483263-119483294
  hypo
ccccacgcccggcctctgttttgtttttaat

SEQ ID NO: 256332 - DNA, 198 bp, Homo sapiens
  chr6:119510813-119511011
  hypo
ataacatgtactcacatgttcgattatatgattcatgacaagtacgggcaatttcagccccgagttcaaggtagtgttgggccatgccttcgggagctgcatcagccccgagtgcgaacatgccccccgcgaagcaggtcaggtggcccatcttgtgctccaggaggccccctttccactctgcgatataagttagtc

SEQ ID NO: 256333 - DNA, 146 bp, Homo sapiens
  chr6:119590026-119590172
  hypo
taagccaatgtgcccggccctcatttttctaaaacaactctctcatgaacgagtaggccatagacaaactacgcctgaacaattcttagagtcatttaaagtaacaatatagaaaggcagttgaataatgccgtttccttaccccc

SEQ ID NO: 256334 - DNA, 41 bp, Homo sapiens
  chr6:119620032-119620073
  hypo
ttacaggagtgagccactgcgcctggccaactttttaaata

SEQ ID NO: 256335 - DNA, 92 bp, Homo sapiens
  chr6:119834901-119834993
  hypo
atcattgtgcttatcgaagttttcctggtataatgtggacttttctgttccgctaataaaaagctcctcctggccccgtgtggtggcacatg

SEQ ID NO: 256336 - DNA, 90 bp, Homo sapiens
  chr6:121364079-121364169
  hypo
gccagatcccacaatatctggtgcctaacgtggccttctttgttcctcggctcagtgcactccgagtgcgggtttgtgatgactagtctt

SEQ ID NO: 256337 - DNA, 210 bp, Homo sapiens
  chr6:121654738-121654948
  hypo
caaggaacaaagatcgttggaactcattgcttttaagtactgtatactgacaggaatcccttgaaatcgtggaagtattctttcaaagaacatgaataatttataattaatattactgtgctgcccgggtgaggcgcgggggaatggattattaggatatgctggttgtggcagtaaaaatatagaggcggcggccgggcgcggtggctc

SEQ ID NO: 256338 - DNA, 131 bp, Homo sapiens
  chr6:125087371-125087502
  hypo
aaagtgttctctaagaccctcgtttaaagtgcctcttaggacttttgagactgtcgagatgaattctactttctgggtcctgaatccaaaatgagcggaagaggacctacggttgccctgtaagagtgggt

SEQ ID NO: 256339 - DNA, 39 bp, Homo sapiens
  chr6:125207462-125207501
  hypo
gggacagagccagactccgtctcaaaaaaaaaaaaaaaa

SEQ ID NO: 256340 - DNA, 210 bp, Homo sapiens
  chr6:125299462-125299672
  hypo
ggcaggctgcattccgcttgtgccccagaccagatcctgtgcccaccgtggctctgcgctcagcccatggatcaaccaggcatgctgtgagcggcttccaccttgggtgccagcaactagatgaggggaatgcggtggtgcctgataactcagagatgccagcagtcgtggagccccaaggggggttacagttctcgcttgtggagtccc

SEQ ID NO: 256341 - DNA, 41 bp, Homo sapiens
  chr6:126208032-126208073
  hypo
agtgtgtgtatgtgcgcgtgcacacacgtgcaggacgtttt

SEQ ID NO: 256342 - DNA, 151 bp, Homo sapiens; identical to SEQ ID NO: 210907
  chr6:126242092-126242243
  hypo

SEQ ID NO: 256343 - DNA, 57 bp, Homo sapiens
  chr6:126243892-126243949
  hypo
gcacgggaccagcttaaagacgctctaccggaaatcggcatcactagacagtcctgt

SEQ ID NO: 256344 - DNA, 150 bp, Homo sapiens; identical to SEQ ID NO: 210908
  chr6:126426570-126426720
  hypo

SEQ ID NO: 256345 - DNA, 82 bp, Homo sapiens
  chr6:128830109-128830191
  hypo
gaaaagaaaagaaaacgaaaaaatttcataaataaacagcttttaaattacacacccttctgagtggcgtgatgaaatcaca

SEQ ID NO: 256346 - DNA, 742 bp, Homo sapiens
  chr6:128901269-128902011
  hypo
caaagctgcgatgtcgacactctgcacatgctcctcaaacttggtgatctcctcctccagcaagtctgtccccactttgtcgtcctccaccacacactgaatctgcatcttccggataccatagcccacggacgccagcttggaggccccgctcactagcccatccagctggatagagcgcacacatgcctccagctgggtcatgtccgtcttattgtcccaaggcttgatgtccagcaggatggaggacttggccaccagcgagggattcttggccttcttggcgtacagccgcagccgctcctcccgcagccgccttgcctccttgtcttcctccttattgtcgctgccaacagatcaatgtcatcgtcctcgttatcctctgcttcttggccggggtcgtagtaaggggggcgaggggaggggcgctccacttggcgcatgggagacacgtgctgtgtctgcgggactgtggaccatggccaggcgagctcttctctcttctccggcatgttcagccaggcctccaggttggagaccgcctgctgcagctcctgcaccacgccgcgcaggctctggttctccacttccaggctggcgatctggaggacgagctcgctgtggtcttccctggggccgagctctggcgggaggcgctggccacaggcccattcatctgcttgtagaatttcctttctgtatcttcatatttgaatttgtcgagccagatcttctcatgtgc

SEQ ID NO: 256347 - DNA, 81 bp, Homo sapiens
  chr6:129635704-129635785
  hypo
ttttaaaaagagtatgctcccgttatgcattctcagggtgatttctcccctaactttgccgttataaactctgagggtctc

SEQ ID NO: 256348 - DNA, 32 bp, Homo sapiens
  chr6:130472587-130472619
  hypo
ttatttatttatttttaacacggagtttcact

SEQ ID NO: 256349 - DNA, 103 bp, Homo sapiens
  chr6:130499429-130499532
  hypo
cccttcttgaagacagtgccttagggctgcttctgctgctcttctccgctgcaatgccgtgtgattgaatagatccccacagtgagtgcggggaagggaaaaa

SEQ ID NO: 256350 - DNA, 140 bp, Homo sapiens
  chr6:131455819-131455959
  hypo
gagtaactagtttgccgacttctagtgtgcagcctttacgccagctgttgtggctgtgtaggggtcttcttttcttccatccctattctacgatgcattcaacataagcgaagtgttattattcacgaaaggcgctaatt

SEQ ID NO: 256351 - DNA, 143 bp, Homo sapiens
  chr6:132601694-132601837
  hypo
gcagaaactggagccgcggtctctctttgtcacattagagtgctgcactttctagaaagacaaaagaagagagcagcctgggcgtcagtgggcttatgtaaggaatgcatactgatacgatgtcacaataaaactactgatga

SEQ ID NO: 256352 - DNA, 41 bp, Homo sapiens
  chr6:133118418-133118459
  hypo
cttgtacattactgccgttttgaaaacgtactgctttcggc

SEQ ID NO: 256353 - DNA, 43 bp, Homo sapiens
  chr6:134502445-134502488
  hypo
atctctctccaagtctctcccgtttgttttctttctttctttt

SEQ ID NO: 256354 - DNA, 32 bp, Homo sapiens
  chr6:134545871-134545903
  hypo
ataatatggccaggcgcagtgtctcacgcctg

SEQ ID NO: 256355 - DNA, 87 bp, Homo sapiens
  chr6:134589500-134589587
  hypo
caactgtttgtgaagcgcattgtaaacaaacatagacggggtgagacatcctctttatcctgaataaatcaagaattcccaggccgg

SEQ ID NO: 256356 - DNA, 174 bp, Homo sapiens
  chr6:134669115-134669289
  hypo
gaccatatgccagccgcctcttggactctgagtgaatagctcacctcaatagaacgcatagaacactcattccagaaataacaggtgcccacatttttcttccttgggagacacattcatggagccaacaactaattatcataccaagaaaacaaaaaccgtgagggagagcag

SEQ ID NO: 256357 - DNA, 74 bp, Homo sapiens
  chr6:134749836-134749910
  hypo
cctgcctcgggcatcgctgcttctcttgtcggcaagttgccgaaggatccttccctaggcggagatcagttaga

SEQ ID NO: 256358 - DNA, 82 bp, Homo sapiens; identical to SEQ ID NO: 210914
  chr6:134817633-134817715
  hypo

SEQ ID NO: 256359 - DNA, 36 bp, Homo sapiens
  chr6:135305600-135305636
  hypo
atacagagaatacagagggacgcgtcagggcatgtg

SEQ ID NO: 256360 - DNA, 110 bp, Homo sapiens
  chr6:135427927-135428037
  hypo
gtccatcgcaaacacgggcctcggggcagcagttctggtgaaggggaaaggagaagccccagaaagcttcatggtcacgccacgtatgggatgctcggcagctgccctgg

SEQ ID NO: 256361 - DNA, 34 bp, Homo sapiens
  chr6:135930509-135930543
  hypo
catgagccactgcgcccagccttggataattttt

SEQ ID NO: 256362 - DNA, 55 bp, Homo sapiens
  chr6:136552674-136552729
  hypo
tgtatcaggtactacgctcagagccaaggacaaaagtgaacgagacactctcagc

SEQ ID NO: 256363 - DNA, 159 bp, Homo sapiens
  chr6:136556325-136556484
  hypo
cctgattcctagatcttaagcaaccgggtgatcgtgttgccatttgctaatatgcaaaagacgtgggaaagaacaggttttcaaggtggcggaaaagaacaggtaggaaggaaaagtcctgttttggacctgtgaaacgagatacctgtgagacaggca

SEQ ID NO: 256364 - DNA, 120 bp, Homo sapiens
  chr6:136655688-136655808
  hypo
cagaggagcacatcagcggaagaagacacaagtggctggacgtcgaggagccatcaaggggagcacaccggcataagagcacacgacagaggccagcacaccagcgggccatcgacttgt

SEQ ID NO: 256365 - DNA, 31 bp, Homo sapiens
  chr6:136682124-136682155
  hypo
ggtggggtgcggccgcacctgcctctgggcg

SEQ ID NO: 256366 - DNA, 206 bp, Homo sapiens; identical to SEQ ID NO: 210916
  chr6:136682758-136682964
  hypo

SEQ ID NO: 256367 - DNA, 154 bp, Homo sapiens
  chr6:136809005-136809159
  hypo
ttggaccattaacatggacacgcacttcatacgctaatatacagagcggaaagtcctctgttaagagtcatacttattctgggaaaagggcctctcaaaaaatttcaaaaggacagtattattgcgaaagggcggcttatgctttatttacttt

SEQ ID NO: 256368 - DNA, 156 bp, Homo sapiens
  chr6:136901462-136901618
  hypo
tctgtaccgccttccgaatgatactgtctaaggcaaacatccagtgcggcttgatgttatgattccgaagaactttattgacctggagagagagtgacatttagcctactttaatttttaattgcaaatagcctagatgatcgaagcacttgtatg

SEQ ID NO: 256369 - DNA, 125 bp, Homo sapiens; identical to SEQ ID NO: 210918
  chr6:136980868-136980993
  hypo

SEQ ID NO: 256370 - DNA, 99 bp, Homo sapiens
  chr6:137144497-137144596
  hypo
aggaatgcacacattcgcaagtaggtgttacagactccagttaattgtctcccgtcgcgcgcattggctcagcctgtggttaaagctgctcaggaggct

SEQ ID NO: 256371 - DNA, 212 bp, Homo sapiens
  chr6:137147517-137147729
  hypo
atcacctgtagtggcgatggctcgctgcagctctgggacactgccaaagctgcagggccactgcaagtctataaagaacacgctcaggaggtaggagggaaatctttctgggctgattatttttctttcttcgactttggttgaaatccatttggggatggacacatggagaaatatcttcaggggacaagtttaaacgttagcatttctta

SEQ ID NO: 256372 - DNA, 190 bp, Homo sapiens
  chr6:138518767-138518957
  hypo
tgatcatcttatgggaccaccgtggtccgtcattgacggaaacaccattgtgcggcacatgactgtatttgtccatccttattgagtggttgtgagagttgttgggatcaagtgcctgagctctcagcacggtgactggcatgctggaggttttaatgatggcacttccgtgactcaactgccactctcc

SEQ ID NO: 256373 - DNA, 327 bp, Homo sapiens
  chr6:138745335-138745662
  hypo
ccacagagcaggccgccctcgtccatctcctccctcgccagtccgtccagggaacatccctccgcagcgcccagagccccgcgggctatgctgtccacaggctccacggcttccccttctccctccgagatgacggtcatggggctgctctggatccggttccgcatgctgtacctgctgctggcggcagaaggcggcgttcggctgcggccgtacctggggccggaaaaggacagactccgaggcatcaagccttcgttcttggcccactcctcctgcgcccttctgttcttgcttggggagcagcttgacgggctctcgggggca

SEQ ID NO: 256374 - DNA, 263 bp, Homo sapiens
  chr6:138790362-138790625
  hypo
gccaactaagcagccaatcacgtactatgcggatgcacacaaatgaaaccctcacttcaacctgaagacattcgcacatgagttacgtagagggacctgcaggaagcggtagagaaaacataaggcttatgcgtttaatttccacaccaatttcaggatctttgtcactgacagcagcactaagacttgttaactttatatagttaagaagaacaaggctgagcgcgatgactcacgcctgtaagcctagaactttgggaggc

SEQ ID NO: 256375 - DNA, 41 bp, Homo sapiens
  chr6:138812078-138812119
  hypo
tctttaatgttaaacaggtcgatgtgtgcaccattgttttt

SEQ ID NO: 256376 - DNA, 161 bp, Homo sapiens; identical to SEQ ID NO: 210924
  chr6:138883861-138884022
  hypo

SEQ ID NO: 256377 - DNA, 184 bp, Homo sapiens
  chr6:138884363-138884547
  hypo
aagttttaataatagtgtctcgccacggtaaacattcactaaatattagctattgttaagcttatggataggtcgactgattcagacatgactttcaatttagtattttaatcatttcaggatttgacgtcaacactgagataccaattccttgaaggattacgtaaaggaagtgataggttcc

SEQ ID NO: 256378 - DNA, 154 bp, Homo sapiens
  chr6:138905937-138906091
  hypo
agtggactgatggagactggcgagcacagacggagacatttgttccagagattctccttcctaatcgtcctcctcccagcccagccacgcaggcatttccctgaaacacaggaagaactacaacagagctgccgcaaaatgcacctgtgtgggt

SEQ ID NO: 256379 - DNA, 32 bp, Homo sapiens
  chr6:139455797-139455829
  hypo
acaggcataagccaccgcgcccggtcccctgt

SEQ ID NO: 256380 - DNA, 379 bp, Homo sapiens
  chr6:139564048-139564427
  hypo
gcaggggactctctgaatcccgtgaagggatcagagggggttgctctggctccttgagagcggcgtcagcactctcctgagaactgcctatttcgggttgggtttctttggactggtgcggggttgactctggatgatgaattatcatgaaggctgtggccagatttttcacggcggtttggacactattaacctcctctgcgtcaatctcttgatccacagagacgtttgactctggctcttcatcggagttgtgctgactttggtcatccttttcagatatttctgcgtctctgatttttttgtggagttcgtttctctcttcttgtaaagcacggcagaggttctctagcctcccgattttcatcacaaagcactc

SEQ ID NO: 256381 - DNA, 48 bp, Homo sapiens
  chr6:139697344-139697392
  hypo
tcttgcacacaagacttttaaaggccctgtttcttgaggactggaaat

SEQ ID NO: 256382 - DNA, 61 bp, Homo sapiens
  chr6:139697463-139697524
  hypo
tgtcttttcctagtcaggcatatttttgtaaatgttgttactttgtgtcttgtcttctttc

SEQ ID NO: 256383 - DNA, 151 bp, Homo sapiens
  chr6:139858225-139858376
  hypo
ggcctggaccaacagtccctcggtgaattcatgacaaaacgcctgaatgtggaatcagggtagtcgcatgttcaaaccaaaactctatccgctgctggtccaaggtgcctcttgctgttgccaattagccgggacacccagaactaaccca

SEQ ID NO: 256384 - DNA, 78 bp, Homo sapiens
  chr6:139858705-139858783
  hypo
tacccttgtccaggccctgtcgtatgaatagttctatttcattcgactcttcctctccagacatgtgggagaaagatg

SEQ ID NO: 256385 - DNA, 33 bp, Homo sapiens; identical to SEQ ID NO: 210927
  chr6:139871210-139871243
  hypo

SEQ ID NO: 256386 - DNA, 33 bp, Homo sapiens
  chr6:139871483-139871516
  hypo
ccgagccctgccgctgtctggaaaattttaaca

SEQ ID NO: 256387 - DNA, 31 bp, Homo sapiens
  chr6:139908685-139908716
  hypo
acaggcgtgggccaccgcgcctggccagaag

SEQ ID NO: 256388 - DNA, 212 bp, Homo sapiens; identical to SEQ ID NO: 210928
  chr6:140300532-140300744
  hypo

SEQ ID NO: 256389 - DNA, 35 bp, Homo sapiens
  chr6:141150320-141150355
  hypo
ctgtgtgattgtcacgtcaccggactgctcaatga

SEQ ID NO: 256390 - DNA, 32 bp, Homo sapiens
  chr6:142237865-142237897
  hypo
tgtttttttccccccgataaacatataaattg

SEQ ID NO: 256391 - DNA, 86 bp, Homo sapiens
  chr6:142509608-142509694
  hypo
caaagtggtgggattacaggcatgagccaccgtgcctgttttcaaatagtaaaaccacgttcgctctggaacgctaatgtgcgtat

SEQ ID NO: 256392 - DNA, 77 bp, Homo sapiens
  chr6:142543125-142543202
  hypo
acaataatcaaggtgagatattatgatgtcttagtccaggagtagccttggaggtaataaaacgggattggtttctg

SEQ ID NO: 256393 - DNA, 49 bp, Homo sapiens
  chr6:142622529-142622578
  hypo
agacagaaaagttaagtaaagaaagtggcagaaaagtgaagcaaagcaa

SEQ ID NO: 256394 - DNA, 65 bp, Homo sapiens; identical to SEQ ID NO: 210930
  chr6:143031708-143031773
  hypo

SEQ ID NO: 256395 - DNA, 38 bp, Homo sapiens
  chr6:143239181-143239219
  hypo
ttatagacgtgagccatcatgcccggagcgtctgtaat

SEQ ID NO: 256396 - DNA, 46 bp, Homo sapiens
  chr6:143557407-143557453
  hypo
ccggctcagcccagcggggcagggcctctgccgtgagtttgcagat

SEQ ID NO: 256397 - DNA, 39 bp, Homo sapiens
  chr6:143947371-143947410
  hypo
tttaaaatttagcacaaaaccggccgggcacggttgctc

SEQ ID NO: 256398 - DNA, 39 bp, Homo sapiens
  chr6:143947650-143947689
  hypo
gcagcagagcgagactccgtctcaaaaaaaaaaaaaaat

SEQ ID NO: 256399 - DNA, 173 bp, Homo sapiens
  chr6:144067584-144067757
  hypo
gcgagaatgtggcccgatccctaggccagcggcacttgctcttgcagttgccaccttcatccttaagtttagggcagaacagccgtgaatctctgggcctgttcccaggaatggaggccaagacaactgttggaggaggtctacagagtcccgccacccctcagagcccagtc

SEQ ID NO: 256400 - DNA, 250 bp, Homo sapiens
  chr6:144271186-144271436
  hypo
ttcagtgtctggacagagttcgcggtaccaagcaaatacccctcaccatcctgcctcacccacttggaaacgtgaaagctgactcgggcacttttggtcagcgctaatccaaaccaggggacacacaggagtcctcggccagcaccttggcaccacaccttctttgtgacggctgtgattctagcagcacacacaacctctgcaattatgtgtgactttaactaattacctgtcccggctctgcccaaac

SEQ ID NO: 256401 - DNA, 72 bp, Homo sapiens; identical to SEQ ID NO: 210933
  chr6:144330175-144330247
  hypo

SEQ ID NO: 256402 - DNA, 79 bp, Homo sapiens; identical to SEQ ID NO: 210934
  chr6:144508671-144508750
  hypo

SEQ ID NO: 256403 - DNA, 173 bp, Homo sapiens
  chr6:144534399-144534572
  hypo
ggacatatttttaaaactatcgcagaatgtatgaagaatatcatggcttaactaagcacatatacacactgaaaactagtttaaatagcgtggaacatttccctgtaagaagtacgttaaatgcagtttcttgaacgtgaagccatttcaacgttacaaaatctgtcctaata

SEQ ID NO: 256404 - DNA, 177 bp, Homo sapiens
  chr6:144973591-144973768
  hypo
ctagtagactctggcgctttcactctgccacagtctaggtgggatcacttaaacctacttgaaagataaagcgatgcttcaattgcctggacaaatcaggccagacattcattttcaagcgttatcaatggatttttataaacattccaaaaaactttagaccgtagtatcacagta

SEQ ID NO: 256405 - DNA, 31 bp, Homo sapiens; identical to SEQ ID NO: 210937
  chr6:146011352-146011383
  hypo

SEQ ID NO: 256406 - DNA, 69 bp, Homo sapiens
  chr6:147519322-147519391
  hypo
aagtaatatgatatacgattagtcgctgtctatatataaatatatatataggtgcgaatccaggggtgg

SEQ ID NO: 256407 - DNA, 163 bp, Homo sapiens
  chr6:147728142-147728305
  hypo
gcgacccaggcggcgccacaggcaacccccaccgggcgtcagatcctgcacgcccgcggggactgggagaggaacctggaggcgctcttcaacgccttcatgaaccccaagatggccaacgtgcaccagaccatgcccatgaggctccggaagctgcccgact

SEQ ID NO: 256408 - DNA, 42 bp, Homo sapiens
  chr6:148062632-148062674
  hypo
ttttcaaaatatgttgcatgcggattaacataaaaaggcaaa

SEQ ID NO: 256409 - DNA, 137 bp, Homo sapiens; identical to SEQ ID NO: 210942
  chr6:148200360-148200497
  hypo

SEQ ID NO: 256410 - DNA, 39 bp, Homo sapiens; identical to SEQ ID NO: 210943
  chr6:148648689-148648728
  hypo

SEQ ID NO: 256411 - DNA, 157 bp, Homo sapiens
  chr6:148710316-148710473
  hypo
tggactacacgagccggctaaagtctaagcgcttcacacgtgttactccagtagtcctcactgaagtaggtgttgtgattattcagtgttcctcagaggttgagacgtgcctaaggccacttaaccaataccaggcgctatggagctgggtggaaac

SEQ ID NO: 256412 - DNA, 198 bp, Homo sapiens
  chr6:148819897-148820095
  hypo
tgctcttgggaacaacgctggggaagttggggataagaggatttccattacttgttcaatgttactgattgattacatgtcaattccttgttaaatcatttgccctagcgccggtccttatttaatggatgggttggggagatacccaggcactattgttattcgtaagtagaatttagactgcgggccatctccaac

SEQ ID NO: 256413 - DNA, 210 bp, Homo sapiens
  chr6:148869356-148869566
  hypo
cttttagacatacgcgaagtagtcctcgatgacacatggagcgtttctatcatattctttcttaatttatccagattccaagtggtggactcacggaaatctgccgaaagcccgtctctcctgggtgcatttcgtctgtgtcagattggctcatttccatcggtctgcccatgtacgccggcaccctctccaccgcgggcttcagcacac

SEQ ID NO: 256414 - DNA, 195 bp, Homo sapiens
  chr6:149177572-149177767
  hypo
ttatatatcaaagtacgcatctactaagtcctattcatcggagacagccacaggtgatagtgtatgggcagaggtgccaccaacctagcatgtcctgcatgggggcttttcccttagtcaataaaggccagtgactaggcggtagctacctcttgaagagatgggactagggttgcggggcgggctttcccacat

SEQ ID NO: 256415 - DNA, 92 bp, Homo sapiens
  chr6:149198424-149198516
  hypo
atgagtgcggggggtcgtgtatgagtgtgggtatcgtgtacaagtgtggggggtcatgtatgagtgcagagatcgtgtatgagtgggggggt

SEQ ID NO: 256416 - DNA, 32 bp, Homo sapiens
  chr6:149198576-149198608
  hypo
cgtatgagtggggggatcgtgtatgagtgtgg

SEQ ID NO: 256417 - DNA, 311 bp, Homo sapiens
  chr6:149409546-149409857
  hypo
cttcacagaagtcacgttctctgtccctcggcacacgcttgtatcttaatctttatttttccaactcagttgtggaattccaccaggaaaaccctttcttgctcaagaagaactgcgggtacaatttcagctcaccttgggtctgtgttgccccagggagcccaggctgagggtgaacaagctgcagctgccacttgaacagcgctttctcaggtcttgagccgctttgcgtcatctctgttgcttcagtgcctccagaagccccttggtgctccccccaagggtagcgctcaccacgctacattgtaaat

SEQ ID NO: 256418 - DNA, 110 bp, Homo sapiens
  chr6:149721362-149721472
  hypo
ctggcgcacacagcgggaggggagggagcccaggatgtgcacgcaccctctccctcatccaccgctgtcacctcctgctgctcttcctgctgctcgtgtactcgttaggt

SEQ ID NO: 256419 - DNA, 34 bp, Homo sapiens
  chr6:149772982-149773016
  hypo
gccaggcttagggagcgggcggtagggagtgggt

SEQ ID NO: 256420 - DNA, 42 bp, Homo sapiens
  chr6:149786124-149786166
  hypo
cacactgctgtgctctctctcgtatgtgacctttcctgctat

SEQ ID NO: 256421 - DNA, 169 bp, Homo sapiens
  chr6:149813263-149813432
  hypo
gccttgtcccttgcgaacgctccccacgaaggcttgcgggtggttaggccgccatgtcttctgtttcacattcttattcctgtacccgaacgtggaaaccccttcaccacgcacctcaaaaccaccaggccgccacttcgccgcccgcctcaccggcaccattgcagcc

SEQ ID NO: 256422 - DNA, 90 bp, Homo sapiens
  chr6:149868352-149868442
  hypo
gcttgagccaccgcacctggcggaaaagccagagcttttataatgatttacaagatcctctcctaccccatcctacgccatcttcttatt

SEQ ID NO: 256423 - DNA, 484 bp, Homo sapiens; identical to SEQ ID NO: 210944
  chr6:149915185-149915669
  hypo

SEQ ID NO: 256424 - DNA, 84 bp, Homo sapiens; identical to SEQ ID NO: 210945
  chr6:150081971-150082055
  hypo

SEQ ID NO: 256425 - DNA, 122 bp, Homo sapiens
  chr6:150174429-150174551
  hypo
ttttctatttattttatgatcgtggaatttagctataatatgcgcagaagaggctgtgtggagtgttggctggtagcgattttgggtacaaggcagcatacgaggtcccaccaatgtgtaaa

SEQ ID NO: 256426 - DNA, 210 bp, Homo sapiens
  chr6:150209155-150209365
  hypo
ggagaaaccccatctctactaaaaatgtaggatgtagttcggcactgtaatgtttagagggtggtgaaaggatttcttataccacatcttgtatgttatctgggagtaaatgctgcagccacaagcgccaccagcaagtcttctcagggtgaacgggaaaaggggatgggacctgctgagctaaatcacggtaaacgcagacagcaaaca

SEQ ID NO: 256427 - DNA, 99 bp, Homo sapiens
  chr6:150420027-150420126
  hypo
caactcaatccatgtcggttacaaacctctcttacaatttctccgccttattctcactcgttctcacctttccagccacgttcaagaaatcacccagtc

SEQ ID NO: 256428 - DNA, 39 bp, Homo sapiens
  chr6:150420186-150420225
  hypo
ccaccaagcccaggactgggtacccgggcaagattggca

SEQ ID NO: 256429 - DNA, 120 bp, Homo sapiens
  chr6:150421767-150421887
  hypo
ttattgaaaaagtcgtcccttttccctttttctgtaacgaaatagacaggaatgaaagactttccccggggcctggaagctgggggtggtgggtgaataactcctccattctcagggcca

SEQ ID NO: 256430 - DNA, 120 bp, Homo sapiens
  chr6:150437046-150437166
  hypo
ccggctgagcctagtgagggagccccgtgagcccgtgccagcccggaacccgcaccagcctgcaagcgccacgctcagccccggctggcttcggcgcctcccgctccacacctccctgag

SEQ ID NO: 256431 - DNA, 43 bp, Homo sapiens
  chr6:150437286-150437329
  hypo
agtgagcgagggctgctagcacgttgtcacttcttaccagggg

SEQ ID NO: 256432 - DNA, 35 bp, Homo sapiens
  chr6:150487186-150487221
  hypo
cacatgccacataccgctcttcttcttcttttttt

SEQ ID NO: 256433 - DNA, 118 bp, Homo sapiens
  chr6:150498913-150499031
  hypo
agtgggacctgggccgctttctctgagccagtccggactgcagcagaaccccagtgactgtcccaacaagaggccgggacagactcatctcctgaggccccgtcgtcaggcaagaaag

SEQ ID NO: 256434 - DNA, 31 bp, Homo sapiens
  chr6:150499232-150499263
  hypo
ccccatgcagcctccgcgaggccttttgtgc

SEQ ID NO: 256435 - DNA, 169 bp, Homo sapiens
  chr6:150518591-150518760
  hypo
tgaatattcgctgccggcctggggtcggtgagattagtgagaagggaacaggtggcgtaaaagctaatgggatgctttaagattggcacattgctgatttccaggctgccgtgggaaggctggtggtgggtatccaggttgctgtagcggggtggagagaaagcacctc

SEQ ID NO: 256436 - DNA, 39 bp, Homo sapiens; identical to SEQ ID NO: 210947
  chr6:150596883-150596922
  hypo

SEQ ID NO: 256437 - DNA, 495 bp, Homo sapiens
  chr6:150654140-150654635
  hypo
gttgatagtgtgcgcgagttgatagtgcgtgagttgatagtgtgtatgagttgatagtttgtgccaggtgatagtgggtgagttgatagtgtgcacgagttgatagtgtgcacgtgatagtgtgtgcacgagttgacagtgtgtgagttgatagtgtgtcagttgatagcatgtgagttgatagtgtgtgcatgagttgctagtgcacgagttgattgagttgatagtatgcaagttgatagtgtgcacgagttggtattgtgtgcaagttgatagtgtgcacgagttgatagttgcaggttgatagtgtgtgcacgagttaacagtgtgcaagttgatagtgtgtgcatgagttgctagtgcgcgagttgattgagttgatagtgtgcaagttgatagtgtgcacaatttgatattgtgcgcgagttgatagtgtgcacgagttgataatgcgtgcgagttgatagtgtgtgcgaattgatagggtgcatgagt

SEQ ID NO: 256438 - DNA, 66 bp, Homo sapiens
  chr6:151125834-151125900
  hypo
caatgacatgaagcggaaacacgagcacgcggtccggttacaggtgagcccgcgaggtgtcggtgc

SEQ ID NO: 256439 - DNA, 125 bp, Homo sapiens
  chr6:151306909-151307034
  hypo
ggaagcactgggaaatagcacgtcactggtgcctcgtgccatttccgtgcctttccctgtcttgcctcagccttgcactgtggaatgcaaaagagtagaagaaactccaacgtgaaaattgtcga

SEQ ID NO: 256440 - DNA, 169 bp, Homo sapiens
  chr6:151346254-151346423
  hypo
atttcccagagtccggttaccctcaccgcaccccaggtttgccgtagaaggatgagattccctacatgtaggcgtcttcagagtgaacctgttgctcagggcccgcgagcccacagggctccatgcccactgagcaggctcgtggacgtcggcacgtagctcagatgtg

SEQ ID NO: 256441 - DNA, 34 bp, Homo sapiens; identical to SEQ ID NO: 210952
  chr6:151546982-151547016
  hypo

SEQ ID NO: 256442 - DNA, 34 bp, Homo sapiens; identical to SEQ ID NO: 210953
  chr6:151547076-151547110
  hypo

SEQ ID NO: 256443 - DNA, 369 bp, Homo sapiens
  chr6:151662637-151663006
  hypo
ggtcgagggctggcgccgggcgcggggaggctgcgtcttttgtgatgttcgcggctggcttcccgggcccaggctttcgcgagctatggcagccggcaggggcgcgctgggcctcacgggcggctgttgggctgcccctgccggcgggctgcgcgcgccatgccctggtggagtaaactctgcagtgagtagcacgtgcacccaagcggcagttcgccccgcagcgatggcggacacggaatcccgagggccaccaactgtcccttaggaccggcccgagatgggtgtgtgtgggttttccagcctccttccttcccgtcccaggcttgggaaagcctctctactggccaaggcgcgcagggacaggtc

SEQ ID NO: 256444 - DNA, 270 bp, Homo sapiens
  chr6:151687250-151687520
  hypo
tcacttatcatcccggcttcaggcacttccatggcatctttcccgaggtcagctgcattgctacagagagtcagggggacgcgactttctccctgttggctagatgtgaaaggtactcctgtgtggatctggaggtgttcacgtaagctgctccggagagtgaagcgccgtccacacaggtggcaggcatagtactttggaaagctcccattcctcttcatgatgcttggcttgacgtgggctattgtgagggacgcaggctgctcatcg

SEQ ID NO: 256445 - DNA, 38 bp, Homo sapiens
  chr6:151770486-151770524
  hypo
gagtgagattctgtaacgaaaaaaaaaaaaaaaagcta

SEQ ID NO: 256446 - DNA, 142 bp, Homo sapiens; identical to SEQ ID NO: 210955
  chr6:152099113-152099255
  hypo

SEQ ID NO: 256447 - DNA, 44 bp, Homo sapiens
  chr6:152457829-152457873
  hypo
tcatctgcgacaagcgatcctgcaggtcccggctctccttgctg

SEQ ID NO: 256448 - DNA, 124 bp, Homo sapiens
  chr6:152527365-152527489
  hypo
ctcttggatttcagcgagttcggcctgcaaggcggcctcagcgccactgtccgccgagagaaggagttgcttgccagcctccacagtcaggatgtagctgccttgttgccgcagaaacactttt

SEQ ID NO: 256449 - DNA, 177 bp, Homo sapiens
  chr6:152539828-152540005
  hypo
aagtctgagttaaataaacacgaatatttatattaaagccgcttagtgtttattaattgaacaggccatggtggcaggcattggttcaggggcttgcatcttaaaccgattttaaaattccttggcagagaacagcgcaaaacgtccaccttcatcgtccccaccagaacttccaag

SEQ ID NO: 256450 - DNA, 165 bp, Homo sapiens
  chr6:152644581-152644746
  hypo
aacaaaagaatgaaagtaggtgcttaattacttcaggcaccgatcttgcatggcggtgatttcctgcatgagcggaggctcttccccaggggttggggcggctccatcctggagcatgctcagggtttgctgccgcagcatgcccaaggccgactgctgctgctc

SEQ ID NO: 256451 - DNA, 39 bp, Homo sapiens
  chr6:153337061-153337100
  hypo
acaggtgtgagccaccgcgcccagccaagcatatctttt

SEQ ID NO: 256452 - DNA, 110 bp, Homo sapiens
  chr6:153355448-153355558
  hypo
atgctccagggctgctctgacgtatacctgtgccgattaatgtgagggctgggaagcgcgaagtgatacagactgaagaaacagcatccgctaccttaactgacaacatg

SEQ ID NO: 256453 - DNA, 80 bp, Homo sapiens
  chr6:153572990-153573070
  hypo
tgagtaacttactgaaggaacgattttttttttgttgttttttgagactctgtcgcccaggctggagtgcagtggcgcca

SEQ ID NO: 256454 - DNA, 37 bp, Homo sapiens
  chr6:154709415-154709452
  hypo
gtttatttcacttagcgtaatgtccttaagatttatc

SEQ ID NO: 256455 - DNA, 113 bp, Homo sapiens
  chr6:154727651-154727764
  hypo
ctcggatgtagtccgcaccccggaccagatgccgctcggtcgtgggtctggagaaccggtatgggggagaggagctctcttcaatgatcggaggaatccgctcgttactgaaa

SEQ ID NO: 256456 - DNA, 73 bp, Homo sapiens
  chr6:154757104-154757177
  hypo
tggcacgcgtcaagcgtggatgcacacctgagaatttggtgtgatggcacgcgtcaagcgtggatgcacaatg

SEQ ID NO: 256457 - DNA, 136 bp, Homo sapiens; identical to SEQ ID NO: 210957
  chr6:154764334-154764470
  hypo

SEQ ID NO: 256458 - DNA, 96 bp, Homo sapiens
  chr6:154785476-154785572
  hypo
aggaaaaaaaattctactctcggaaacattcacactaacatacaattcacatcgtggatttaagcagcacgttaaagaaagacaaaggcctgggcg

SEQ ID NO: 256459 - DNA, 183 bp, Homo sapiens
  chr6:154799040-154799223
  hypo
aatcccctaacatcactcaccgccaggcaccaggggagccatcacagaagaacgtcctgctctgctggggcttccgtccttatgacggaagagaggcagcgaacacacaaacccagaacagggcaggcggtaagtgcttggaagaaggctaaggcaggcaccggggctgcagaatggcactta

SEQ ID NO: 256460 - DNA, 121 bp, Homo sapiens
  chr6:154806723-154806844
  hypo
gaccaaatctgttcttaatacgaacagcgtgattcacgtcactccaggttactccctgcaaggcgcctctttgacacggtgggcatcattctttctcctcgctgcacaggcaatctaaaag

SEQ ID NO: 256461 - DNA, 160 bp, Homo sapiens
  chr6:154826922-154827082
  hypo
cgcgcctggccaactacacaattgttgagagcctacccactcgaggctgatcaacagccaaggctaggacagttctgctgggacaaccagtcccacgtcttcctcgtcgaaggcactccccagtggcctttttaaagcagaaaaacgacttgtggtagct

SEQ ID NO: 256462 - DNA, 175 bp, Homo sapiens; identical to SEQ ID NO: 210959
  chr6:154842637-154842812
  hypo

SEQ ID NO: 256463 - DNA, 341 bp, Homo sapiens
  chr6:154863131-154863472
  hypo
cggctgagcccattctcttaatgacctcactgtatgtatgcctcttccttattgatttattcgattaaaaatatgttgagtcactgctgtgtgctgaactcgttccagatgttggagagagacagtgacgcaaaggaccagacctggttctcacagagtctacactccggtgtgaagggtctgaaagtatgtgggaagcgggagagaggaagaaagaggagcggaactgccgacccactctatgggaactctgtattgaaccatttgaggaagggccaggctgtttcccaaaagcagctgcaccattttgtatttcaccaaccaagcgtgtggggtgcaat

SEQ ID NO: 256464 - DNA, 152 bp, Homo sapiens; identical to SEQ ID NO: 210960
  chr6:154894708-154894860
  hypo

SEQ ID NO: 256465 - DNA, 39 bp, Homo sapiens
  chr6:154970553-154970592
  hypo
gaagtgaaaaatggcattaccggccgggcgcggtggctc

SEQ ID NO: 256466 - DNA, 38 bp, Homo sapiens; identical to SEQ ID NO: 210961
  chr6:154970832-154970870
  hypo

SEQ ID NO: 256467 - DNA, 41 bp, Homo sapiens; identical to SEQ ID NO: 210962
  chr6:155077849-155077890
  hypo

SEQ ID NO: 256468 - DNA, 174 bp, Homo sapiens
  chr6:155281567-155281741
  hypo
gggtgagcctaggtcacctccgtcccaccttccctgttcacgccatcacgttgctgtctccttcctcacagctctgtccaatcttttggcacctggccacccgctgttacttgacactctcactcatgccatctaatcgcttcactggattccgatctccaagagcacacagtc

SEQ ID NO: 256469 - DNA, 206 bp, Homo sapiens
  chr6:155353325-155353531
  hypo
tttctcctggtgcatacacacgtcttaagcctgtgcgaacctgcctgcttgtctgtgcacaggaattaaagtttggaaagcttccattgtgatcctttccccacttgccactcacagtgtggttcatggaacgcaacgctcggtggacctacatttggagcatgaagatgctgatagcaatctatgtcatgcgtggcattaatcac

SEQ ID NO: 256470 - DNA, 60 bp, Homo sapiens
  chr6:155396836-155396896
  hypo
gataccttatatgcatagcccgacggtaattttatattcgaaagaattttgtgcatgaaa

SEQ ID NO: 256471 - DNA, 392 bp, Homo sapiens
  chr6:155509028-155509420
  hypo
cttgcgcaggtgtggaaagcagccttggagagccagcctctctagcctgcattggctggagagcagccccagggctggcgtgagcactcccgctgccccttggccattagtctacaagaggtggcctgaactgaggcagtaggacttactgtttcctgaggccttctatgccgaggttttgaggatggaatgagataatgtgtgcaaagttcccggcacatgatctctgttgcgcatgtgtgttcttaggaattgtgtgtcccaaacctccaccattgtctttcctcgtgcgctcagaatgcaggcagtcgactcttagctcacctcgtttattgctgggcccgtgcttggaagacaccatgttccatttggcaaatcgcttacactgggaa

SEQ ID NO: 256472 - DNA, 450 bp, Homo sapiens
  chr6:155534949-155535399
  hypo
agcgctgccctgaacgtgtccacacatggctgggttgcagcagtgcctgggcttggactcaactttgctccaagagcagagcgggcaccaggagtagggagaaaccaggcagtgggagcaggctactttcgagcctgtgggggcaatgggtccttcctaggcccctgagagtgcagagatgtctgggtccacagtcgcggctacgtggctgcagcagtacccgggagggcggggctccttcctgctcctggcccccaagaacacagggatgtctgggtcagaagccacggctgggcagtcacagctgtgcccgaggagcacgaggctcccgccctgccacttcaggattgggtggggcttccacattctcagctcctgctggctccatggaacgcacagcgctggccgtgcctcccccggtgcagccggcatcatcgcagtgactgttcc

SEQ ID NO: 256473 - DNA, 758 bp, Homo sapiens
  chr6:155568745-155569503
  hypo
gccaccgcacctggccacgcttcatggcttttaatgaattgtttgaaactcactttttaggccacctataacaatatttctcatgggtatgcatgaaatgtgtctttaaagtcagacattcctgcattttgagtcagtgttagtctttggggcgcagcctgcattccatcctcggaagctcccagcactccagggctctgtcagggctgtgaggcggaatcccacgctgacagctgggtgcctgacccactgatgtgttggggttttcattaaagaatggcattaggaggactatagaaatagatgatctataaatgttaaaagagaaatgaagaatttaattcaccccactgtgctcttctgaggtcttttatccatctgcttgtagctaaaactgacaaagccttcaaggcttttctggacgcccggaaccccaccaagcagcattcctccacgctggagtcctacctcatcaagccggttcagagagtgctcaagtacccgctgctgctcaaggagctggtgtccctgacggaccaggagagcgaggagcactaccacctgacgggtgaggcggcggcggcacctccgggcgagggcctgcacagggcggcgaggggctgccagccgtgccctgggcctgacagctcacctcttccccgcctagtggcacgtcctaagtcacttttcagttctgcgatggttaatcttaggtttcacgtgaatatgtgaaactagctaggcgtctgggcactcct

SEQ ID NO: 256474 - DNA, 439 bp, Homo sapiens
  chr6:155577640-155578079
  hypo
ctgaagaattcctccagcaacgagtggaccggtgagactggcaagggaaccttgctggactctgacgagggcagcttgagcagcggcacccagagcagcggctgccccacggctgagggcaggcaggactccaagagcacttctcccgggaaatacccacaccccggcttggcagattttgccgacaatctcatcaaagagagtgacatcctgagcgatgaagatgatgaccaccgtcagactgtgaagcagggcagccctactaaagacatcgaaattcagttccagagactgaggatttccgaggacccagacgttcaccccgaggctgagcagcagcctggcccggagtcgggtgagggtcagaaaggaggagagcagcccaaactggtccgggggcacttctgccccattaaacgaaaagccaacagcaccaaga

SEQ ID NO: 256475 - DNA, 41 bp, Homo sapiens
  chr6:155593719-155593760
  hypo
gaacaggccacaaacggtattatactcgtggctggagggta

SEQ ID NO: 256476 - DNA, 66 bp, Homo sapiens
  chr6:155838705-155838771
  hypo
accagctagggctggcgtctcactggcatctgtagacccacctaagccctccggcagcatctctgg

SEQ ID NO: 256477 - DNA, 40 bp, Homo sapiens
  chr6:155991045-155991085
  hypo
gattacaggcatgagccaccttgcccggccaggtttcctt

SEQ ID NO: 256478 - DNA, 65 bp, Homo sapiens
  chr6:156030251-156030316
  hypo
aaagcggagacaacgttggaaagaatgaggcctgagaacgagtcagtgccgcctcatccgcgtca

SEQ ID NO: 256479 - DNA, 32 bp, Homo sapiens; identical to SEQ ID NO: 210966
  chr6:156156136-156156168
  hypo

SEQ ID NO: 256480 - DNA, 120 bp, Homo sapiens
  chr6:156199683-156199803
  hypo
tttttatagtacgatctcgtcatcttttatttatctatccaattgccttttcatatactttccccatctatatatctttgtaagtatctattttgacatgcttttggtttctagaatgat

SEQ ID NO: 256481 - DNA, 130 bp, Homo sapiens
  chr6:156374934-156375064
  hypo
agacagtttgcagtcgctgtgtcagcataaaaaagagaatcataggtaggacaaggtgaaagggtcaggcgtcagcatggggatttgggttacgccggttccaaaaataatcactcgttcacgtgcttgg

SEQ ID NO: 256482 - DNA, 139 bp, Homo sapiens
  chr6:156710186-156710325
  hypo
agaaatctatcagcatcccccggcaacatcttctgaagatgaggcctgcatggagattctgactcagtgggcatagagaggggcctacgtcagaacatactgaaaaatgtttccgtgcgaaactaatgtacatccccaa

SEQ ID NO: 256483 - DNA, 196 bp, Homo sapiens
  chr6:156817501-156817697
  hypo
ctgcagaaagcccacgatctgcctaagaagggatcgtcaccagataaagccatgatgcatatctcgtcagtgaaaacagttgaataaaagcaaacttcaaccttcaagaaaaaaaaaattggaagcaacatatattttgctttgtttcgttttgttttgttttgagacggagtctctctctctccccaaggctgga

SEQ ID NO: 256484 - DNA, 163 bp, Homo sapiens
  chr6:156876717-156876880
  hypo
acatgaggcactgggcacatcgactcacctggcgctgactcccacactctttccacactggcacccactcaacctcaactgagatcctcaacaatcacattattttgtttcaaagaggttccaccccgtaggcagacaccacggaatctcacccattttgttc

SEQ ID NO: 256485 - DNA, 244 bp, Homo sapiens
  chr6:156883161-156883405
  hypo
tgtgctgggcagtgcgaccaattcaaacgtgaatactgacaaagacaagacaggtgcagacacagccacacggcaacacagggcgcactcaggagcgggagggggagaaggtcaggcaagtggggagatggtgactgagctggcatcctgccaggtaagcaagccaggacagaagcccagaacctgagccacagaccacgaggggtggcatgggacagctgcctggcagcgggtgcgaggggct

SEQ ID NO: 256486 - DNA, 81 bp, Homo sapiens
  chr6:157159618-157159699
  hypo
gcctgagctgccaacgatagcgagagcgtacctgaaagcaagagctcttaaaacgctctaagtcaccgaagcctgtcggtg

SEQ ID NO: 256487 - DNA, 86 bp, Homo sapiens; identical to SEQ ID NO: 210967
  chr6:157193703-157193789
  hypo

SEQ ID NO: 256488 - DNA, 120 bp, Homo sapiens
  chr6:157283777-157283897
  hypo
ggctaatttttttgtatttttagtagagatggatcttcccatgttgccagtctgctcttaaactcccacgctcaagagatccgcccgccttggcttttcaaagtgtggggattacaggtg

SEQ ID NO: 256489 - DNA, 166 bp, Homo sapiens
  chr6:157336127-157336293
  hypo
agcagctggctaatctgactcgagggcatcagactgggaaagacgagatgacatttgatgccacgtgtcttttaatccagcatttttcacacaatgccctgcacgtcgtagctactgagaaaatatttggggagtaagtttgaacggaactgtgacttgaagaata

SEQ ID NO: 256490 - DNA, 227 bp, Homo sapiens; identical to SEQ ID NO: 210968
  chr6:157351860-157352087
  hypo

SEQ ID NO: 256491 - DNA, 40 bp, Homo sapiens
  chr6:157390994-157391034
  hypo
gtaactacatgaagcggcattccagcgtcctagcctatac

SEQ ID NO: 256492 - DNA, 144 bp, Homo sapiens
  chr6:157411050-157411194
  hypo
gtttttcactttggcgttaggagggctgctgggttttggatgtgtattgaacaggtcttgggtcttacgctgggcctgattgcccctaatgcatggtggaagctgactcagcacggcatctgaatgcaccgctgttgccagaag

SEQ ID NO: 256493 - DNA, 176 bp, Homo sapiens; identical to SEQ ID NO: 210969
  chr6:157430366-157430542
  hypo

SEQ ID NO: 256494 - DNA, 173 bp, Homo sapiens
  chr6:157431600-157431773
  hypo
tacaggtagtcagatgcctccgcagccacccgggagccagtcagaatccagttcccatcccgccttgagccagtcaccaatgccacaggaaagaggttcgtctccagttcatgtcttacatgcctatagtgctttcaggcgataaggcgtacgtgagtttgcttacctatgca

SEQ ID NO: 256495 - DNA, 86 bp, Homo sapiens
  chr6:157447664-157447750
  hypo
gtatgagcatacagcgcaggactcaaaactaggaaattccctgatcagaaccctggtgcagatttatgttacggatgaatatatta

SEQ ID NO: 256496 - DNA, 166 bp, Homo sapiens
  chr6:157472013-157472179
  hypo
tgcgggacctgggcgttttctctgaaactgttaacgatcgtgccgtctggccgcgaaaggaacacccaaaccaagaaagcgaaacacctaacagaaaatccatctccaagggggttgtccttctgtccatttttgttggtgtgtttgtttcgttttcctttcgtat

SEQ ID NO: 256497 - DNA, 224 bp, Homo sapiens; identical to SEQ ID NO: 210970
  chr6:157477823-157478047
  hypo

SEQ ID NO: 256498 - DNA, 269 bp, Homo sapiens; identical to SEQ ID NO: 20676
  chr6:157478285-157478554
  hypo

SEQ ID NO: 256499 - DNA, 180 bp, Homo sapiens
  chr6:157484363-157484543
  hypo
ctcgaaacccaggtcgctgtggtctcgggcattgtattttcagccccaccaaacaaggagctttttgttgtgagccacagactcctcctaggttagcaacaccacgctgagcaggagtgctgggttagttagggcggcagccatcttaggagtccatccacagcccgctgtctccactaa

SEQ ID NO: 256500 - DNA, 279 bp, Homo sapiens
  chr6:157498984-157499263
  hypo
gtctttccgaagggcgagtttgtttgcctactgtcagtgggaggagtgtaaatgaagacctttatccaaagccagcgtctatgaacaaggacagtatgtttggagcctggtcagtgatgagagtgataacgtacatgctctctattcactaagtctttaattgcgctctgttcagacactaaatattggctgtggtcattgcctgcccagtatgcgaaccataagctggggtggaggcgttgagtgctggcagcggacgcaacctcttgctcagccttc

SEQ ID NO: 256501 - DNA, 404 bp, Homo sapiens
  chr6:157502171-157502575
  hypo
agaaagctctgggtcgaccgatacctcaccttcatggaagagagaggctctcctgtctcaagtctgcctgccgtgggcaagaagcccctggacctgttccgactctacgtctgcgtcaaagagatcgggggtttggcccaggtaagaatgagtgagggagggggtgaaaaaggaagcattgtggataagttcttacagtggctttctttgaatgtgtggactcattttttttctcacaaaggaaaagctaagcctgtgtgaaagtcgccttcttgcaacccacgtctgtgtgctgtcagggagcactgggggaccctggctctgccaccaactcgcagcgtgacctcagcaggtcatgttcttggacctcagtttcgtcatgtatacagcgggccagactagat

SEQ ID NO: 256502 - DNA, 51 bp, Homo sapiens
  chr6:157502910-157502961
  hypo
cataccccaggcaccggctttcctcactgtagccctcgctccttaatcagg

SEQ ID NO: 256503 - DNA, 312 bp, Homo sapiens
  chr6:157505817-157506129
  hypo
atcaaaacaggctttcgaattctaagccatatacgtttattgcttatacaagtattcaaaaagattccatctacctctacacaaaataaagatcccccagtggccagtttgaatacatgtgcacttctaggaaatgccaccctacaggttcgacagctcgagctcccccgccctctttcggaaatcctcagatttgaactttagtaaaatgaagcctgggcttcgtttctaatgtcccctacccagcaagttctcacttctagggaatttaacaagctgtcgtggtaaggatccacacggccttgttttgga

SEQ ID NO: 256504 - DNA, 66 bp, Homo sapiens; identical to SEQ ID NO: 210973
  chr6:157548327-157548393
  hypo

SEQ ID NO: 256505 - DNA, 79 bp, Homo sapiens; identical to SEQ ID NO: 210974
  chr6:157549784-157549863
  hypo

SEQ ID NO: 256506 - DNA, 31 bp, Homo sapiens; identical to SEQ ID NO: 210975
  chr6:157550095-157550126
  hypo

SEQ ID NO: 256507 - DNA, 40 bp, Homo sapiens
  chr6:157638362-157638402
  hypo
gcacagggcagcagccggcttggcccgcagtgctcctccc

SEQ ID NO: 256508 - DNA, 82 bp, Homo sapiens
  chr6:157837762-157837844
  hypo
aacagtatagaggccgttgaatgaaaactaattcacctcccacttgccactcccgagttgtagccattgttagcaaattttt

SEQ ID NO: 256509 - DNA, 138 bp, Homo sapiens
  chr6:157849557-157849695
  hypo
gctgctttttatagcggtgccctctgaaactagtggcctgttacgccttgtggaagggcacccgagagaggcgcattcctgcttagcgagtccccccgcccgccccaccccgcccctagcccccgagcacaggtggct

SEQ ID NO: 256510 - DNA, 363 bp, Homo sapiens
  chr6:157892374-157892737
  hypo
ggcaggcctgcagcgttcacattttcccgatgatttctgtgtgggctggactcccccgcccgccgacaccagacacacctgctgccccctccccatccagaacccccgaggaaaggaaatttgcactgcacagcgggtcttcacagggcaattccagcatctgtgcaaagcggtttcgcgtcggttaatgctgccttcgatgagaaggaagacgttatcacaggagggagctagctcaaattaaagagttcgagggcccgaaatagctgggaaaatggctgcctttgtaagaaaaccaaacctactttgctgagcggactggttataaaacatccagggagagaagacggtcttggaagccgg

SEQ ID NO: 256511 - DNA, 547 bp, Homo sapiens
  chr6:158017916-158018463
  hypo
attacaacaagaagcgtcttcacaaagtagtaggaatcgccttgtttctctgtaatctggaaggatttagatgatctgccgtgatcgacgtgaatgtattttctgtctctctctgactttgtccctgctgcctgtttccgtctgtctctttctctgaatccttgactgtctctctggttctctgtgagtcttgccatcgcgttccttctgcacacgtggaacgcagcatttcgggttgtttatttatccaggcgggctttgaggttacggaatatttttaaacaaccaacagctggggccagggagccacctcttctctctcggatcctcatatccctcaaatcattaaagcgagagaaactgaaggagctgaagaggcaaagcatgggcctgtgagaccctctcgggctcactatgtatgttttaaagccccaggtgcatgctgccctcgtttttctgatggggtaggccctatgagggatgtctgtcgtttggtgggccctagtccagcgtcggaattgccagcagctttcgctggaatgcgtat

SEQ ID NO: 256512 - DNA, 706 bp, Homo sapiens
  chr6:158024057-158024763
  hypo
gaccgtggggccatcgtccccctgggtgtctgaagtggatgttgccgtggcttactgcaggctgggacgtccacagtgcttcatggcagtgccagggcccagggctggacatggagagtcaggtgaggaatccagccatctctgtggaacgctttgtgaagcaagtgtttacaatgaatccagaagcacttatggagtggctgctatgtgcacgtagagggcaaagaaatttcacacaggttcgttccctgcccttaacgagttttccacgtagttatgaaaagataactaacatcataaagaagtacttgacaaggtcgtagcactcaggatggtcattttagaccaattcccgtaaaggggagaaatgagagaaaaggctgaagaaattagctggcagccacactgagaggcccttggatgcccatctaggaaagagggacttgactcagctgctggagcacgatgcttgaacaggagattgagagggctggaattcagccctaggaggactgatctggcatccgagtataaagtgagctgatgacaggtagtaggcagctgttgtctgatgatgccgtattacaagcaccctcaaaaacctctgtggcccttaacaagcagcatttctttttctcgtgtgtctgtgggacatctggggcagctctgcggattaggcaaggctcggccccgggcgttggttcag

SEQ ID NO: 256513 - DNA, 90 bp, Homo sapiens
  chr6:158057893-158057983
  hypo
cagagacatttcttcggtgtgccactgacgcccctcccctcatcgatgctgtggttgcctaaaggttctgtgttccgacagggtgctttc

SEQ ID NO: 256514 - DNA, 275 bp, Homo sapiens
  chr6:158070271-158070546
  hypo
ctccagacttgaagcggtgtggggcagcactgaaggggctccgggggaggcttttattgggtgaaggcagagcaagacaaataagacatttgctttgttaaagtggggccgtagctttccttgggtcattctggagcttgggcagggacataggccactcataggcttccgggctggccccaggcagatgtgagggggtgatgcctacctttgcccctccctctcgtcccctcttgccttgcccttccgctgtgccacctcgacccagcccctgt

SEQ ID NO: 256515 - DNA, 652 bp, Homo sapiens
  chr6:158093623-158094275
  hypo
tgaggtgtcactaacggtttctctcttctcgcaccccaccctccccgcccgtgccctgtccccatccctgtccctccccacctctgccccctcctctccaccttctctttgctggcgcctcccgctctccagtgcgaccaagaccagtgcattcagagcaccaaattcgttttgcaggctgcagccacgcccctgctgcagagcgagcccagcctcaccagcgacgagctgcacctgcccgggaagcctggcctgggcacgccctgcgccagcctcacactgggcccgcccacaccgcccgcctccatgcccaacctcgccgaggccacgctcgcggacgtgatgccccggaaagatgagcacatgggccaccagttcctgacgcccgatgaggcgccctcgccccccaggctactggcggcgggcagccccctggcgcacagccgcaccatgcacgtgctgggcctggccagccaggactccctgcatgaggactctgtgcgcggcctggtgaagctcagctccgtgtgacccacatggccccaggccgggggacaccagaggctcctccatgggcagcaggagtgagcggaggggtgtgtcccacagcgactttcccagccaatgccacggtggagatgacagccccagg

SEQ ID NO: 256516 - DNA, 56 bp, Homo sapiens
  chr6:158094784-158094840
  hypo
ggagaggtggcaccggggctgcagagggcggctggggttccgtcgtgtcgggtgtc

SEQ ID NO: 256517 - DNA, 276 bp, Homo sapiens
  chr6:158116417-158116693
  hypo
tcacggagcgagagcgggacaggctggctgccagtggaaagtcagggtggactggccgtgggcgacagagtaacagtccactgcacttcccttgtgcacagcggccttggtatgatgctagcgagtagagaagtcaggcaataccaccacttggccacctaacaagggccggcaaaggctgaggtgaagaacaggggctttcagagcagttgccaaacctcgggcctggcacggccgtcctgtgcacctccctggcccccacgctgtcagccacag

SEQ ID NO: 256518 - DNA, 302 bp, Homo sapiens
  chr6:158296042-158296344
  hypo
gtaatctatgaaaataattgcggctctttctcctattcagattttacccagtgatggaaaagatcaattttcttgtggaaattcagtggctgaccaagccttccttgattctctctcagccagcacagctcaggccagttcgtcggctgccagcaacaatcaccaggtacgtctcacttcctccttctggatgtggctggctttacggaaaacagagcgtatttgtgaaggcttgtgatgcattatagctattgccattccccaaaagcaaaaacaaagtcgcttttaggttgttctgtggc

SEQ ID NO: 256519 - DNA, 87 bp, Homo sapiens
  chr6:158321403-158321490
  hypo
tcagatacatggctcgcaaatattttctcccagcctattgcgggatctggccagcagcccgcaatgcaacggggttctctttgtgtt

SEQ ID NO: 256520 - DNA, 199 bp, Homo sapiens; identical to SEQ ID NO: 210981
  chr6:158328733-158328932
  hypo

SEQ ID NO: 256521 - DNA, 228 bp, Homo sapiens
  chr6:158412178-158412406
  hypo
aggggaagagagaacgcctctggagcctggcacacacatttgccggagaaagtggtgagtgcgttgtgaccaggtgagggacgaaccttaaggagattggctgagaacacctcccctcctcaccctaagtcaacaaacccgggacagcagtgcttccaaaaccttacttgttcacctcacctggagattcttgtggcaaatcgggttctgcctcgttggctctggggt

SEQ ID NO: 256522 - DNA, 165 bp, Homo sapiens
  chr6:158454488-158454653
  hypo
accagctgttgcacgtgcccttgaggcagcaccaggtgagctgctgtgactggctgctgaagatcatctgcggggtggtcaccatccgcaccgtgtatgcctcccacaagcaggccaaggcctgcctcgtctctcgcgttagctgtgagcgcacaggcactcgct

SEQ ID NO: 256523 - DNA, 183 bp, Homo sapiens; identical to SEQ ID NO: 210983
  chr6:158488744-158488927
  hypo

SEQ ID NO: 256524 - DNA, 37 bp, Homo sapiens
  chr6:158563786-158563823
  hypo
atgagccactgcgcccggccctcattctttaagataa

SEQ ID NO: 256525 - DNA, 35 bp, Homo sapiens
  chr6:158567710-158567745
  hypo
ggattacaggcgtgagccaccgcacctggccactc

SEQ ID NO: 256526 - DNA, 35 bp, Homo sapiens; identical to SEQ ID NO: 210984
  chr6:158593346-158593381
  hypo

SEQ ID NO: 256527 - DNA, 50 bp, Homo sapiens
  chr6:158619761-158619811
  hypo
ttctgtttagattgcaggagcgttctctcggctcatctcttgttttctca

SEQ ID NO: 256528 - DNA, 217 bp, Homo sapiens
  chr6:158651785-158652002
  hypo
tgggaccacagttaaatgcattatatttatacgcattcaaacatgaggcaactattcttggttcagttacttttaaattaatatttaattttcttgtgttagagccgggtttcgctatgctcaggctggagtccacaggcatgattatagctcactgcggcccccagctcctggtctccagggatccacccgcctcagcctccggagtagctgggga

SEQ ID NO: 256529 - DNA, 219 bp, Homo sapiens
  chr6:158708293-158708512
  hypo
gtgtttatttctgtcgtggcagtaaaaagacttctcctgtagtttattggcctataaaataatataatttacgacatcattggaaaagtatttttattcctatgtagggtcatttgtttctagagtagaacagttttaacaccgtatacaaataaaagcacttttattcaactgaacatgcatttattgaatacgtaatatatacgtacattttgcttg

SEQ ID NO: 256530 - DNA, 41 bp, Homo sapiens; identical to SEQ ID NO: 210985
  chr6:158734071-158734112
  hypo

SEQ ID NO: 256531 - DNA, 120 bp, Homo sapiens
  chr6:158794424-158794544
  hypo
ctttgacaagccaccgcttgaagaagccaacgtgactgctgccaaggagactgagtgaacagttagagtgtggcagtcgaatcagtcatcgtcgtcatcgtggatggctttgcacttgga

SEQ ID NO: 256532 - DNA, 157 bp, Homo sapiens
  chr6:158806007-158806164
  hypo
ctatctcccaatcccaaagtcgggcttttaattaagttaagagttagtcgactaaggcaaatgacctgatgcttttatctggaaagaagttatcctcgcccacgtcagtgtgttgatgccgtgaatgtaggttcccgttactgagtataccattcag

SEQ ID NO: 256533 - DNA, 181 bp, Homo sapiens
  chr6:158873203-158873384
  hypo
aagcctctgctcaccgtcagcttcacctcgggagacatcagcttaatgaacaactacgatgacttgtctcccacggtcatccgctcagggctgaaaggtacagaatgctgcacacaccccaaacctgcagaccgggcctgtgtgtgcttgcctcaaggccggtcttgtacactctgtgctt

SEQ ID NO: 256534 - DNA, 55 bp, Homo sapiens
  chr6:158925050-158925105
  hypo
gaaggaggacgggcggctgggcagccaaggcttcgtgtacgtgatggccaacaag

SEQ ID NO: 256535 - DNA, 165 bp, Homo sapiens
  chr6:158982652-158982817
  hypo
ggtcttctgccagggtcctgcgctgttacaggacagggaactagaccaaagaaagcagttgaccaaggaaaggtcccgaggaggacaagcaaaacgcagcttgaattttgtgcgagtttgaggcctccccctgcagctgtaagcgctttgtgcctcaggctctgt

SEQ ID NO: 256536 - DNA, 448 bp, Homo sapiens; identical to SEQ ID NO: 210989
  chr6:159045071-159045519
  hypo

SEQ ID NO: 256537 - DNA, 483 bp, Homo sapiens
  chr6:159049612-159050095
  hypo
caggtcagctcctcgcgccctgttctccggaggcctcgtctctgctgagaggtgtctcagttggccccgctgcagccgtgggaaggggcagcctgtccctcctctgtacacaggaagcttggctcagtagttgccccaggtcaggtttcgggtggcagagcccggctccaaacccagagaggctggcgctctggagcgtgcccacgccacgctgctttccacccagaggggcaggtgctgtgaggtaaatgaggtgcggttgcctctccacaccgcggggctccaagcccctactgccctccagcagagcactgtggggtggctgagggctgccgtgagcctcctgtctccccccgggatatctctctcatcatcacggagatgtatccaagggtatgacagttgtggcaggttgagcctgtgtctgtagggaagagctcagaaaatactgggacccccttcgattcccgctgtgcctgaggc

SEQ ID NO: 256538 - DNA, 216 bp, Homo sapiens
  chr6:159076942-159077158
  hypo
ggcagaaggaagagtggggccgatgcgtggaaatgcagagcgcatgtggtcagggaatggtcttgaatgaggtcagtatgggagtggcgagcattctgtgggaactgaggatggaggagtcaggagaactggatcgggaggtcacgactgggatgcctgtgctttagaatgtgtttacgggaagggaaaaccagcgtgacttcactggagagtgga

SEQ ID NO: 256539 - DNA, 124 bp, Homo sapiens
  chr6:159086527-159086651
  hypo
ggttcctgctgcaccggggcgccgtgtgccggggctgcagccaccgcgtgtgtgcccagtgccgagtgttcctgagggggacccatgcctggaagtgcacggtgtgcttcgaggacaggtaagc

SEQ ID NO: 256540 - DNA, 185 bp, Homo sapiens; identical to SEQ ID NO: 210992
  chr6:159135764-159135949
  hypo

SEQ ID NO: 256541 - DNA, 241 bp, Homo sapiens
  chr6:159151686-159151927
  hypo
tgcagggtcctcacataccacgcgggccaggtaacctcatgcataagacaaggaaggaaataccggaggagctggtaaaatatttccttggtggtcaggactaaggaaagaaaagctgcggggcggtaaagcattccttggttaggacatacctaggtaagagaaaccgcaggggcggtaaagcattccttaggactgaagaaagaaaagccgccagggggcgggtcggggtggggcggtg

SEQ ID NO: 256542 - DNA, 103 bp, Homo sapiens
  chr6:159175774-159175877
  hypo
aaggtagattctgtatgtagcagggagtagtcctattgacagaaaggggcgagcaatgggtaaggacccaggagaagtggctgagcgtcgcccacacacagct

SEQ ID NO: 256543 - DNA, 306 bp, Homo sapiens
  chr6:159176740-159177046
  hypo
gaaccccaaagcaaacaaaccgcacagctgctgcaaatgggtgcaagtgtccagcctcacagcaacagccgtgtcacgaggagtcaccattcaaaccccaaacaagcgccggagtgggggcagcatgggccacagaggtcagcagcgagactcgggcctggacacagtcagtgcacgtgaatctggcctgcagtgtcggctaccagaccaagggagggagggtcactgaatttccaagctgcttttttttcacctgcaacatggtttgaattatactgacctcatagggtgcgtgtgaaagctaaa

SEQ ID NO: 256544 - DNA, 92 bp, Homo sapiens
  chr6:159177387-159177479
  hypo
aacacgtggtgttgcggggaatggaggaggggggagttcatgctttgctttaaaaaataaataaataaatgcaggctggtgcagtggctcac

SEQ ID NO: 256545 - DNA, 162 bp, Homo sapiens
  chr6:159180413-159180575
  hypo
gacgggctggcccacgcgggctcccaggagtcctgaggcctctgagggtaactgagagggctgcttctcagtgctggcaggagccatggtggaccggatgtgtcaagaccaaacttgtccaacctgcagcccgggacggctctgttttttggttgttgttgt

SEQ ID NO: 256546 - DNA, 112 bp, Homo sapiens
  chr6:159182970-159183082
  hypo
accactcccatctgctctctcggggtctgagggctgtagcagattctctagctgagctctcggttttggggtggtggtactgcatactaacgtatcaggagacatggtttga

SEQ ID NO: 256547 - DNA, 114 bp, Homo sapiens
  chr6:159188289-159188403
  hypo
caccagcagctgccgctgcacacgctcgttcttctctgcctcagtgatgcgcttctcctcattgcggtcatcccggatgccctcactagacagctccgcgctgtagcccgtggg

SEQ ID NO: 256548 - DNA, 194 bp, Homo sapiens; identical to SEQ ID NO: 210994
  chr6:159190317-159190511
  hypo

SEQ ID NO: 256549 - DNA, 178 bp, Homo sapiens
  chr6:159193321-159193499
  hypo
cagacagccacgtgcgagctccacagccttgagcacatcccttcaccaggctcagtgccttcaaccataaggcagggatgccggtatctcaagggacttcagatatgggactcaatcctcccagcagtcccattagatgctggcgtccccgccttatcggtgacgttcaggaggtgct

SEQ ID NO: 256550 - DNA, 96 bp, Homo sapiens
  chr6:159203058-159203154
  hypo
gggattccaggtgtgagccgctgtgcctggcttttccgtgcttctttaccaatgctgcatccagcacacttggagtaggagcgaaccgagagtcct

SEQ ID NO: 256551 - DNA, 125 bp, Homo sapiens; identical to SEQ ID NO: 210995
  chr6:159205611-159205736
  hypo

SEQ ID NO: 256552 - DNA, 234 bp, Homo sapiens
  chr6:159206078-159206312
  hypo
gaggagctgagcagtcaggtcgagaagtttgctatgccatgtcccacaggacacggccacgctttagtttccatgaggaatggcagctcgccttccctggctatgtttcaggtcgctggtcagtgacttaatgactagcatgaaggagcacttgacactggcgaagtccttgtgtttttaaactgtgcttctaaggcaatcacttctccctgccgaggacggcatgactgctcc

SEQ ID NO: 256553 - DNA, 172 bp, Homo sapiens
  chr6:159211979-159212151
  hypo
aggtgtaaatgtaataaggacgtattacctgtgccagtatatggcgacagaggtttcgttatccagccagggaaccagaaatattaagcactcaccaaatgtcacttcctacttcaggaacataattagtctccccagccgctcccaccccgtcccaataacatttaagact

SEQ ID NO: 256554 - DNA, 35 bp, Homo sapiens
  chr6:159213572-159213607
  hypo
tggctgggcacagtggctcacgtaatcccagcact

SEQ ID NO: 256555 - DNA, 130 bp, Homo sapiens
  chr6:159215619-159215749
  hypo
tgcagactggagaaaaagagcgcgtggtctgcagtttttattgtcttagtaattcccctcagattacacagttatcaaaaacggtgttcagtgaaggcaacgcaatcacgtgtagtacaggtgtgtgtat

SEQ ID NO: 256556 - DNA, 143 bp, Homo sapiens
  chr6:159219542-159219685
  hypo
tcactgcttctgggcgctatggggtgccccaccagggcagagctgagaggctggctcagctctgcttcagagacctccctcgatggaaaagggacttagtttgctgctccgctttttttttttttttttttttttttgagaaa

SEQ ID NO: 256557 - DNA, 37 bp, Homo sapiens
  chr6:159223564-159223601
  hypo
gttttgtttgttttttgaggcggagtttcactcttgt

SEQ ID NO: 256558 - DNA, 37 bp, Homo sapiens
  chr6:159223841-159223878
  hypo
gtgagccaccgcgcccggccaggtttttgcttattta

SEQ ID NO: 256559 - DNA, 32 bp, Homo sapiens
  chr6:159228049-159228081
  hypo
taaaaacataacaggccaggcgcagtggctca

SEQ ID NO: 256560 - DNA, 63 bp, Homo sapiens; identical to SEQ ID NO: 210996
  chr6:159299254-159299317
  hypo

SEQ ID NO: 256561 - DNA, 119 bp, Homo sapiens
  chr6:159345138-159345257
  hypo
atttatgtctccaaacgtatctaaacagaaaaggtaaaatacaaatatggtaatataatcttaagggaccgcatcaagaaatgactggcaaagttcacgtaaaaatgcccttggcaatt

SEQ ID NO: 256562 - DNA, 120 bp, Homo sapiens; identical to SEQ ID NO: 210997
  chr6:159419499-159419619
  hypo

SEQ ID NO: 256563 - DNA, 145 bp, Homo sapiens
  chr6:159423619-159423764
  hypo
caaggaagcagccaattcctcgttctaaggcaggaagtcgtgttggggatggcagtaagagtgagtggagcagagtgagcacaaggaggagcattcggagatgaagtcagaggctgggccgtgcgccctgttgtaggtcagtgaa

SEQ ID NO: 256564 - DNA, 243 bp, Homo sapiens
  chr6:159653184-159653427
  hypo
ttcccgggaggactcgcccatgtcaccctcagacacccaagaccagaaacggaccctgaggccgccaagtagacacggccactcggtggttgctcccggcaggactgcagtgagggcccggatgccagcgctgccccgaagggaaggcgtagataagcctggcttttccctggccacgcagccccgcccaggggcgcccccctcggcttcggcctctcctgcccaccacgcgtccacccaggg

SEQ ID NO: 256565 - DNA, 130 bp, Homo sapiens
  chr6:159653853-159653983
  hypo
tctctcgtccaggacgcaggtctctgagggagcggaggcttctgatggtgaaagccacggtgacggcgatagggaagacggcggaaggcaggcggaggccacggcccagacgctgcgggcccggcctgcc

SEQ ID NO: 256566 - DNA, 287 bp, Homo sapiens
  chr6:159876779-159877066
  hypo
atcaccaaagagcacgaccaccacctgggagcatcaccaccacctgggagcaccaccaccacccgggagcaccatcaccagggagtgtcaccactgcccagaagcaccaccaccaccacccgggagcaccaccaccaccaccgcccagaagcaccaccaccaccacccgggagcaccaccaccaccaccgcccaggagcatcaccaccactcaggaacaccaccacctgggagcactaccaccaccagggagcgtcaccaccaccagggagagtcaccaccgcccag

SEQ ID NO: 256567 - DNA, 42 bp, Homo sapiens
  chr6:159877096-159877138
  hypo
ccacccatgagcagcatcaccaccacccggggagcaccacca

SEQ ID NO: 256568 - DNA, 253 bp, Homo sapiens
  chr6:160220483-160220736
  hypo
aaggaaaaaataaagtataacggtaatgttttctccgctaaccttaaagattgatttgagcacctcactttgaggaccatagttccaaaacgctgttcaagtagaagcctagaattcaagggaggacactgtaaggaagaccatggactagttgcactggaaacagtaacaaaagtaaaaattaagctcacatgtatgtgatgatgtaggtagggatttccgcaaggagtgagtgcacgagataatccctggg

SEQ ID NO: 256569 - DNA, 180 bp, Homo sapiens
  chr6:160328046-160328226
  hypo
caggaacgcctcagtcgggaatgcacatcggcaaatccccatcgtgcactgggtcattatgagcatctccccagtggggtttgttgagaatgggattctcctctggttcctgtgcttccggatgagaagaaatcccttcactgtctacatcacccacctgtctatcgcagacatctcact

SEQ ID NO: 256570 - DNA, 133 bp, Homo sapiens
  chr6:160418650-160418783
  hypo
tcagggctcctagccgctctctgcccctctcgtttcctgctttttattttttgccctcgtttcatcccaggggttctccaccaggctccagtgctctccacttgatactccattctggcgacggttgctcacc

SEQ ID NO: 256571 - DNA, 236 bp, Homo sapiens
  chr6:160452661-160452897
  hypo
tgtcagactgcactgagccacgtgggcagaagcatcgattatgagtcaaacagaagagggttgggcctgcagctctgcaacttactaattgtgtgcgacctgtttgtaaacctggcacctagtgcctggcgtgtagcaggtgctcagtgagtatttacggaatgaatggtgctgggaagcagcacggctatgcccggtgctaagcccagtaagtcgtgtctcctaagggtgattaa

SEQ ID NO: 256572 - DNA, 56 bp, Homo sapiens; identical to SEQ ID NO: 211001
  chr6:160455508-160455564
  hypo

SEQ ID NO: 256573 - DNA, 263 bp, Homo sapiens
  chr6:160459515-160459778
  hypo
ccagctcaaaagtactaggacgatttgtagtagtatttaattatttgtaaacttacacgtttttcttcacgtttgcagaatacaaatctttgtcagtagtgaaatgtgaatctagtaggattaaactgtgtgtaaaccttgtgggcgggatgaagagaggcagaggcgcgtcactgttgctgttagttgaccggcaagctcaggggcccagctatggtagctgcctctgggttgtcagctgcgcccaggaggtgaaggtggaa

SEQ ID NO: 256574 - DNA, 217 bp, Homo sapiens
  chr6:160463628-160463845
  hypo
caccagtcttgtgagttcagcggccacctgtggtaccttgcttgtcttctgtggtagcatgcattgcatcctgcactcagtctgcagatgtgtaagaggttgctggtttcttttagcttcacaggccttcacaggggccgagcggggtgtattagcaatggtgttaagcggggtgtactagcaatgatgtaccactctactgcgtcccaagacacag

SEQ ID NO: 256575 - DNA, 137 bp, Homo sapiens
  chr6:160475955-160476092
  hypo
cagtggcccagtggacgctgcgtcactcacctgcctggtctgctttgtcattggctaacactctttttcctgagagacacttcctttagagttgaagatctcggtgatcagggaatgaatgacgggcaggctgagct

SEQ ID NO: 256576 - DNA, 162 bp, Homo sapiens; identical to SEQ ID NO: 211003
  chr6:160491754-160491916
  hypo

SEQ ID NO: 256577 - DNA, 71 bp, Homo sapiens
  chr6:160509961-160510032
  hypo
tctgcctaggcctgcgcagcccggggagtgggggcctcgggacccaactgaagtctcgcagcaccttgact

SEQ ID NO: 256578 - DNA, 557 bp, Homo sapiens
  chr6:160511922-160512479
  hypo
ggtgctgagctcatcgccgagaaggagcaggtgctccgtgccctggtgctgagcgcatcgccgagaaggagcgggtgctctgtgccctggtgctgagcgcatcgctgagaaggagcgggtgctctgtgccctggtgctgagcgcatcgctgagaaggagcgggtgctctgtgccctggtgcggctgagaaggagcgggtgctccgtgccctggtgctgagcacatcgccgagaaggagcaggtgctccgtgccctggtgctgagcacatcgccgagaaggagcaggtgctccgtgccctggtgctgagcgcatcgccgagaaggagcaggtgctccgtgccctggtgctgagcgcatcgccgagaaggagcaggtgctccgtgccctggtgctgagcgcatcgccgagaaggagcaggtgctccgtgccctggtgctgagcgcatcgccgagaaggagcaggtgctctgtgccctggtgctgagcgcatcgccgagaaggagcaggtgctccgtgccctggtgctgagtgcatctccacgacggcagcacctgatgg

SEQ ID NO: 256579 - DNA, 31 bp, Homo sapiens
  chr6:160513374-160513405
  hypo
tcttcacgctccatcgcgcagcactggccac

SEQ ID NO: 256580 - DNA, 111 bp, Homo sapiens
  chr6:160527214-160527325
  hypo
tgggcgggtacagcgcggaggaggagggaggccaggcgggcatggcgtggaggaggagggaggccgggcggtcacagcatggaggaggagggaggcgctgctggtgttctt

SEQ ID NO: 256581 - DNA, 468 bp, Homo sapiens; identical to SEQ ID NO: 211005
  chr6:160679357-160679825
  hypo

SEQ ID NO: 256582 - DNA, 195 bp, Homo sapiens
  chr6:160680141-160680336
  hypo
tcacagcccagtaatcttcccgtagtgccccgagcagccaggaacttaatatactcctatctcatgcgcaccgccagcttttcttcaaggccctatggagaaaacacacgtgtttggccacaaggcccagcgtgatgtgaaccaggatccgtgtcagaaccctggtccagattcgaagtgggttgcaagcctgac

SEQ ID NO: 256583 - DNA, 98 bp, Homo sapiens
  chr6:161430268-161430366
  hypo
gcctcccaaagtgctgggattacaggtgtgagtcaccgtggccgcctgaaccatttttaagggtacagttcagtagcgttgttaagtacatttattta

SEQ ID NO: 256584 - DNA, 168 bp, Homo sapiens; identical to SEQ ID NO: 211006
  chr6:161522588-161522756
  hypo

SEQ ID NO: 256585 - DNA, 64 bp, Homo sapiens
  chr6:161547843-161547907
  hypo
gtggtggtatggggcggatgaaaagcgtatcagctgtggtggtatggggcggatgaggcggtgg

SEQ ID NO: 256586 - DNA, 75 bp, Homo sapiens
  chr6:161549953-161550028
  hypo
tttccactctggggcgagtcctctggtaacctgctctagtgttctagcattttgtcaagtcgctttttctcttct

SEQ ID NO: 256587 - DNA, 34 bp, Homo sapiens
  chr6:161556868-161556902
  hypo
gtgtgccagggacacgcttcgttggtctccacgc

SEQ ID NO: 256588 - DNA, 39 bp, Homo sapiens
  chr6:161558061-161558100
  hypo
ggagcctggaagacgcaagagctcgagtatcgagtgccc

SEQ ID NO: 256589 - DNA, 128 bp, Homo sapiens
  chr6:161559035-161559163
  hypo
gcccctctccaagacggcgtgggtgtgtgtgtgccttgctgttgcctgctattgaagcagaagggttgagcttgcccccgccctaccaggggccctggcacctgcagctgccccggacccttggccag

SEQ ID NO: 256590 - DNA, 362 bp, Homo sapiens
  chr6:161559597-161559959
  hypo
ctttccattttctgcgcttgtctattgcttgggccttttatagtgagcatactgcatctttgtgtttgacagaaaataactgagtcctgtccatttggaagaagcacgtgatctctgtgtgcttggacaatgtgccgtctctcccgggctctccaaagcctcagaggacgccaggcttggggagacagggcctttcacagggaaaccccaaagtcttccttggctccaggaagcacggacctgctgttcacagggcaggaagcaggcacgacaggctgccccgccagaggcaaggagcagggtgcacaggggcttgccaccaagaagcagcagtagcccgagaataccggtcacctggagcc

SEQ ID NO: 256591 - DNA, 47 bp, Homo sapiens
  chr6:161560591-161560638
  hypo
ggggcaccatgggcgtctctgggaaggtgcccgtcctgtagtactcc

SEQ ID NO: 256592 - DNA, 113 bp, Homo sapiens
  chr6:161572342-161572455
  hypo
cgtacagggcctggcgtgccagacgcgcccgagaccggtgttggctgttcttggagacagccttgttaactctccgtgatgaacagcatagagctggacggccttgcgaggca

SEQ ID NO: 256593 - DNA, 861 bp, Homo sapiens
  chr6:161575239-161576100
  hypo
cctgctcccacttgcgcgaacagaagaccatctcggtgaagtaccacatccagccgataattgggacataggccagctctttcttggccaggaccttggagccctgaaacagaagaaggagcccaggtgcccatgaaggagacgtcagagccacctgccggggctgttggagactgaagtagaaaaagaggaggggacgttcacaccagacgcctcgggacagtcccagaacacatgctgtcgaggccatggaccctggtgccctccccacctttcagctagaggtccaggttgtgcttgccctgccagtgtgggagcagggggcaggggcaccctggttctcagcgcagacggcaggagtcaagaaggcagcagcgagcagtcacaggtattcagggtcctgacgatgctcccaccaccatccaaacggtttctaggttatcaccgtcacatactcgctaagcccaccgtgcagctgtgtgacactaatttgtgcacctcttttctgcagatctcactgagttttgtgatattacaaaatatagtaattcttgatcgctgaaaatgtcaaacgctagaaaatgtagcattcctaggtgtgaggttaacatccttcttgaacagtggttggccaaagattcatttgaatccgatttttccgagacagctcaactcactctgctgagctctgcagttgaggcaaacaggagtctccgctcacagagcaggctgcggagcccagtgggatctccgggtacagctggtccaagctgggagtaaaacccagaccaggagatgtgctcggtgccctccacacccgctgccagcatgtccttgaggctgagacggggcagaagcacc

SEQ ID NO: 256594 - DNA, 182 bp, Homo sapiens
  chr6:161585056-161585238
  hypo
atcaaggggaggtgcggtccctatgctgcaggtgggatgggcgtgctgttgacttgctttcccgccatcagcgctcccgcccttatgctcagagttgtaaagtgatcatggattcggaagcctttgggagcaaaaccctaaacggtgctgagattaaattcccgctccgtgaatgtctcttc

SEQ ID NO: 256595 - DNA, 276 bp, Homo sapiens
  chr6:161637994-161638270
  hypo
ctttcccctcacacgtggctctgattcacctttgctcacctgctgatgcggttctcatgttacacgtgttcttcaccttcaggctttcctgtccttgtcaatttccgtttaggtgttttatcattagggcctgactccgcgtttcagcaatgaaagatgagcagacagtggagaaggcaagccaggggaggggcggagtgagcacaggcgtggggacgcgaaaggacaggggaacaccggagaactcggtcatccgcttgggagccagggacatgc

SEQ ID NO: 256596 - DNA, 99 bp, Homo sapiens
  chr6:161642104-161642203
  hypo
gcacccggccccagacagcatatttaaacagatgacacaaacgctggatgaacatggtgagcaaggaacacatggtgaaggaaacgtgtgaggctttcc

SEQ ID NO: 256597 - DNA, 168 bp, Homo sapiens
  chr6:161685574-161685742
  hypo
ccccctggcgtgcccgcgcatccctgccctgcaagtcttatccactgcgtgggaacccctcgctgaggcttccgtcttgccctctgggcagcaggctcctcaaaggcacttgcagggtcggctccctctttgtattcctgcgggctgaatgcacgggctccctaagaa

SEQ ID NO: 256598 - DNA, 134 bp, Homo sapiens
  chr6:161725115-161725249
  hypo
cagctgcccgctggcgaaatgggcttggtctcttcctgctccgcacactttgacatcagctcgttgtggctccctgtctctgctctcccgggtggccagtgacgctgtgcggggtgcagcgcctgtgctgtctg

SEQ ID NO: 256599 - DNA, 141 bp, Homo sapiens
  chr6:161788278-161788419
  hypo
ctgggattacaggcgtgagccaccgcgcccggccgtgtctgaagttttaacagtaccaagctaggggagggtgttttagccggcaggacagctacccactttcttttgcagtgggggtggggttcacgctgacctcctggg

SEQ ID NO: 256600 - DNA, 257 bp, Homo sapiens
  chr6:162253677-162253934
  hypo
atcaatatcagtgtatacccgcggaactgtaatacaggccgatccctaaggcctccatggtgtcttacagccacacagtgtgacacaatgacatgcgccatcctggagcagggcatctcaccctccccattctctacggtctgtctggagaaagctttgtggcggcgcctgtgccctgcagggtctccagcagcatccccgctcctgcccactagatgccagcagccttctcctacttgggacgaccaactatgact

SEQ ID NO: 256601 - DNA, 41 bp, Homo sapiens
  chr6:162938563-162938604
  hypo
aggcgtgagcgactgcgcccggccaatatatttttttaatt

SEQ ID NO: 256602 - DNA, 37 bp, Homo sapiens; identical to SEQ ID NO: 211008
  chr6:163009855-163009892
  hypo

SEQ ID NO: 256603 - DNA, 45 bp, Homo sapiens
  chr6:163032923-163032968
  hypo
aagaaatgatacagcggggcgtggtggctcacgcctgtaatccca

SEQ ID NO: 256604 - DNA, 290 bp, Homo sapiens
  chr6:163321044-163321334
  hypo
ggtctggctgtggggaagggcgggggagagagagccagttccttatggtcagaccggaacatcgtaatgctccctcgagaactgatgctctggtatcagagcatggtcaggccggaacatcgtaatgcaccctcgagaactgatgcgctggtatccagggaggatcggtaaaggaaccaacacgcacatatgcactcacaatgctcacggatgtcacgcagcaggacctggcagggctggcctctgcttacagaggccgacgttccctcgccctgagacatcaattttac

SEQ ID NO: 256605 - DNA, 501 bp, Homo sapiens
  chr6:163558514-163559015
  hypo
tccatccattcaaagaggagcgccaggatttcccaagcgacaagaacagggcgagctctccgatcctttctccatccccccaaacctcccctggctctcgagaacaccgtcagtactccctaataccccgtgctccaaatccggagctcggtctccacccggccgcactccaagtgacagcaataatagctggtgtttctaaagtgcttactggtaccaggggctgcatccgtgtagactcatttaatcctcacagccctaagagagacacgtttgacagatggagaaactgctccgggatactccgtcggggaatggcaggagctggccccacagcccggcctggcgccaccgcgcactgcctgggccctgcagcttggagcaggccctgagtgggctccctgcaaatattctcatgctcccttctcaccaccgccctgcaaggggcatggtactgagctcaccgttttacaggtgaggaagccacggctcagccttccg

SEQ ID NO: 256606 - DNA, 209 bp, Homo sapiens; identical to SEQ ID NO: 211009
  chr6:163591723-163591932
  hypo

SEQ ID NO: 256607 - DNA, 153 bp, Homo sapiens
  chr6:163607798-163607951
  hypo
agcatgcatttcctctccaccgctctgctccctccctggaggtgcttctgttcctacccgctgaggggcacagtcaggaggtatttagtcggcctcccgtcgccctcaccgcacacacaagaccaatttgacggttgtttgggggcatccact

SEQ ID NO: 256608 - DNA, 144 bp, Homo sapiens
  chr6:163710196-163710340
  hypo
gtttggccgtggaccgactgaaccctgcgccagttcccatgtgtcaggactcgctggtgtgcagagtatttgctgcggctttgatctcattgttttagtttactggctctcctgatttggcattaaatgcgttagaacctaatc

SEQ ID NO: 256609 - DNA, 35 bp, Homo sapiens
  chr6:163946671-163946706
  hypo
caggcgtgagccaccacgcccggccatcttgtttc

SEQ ID NO: 256610 - DNA, 43 bp, Homo sapiens
  chr6:164064089-164064132
  hypo
agctgatcaaagtaggtccacgttgttttcctttttttttttt

SEQ ID NO: 256611 - DNA, 50 bp, Homo sapiens
  chr6:164112161-164112211
  hypo
attgcataggctggcggggctgagacagccctcctcgaactcatcaagcc

SEQ ID NO: 256612 - DNA, 220 bp, Homo sapiens
  chr6:164170160-164170380
  hypo
gcctgtcctggagcacagcccgtgcccaaagtggctcccacaccaagcgtggtgggagctgggccgcactgggggatgggactggctgctctggaagcatcgagaagtagtgtcctccagaggaggtagaaccagagatctcgcaggtacgaggggaacagatggggtgaggggccgggggatgtcactgctgcagatcgccccagtggaggccaggaag

SEQ ID NO: 256613 - DNA, 180 bp, Homo sapiens
  chr6:164183098-164183278
  hypo
gcctctcctaggtttttaaatgactgcattcttcctgcctcttcacacagtcacccttctgtgcacaaggatctgctgtctctctgtctgtgtcctaacctcctcttcctataaggattccagttggattggactagggacctcacgtaggacctcattttaacataattacctctttaa

SEQ ID NO: 256614 - DNA, 75 bp, Homo sapiens
  chr6:164241313-164241388
  hypo
cctcccacggatgcgtttctggcctgatgcttggcgctctggcagtctgtgtcattcaccgctctgcctctgccg

SEQ ID NO: 256615 - DNA, 313 bp, Homo sapiens
  chr6:164245430-164245743
  hypo
tgcaaagagacaccagccaccgggaaagcggtggttaacgttggctccacgcccttgttcctgcatctgcccaacatggacaaagatgctgcatggaccagccttcctcttgtgaagaggagcttgtgctctgtaaagccttactgtggtgcgcctcaggggagcagggtcccggacaaccatctccacgccaacagggcggccatctttggtagcattttgtgcctcataacgtgttttaaattaaaatacgtcatgtttttcttctctactaaggccttactgttgtgtcggaaaacaattacagagattg

SEQ ID NO: 256616 - DNA, 77 bp, Homo sapiens
  chr6:164283342-164283419
  hypo
agagggctcagtggagactccggtggatcaatgactgaagttcacatgggacaatcgatggcacagaagatggccct

SEQ ID NO: 256617 - DNA, 42 bp, Homo sapiens
  chr6:164299008-164299050
  hypo
cagtaagttctggcatggggcggagttggagacttctctgcc

SEQ ID NO: 256618 - DNA, 113 bp, Homo sapiens
  chr6:164314284-164314397
  hypo
caagttggtgctcaggtatccgtggagagcgcacaggagagtctcacctgcagggccagtaaagaggactcagaaacttcatgggtcaggttgcggcccgactggcctgacag

SEQ ID NO: 256619 - DNA, 38 bp, Homo sapiens
  chr6:164320871-164320909
  hypo
acatagaaagaagtctgggccgggcgtggtggctcacg

SEQ ID NO: 256620 - DNA, 157 bp, Homo sapiens
  chr6:164322567-164322724
  hypo
ttcagaggggggcatcttaacgcgagtcttacggtctttcctgggttcccatgctcggcggcggctcctccacaggcctgtcttccctttgttctggagaatgttctgcctgggcggagcattcggtgcggttacgtgggtgcggttctccagggag

SEQ ID NO: 256621 - DNA, 130 bp, Homo sapiens
  chr6:164339933-164340063
  hypo
aaggaaaaagaaaatctagacgacatcataatttccccgccacgcaaaaaagaaatgtgaaggtagaattcggctgatttgagaatgctgggggaagacggaaatgtgcgtgctctgcatgccccagaaa

SEQ ID NO: 256622 - DNA, 172 bp, Homo sapiens
  chr6:164441338-164441510
  hypo
ggttaacctgaagtgtattgcgaatatgagggctcatattcaagggtacggatgtgtctcagctgggcagggcactcgctaacccccagctggggcgggagcaggggtacctgcggcaccagaggtacgtggggcctggccccggctgcgcggcagcttctcctttgcaaac

SEQ ID NO: 256623 - DNA, 135 bp, Homo sapiens
  chr6:164506147-164506282
  hypo
cctctcttgtcatccgtcagaagcgcagagctttttcggaagctttgaccgtgaaggatcacaaatttgtttctcaaaggcccctccgctggctcctccggcctcacgagtcccgttccccgtgtgcttctgtcc

SEQ ID NO: 256624 - DNA, 52 bp, Homo sapiens
  chr6:165747832-165747884
  hypo
tacagcgccgggcacgcgcctccatagcgccctacagcgccgggcacgcgcc

SEQ ID NO: 256625 - DNA, 128 bp, Homo sapiens
  chr6:166128526-166128654
  hypo
aggaacccacgggccgcgagggtagagtattggctcagcctgcagggacggccgcccgagaacccccgagggacgctgcagtgcagcagggctcagtgaccaggtgcggccggcgctgcttacactca

SEQ ID NO: 256626 - DNA, 89 bp, Homo sapiens
  chr6:166144516-166144605
  hypo
gtgagactccgtctcaaaaacaaaaagcaacaattaaaaaaatgtcaattgtacagaacccacgccccatgccgcgccgcggaaccctg

SEQ ID NO: 256627 - DNA, 445 bp, Homo sapiens
  chr6:166240451-166240896
  hypo
gagggacatcaggaggggcacggaggggacaggtaagggccaataacttgcctgggtgacgccagccgcacagcctcggttgtcccctgaccaggacgtggcctgccgggtagggcacagggaatgtcggggccgacccgggagagcctgacttcctgcgggccctccgccgtggtctagacgcttcccctcttgtgcgctcaggtggagcgcggaggccaagctcagtctgacccaggaaccaccaggtccccggcaaaacacagggaagggtctaagccctgacgtccctccagaccccacgcccattcgcggctgcccgctggggaggtgcaggggtgacgcggggcgggggcacccggtgtccagctcgagacctgtgcggggacaggaggtgcccggtgacagcgccaagctccaccccgaactctcccagaagaactcc

SEQ ID NO: 256628 - DNA, 33 bp, Homo sapiens
  chr6:166487244-166487277
  hypo
ccgcgcccggccgaagtaaggcttcttcttaat

SEQ ID NO: 256629 - DNA, 136 bp, Homo sapiens
  chr6:166711367-166711503
  hypo
ctgcaccaagggacgagatgtgacggtgacagacgatggccaaggccatcttaccgagtgccaggcacgggcctcggcacctgctgtgctctgtctggggaagcgggcacagagatgaagcggccccacggcggtc

SEQ ID NO: 256630 - DNA, 200 bp, Homo sapiens
  chr6:166731254-166731454
  hypo
ctatccatccaggacgcctgagagctctgagctaagacaacacccttgtctgaactcaggtgtctctctccaccacctgggcagactgaatgacgcccttctctatcccgaggccacgcctcacaccccatggtggacccaaagctactccatatcctgtcctgggactacaccccaccccgcaccgctgcatcaatata

SEQ ID NO: 256631 - DNA, 289 bp, Homo sapiens
  chr6:166731848-166732137
  hypo
gggaggcagcagagcgcaacggggggcacggcctccgcagcccacaagctggccacacctgcccctgccacgcaggctgagtcaccacggcagctgcacctctgtatggcatggagactcggctacaccgcagggctgagggccggccctcagacgaaccaggccccagacagaactcagcacatgagtttcttcctagtcttctgcaaactgacatgttttctttactcccattgtcgcctgctgtctaaaataagattcttcttcaggctgccgctactctcagact

SEQ ID NO: 256632 - DNA, 106 bp, Homo sapiens
  chr6:166742969-166743075
  hypo
agatattttgagaagccaaacgtacctggctaacgcagcaagattgccgagggtataaaacactgcaaaaagctttatgccgcccggaagccacagcaatccagtt

SEQ ID NO: 256633 - DNA, 48 bp, Homo sapiens; identical to SEQ ID NO: 211013
  chr6:166748326-166748374
  hypo

SEQ ID NO: 256634 - DNA, 203 bp, Homo sapiens
  chr6:166868890-166869093
  hypo
agcgtcatggacccgggctcatcttcagtgtcctgaaccaagaggcagctagagccaggtgtcggccctcaaaggggccaaaaaaggggccttcacagtcaccccaggtagatgcccacgcgacccctggactaatgtgaccagagtcggctgtgtttggaaataaacttccaacgctccagactagcgaagcgtcgttaaaa

SEQ ID NO: 256635 - DNA, 496 bp, Homo sapiens
  chr6:166943949-166944445
  hypo
tgctgcccccgtgacgccctgtgtggcacggggtgccctcctccccagggggtcagtttatgtaactaataagctgctgtcagttcatctgtccagtgcccggcgctgtgtgttcaatcgcctaatgctgtttagggcagggggaagttccctctctcaccaacacagtgaataggaggtgatcagaacagatacggtaggtgcccagctagtgacgggcttaaagactgtgagcctggaacggagattttggatcacattctgactctaacgctgcactaggggctcatccctcacttgcaggatgggcgtgcagaggagctgggcagaaatcggtatttctaatgcccagtcactgggtcaacaaaggaaaacaacccaacccaaccatgagtcacgttgtatttaaaaccgagtgaggccgtcggcctgccggtatcgaggctggtttgtcaggccccatccagcccaacagcctgctcgcagcctgctgctc

SEQ ID NO: 256636 - DNA, 44 bp, Homo sapiens
  chr6:166944738-166944782
  hypo
aaggaccttcatggcgtagagctgcccagcgtcggaccccttca

SEQ ID NO: 256637 - DNA, 136 bp, Homo sapiens
  chr6:167038233-167038369
  hypo
gaaagttacatatgctaccccgattttcacaagtatcaaataatagaaagctggggaatgcatttgtaaaaaagagagcattgtattagcattgacctttttttttttgagacaagtctcgctctctcgccaggct

SEQ ID NO: 256638 - DNA, 96 bp, Homo sapiens; identical to SEQ ID NO: 211014
  chr6:167051700-167051796
  hypo

SEQ ID NO: 256639 - DNA, 87 bp, Homo sapiens
  chr6:167089923-167090010
  hypo
ttgatctccggaagcgcaagtccaccctgtgattccacgcctcaccctctagcggctcggctccctattacacgggaagattcctct

SEQ ID NO: 256640 - DNA, 67 bp, Homo sapiens
  chr6:167091815-167091882
  hypo
gcctccaccctccacggggaaccaaatcatgggaaagctggattccacaagccgccctgcaagccca

SEQ ID NO: 256641 - DNA, 37 bp, Homo sapiens
  chr6:167092252-167092289
  hypo
ggcctctgaagtctcgatcccccgcatttctgctgcg

SEQ ID NO: 256642 - DNA, 307 bp, Homo sapiens
  chr6:167136191-167136498
  hypo
cccattctctgaaacgcttgatacacgtgcttctccacgtgaagcaaatgcctccctttttgagattcgtccttcagtctactacttagactttacctccagtgacacttcagtttccatgagcttcaatcgctgcattttcagcccattcctctctgcatttctggagtaatttcggttactctttgcacagctccctctccgagtccacaggactcatcacaactcgcgagacaccaccgcctccaaggtctgtctgtgcctacacttggcgactatgacaaccgttaagcgatgcaaggtttgg

SEQ ID NO: 256643 - DNA, 194 bp, Homo sapiens
  chr6:167139143-167139337
  hypo
gtggggtgggcccacggggagaccctcactccacctgccttctcttcagatgctggggacgagagtgaagctccgagtttctgcttgcacagcttcctcgggccagcgtggacgttcccgacctgccccacagcacagagactggctccaggtatgccgggcagggaggctcctggcggcgcaggcccagaggg

SEQ ID NO: 256644 - DNA, 333 bp, Homo sapiens
  chr6:167140085-167140418
  hypo
ccaaaatatataaccgtgatcaccttaaatcacataaacatgatcaccttaaacagagaactggatctcgtgtactgatgctgctggcagcattggaaagtgactcttacaacttcagttgcgataccggtttccataagcttctgtgaattcttgtcaaagctttaaaactgaacacggcaacaactctaggtgaggagtgtttggcagatgaaacccctccaccagggaggtgacgggtctcagggagtgtgtctggcgggtggggaggaatcccaggcctggaatctaccgtcctgggtgctgtctcctccaccacgtaagccaaacctg

SEQ ID NO: 256645 - DNA, 42 bp, Homo sapiens
  chr6:167144437-167144479
  hypo
tagatgtcatccgccgggtgcagtggctcttgcctgtaatcc

SEQ ID NO: 256646 - DNA, 55 bp, Homo sapiens
  chr6:167169077-167169132
  hypo
gctgggggtcctttcgacacgcaccatggctgctgcgctccggcccagcttccta

SEQ ID NO: 256647 - DNA, 204 bp, Homo sapiens
  chr6:167284359-167284563
  hypo
aagaccagcctggccagagtcgcactagctgtgaaccaaacgacaggctgcgcccagtcagagggtggaaggtgccccgcggtgtgctgagaactgtgcttacgtttctcaacataaagcggagcattgataaaccccagagaacaagctgtgcggcgctgaccacgctgtgcagggctgaacgcacattaggtgcttgataaa

SEQ ID NO: 256648 - DNA, 2667 bp, Homo sapiens
  chr6:167313423-167316090
  hypo
aggagagaacctccagtgagcgcacagaaagaagaacgccacaggaacgcacagtggagagaatgccatgtgaaggcacaaagaacggagaacgctgcgtgaacgcacacacgtgggggagaaagccaggggaacgcacagagtaaatagaacgcaatgggaacgcacaggaaagagaacgccacgggaacacaccgggggagaacgccaggagaacacactgaggagagaactccgcgtgaacacaatgcgggagaactccaggtcaacgcacggagaggagaacgcctgctgaatgcacggggttggagaacgccggtgaacgccggtgaacgcacggggaagagaacgccacgtgaacacacgggggagacgccgcacgaacacacagaagggagaatgccgggtgaacacacacgggggagaacgcccacgcgaacgcacagggtagagaattccgggtgaaggcacaggagggaaacggcgcgcgaacgctcagcggggagaacgcctggtgaatgcacgggagggagaaggccaggtgaacgcacagggggaaaatgccgcgctaaagcacacgggaaataacgccgagcaaacacacaggtgggagaacgtcgcacgaacgcacagcgtggagaacgcgacgtgaacgcacacggggaagaacactgcgcgaacgcacagcagggagaacgccacttgaaagcaaagtgaggggagaatgccgcgttgaacgcacagtggggagaacaacccgcgaactcataaaggggagaacgcagcgtgaaagcacacagcggggagaacgcctggggaacgcaaagagtaaagagaatgccttgggaacgcacaggagagagaacgcaacctgaacacacggtgggggctggaggaagaacgtcgggagatcacacagggaggagaacgccaggtgaacgcacaagagaaaacgcctggtgaacgcgcaaagaaaggagaaagccaggtgaacgcacagggagaacgccgcacaaccgcacaggtaggagaaagccatgtgaacgcacaaagaaaggagaacgctgagtgaacgcacacagggccgagaacgccaggggaacgcacacagtaaagagaacaccgagaacgccgtgggaacgcacaggagagagaacgccacgtgaacacacgagggagaacgccgcgggaacacacagaagggcgaatgcccggcgaacgcacagaggggagaacgccaggggaacacgcacgggggagaacgctgcgcgatcacacagcggggagaacaccgggtaaacacacactggggaaaacaccgcgtgaacgcatagaggggagaaccccgggtgaacacacagaggggagagctccgtgtgaacacaaagggaggagaacgcctggtgagcacacacggggagagaacaccgcgcggacccacaagggggagaatgcctggtgaacgtacagcgggaggggagaacgctggtgaacgcacagcggggaaaacgccatgtgaacgcacaaaggaaggagaacgccaggtgaactcatacagggggtaggaacgccagaggaaagcacacagtaaagagaaggccgtgggaacgcgcaggggagagaacgccgggagaacacagagggaggaaaatgccaggtgaacgcacaagggggaaaacgcctggtgaacgcacaaaggagaaagccaggtgaacgcacaagcagcagaacgccaagtgaacgcacgaggggagaatgctgcgccaacacacacgggaaacacaaccgcgcgagcacgcagtggggagaacggcacgcgaacgctcagcaagaagaacgtaagttgaacggacagcggggagaacgccgccctaacacacgcgggaaataacgacgcgtgaacacacagcagggagaacgccgcgtgaaagcacaggggggagaacgccgcgtgaatgcacacacgggaaataacgccgtgtgaacacacagcggggagaacgccgcgtgaacgcacacaggggaaataacgccgcgcgaacacacagggggaagaacgtcacagggacgcacagtggggaaacgccatgtgaacgcacaaagaaagaacgccacgtgaactcgcacacgcggggagaacgccggggaaacgcacacagtaaagagaacgcagtttgaacgcacaggggagagaacgccacgtgaacacacagaagggagaatgcagtgcgaacacacagaagggagaacacctggtgaaggcacagaggggagaacgccgagcgaacgcacagggtggagaatgccatgtgaacgcacaaagaaaggagaacccctggtgaacgcacacaggagaaagaatgccgaggaacgcacagagtaaagagaccgccgtgggaacacacaggggagagaacgccacgtgaacacatggggagaacgccgcgggaacacacagaagggcgaccgcctggtggatgcacagaggggagaacgccaggggaacacacacaggggagaacgctgggcgatcacacagggtggagaacgccgggtaaatacacactggggaaaacgctgtgcaatcgcatagagggaagaacgccgggtgaacacacagggtgcgttcttccatcatgcggctgcgcctgagtctctgagtctact

SEQ ID NO: 256649 - DNA, 176 bp, Homo sapiens
  chr6:167354231-167354407
  hypo
tttttttttaagcatcagaacggtcagtcaccaatgcgaagtgactcagcgtgttgccctctgtgctgagagacaccctgactcacccaccaagagcagatgcagccaggagcggatgtcccaggctcacccacccactgtcacccagcccgctcggccacaacaggcagccagtc

SEQ ID NO: 256650 - DNA, 65 bp, Homo sapiens; identical to SEQ ID NO: 211017
  chr6:167384339-167384404
  hypo

SEQ ID NO: 256651 - DNA, 217 bp, Homo sapiens
  chr6:167391010-167391227
  hypo
tgctttgatatctggcaattccttttcttatttccctgaaatgaatgcctggcttagagtaggaaacgaatttgttgagttaatagattggtgaaatgactgcagtgctatgatgttgagaaatattttcttttcggtcagcatacacatatatgtgtatatgcttatgggggtgtggggtaggtgtatatacgcatgtgcacgcccattcgtgtat

SEQ ID NO: 256652 - DNA, 196 bp, Homo sapiens; identical to SEQ ID NO: 211018
  chr6:167511715-167511911
  hypo

SEQ ID NO: 256653 - DNA, 127 bp, Homo sapiens
  chr6:167649278-167649405
  hypo
tccaagagcacacagaggctcgtgtctaccgccccaactcgggcggctgcagccgcgcgggagagattggcggtgctgctgcctgctcctggctcccacccactccgtggggcacacagccccaact

SEQ ID NO: 256654 - DNA, 86 bp, Homo sapiens
  chr6:167707449-167707535
  hypo
cagtttccaggatacgagggccacgtccctggtccattctcaaaccttagacagtgacgggcactcggaggcgggcgatggatatt

SEQ ID NO: 256655 - DNA, 138 bp, Homo sapiens
  chr6:167813214-167813352
  hypo
cagagtccctgtgtcgcaccagccctgcaggcacctgtttcttggtgccgagcgtctttcacgagtgtgaacccatctgatgttagtccccagtagggaaaatgcccatgggaaacggggtgtcgggggagcccaagc

SEQ ID NO: 256656 - DNA, 394 bp, Homo sapiens
  chr6:167834914-167835308
  hypo
cctgcacccgccaccgctccaatccccacgcagcccggtcacccggtgcctccactgccttggctggcgctgggccggggcctccaggtttctgtgtccaaagggcaggagagaggcgcaagcgggagctgctcttgctatgccagggcggtgctagagatagactttgccctgggctgggctgttttccccccacgcggatcctcacctccgcttctccactggctttccgcctttacatacgtctattttaaatttgtgttaggcacccccacactgtgactcccctcaacactgccgctcccccacgcacacagcggctcccccaacacacggctgctccccccacagcctgcggctccccacacacggcggctcatccacatatgctggc

SEQ ID NO: 256657 - DNA, 453 bp, Homo sapiens
  chr6:167836478-167836931
  hypo
tccctcatacactgcggcttcccccccaacacatgacggctcacccacatctggcggctccccctctacacggctcccgtctccaaccctccacacggcggctcctccacaaatacggcggctccccctcccacggcggctcccccacacacagcagttcccacacacacactgcggctcccccgcacatggtggcttccccccaccacactggggttcccccccagggcagctcccacacacacgacggctccccccatactgtggcttccctgcacacgacagctccccccccacacaccatggttccccccacacggtggctccccctcacacagcagctcccccgctacacggcggctcccccgacacggtggctccccacacgtaagcagcagctccccccacacacggccctccccacacacacacacccggcggctccccccacca

SEQ ID NO: 256658 - DNA, 545 bp, Homo sapiens; identical to SEQ ID NO: 211020
  chr6:167880207-167880752
  hypo

SEQ ID NO: 256659 - DNA, 51 bp, Homo sapiens; identical to SEQ ID NO: 211021
  chr6:168054236-168054287
  hypo

SEQ ID NO: 256660 - DNA, 732 bp, Homo sapiens
  chr6:168062967-168063699
  hypo
ctttcccgcagtcacgatcactggagcacgttcagggcctgcaggtggtgatgggccgcgcagtcgggaccctggagctcttcaacgtgcttcatggcactgcttctcgacctgagattcaaggctccagaggccccactggccactccgcttccgggacccctcacacctcccagccgggacttggggaggcacttgcgagaggctgcgtttgccgttgcgctctctggagctggagaaccactgggcgactctgcgtgactcctgcacccactgtcaggaccccggaagccaaccggtttggagaaaagggcccactcctcaccgcgctctctgcccgcggcctggcgcagggcctcacggggctgagatcctgatcaccaggaggagccacacctggcggagcccctcctttaccgagcccatctcaggtggctggtgaggatgcgtgaaggggtaaaccgaggcaccaggagggcctcccaagcactggctgggcactttcccattcttgtttagtcctcaggccacccgccagtgaggcgcaccccaggccatcccctgatgagcctcagaggtagccagggagatgcccccgcccgtttcacccgcgctgtcactgctcgctgccccgtgagccagcctgggttctgggtggcaccagcggcagtggctctgcctttgggagcctggggacagtgctggctgcatggagcgcgggcctctgcggct

SEQ ID NO: 256661 - DNA, 36 bp, Homo sapiens; identical to SEQ ID NO: 211022
  chr6:168131201-168131237
  hypo

SEQ ID NO: 256662 - DNA, 261 bp, Homo sapiens
  chr6:168137807-168138068
  hypo
gggatctgatgctgcgacccagcccagcacacccagttctgctgcccgcatagccagaggactagcggactttgtgtgatgtggctgcttcgtgacccccattcagagaggctgacggagtgcgaggggcatggcccacgggcccaccgtggggttgcagggccagggcgccgcctggcctgggctgagtaacgatgagctgctgggacagtgggggctgcagcagagacccagggtggctcggagcgtggctgctgcacc

SEQ ID NO: 256663 - DNA, 47 bp, Homo sapiens; identical to SEQ ID NO: 211023
  chr6:168156341-168156388
  hypo

SEQ ID NO: 256664 - DNA, 277 bp, Homo sapiens
  chr6:168167927-168168204
  hypo
tggactcaatcactcggggggcaggaaatcccaccccagccgcaccgaggttctgctccagcagctggtccaaaggcaccaattttggcatcccgcagagcgtcagagaatctttgttgccataggtgagaagtgcgtctcctgaaatgccaggtgttttctgctgacagctgcacacgctccttaccagggccgtgccatcctgctccatgacacactccatagagggatcgctgcactacaggtggtgacagcagggtggcgtgcgtcgcactga

SEQ ID NO: 256665 - DNA, 300 bp, Homo sapiens
  chr6:168377438-168377738
  hypo
ggtccaggagctccgcaagttgcgggagaacctggcgggtccgtggtccagcgaggcctgggattcagaagggatgaaacgttcctcgacgcttgaacaccggcctcctgcccctgggtcttcctgctatttcttcctgcccctcgctcccgcctcgagccaccccctcgtgctccccaacgcccgctcctgtgctggtcactgggggcagtgagaggaggccagaagcagaggcgatgccggcggggagcgggcggtgggggggcttctgggagcgacggacccggcagctgcagagcc

SEQ ID NO: 256666 - DNA, 683 bp, Homo sapiens
  chr6:168378613-168379296
  hypo
cacagtagcgaagccgggacagataaagttcttctagtcactgccctcttggagtataccgttgaatccgggaagtagatcaatgaaataaacacagaatggttgtaaaatacagaacgctgggaagtggaggtgcgtggtcttacccgtgtttataattcagccgtcgcctaacctgagaaatcaaggatttctgcgtcgtgcgcgtgcccgctgagctgagctctgctgggatggggagtccttctccggctggaggctgagggcaggagctctcggtgagaggctgcggccagcggtgctgtgagccgggcgggggtcagcgcgggcggccggggcgaggctgacagcacagcaggggccgagctcccccgggtcaggcgggaccaggaagggatcatccttcttttgagggcacggagccaccgtcggagggcctgtgagaagggtgggaagctgagattacattcctattctgaaaatgtcacactgtggagggcggtggttcaagcgcagtaatggccatggagggagaacaccgcccggggacacccggggtggcagggaccggagccccggaaacctgagcaaaacgcgcaaaatggggaaaaccacccaggttttaatggaaattgtgcgaacagctgtcaacgaagagtcaaactctgtaaaatatttgaaga

SEQ ID NO: 256667 - DNA, 40 bp, Homo sapiens
  chr6:168387062-168387102
  hypo
catacagtcaggcatcgcttaatggcggggttgtgttctg

SEQ ID NO: 256668 - DNA, 86 bp, Homo sapiens; identical to SEQ ID NO: 211029
  chr6:168387333-168387419
  hypo

SEQ ID NO: 256669 - DNA, 188 bp, Homo sapiens
  chr6:168389684-168389872
  hypo
aggaacctgaggtgtcgctgctctacaatcacactccagtctccatctttggccagggacacaggtccttctgtggaggagggacctcagacccctgcccgtgagtgcctgagcttgcagaggtaacccctcgccatcacattccaccaaagccttctccagcagaacgtggacggcccccgctcagg

SEQ ID NO: 256670 - DNA, 100 bp, Homo sapiens
  chr6:168390655-168390755
  hypo
cagccccacgttgagcgcagaccatcctggcgccatggattttcttagaactgccgttccacgccgggtgagtccccggggctctggaaccgtggatttt

SEQ ID NO: 256671 - DNA, 99 bp, Homo sapiens
  chr6:168390875-168390974
  hypo
attgccgttccacgcccggtgagtcccggaggctccggaacacggtttctaacgcgcaggctgatgatttctaacactcacgtgcgtggtatttctttc

SEQ ID NO: 256672 - DNA, 305 bp, Homo sapiens
  chr6:168391271-168391576
  hypo
gcagcctccctgccccgctgcgcccggctcgcccccgtccctctgctcctgaggccctgagcttggccgtctctgtgccaggactcgggcctgggcttagctccccggaggcaccgcaggcagcgcgcgaccccgagctcacacgcgggcatcgccgagtcacacgtgggcatcccgggcctcacacgcagcccctcttccaggacgttctgcctccccgcacctggccgggaccctcaggctcagccctggggatgcctccccgacggctcctgtggctccgtgccccgcgcgcccctggatca

SEQ ID NO: 256673 - DNA, 201 bp, Homo sapiens
  chr6:168401780-168401981
  hypo
ggactggaaattgggcctgtcggatacgtcagtgtggcgcgggacaggccaagtggccctcattcaaaatgtgtgggaccagaagaagtgtttccgatgttgaattgtttcatattttcgaatgttcgtgttttgtatggaccggttcagcaagataatccagtgggcattttctttcagcgtcatctcagtgctcaaaac

SEQ ID NO: 256674 - DNA, 97 bp, Homo sapiens
  chr6:168416725-168416822
  hypo
tagcatcaaaggaacggtccccgaagtggacagcagaaaaatgaaaatatgccgcgagaaaggagcaaagggcctaggctggcggttggattaggga

SEQ ID NO: 256675 - DNA, 127 bp, Homo sapiens
  chr6:168417026-168417153
  hypo
tcttctgtgaaagccgtgccggagcacgagcacgcgcaacctccacatcctggtggtcgtttctgtgctgcgatggagaccacggaccgccccagccaccggctgctcctcccggcattgccagagt

SEQ ID NO: 256676 - DNA, 200 bp, Homo sapiens
  chr6:168420280-168420480
  hypo
ggacggctgggctgacgcaagccccacagtgcgaatgagcttgaggcccctggacggcacacttgaaatggtgaaaatgtcaattttgttatatgtatttttttaccacaattaaaaaggaagtgaacagagcatcatggcgccatgggaccatgatgtattggcttccaagaagccaaatacagcgggagttgcagtcc

SEQ ID NO: 256677 - DNA, 45 bp, Homo sapiens; identical to SEQ ID NO: 211031
  chr6:168428432-168428477
  hypo

SEQ ID NO: 256678 - DNA, 167 bp, Homo sapiens; identical to SEQ ID NO: 211032
  chr6:168434610-168434777
  hypo

SEQ ID NO: 256679 - DNA, 153 bp, Homo sapiens
  chr6:168450069-168450222
  hypo
gagggcagtcccagcgccacggagaaatgcatctccagaaacactcgtggcttcctcaaactgagcacaaccagacctccccagcgctgacctacggcacaattgttcatgcacgagagccgccttatggggtgagtgcgtgactctggtgcg

SEQ ID NO: 256680 - DNA, 552 bp, Homo sapiens
  chr6:168450728-168451280
  hypo
ggaaccacaggggcccggccccatctcggggtccggggtggcttccctgcgggggcggcctctgtgcagaggcctgaagggtccacagtggcaaagggggaatgacaaagtgtctgcctgtgccggaccgagtgatctgtactataattaccctgtgaggggcgcacgctgccgtcctagagcgtcacagacaccagcccccgggcctgttggtactcgccggaggtccctgcgtgcccagagtcccgccctggccatcgtttagtgtgaggcaggagggggccagatatgggggggacgcctggctcccccagatctctcttgcctgctctttcctccgcaggctgcctgtgcccctcccccgtagccaggaacaggccctggggagtggtgggaggccgtgcagtgaggcttgcggccctggatgctccctcaggactgtctgggaccaggctcgtctcacaatccgaattaactgcagacctcacttcgagaacagcctggcccagccctgatactcggggaaagagcagcggtcggaggaggcaggag

SEQ ID NO: 256681 - DNA, 210 bp, Homo sapiens
  chr6:168453027-168453237
  hypo
cagaggcccccattggaggccggcctgttcccactgttacgtgttcccatgtccgctcaggagggagcctggcccgcaccccacagggcacactcctgcatctggctctgaggacatgcttcttcctcttctcccactgcgccaggccctgccgccgccccaacagcgtggatgtccagggctgtgggcggacaatggccctgatgtcca

SEQ ID NO: 256682 - DNA, 351 bp, Homo sapiens
  chr6:168458057-168458408
  hypo
tctcactcccaccaccgcacacggcagccacactgcttgtggccacagagccacactccctgccaatgcccaccctgcgccgcagtgcatggccggcctgcccctggacgggtcccccagcacacacctctgcgagagaggcttggcatcttcctttgatgcatttcaggaggcccccaccttgcccagcttctttcctggggctgctttctgccttttaactcagtggacctggactcttagcgtttggtgtaatttaggatcaggtctgagtgtgggccttgaacactagctctggaagcacctcagtggtcaagaacggcctcctattttatacgggaggaaactgtc

SEQ ID NO: 256683 - DNA, 203 bp, Homo sapiens
  chr6:168458627-168458830
  hypo
cttgcccttctacgcgtgtttccttgtttttaatcaatacgtctttcaagagtgacagtccctggcccagagctcaggcggcttcgggcagccgtctcctccactgagtgggctgacctgggtttgggattgcccccactgggatgggcccgcgcctgccaggacttgcagcctcccctccctcctcccgtgcccagccctgt

SEQ ID NO: 256684 - DNA, 66 bp, Homo sapiens
  chr6:168461832-168461898
  hypo
cagcccagatgaggacgtggaacaggcagggagaccaggcctgcgggtaaacgctgaggccaggcc

SEQ ID NO: 256685 - DNA, 302 bp, Homo sapiens
  chr6:168462442-168462744
  hypo
gcacagtccggctgcggagcccagcatacccagcccagccccaccttctgcctcctcccgctgccgcagctgttgcagagtgggccgcacgcggaggtggagctggtggctggcgcgcagcaggtgcagcaggtgcctggaccgccaggtgcaccccgtgtagtaaaccagcttctgtgctgcgggcagcccatccagctggatctccagcttctttccctgagcaaacaggagagaagttgccactccacaggtggaaaaccacgctagccacaggaaaggatgattttaaatgtcagcca

SEQ ID NO: 256686 - DNA, 54 bp, Homo sapiens
  chr6:168462774-168462828
  hypo
cacttcgcagtgcagatggctgttggcggacactgtgcgcggacactgtgctct

SEQ ID NO: 256687 - DNA, 202 bp, Homo sapiens; identical to SEQ ID NO: 211035
  chr6:168463427-168463629
  hypo

SEQ ID NO: 256688 - DNA, 119 bp, Homo sapiens; identical to SEQ ID NO: 211036
  chr6:168467750-168467869
  hypo

SEQ ID NO: 256689 - DNA, 53 bp, Homo sapiens
  chr6:168482041-168482094
  hypo
tcgactggcctgttcgtgatggaagaggctggcctgccacgttcgtgatgtca

SEQ ID NO: 256690 - DNA, 172 bp, Homo sapiens
  chr6:168482714-168482886
  hypo
gtgagtgtgagacacgtgggtgctgtgtgagggtgtgcctgtgtggatgtgagtgggcacatgcttgcacacgtatgttcacatgcagccttcatgtccgggaatgctagggctgcccacctctcctccacgtcctcctctgcacaatcagcaacaccgactgatccctttc

SEQ ID NO: 256691 - DNA, 103 bp, Homo sapiens
  chr6:168490178-168490281
  hypo
aggtggaggaggaccgaggcaggaatggccgcctccaggcagctgtgtttatcacgcacactgtttaccgtcactgtgcacagataatcgaccatcagcagct

SEQ ID NO: 256692 - DNA, 118 bp, Homo sapiens
  chr6:168517650-168517768
  hypo
agatttgggactggagctcacggtgcccagagatgcacagcgggattttcccgccacgccatgcattctccacaggccgagagtgtgctgtgaaaccgcaaggctgaaaccaccttca

SEQ ID NO: 256693 - DNA, 541 bp, Homo sapiens
  chr6:168529686-168530227
  hypo
ctgtccagctgagccgtctcccgcttggcgcccccaggcagtcagacttcccacacctgaaggaaactaggtggaagcgacttggcctctccggccccgcctaggcctcggaggtcaggtggcctcacctcccctgcgggcaccggccagctgctaaggcctgtccacgaggagagcggggtgtgggacacagacttcgcctctcagtgggaagcgtgttccgactctgccacgtgcctcttactttagaaaagtgaatccatcattgttccagttaccttgggctgcactctaaccgccaccaagtgccacggcttcaacacggttcattaattgccagcgtgtgtgtggctggtctggccacagcggccggttttcgctcgaggtccttcatgtggttgccgtcagatggtcagatggcggccggggccggggctggggtcgctggacacttgacccagctggaggcctacggggaggccttggttggagtgtctgaggcctcagctgggcccctgcctccgcgcgcctgaccagcact

SEQ ID NO: 256694 - DNA, 38 bp, Homo sapiens
  chr6:168561523-168561561
  hypo
gatgttcactttcttcgatcttacgtggtggcatccac

SEQ ID NO: 256695 - DNA, 209 bp, Homo sapiens
  chr6:168591119-168591328
  hypo
ctcacgtgtcctgcgctgtgcacctgacgtcccgcctgcgagggtcggccacctcacgtgtcctgcgctgtgcacctgacgtcccgcctgcgagggtcggccgcctcacgtgtcctgcgctgtgcacctgacgtcccgcctgcgagggtcggccgcctcacgtgtcctgcgctgtgcacctgacgtcccgcctgcgagggtcggccgcc

SEQ ID NO: 256696 - DNA, 108 bp, Homo sapiens; identical to SEQ ID NO: 211038
  chr6:168613294-168613402
  hypo

SEQ ID NO: 256697 - DNA, 252 bp, Homo sapiens
  chr6:168633686-168633938
  hypo
cggagaggctggatgagatgcggcgagcgcgtgacacacatcagaaagtggcagaaccagaaccggctccccggggctgcccctgcttcccctgacaccggctgcgtctgtcatgggctgcggcacggtcatcttcgttttgactttcaggtggcaaccgcacggtgccacaggctgtcgctgtcacccaagcacaagtgcagtgacaatcctcgctacgaatttcctcgcggctccatacctgaaataagt

SEQ ID NO: 256698 - DNA, 193 bp, Homo sapiens
  chr6:168664088-168664281
  hypo
atccttcaagcagcacagagcgggcggtttgtctcacgctggagaaggaattcagacgcaaagctcgccgcagcctcagagggcaggcgcaccaggctcctgggttctctccgtgaaggaaactgacgaagccttcccgaaggctgatttctaactgcctgatgcttccaacgaggtggagctgtgggcacag

SEQ ID NO: 256699 - DNA, 400 bp, Homo sapiens
  chr6:168672432-168672832
  hypo
catgctggaatcctcgttcccgctgaaatctgcctgggcggccacacgcttcctgtgcaggctgcagggacccagaggacggtgtcttgccgagggatcctccctccctccaggtacctcgccccgggacagcagaagtgagagacaatccgagcatatccatgtaatgtggaaatgctgtactatcacccatctaaacaaagctcggaactgtctgcgccccaggacggggtcccagctggcccaggagaaatcgcactcacaggcccagcagagcccaacgccagcgctcagaatcccacagtgtctagacacgcacagcagcaacacggaagcggcacagggacagccccagcggtggcgacccagctccacaggcgtgtggcaaatgcaggcaggc

SEQ ID NO: 256700 - DNA, 56 bp, Homo sapiens
  chr6:168700436-168700492
  hypo
tgctccggggccaccgcgtccctgaaggctccatcgtcggacggttctacaatagc

SEQ ID NO: 256701 - DNA, 453 bp, Homo sapiens
  chr6:168708247-168708700
  hypo
gtccaggccagctccgcatgcccggccgccacatagcccagtgccaggtcacagtccctgctctgggcgccgccctcctcgtcgctgctgctggactcacggtctccgaatcggttggtggtgtggtcactggactctccctcgctggtctccgggatgactgacgggaaccgcgggtcacactcggccgagtgcttggagggctctgagtcgctcctggtgtaggcgtcctggcggaccagtgagggacggccccgggccagtgggccacctgctctcctggccacgggcctggggggccccaggttagactcaggacagctggccaggcgggcccgggccgagatctccacggtggactgccagcggcgatgcttcctcctggccactgaggtgagcagtgacgcctcaaaggggaacagggcttgggctgaggtccggtggctctcctgc

SEQ ID NO: 256702 - DNA, 646 bp, Homo sapiens
  chr6:168709572-168710218
  hypo
cagggggctctgtagagccacggcgtgcagggggctggggtacgggtacacctccctgccgccctgggacaccaggtcctgccgatacttggggtccggcacgtgcagcgggatatccaccccctggcagaggagcccgaggagctcggcgtccgcgctggctttctggagccccgtgtccgccggcagggctctgtcaagatcacctgggagcgagaaaaatgaacaaacacgtaactacggagacgatttagtgcactgttgatttcatttcatgcgtggcagctgggatggaaacgctgctcattcactgcttcgaggaactcctgggtcccatgggagacggcgactcacagtcactgaggtccgcgtgtagacacagggcgcggggcagacgggaatgcgtttaagacactgggcgcggggcagacgggaatgcgtttagacacagggtgcagggcctcatttgcatttagacacaggcgtggggcccgtctgcatctagacaccgcacagggccgtttgcgtgtagacacagggtgcggggccgtttgcgtgtagacacagggtgcggggccctatttgcgcctgcagcgcggccccctcagcctgttctgatcctgcccgttgcgggagagtgcatggg

SEQ ID NO: 256703 - DNA, 133 bp, Homo sapiens; identical to SEQ ID NO: 211043
  chr6:168813949-168814082
  hypo

SEQ ID NO: 256704 - DNA, 202 bp, Homo sapiens
  chr6:168858075-168858277
  hypo
tgcgatggactcagcgacaaacggcacccaccgaccctgcactggagctgcagtgacttcatcgccttgtgtttcccgtcgggtgcccagtaatcacaaagtggcctggagtcactgtttgtaaatacacaggagcctgcacccatcatatgtatgcggcagagtaatcctcccagaacatgagccccgcgtcacgtccttc

SEQ ID NO: 256705 - DNA, 354 bp, Homo sapiens; identical to SEQ ID NO: 211044
  chr6:168936432-168936786
  hypo

SEQ ID NO: 256706 - DNA, 156 bp, Homo sapiens
  chr6:168956125-168956281
  hypo
cagggaagcccttaccttcccgtcgcctacacagagaggctgggtgctggctcagccagcccagcgagctccttctccctctgccagcaccctgctccccgtgggatttgggatggacgtatggcgtccacggccgcatgttacaaggtcccactc

SEQ ID NO: 256707 - DNA, 87 bp, Homo sapiens
  chr6:169013509-169013596
  hypo
cagagcagagcaggcccagtcgccggcaggttcagggcaggagcatcggccaaggagagttggctcgaaaacttacaatggagactt

SEQ ID NO: 256708 - DNA, 185 bp, Homo sapiens; identical to SEQ ID NO: 211045
  chr6:169106757-169106942
  hypo

SEQ ID NO: 256709 - DNA, 42 bp, Homo sapiens
  chr6:169448769-169448811
  hypo
agccttcccatctcactgcacgacttgatcatacagtgggct

SEQ ID NO: 256710 - DNA, 177 bp, Homo sapiens
  chr6:169465183-169465360
  hypo
gtgcctctgatttgcgggtgtcgcctgtggacccacaggcctccagcctggcgctccctagaactcgtcctcagagcagccgcccgaggccgtttccacccagtcccctctactccaggccttctcacgagcatcagacctgctcccgttctgttcctcccccgcctgctcccaccc

SEQ ID NO: 256711 - DNA, 632 bp, Homo sapiens
  chr6:169539421-169540053
  hypo
attttcttggaagctgccagcgggcatctttggggctcaccgtggtgaatccagcacccttcgctgggtcagcctctctccgtgccccggccctccagatgcccagtgctccgcgtcccccacaagtgaggccgaggaggtcggcgccaggggaaccagggccggtgctgagcagctccggtggaggccgtcagtggacttgagttttaaaaaggctcctgcggcgtggtcctggccagcttctctgctgctccgtggaaaggcctccgggacagtggcctgagcttggccttgcagggctgggagccggcaacccgccctgggcacggacacgcccttcatccctgaccgccaggctccagccctgctggggacactcaaggcaggacgccgggtccccccgcatggcctttccgcggagctctccgccgccgaggacgcccaggcctgcttttcctgccacctctcctaggccgcgagcccgggcccctggaactcagccaccgagtcacctccggcaccggactcagctctgcgcccccggcccgcgctcaccgcggagggggaaggaaccactatggaggctgcactccaacgtcctcccgaattccgcagcttctgggcttgtcttg

SEQ ID NO: 256712 - DNA, 426 bp, Homo sapiens; identical to SEQ ID NO: 211048
  chr6:169567204-169567630
  hypo

SEQ ID NO: 256713 - DNA, 45 bp, Homo sapiens
  chr6:169585505-169585550
  hypo
tgtcagagactgtttcaatgcgctggaaacctgaaatgaaagagg

SEQ ID NO: 256714 - DNA, 240 bp, Homo sapiens; identical to SEQ ID NO: 211049
  chr6:169592278-169592518
  hypo

SEQ ID NO: 256715 - DNA, 212 bp, Homo sapiens; identical to SEQ ID NO: 211050
  chr6:169592578-169592790
  hypo

SEQ ID NO: 256716 - DNA, 368 bp, Homo sapiens
  chr6:169625141-169625509
  hypo
agcagatttaagatgatctccgtgcatacatatctctgccctggcgggttgctcagaagccattttcctccacgcccatgagctgagagagcacccaccgtccaagtcctcctggtctgggttgaacacaagccggcagttgtccctgtcatcggggacgccatcgttgtcatcatcagggtcacaggcgtcgccctggccgtctctgtcatggtcagcctggttggcgttggagatgtaggggcagttgtcctggttgttctggtggccgtcgtcatctatgtcctcgttgttgtcacactggtccccaacaaggtcattgtccacgtcggtctaggggatggggcgtgagagaaacagcagaggac

SEQ ID NO: 256717 - DNA, 333 bp, Homo sapiens
  chr6:169634743-169635076
  hypo
tttcatctagtttcccaaagcgtttgtgcttttcatcagaatggaagcccgggtttcagtgcccccgcttctacccctcactcacccacggggcagctcctcttgttgcacatctgacgctcctgcacatcccccacgcaggccttccctccgtactgaggctcagggctgttgcagacccgggtgcgctcccggatcccaccggcacaggtgacagtgcaggccgaccacggggaccaggggctccagcggccatcgactgcggggaaagccaaccagggggagctcagagcaagacccggggtggagaacgtgagttggctgagtgagagg

SEQ ID NO: 256718 - DNA, 349 bp, Homo sapiens
  chr6:169641063-169641412
  hypo
caagctcctgccctcgccaccctccctgccccggtctcctgccatcgaccccctccctgccccaggctcctgccctcgccgccctccctgccccggactcctgcccctgccgccctccctgccctgggctccatctcctggcatcatttacttcatgccctctgggtacgagtgacagtcagcatcactgcaccctggttagccatgtgtatgttgtggggcaccgtggcccggagcacctcattatgttcagtccctttctctaaactgcgagctgcccgtcctgagccccgcaggcatcgctctctcttcctggccgcgctgtgccgctcaaacccatttcactcct

SEQ ID NO: 256719 - DNA, 415 bp, Homo sapiens
  chr6:169641783-169642198
  hypo
tacctgctgagatgggccagcggcggagctgcccatgccctatgacccccgcggcccctgcgtgagtacccaccactctcttgaggttctcgctgagctggttcacgaggacgtggagccccgagagctcctggaccatgtttcccagctcctcgcacgagcgttcgcacacctcgggcctcctctccgagctggggcccacgtactcggtggtgacatgcggacccaggcgcagcgtctctgtgttctcactgatggcgttgatctcagctgagggcaagcgtagaagggccgtgagcatcacagaggacggggccagcagcaggggctgggaacagagggaggatgacccgccctggctcccggagcggcctggtgctgggagacacaaggcggaggactgggccagcagcag

SEQ ID NO: 256720 - DNA, 745 bp, Homo sapiens; identical to SEQ ID NO: 211055
  chr6:169648464-169649209
  hypo

SEQ ID NO: 256721 - DNA, 193 bp, Homo sapiens
  chr6:169803235-169803428
  hypo
cagaaatgtgcacacgcgtacacacacacacacacacagaacacatctcctacatgacacctctcgccatgcctggctctgcgagtcttggcccccacacattttcatttgagtttcctatctcctcaggcacaaccctcactgccgtgtccttcttttagtctgtcacagtgactgacgagctgggcttgca

SEQ ID NO: 256722 - DNA, 120 bp, Homo sapiens
  chr6:169880473-169880593
  hypo
ctctgcagcacccggtcctgtcgactgcccaaggggttaggtatgcaggcgtgcagcgtgggactggtggtcagctctgcctaaggccccagagcgggatccactaggcgaagccagctg

SEQ ID NO: 256723 - DNA, 103 bp, Homo sapiens
  chr6:169971578-169971681
  hypo
tatcctggcataaacatttacgttccacattcaacacccagcaaccactcaaaaactgcattgggccacgtgcggcagctcgcacctgcaatcccagcacttt

SEQ ID NO: 256724 - DNA, 421 bp, Homo sapiens
  chr6:170047309-170047730
  hypo
gaaggcattatcaggacacacgtgagaatcgggcgactgtcacggaagccgagacacactcagccctgcaggaaaaggtcccggctgagggtccggtaaggaaggaatcctgtgcgcagcctgcatgatgccatccccagcctggcgcctccagcccatccatgagcagaggccgcgtctccagagggaagcagtgactgttccattagcttctttgcctgccgaagccctcccaccttaacatgtctgtaggaggggtcagacaaacagagcaaaccccggaggagctggacacagaacagcaaattcgctgctagtgagtgagtgccagtgtctgtgcccacgcaggggtgagatgcctggagatcaccctcactacagtcgagtgaaacgcagtctcggttttcatccagacacaaac

SEQ ID NO: 256725 - DNA, 178 bp, Homo sapiens; identical to SEQ ID NO: 211056
  chr6:170059400-170059578
  hypo

SEQ ID NO: 256726 - DNA, 36 bp, Homo sapiens; identical to SEQ ID NO: 211057
  chr6:170061018-170061054
  hypo

SEQ ID NO: 256727 - DNA, 698 bp, Homo sapiens
  chr6:170065254-170065952
  hypo
gtgggagcgggggacgtctgctcacagccctcttctcagcaggttttcagggtcacgtgagtggccctcacttttgctgcactccagaaccacgcatggagctctgggacatgcagacccagctcctccgcagaccagggggcccaggaccatattgaacccacagtgacgctgagacccacagaaggtcacgttctcagcactgaggtggacaggttttttcaaatcgcaggaaaatacaaagtagcatgaagacaaagacctttgtgtacaagctcacgttcaggcatgtctgggaactggaacttaactctgtggctgtctcacctggccgtcagcacacccggtgaccagctgcctgctttctgcatcaatgaataaactgagaagaggatatgctggtgaaaggaacatcggaaaatttagctttgtaagtgcctggtaccaattaacccgagaactgtcagttttacttatctctttacacgtaatatttacttacagtatttctgttagtcaagtttgaactattccaaaataatttcttcaccaaaaagtaaaacttgcacatgaatacaaatgttgaaaaccccataaacacaatgaaggctggggacatcaccccaaaaggctgcccggtgagtccaccacagatgggtcccgaggaatcccatcccacctcccgacagaaggcctgg

SEQ ID NO: 256728 - DNA, 145 bp, Homo sapiens
  chr6:170178945-170179090
  hypo
ggggggctgctgggcgcagactgtacctgcctggtgccctgtgagcgtgcatggcccctggcagccctgatgtagaccgggcgcctcagatggtgactcagagcaagaaatgcggacgtgcaggatgggccgggagcaagggcta

SEQ ID NO: 256729 - DNA, 615 bp, Homo sapiens
  chr6:170339178-170339793
  hypo
cggggcctcccagcccttcacgcagcgctgacggggcctctgcccaccggccaccctggtctcaagacggagcccacgtctcctgcttgggctggatgagtgacccttccctgcggccatgaacagggagctttaaacgtgttgaggttggaccctgcccagcccggctgaaccccactctgtaggaggcgcaggcatcagacgccggggacgtcatggtggaggagactacccgtgagcccggtgacgtcacggtggagaccacccgcgaggctggtgacgtcacagtgcaggagaccaccgcgaacctggtgacgtcacggtgggggagaccaccccgagccctgtgacgtcacggtggaggagaccaccctgagcctggtgacgtcacgggtggaggagaccgccccgagccctgtgacttcacggtggaggagaccaccctgagcccggtgacgtcacgggtggaggagaccgccccgagccctgtgacttcacggtggaggagtccaccccgagcctggtgacatcatggtggaggagaccgcccctgagcccgggtgcccctgatcccaggcactggatgggatccccgggggccatgttttaaaatca

SEQ ID NO: 256730 - DNA, 42 bp, Homo sapiens
  chr6:170365710-170365752
  hypo
ccaagcagatgctgtccctccgctccagccagttcctccaga

SEQ ID NO: 256731 - DNA, 483 bp, Homo sapiens
  chr6:170402059-170402542
  hypo
gaagggagctttatgatccacgcccaacccataggcccgctcccgccatgccccctcctctgggaaagccgcctggagtgtccaccgcagaacgagtgctgcgctcagcagcaccaggacccgcagggcccgcactcccctccgcacgaagctcactgtccacgaggaaagacgaggaaatgcggggaaaggagggcacgggacaacacgtccaactgtgtagaggaaagggacctgcgtgggaaggaaggggcaggggaggcttcgagaaagagccaggaccgtgtagttggacccttggagggagctacacgtggccaagggtgcagggcggccccaggctggggaacagcaccggccaagctcggggaagggcgtggacaaggccggcccgtggaacggaagggagcatcgcactgttaaaaggtcatgaaacgtccgggagcctcagcaggggaggccgagtgtggaggtttagaggaa

SEQ ID NO: 256732 - DNA, 47 bp, Homo sapiens
  chr6:170413530-170413577
  hypo
atccacagagccaccggtgaccccggcagagtcaggacatgctcccc

SEQ ID NO: 256733 - DNA, 228 bp, Homo sapiens
  chr6:170413607-170413835
  hypo
tcacagagtcacgggtgaccccagcaaagtcaggacatgctccccatgagcacacacacccggcgaggacatcactcacagagccaccggtgaccccggcagagtcaggacatgctcaccgtgagggtgcacacccagcgagggcatcactcacagagccatcggtgaccccggcagagtcaggacatgctcacaatgagcacacacacccagcgagggcatcaccca

SEQ ID NO: 256734 - DNA, 1066 bp, Homo sapiens
  chr6:170453833-170454899
  hypo
tccccttgagccacagagagcgacagtgaccttgagtgtggagagcagcggtgaccttgagcgggtggagagtggtggtgccctggctgcacgtggagaccggtggtgccgttaagccgtggagagctgcggtgaccttgaacgagtggagagcagcagtgcccttgagcatgcagcgaactgcagtgccctttagtacatggagaacggcggtgccctttagtacatggagaacggcagtgcccgtgagcacctggagaacggcggtgcccttgagcacgtggagaactgcagtgccctttagtacatggagaacggcggtgcccttgagcacctggagaacggcagtgcccgtgagcacctggagaacagcggtgcccttgagcacgtggagaacggcagtgccctttagtacatggagaacagcagtgcccgtgagcacctggagaacagcggtgccctttagtatatggagaacggcggtgcccttgagcatgcagcgaactgcagtgccctttagtacatggagaacggcagtgccctttagtacatggagaatggcagtgcccgtgagcacctggagaacggcggtgcccttgagcacgtggagaacggcagtgccctttagtacgtggagaacggcggtgccctttagtatatggagaacggcggtgcccttgagcatgcagcgaactgcagtgccctttagtacatggagaacggcagtgcccgtgagcacctggagaacggcagtgccctttagtacgtggagaacggcggtgccctttagtacatggagaacagcagtgcccgtgagcacctggagaacggcagtgcccttgagcatgtggagaacggcggtgccctttagtacgtggagaacgacggtgcccttgagcacgtggagaacggcggtgcccgtgagcacctggagaatggcggtgcccttgagcacgtggagaacggcggtgccctttagtacatggagaacggtggtgcccgtgagcacgtggagaacggcagtgcccttgagcactcggagaacggcagtgccctttagaggtga

SEQ ID NO: 256735 - DNA, 1004 bp, Homo sapiens
  chr6:170474563-170475567
  hypo
gtgcagtgccgcccgccatcctcctgcattagcatactcctaattgattaagtggatgattgattattggacccgtgcggtctgctttccagacccgttggctgggaatggaaagccacgctcggccctcggatgcagcagaagccccctgccccgtccgctccaggctgcagagccgaggtgattggcgccaggctgcccaccccgcctgccccagcaagtgcgtcgcgcccccatggtttctgctgtttgcatgtcaggtcccggcaggaagctgcagtccgacgttgctcagcgtccagcaaggggctgcccagatcccgtcttccacagaccccctctgaggccctcgttccctcaaaccccaggagccagctctgcccccgcacagctccacggccccaggctgcttcccgctactgtaacagacgaccacaggtcgcataggccagagcccggcacggcttcttgggtgacaatcgaggggtcctgacccagcacccgtgggcacacccttatttggaaattgggcctagcccggagtgatcatgaggccacgtgacatgggcgtgccagtctcaccaacgtgtgttttcacgggcaccacagagtctgttttctatgggtggggcagcggtgaacatatccctcttaatagcggtacgggtacggccagggaggcggcagaacgtagacagaacccgggcactgagagaccggtgccgccccccgccgtccacacaacccgggcctcgggcagcaccagcaggacttttattcctcaccccgcacgccgccgtccatctcctaggccagcgtgattcttctgagtgcagctgggtctcctcctgggagatccggtggctctagcagcgtgggtgctgggaacaggaccagcctcgccggcggacagtgtggacgcctgagggcaaaccctggaccactctctccccgggggactccgttcccgcctccagggagctgcgaacgctccttctgggaca

SEQ ID NO: 256736 - DNA, 902 bp, Homo sapiens
  chr6:170491589-170492491
  hypo
agctcagccccgtcccggactcaggggggccctggaagggcgggggcgcctgggaaggacgggaggggtgggggcggcgcacagcggccagggacggagactctgggagccggggggacccacagagggcagggaggccatggcttccaggcggggctgcccatgagttctgtgtccgcccccggcagggctcgaccctggtgcgtccccagcatgtttcttgggggcgctggaggctgctgatgctgcccagagtggccggacactcctgcccgaggcctccttccgccctgagccccccaaacgtgtggagttgggaagaggagcgggccgggaaggagggcgcgggggaaggaaaatggagaaatgaggaaaacgtgtcggttctaataaaaccatgtctccctgttcccgggcacgcagcggggcagctggctccggaggcggggccgcccactcagcacagccgcccagcctggccggctgtaaacagctattactgctgatcaaaggcgctacaaggacttaatcacagggcttaaggtgaaggaagtgagagggggctgcgcacgacggggcacaaacgcggcgttaggtttccacgcaccgcgattcccgcgtgcggagcgtcggtccccgccctcgacagctggagtggggccagacggccgggaccccagagttcagagggccactgtggcccacccgacagccacgtattcacatgagagggtgcgggtttcacctctcaaggcgaaggagcctcgcccgacgctgggtggtgagcacgttgaagatgaaaacatctgagagcgccgtgcaagatgggcgacgtaggaaaagcaaggagcgcaattccgcctcagatggcagaggggcagccggcagcgggggaggggcag

SEQ ID NO: 256737 - DNA, 35 bp, Homo sapiens
  chr6:170492521-170492556
  hypo
ggggcagtcggcgggggaggggcagccggcagcgg

SEQ ID NO: 256738 - DNA, 276 bp, Homo sapiens
  chr6:170492586-170492862
  hypo
tcggcggggggaggggcagccggtcgggaggcatccagggggaacggggccctcctcgctgcctgcctcttggacagagcccaggcggccggtttcagctctgagtcccacagccaccaccctctctaggccacggacatggtcctcttgaaggtttcctgcagcacccacacccctggaccttatggctgctgtgcctccccagagagacgctggagggggaggcagccccagggagtcctagggacagaaaacgagagcgacctttcaggcgca

SEQ ID NO: 256739 - DNA, 120 bp, Homo sapiens; identical to SEQ ID NO: 211065
  chr6:170500862-170500982
  hypo

SEQ ID NO: 256740 - DNA, 163 bp, Homo sapiens; identical to SEQ ID NO: 211066
  chr6:170531588-170531751
  hypo

SEQ ID NO: 256741 - DNA, 227 bp, Homo sapiens
  chr6:170578601-170578828
  hypo
cctgctgctactagcgatcccagtttggcaaacaccggggcctcactttgtctcttgtgtggggaatgcacacacctcacatctgtctcacggaccataaacgctctcccgagaatcatgttgactctgctcaccgagcccaggcccagcacaaagacacaccataaacacctgcggagggagcgtggcccagcccagggactctggggctcccagaagacagggcc

SEQ ID NO: 256742 - DNA, 74 bp, Homo sapiens
  chr6:170578858-170578932
  hypo
acagcggatcaggaaatggggcagaagcccatgaaaccctcggagtcaggtcaccagggcgggtgctcgcccac

SEQ ID NO: 256743 - DNA, 56 bp, Homo sapiens; identical to SEQ ID NO: 211067
  chr6:170579426-170579482
  hypo

SEQ ID NO: 256744 - DNA, 84 bp, Homo sapiens
  chr6:170579512-170579596
  hypo
ccagtgcccactgaagcgtcctgctcccttcttcgcacagatggcagtgtggggccaggggacgtgtggcatcatttgcccatg

SEQ ID NO: 256745 - DNA, 344 bp, Homo sapiens
  chr6:170667200-170667544
  hypo
tgtgtgcatgtttgcgcctatacacacactcatagttaataactgagatcaatttgtaagaaatgtttaatttttcctgtagcctaacactggcctttctctgtccttttcaggtggacacgctttgcctggaggatttgcatgcgtttattgcgcaggccttgtgcctccaaggaaaatccacctcgcagcttgtaaatctacaggtacagacgtgaccagttagttgtcactgcccggaagacagctgtgcagtccagccttctctttcccattatagttgaagtttcacagaaaagatcaggaaggtattttagtcaggatcttttcgtgatgcagtagtt

SEQ ID NO: 256746 - DNA, 112 bp, Homo sapiens
  chr6:170713941-170714053
  hypo
tgggagccaggcctcgcttgcatgaagaaggaacgatgcctttttcaatggtgtctccctcccattgtgcagaagagcttttgttggcttctctcccgagcttgtgcctgat

SEQ ID NO: 256747 - DNA, 176 bp, Homo sapiens
  chr6:170871267-170871443
  hypo
catcactcctgccacgccagcttcggagagttctgggattgtaccgcagctgcagtgagtacttcgtgttttatgtttcctcccacttaggagtccctttgagttatgttcctgctctgttttcagatggatccttttattaagggagggagtggcactaacggtaattgtgtatc

SEQ ID NO: 256748 - DNA, 120 bp, Homo sapiens; identical to SEQ ID NO: 211068
  chr6:170894913-170895033
  hypo

SEQ ID NO: 256749 - DNA, 33 bp, Homo sapiens
  chr7:62937-62970
  hypo
ctgtctctggtccagcggcgaggagcccccaca

SEQ ID NO: 256750 - DNA, 218 bp, Homo sapiens
  chr7:84205-84423
  hypo
ggctcccaaggctgcgctgtgcgtctcttccaccacacgcactggggcatgaggccaagggcatcgtctgcagagcgagagggaaactggggtggcagggcttgcgggcgcaggacagcgccaaggggctttcgtctcccagcattaggacgaccttgtcctctgcccctgtctgggggccgctgggtccctcctcacaggagcgaggcaggcagctc

SEQ ID NO: 256751 - DNA, 139 bp, Homo sapiens; identical to SEQ ID NO: 211069
  chr7:85450-85589
  hypo

SEQ ID NO: 256752 - DNA, 46 bp, Homo sapiens
  chr7:118252-118298
  hypo
ctgaagcgtctgtgcggaattcttacgatgtcgtgttccctcagca

SEQ ID NO: 256753 - DNA, 94 bp, Homo sapiens
  chr7:139618-139712
  hypo
gcctcccctccagccccagccgcggtgcacagggcgaaggctgtctgggtgaaggctatttgtgagtgaggccggggaatgaggggcagttggc

SEQ ID NO: 256754 - DNA, 155 bp, Homo sapiens
  chr7:153660-153815
  hypo
cttccccacatgctcgggttggcccagcgtctcacgctagcagctacgtggaatagttattttttctggagaactctgggacccctctgatgtcttggagcacccacacaggccgttcactgtgcacgctgtgaggctgtcgtcttggagcaccc

SEQ ID NO: 256755 - DNA, 66 bp, Homo sapiens
  chr7:154289-154355
  hypo
gagagcagcctggacggtccgcaggagacgtctcctgtcttaggcgtcccacgccgcgtgctcctg

SEQ ID NO: 256756 - DNA, 217 bp, Homo sapiens
  chr7:158843-159060
  hypo
ttctcatcacaatgcgtacagggaggcttccagaagctctgggtcagtattccggcgtgcatgtcctccaccctaacgcactcacccacatgcgccgagcaaagttggagcgggtggagaagggcctggcggtgcagaggccccaggatttctggacagggcagctgtggctgcagcagggaggtgcagtgctgcggggaggcggttgacagctgtc

SEQ ID NO: 256757 - DNA, 262 bp, Homo sapiens
  chr7:161869-162131
  hypo
aaggaaggtttagaggtgaacgtccactgcggaggtcggagaagcactcaggtcagcgggcagagcggctagtcggtgggccgagctctctgctacccccgcaggagtgtcccgacgccatcccagaagcagcacctgtgggccacggcgtttgcttagagcctggactgaggctgcctggacggggcccctcacccggccagagttaggggtgccgctgccacccccatggacccgcttcgggctgctcagtccttgttca

SEQ ID NO: 256758 - DNA, 149 bp, Homo sapiens
  chr7:168485-168634
  hypo
tctcctggagggtccgtgtccctggtggatccgtgtccctagtagatccgtctcctggagggtccgtgtccctggcggatccgtctctgaccgcgcgtgctcttcaccatggaaggaggtgctggtagccaagccgccctccccaagtg

SEQ ID NO: 256759 - DNA, 283 bp, Homo sapiens
  chr7:170020-170303
  hypo
gcttccctgcaccacggtccgcctggatcctgcacacccagcccggtggctcctgcccactcagcggggccctgacgccctacatctcctctgtgagcaaaagctctcttgttgttagagagacttgcggaagccacacacccatagaccgttacttctacacattctttttatttcacacagatctgcatcccttgaagtactcacggggacgtattccgcatggtttccatcttagtgcacatagaacacggttttaacttacaatcggcactgtcttctc

SEQ ID NO: 256760 - DNA, 486 bp, Homo sapiens
  chr7:173194-173680
  hypo
cggaggacaggacccgccccgcgctgccagtgccgaagcttgggttctctgaggactgcgagggggtctcagcactgtgtccacagatggggcagggacctccgcagggaaccttctctcggctgggccagcccaccccaggggctgtagacgagggagttaatgaacacgggatgggttgagccgcctggtttgcccacagaggggcgaggaagggagtggggagtctgctgtgagcggagagaggacagcctgaggcctcaggaacgctggctgcctgcctgcagcgggagctaacggggcgtctgtcgggaaggggcacggccacaggatttaggggcagtttggacacactggtccggtgagcttgatttcagattccgggatctggtttcggagtggagttgtggactctccaggacccatcgctgaggagcaggaggttctccaggggccatggggcccggggctctgagggaggctctg

SEQ ID NO: 256761 - DNA, 529 bp, Homo sapiens
  chr7:175273-175802
  hypo
cagcaagaaaggtacggcagggcggggccaggacagggtgaacaggaccccagcgcttggtggccacgagtcccagctctgggaggaacaggccttgaggatgcagagaggtttgcattggcaaaagtctcggcatctctcatttttcccgtacatgcaccaccaccgctgcttcctgctgtagcccctctccgccaagaggcattcccagcccccaggaccatagagaggggcaggggtcttcagcgtggctgagggccaccgcctgcggcacgtgggaggaagctgccaactacccccatcccctgagctgaagtctccttgcatctgggccttgattttttaatgcgagatgcagctcaaggcttgcggtcatacttctgtcttcaggtgcgaaaactgcgttttcttcttgagttccgtgtttcagggagagaatcgtgaagaaacagactaaaggactttgttgcaagctacagtcatgaagaaggacacgtgggtgaggctgggagcccggggagcctggtgt

SEQ ID NO: 256762 - DNA, 254 bp, Homo sapiens
  chr7:178590-178844
  hypo
ctctggggccgcatcgcacccccgattcgtgtcctccagcctgtttcctcgccttaggtgggacgcgatcacccgcctgcggggagtcttgctgccgtgcgacagtgagtagaggccgggcacaggcccacagcaggcgctcagcaaacgctcactcccaggtccccgtgtgcccgtctaagaaccgcgaggcttcaggcctccaggaggtgtcttgcgggggcagccgctctgacgtcgcctctgcccactgt

SEQ ID NO: 256763 - DNA, 334 bp, Homo sapiens
  chr7:181259-181593
  hypo
gccagcccagctctcgggctccctggcaaggctggagccgcaaggggctcgagtttcccctgcccgcagcccccataactggaagctggctcgcccagtgccctgatcccacccgccggccccttcctgtccacacatccccgcttttccctggaagcctttggtgacaagtgcagacactctgcccctcatcgtctggggtccttggccgcctctcacctgtcccccaggtggcaggtgaggccctcgggtccactctgaaggtgatgggctgatgctccaggccggacatcaggctccgtgacagctggttctacaccgtcttctccggctg

SEQ ID NO: 256764 - DNA, 148 bp, Homo sapiens
  chr7:199426-199574
  hypo
gagattagcacctgcgtgctccaggctctgagttctgtcccctcagctgtccggcccctgggtgctcactttaatctcaagtcattcatcttactattaaacgtgagcccagaaatattgttgtaatggagaacgatgcctgcgagtc

SEQ ID NO: 256765 - DNA, 202 bp, Homo sapiens
  chr7:204779-204981
  hypo
agggaatgtggcactcgtgtggccttcgctgtgctgtgtccccacactgccgctgttctcagtgttcagggaggggaagtggcacctgtgtggctctggccatggtgagtccccacactgccgctgttctcggtgctcggggaggggacgtggcactcttgtggcccttgccgtggtgagcccccacgccactgctgtcctg

SEQ ID NO: 256766 - DNA, 202 bp, Homo sapiens
  chr7:208838-209040
  hypo
aggagaagaaggggcgtgaggccagagagtgaccctgtttctctccctccttcctgcagccatgaagtcggggggcacgcagctgaagctcatcatgaccttccagaattacgggcaagcgctgttcaaacccatgaagtaagtgccgaggcctgtgggctggggcgtgaggagctggagctgcaggcgagcaggcgccggg

SEQ ID NO: 256767 - DNA, 342 bp, Homo sapiens; identical to SEQ ID NO: 211073
  chr7:212459-212801
  hypo

SEQ ID NO: 256768 - DNA, 155 bp, Homo sapiens
  chr7:217102-217257
  hypo
aagaggaggatggccgtcagcggccccccaggggtgagcagatgcagctcagacaaacctttcccaggtgccctggggctgctgaccccccgaggcctgtgggggaggcggacacagctttggcctcggacttgcagctgcgtggggccttctgc

SEQ ID NO: 256769 - DNA, 314 bp, Homo sapiens
  chr7:217590-217904
  hypo
ccctagagaggtgccggctttccctgaagcggcttctgaggcctttctcgcacccatgtctagggccaggcagaggtgccctgagggttctctgcagtcccacgtggccacgtccagagagggcaaaacagatgcaatattaataagaaagacgggagaacaatgacccggggcccgcgcgtcactgcaaagctttccatttgtacgaggagaggactgagaggttcgatgagcgcctggctggggctggccgtaacggccaccctcagaggaagaggggcctggctgatggtggtgcacgttggctgggagag

SEQ ID NO: 256770 - DNA, 120 bp, Homo sapiens; identical to SEQ ID NO: 211074
  chr7:223534-223654
  hypo

SEQ ID NO: 256771 - DNA, 354 bp, Homo sapiens; identical to SEQ ID NO: 211075
  chr7:226184-226538
  hypo

SEQ ID NO: 256772 - DNA, 166 bp, Homo sapiens
  chr7:228056-228222
  hypo
tggttctgaagccctttagccgcaccacagcgacccgtcagagctgatgggggacggcgggctcagtcaggcgcacaggcctgtgcctgcgtaacgaaacaccaggggggaaagccatccgcctggcatggttgtgatgaggcccgtggccaatcagagaaattct

SEQ ID NO: 256773 - DNA, 231 bp, Homo sapiens
  chr7:229478-229709
  hypo
agccctgtggctggagagctcgccgtcctcacgcaaacagtccagaccacagcggtggcacatcgtgagaatgacagatgggggatgagcaaggtgccaggggttttaaataagacggccgcgttttgccaaacacctaccccacggggctggaacaagtgacgcagaaatgggcaggaagcgtggaccgcgaactcggggaccaaaaggtcgtgccggagtcactgccag

SEQ ID NO: 256774 - DNA, 124 bp, Homo sapiens
  chr7:230453-230577
  hypo
cctctgtgtcccggcgttcggaacaccaggagcccttcacgaggctcctgtggggccgtgggtggatggagggtggccgggccgtctggtccacatgcctcaccctggccggccacctcagaca

SEQ ID NO: 256775 - DNA, 305 bp, Homo sapiens
  chr7:284816-285121
  hypo
agactagttcttaaaaaggccgtgggtggtacacatctttaaccccccataagaaacgttccgggaacacggagaattgtggccacagctttctgagaacagcgtgggaggacgggagccacgggctggtgtgtaattgacggcctgtgacccagacgtggtccccccgaagggacgtggacatgacatacaggacctgtgccccaccccgctgttcgtgtggcgatgatgtcggcccgtggcagggccaggatgctcccaggagttgggcggacctccgctgcgtatatggaaggaaggacccg

SEQ ID NO: 256776 - DNA, 771 bp, Homo sapiens
  chr7:286006-286777
  hypo
ggtcccagggtggacgtgccggggcccccagccagtgcaggagaggcctttgagcagcttacctgagaagggcccatggggagctgggacctccggcctccgtcgcaagggcctgcgctgctctgagggcccgtcggcagctgggtcagggccacggggagctgggacccccggcctccgtcgcacgtgcctgcgctgctctgagggcccgtcggcagctgggtgcccagggtcccgaaggctcagggtggccctgaggaggctggagctccaccgcatttttcatatgaggaacccagcacgtcccgcctgcctccggcccctggaggctttctcagtgacaaaccgtttctgtttctgtcttgttttctcagacaaacgagggagcaggagacaccccctgactttttttatttctctgactacgagaggcacaatgcggagattgctgccttccacctggacaggtgagcccttccttcctccctccatccgcgctcccgtgcgctcagacccaccggtgagtgaggccgtcctgcactggacacagcaggacgtcatcgtcaccttcgtcaccatcaggcagcgccggtgcctgctctccccccaccccgagtgctgccctgagcagggtcctgtatgtcatcgtcacctttgtcaccatcaggcagcgccggtgcctgctctccccccaccccgagtgctgccctgagcagggccctctgtgtcatcgtagcccacacaacacgcggtagggagagcctttcatat

SEQ ID NO: 256777 - DNA, 1086 bp, Homo sapiens
  chr7:287708-288794
  hypo
cacagagcccagcacccaggcgagccgtctgacaggtggagggggagggtgctccacgcagaggcgtggtcgggccttgggtcccgggtcggccctggcagacggcccacgtccctccacacctggtcacctcgcctcacaggacaatcaccacgtcctccgtcagcaagaaaagctctcgccctgcattctccatttaattaagcgagtgggagcctgtggtgtggttcagaaggagttccattaaaagtggctcctttaatttaattttgttttaaatttagccctggaatgagggcaggctttagctatgcaggcagttggtgctgtgtgcccatcagtgaggcatcgccagccccagtccctcaggggcctctcccacccccatcaccgtggggccaggcagagccaccggacctagggctgggtttattcggaggcagggacacagaggcccgctgagccgcacagagcacagaccctcccctgccccgttcttatttggaggcagggacacagaggcccgctgagccgcacagagcacagaccattccccgcccgtttcttgccaggatcctggacttccgccgggtccctcccgtggccggcaggatggtcaacatgaccaaggagatccgggacgtcacacgggacaagaagctctggaggaccttcttcatctctccaggtagcctggcacgggggcccgcattcatctctccaggtagcctggcacgggggcccgcattcatctctccaggtagcctggcacggggagcccacattcatctcgccaggtagcctggcacgggggcccacattcacctctccaggtagcctggcacggggggccgcattcatctcttcaggtagcctggcacggggagcccacattcatctcgccaggtagcctggcacgggggcccacattcacctctccaggtagcctggcacgggggcccgcattcatctctccaggtagcctggcatggggagcccacattcacctccccaggtagcctggcacggggagaccacattcatctcgccaggtagcctggcacaggggcccgcattcatctctcc

SEQ ID NO: 256778 - DNA, 113 bp, Homo sapiens
  chr7:289727-289840
  hypo
actggcatttgtggctctgccgagggctcagtcctcctctccaagcgcctctctggtaccaggcccctgctgcacagcctgttcccatttccgatgctcacctggctgagctc

SEQ ID NO: 256779 - DNA, 258 bp, Homo sapiens; identical to SEQ ID NO: 211078
  chr7:290537-290795
  hypo

SEQ ID NO: 256780 - DNA, 233 bp, Homo sapiens
  chr7:291025-291258
  hypo
cagagcagcatctccggaactcctcattttgttgtaaaatgagcctgtgggggcaggtcgtttcctccccgtttctaaggtcttactgagtggccgggcacggcggctcacgcctgcactgagtggccgggcacggcggctcacggctgcactgagtggccgggcacggcggctcacgcctgcactgagtggccgggcacggtggctcacacgcctgcaatcccagtactggg

SEQ ID NO: 256781 - DNA, 665 bp, Homo sapiens; identical to SEQ ID NO: 211079
  chr7:292736-293401
  hypo

SEQ ID NO: 256782 - DNA, 1353 bp, Homo sapiens
  chr7:293611-294964
  hypo
ggacccccgcttcccgggcgaggggctgggcacagagcagggaggcacttgcctgaggtcacacagctccaagccctcctaaccccgcccgggaggcccctttaatacccgatttggatctgcaaagagaaatggctgtgggcccgagaaatgcctttctcttttaacacgataccatctgaaaccggcttaggcgaggacgggaggctgttaacagcagacgaattttaagcctccagccaatgagcgctcagatgaagattttcctcctgaaatggagctcctgccccggtgggggctgcctcgtccgactgtgggctgccgactaatctgtatcagcacgagacaggattgcagctggtctttccttgatcgttcgttcttacaataatgacccagcgttggcagtggggtgagggggcgcgggaaggagggggcaggcaggtgatcggggcgttggaaccagaccagccgggacctgccgggtgcgtggggtgtggtgggggccaggtcggcctggcacccaccccgtttcctctccgaacctcagcttgttcagctaagaaagggcagccgggaccggccaccctcctgttcactccgctgggaagcgccctgccgaacctgccttctgatcccacggggagcctgccctgcagccaggagagacccctggaatcactcagcctggctgcataggaatgctgggactgggggagctgtgagtgaggttcggggctccggccccaacaaaaccacgttctcaccagttctacagccccaggctttccagagtttctccacaaacaaataaagcaagaaaaactagatttaatcagcaaataaatacaggaatagcgccgtcggccgggcctccagcatcagagcagtgaacccgcactgctagcgggcctggacagcgcttgcatttttctgattattctttctttattaaggtataattcatgtaccacaaaatttaccatttaaaagcgtacagttccgtggtttttagtatatccacaatggtgtgcaaccatcaccactgtctaaatccagaatgtcctgctgaccccaaaaaggagccccgtaccatgagcaggcggtcaccgttcctcaccccgcagccctcgacgagcagcgtcccacccccagtctatctggatttgcctgttctgggcgtttcatattaagagggtcatacgacgtgtggcctcctctgtctggcctccttcgcggagcacagggttctcgggttcagtgagggcttcattcctcttcttgtttcatttcgtttcgtgtcatcgcacggatggaccatgttcacctggcgtgtccactcctctcttgatg

SEQ ID NO: 256783 - DNA, 1233 bp, Homo sapiens; identical to SEQ ID NO: 211082
  chr7:295710-296943
  hypo

SEQ ID NO: 256784 - DNA, 315 bp, Homo sapiens
  chr7:297158-297473
  hypo
agggatgggaatgtcgcaaaggcccatctcagagccagatgcagagggcggccccaggccccaaccaggagggagggccgccccgggagtgggacctccgaggcacaggaatgctgcagaccaagtcccggcagagctggtgttacctgggaaacggaggccaggagaggctgctggtaggaagagcaggaccgtgcagaatagatgggcctctgcctgcacgcggtacctggagccagccagcgggggataggcggcctctgcggccgctgctggcctgccacggggggtcttgggcggcgctgtgagaccctg

SEQ ID NO: 256785 - DNA, 674 bp, Homo sapiens; identical to SEQ ID NO: 211083
  chr7:298605-299279
  hypo

SEQ ID NO: 256786 - DNA, 38 bp, Homo sapiens
  chr7:299617-299655
  hypo
cctctcactttctctcgctttcccgtgggcaggcatct

SEQ ID NO: 256787 - DNA, 1066 bp, Homo sapiens; identical to SEQ ID NO: 211084
  chr7:299916-300982
  hypo

SEQ ID NO: 256788 - DNA, 407 bp, Homo sapiens
  chr7:312490-312897
  hypo
cacaagagcccctccctccacgcccccaccgtgcacgttcccagacacagaagtcgcctcctggttctgaatcccagcggcctgcacagtgaccctcacaagagcccctcctcagctcgcagtccaagggacccgtaaatgtgtgagcagatcacaccccctctccttcacgcaccatccccatcccacacgagggcaaggcagagtcctcacaaaggccttcggggtcctctgcaggtggcctcggtccacgtgctaagatcatcctgcttctcttcctctcacgggttctccttcagccccaggcctggctgcttctcggtcagtgggcattcacccgcacagccctctgccctgtgcctccctcagcctcgcatggctggtgcgtcccctcttttgggtctgtg

SEQ ID NO: 256789 - DNA, 259 bp, Homo sapiens
  chr7:322780-323039
  hypo
agatccccatcctgtctgcccggggccctgttaaccatggacccctcctctggacgtggacggcccctccgggcgcccccatcctggccgccccaccctctcgggcgcacccgcgtgtcaggatcgccagcctccatcgcttccgcatcgaggacgcacacggtgtgtcccttcagtgctacagagcacgcacccttaaataggcttccgtacagtcaaggatcctcgaagagtaaacgcttttaagctttttccattc

SEQ ID NO: 256790 - DNA, 146 bp, Homo sapiens
  chr7:325295-325441
  hypo
ttcattttcttccccgcccctggggctgtggctgggatttattgtgtttattttccgatgtgtagcttttatgatctggggtccgctgagcggggctcggacagtaccctaagctaggtcgggtcgcactgcgccactcactctgc

SEQ ID NO: 256791 - DNA, 140 bp, Homo sapiens
  chr7:328221-328361
  hypo
tgtctagaactcacacatttcgctggatgtgtctgagagccgctggatttgtgagattcactgctggtctttgagaacgtccccaaaacaggctgcagctcccgactggctgatcgccggctctctgtttcccttgcgcg

SEQ ID NO: 256792 - DNA, 139 bp, Homo sapiens
  chr7:328541-328680
  hypo
tgggattacaggcgtgagtcaccgtgctggccgcgtttttagttttgacatccgattaaggggacaatacggagtcactgaagtgtgtttcagcttgagtgtgactcggatcccgagcgaggccaggcagccacagtgc

SEQ ID NO: 256793 - DNA, 159 bp, Homo sapiens
  chr7:337220-337379
  hypo
agtggacacgtggacgatgggacgcggggctgaggggtggcgggaggaggtgctgggaggcactggacgcgtggaagacgggacgtggggctgcggggtggtgggaggaggtgctgggagggagtggacacgtggatgatgggacgcagggctgagggg

SEQ ID NO: 256794 - DNA, 63 bp, Homo sapiens
  chr7:337996-338059
  hypo
ccaccgaaaggggacgatgtaatgacagtccaagagagaatggaggtgcggtcccctgcagtg

SEQ ID NO: 256795 - DNA, 34 bp, Homo sapiens; identical to SEQ ID NO: 211087
  chr7:339204-339238
  hypo

SEQ ID NO: 256796 - DNA, 533 bp, Homo sapiens
  chr7:345230-345763
  hypo
gcagccactgtctttttcaacgctgtttgtacagagaaaggggtgcacagagccgtggacctgcagctcctggagcttcccggagctggtcctccagtagaggtgctggggatggggggacgcagccacggccttcatgcaccaacctggggtctccacgagcaaactctgtgttcaaggaggcactcggcctggggacgcggtgggaagagctatcggaggagcccctcggagctgcctcagcacagctgatgaaagcaatcagcgcccgcctgagctggatgtaaaggttaatacataaatcaaagggaaatgtcaggtgccttttaacactgattgagatgtaattgggcagggaccgtgcgccaggcacccgcgctcacggaaccacggcaggacgtggaagaaattatgtggcttgtttgtgtgtctgcaatcgcgtcaagaccgatggtccctcggctctggacagacgcccccccagccagctgaggatgcgaatattcatggcctggtgccgggtccggggctgg

SEQ ID NO: 256797 - DNA, 292 bp, Homo sapiens
  chr7:357936-358228
  hypo
cacgcacattctgacggcacacccttccccgatctgcaccagatgaaacgcagagaaactccagtaacttccaaaacgatagctaaccaggaaccaaggattaccgctacacccggcccacccgaatacaccctgaattccctctgtgcagatcccaggacttctacgttctatttctggcattctgggattcagcccgttgacaaacctgccccaggccaggcccagccaggcaggtcctgagaacagggtgccactgtgcctgcgggcagcccgccgtcagctgggaggg

SEQ ID NO: 256798 - DNA, 56 bp, Homo sapiens
  chr7:361849-361905
  hypo
ggctccatccacagaccaggcggcgagtggtcagcgcacgggaggactgcccttgg

SEQ ID NO: 256799 - DNA, 180 bp, Homo sapiens
  chr7:367650-367830
  hypo
gaagtcacgggaggcgtcggtgtcagcctggtctctgggaacaggcacgtgcaaccccgagctgtccagttagccgtctggatgctccgaggccaccgtgctgtgaaactatcgcacgtggagaagccctgagaccatggggagagagagagatgcccgcctgcccgccacggctcccag

SEQ ID NO: 256800 - DNA, 258 bp, Homo sapiens
  chr7:369857-370115
  hypo
aacgtttatggccacgaagttggcaacatcaataaaaatgtaaatgcatctgccctttggcccggcaattctgcttatcctatagataccattgcgcacaggtgaggccgtctatgtgtgaaattactcactgcagcattatttacaatggcctaaaagcccgttgataagaggttgttatataaatcataatagatccataaagtgaaacacaactgtaagaaaaacgaggaggctgggcacagtggctcacacctg

SEQ ID NO: 256801 - DNA, 258 bp, Homo sapiens
  chr7:373771-374029
  hypo
cacacacacaaacgcgcacacatgcacacatgcacccacatgcacgcagaaacacacgcacaaacaaacgcgcacacatgcacacatgcatccacatgcatgcagaaacgcacacacaaacgcgcacacatgcacacatgcacccacatgcacgcagaaacacacacacaaacgtgcacacatgcacacatgcacacatgcacccacatgcacgcagaaacacacaaacgtgcacacatgcacacatgcacccacatg

SEQ ID NO: 256802 - DNA, 353 bp, Homo sapiens
  chr7:378631-378984
  hypo
ccaacccggtaccccgctctcttgcaagggtgtctgcctgtgccaattttcacagcagcgggtgggttccgtgggcctccacaggtgcctggctggacagcaacgttggtgatggctccctcatagcgacccgctctgagagaactgctagcccctttcacagatggggagactgaggctgcaaagatgagcggatttcccagagcatcagagccgggggtgggagagctggatcgctcactctcctccataccttcccaggtctagggcaggcaggactccgtgcaggacccccaagagccccgctctgtgcgacgaggatggcagcgtccagggcacgtcctggctgccgg

SEQ ID NO: 256803 - DNA, 261 bp, Homo sapiens; identical to SEQ ID NO: 211090
  chr7:380936-381197
  hypo

SEQ ID NO: 256804 - DNA, 100 bp, Homo sapiens
  chr7:388190-388290
  hypo
gctctttgccttgtcgcttgcaagcgctgggcagcctgcggggagatctgtccaacagtgccagggtccaaagaccgaggggccccgtgcaggcctgggc

SEQ ID NO: 256805 - DNA, 709 bp, Homo sapiens
  chr7:409495-410204
  hypo
tccaatccgccgtggccagacgcccggcgatcgtccactgtgccgaggccccgggccccaggctggctgcagaggcgaacgacgcggccggccccgcgctgcagacgggccgcctaccccagcggtgccaccaaggccgctctcaggctgccccacagctgcgtgccaagcccctgacgggcactttatggcacgttatctcgcctgtgccccacaacaacccggccgggtgggaattccgctcccattaaacagataaggaaccgggattcggagaggcgagggcggccccaggtcccgcgggttataaagcaagggctggacccagcccgggcccacctgactccgagcccacctgatgctccggcacgggcccacgccccgttaataaaatgtaataaatagactctttgtttcaaagaaaatgtttttaaaagcaaggcagccaagccgggcccaggtaacaagcagagggaggaggcctcagagggaggaggcctcagcttcggactcagcccaggcctggcctcccgactcccaccaccaggggcctggctgtacctgtgggggctggagccccagggcagacacttcgcagactctgtgcagggccaggtgagccccagggcggagctggcagctgagggtgctccgtggctcggtgcactggccctgactcacgaatgccgcagcgcgtcctacgggaagc

SEQ ID NO: 256806 - DNA, 653 bp, Homo sapiens
  chr7:414503-415156
  hypo
ccccactcccaccgcggcggctacctctttcctcgcacgctccatggagagctggacctgcgggccgacggagggaaccctgtacacgccccctcactcactcgccatcccctgccccaaatgcagtgaatctctcctgtggtcccggattcaccgtctccactcagagtcgctaattctagagacaaggacggccttgttccagctggaacgcacacggaatgggaaggtgaatggggtgggaagcgtgcgtgggtcctgccacttggctcgtgggcagccctctgtgctgggggtcacgtggggcccacggccgcccgtgaaggagcctcccctgatggaggagacctgagcccaggccgctgagtgagccctgaggtgtggaacttgcaggagcccacaggggtaggatgtctcacaaagggtacggggtccgtgtcggcacccacgccaccaccggaccagctgggagatcccgggctcagaggcagcctctgccccagcgtctcctgtgcagctggagacagccaggtcctcacttggggaccgagccggcctcacctgagacaggcccttctgccctcaggcctgcctctcacagcctagctgcccatcacagcttcatgttctgggcgggccgctcgacctctctg

SEQ ID NO: 256807 - DNA, 428 bp, Homo sapiens
  chr7:418417-418845
  hypo
attaatttatttttcattcacgaagaagcccgtggggtacaactgagttagagacacaggacgctgcgccggcggtgccagctcctgaacccggccacctgcagtcactcacacgtcctgggagctgacaagctcagccccactgcgtggcggcccagggccaagggtgtggaggctgccccgtctgcgcccatttcacgactgtgggactgctccacacctggggtctcaacagacccccacaccagtcctagcgtagagaaccgaggatgccctccttgcagatgacaaccccaaggccaagagcagggaagggccctggtcacccagccaggccggcagagctgtggctggaccacgccgggtgagagcctcccccacctggacgcatggtctggcccacggcctgtccccgctctcaggctgct

SEQ ID NO: 256808 - DNA, 146 bp, Homo sapiens; identical to SEQ ID NO: 211094
  chr7:429737-429883
  hypo

SEQ ID NO: 256809 - DNA, 452 bp, Homo sapiens
  chr7:431387-431839
  hypo
gtgggctccactcccgggctcacccaggccagctctggatgctgaagccaccaggcacggggctgtgtgtgcagaagcagccaggcagggcggcccagcagacgcagggagcggccgccagccgctaggatcccgatgccgccgcaagtaaggacaggcccgggtgctgccgcaggaggccaggcctgcgctcgccgctgtggaatgtgtgtttgtctgatgagcatccctgcagggccccagatggagggtgtgacaaggatgggggctgagtctccagggcccgggggcacctgcacgctgcccctggcaggggcccgggcatcccacctgagctggcagccctgagcctgagaccagggctctgactcacttctgggccgccctcctcacagagatctgagaggggctttcccggagccaggcagggaggcggccgtgcacctgcgggg

SEQ ID NO: 256810 - DNA, 51 bp, Homo sapiens
  chr7:432226-432277
  hypo
agcggtgtgcaaaccggggcccaaggccagacaagacgcaggcctacgtca

SEQ ID NO: 256811 - DNA, 190 bp, Homo sapiens
  chr7:438533-438723
  hypo
tgtcctggtgggagatctgccgtcaccctcgcattgctgtcccggtgggagatctgccgtcaccctcccgttgctgtctcagtgggagatctgccatcaccctcccgttgctgtctcagtgggagatctgccgtcaccctcccgttgctgtctcggtgggagatctgccgtcaccctcacattgctgtcc

SEQ ID NO: 256812 - DNA, 158 bp, Homo sapiens
  chr7:442389-442547
  hypo
agctctaacactgccgcttccataaagctgttttattctccctaccaccagctgacccttgaattctttcctaggtggagccaagaaccctcacaggctaagccccacattggggttcacccgtcctgcatcagcttcgcttacgggagccaaagcca

SEQ ID NO: 256813 - DNA, 35 bp, Homo sapiens
  chr7:453594-453629
  hypo
accgctcccggaccgacaccttgttttgaaagagc

SEQ ID NO: 256814 - DNA, 305 bp, Homo sapiens
  chr7:455128-455433
  hypo
gctcacgggggatgcggcctgcggtgccctccaggctcagcctgggtgacagggccaactcacggggcccgtggcctgcggagtcctccaggctcaccctgggtcacagggccagtttgcagggacagcagcctgcggtgccttccaggctcaccctgggtcacgcggccagttcgcggggcccgtggcctgcagagtcctctaggctcaccctgggtcatgcggccagttcgtggggacagcagcctgaggtgtcctccaggctcaccctgggtcacgcagtcagctcacgggggccgcggcct

SEQ ID NO: 256815 - DNA, 387 bp, Homo sapiens
  chr7:455739-456126
  hypo
gactgcagcgacgccgtggctagccaaggagctgccgagccgccgggagctcagagggcctggcgccttcctgaaactcctcatgctggtgttggggacacagaggtgggtcccacagggtgggtctgctctcgaggggcaccaagcaggggagagaagacagagcagagatcagtgagggaactgcacgccgatcccgggccagaccccgactttcacaaggagacacacgtcggggacgccagggaggcaggaaaacgttcccagacactcagcggggcccgcaggctgcccaggagcagagactccagacgttcatgccacagaggcagagagggagaggaggcactggggccccgaggctgagaggggcgcagggagcagcct

SEQ ID NO: 256816 - DNA, 206 bp, Homo sapiens
  chr7:462325-462531
  hypo
tccttctcagacaccgcgcagcctgcggggcaggggaagctcccacgaggggctgcgtgcctgacactcccctcaccctccactcaactaagctcgggcttgggggaaggaataggagagcttggagctttgtgaacggaggcagcttcttgccacctgcccagaggggaaagcctgccggcctccggggccgcatcgtctgaccc

SEQ ID NO: 256817 - DNA, 573 bp, Homo sapiens
  chr7:462738-463311
  hypo
ctcccagcatcagacggagacccccgagactcccccaacacgcccagcatcggatggaacccgggtgttggttccaggggtccccgccctatgcaccgcaccccctgctcaggccggcttatcttcgagggaataagaaagcatcgtgtccaccccaagacccccgcaggcccagtgtccccagagggccgggcgccccaggcctagtgaggaaggggcacccactgaggctgctgggagctttcagggtgaggggtgtggcaccggggacggaacgcccaggccaggtttcaggctgggattaagggtcctccagaccctccttgaattttaggagaagcacgaaggggtgggggcgtctctctcttctcttaggagatctggaggagacttcgggcactgcactgtggcctccacgacaagccgaggaacaaggccgtccacccctgagaaggccacgcagaccactcaccgagggtcctgggggctatggacagaatgtttgtgccccaaactcctgctctgaaatcctcactcctaaggtgttggtgtttggagcggggccttggggaa

SEQ ID NO: 256818 - DNA, 533 bp, Homo sapiens
  chr7:465353-465886
  hypo
gggaggccgtccgtcggtgaccagacgcctgacctcatacaccggcaatgatgcacatgtcagacccagcttgtagccgctcagcccacccgacagacagcaccagtgcccagtggcagccagccccatgcagatgaaagaaaaaggcacagcccagggcggatgcttctgaggtgcaggtgcctgtctgtcatcgggcaggagcccgcaggtggacagcatggggcccgcacacctggggaccgggcgaggggtgtggagcgccgtggggcaccctgcagcatcgggtacatctgcgtgtggacagcaggacatcaagagtcgaaaaggtgcgattaacaagttgcagaacagaacggccgtgaacccattttatctaaacgtggtgtgtgcgtgtgtgtgttcgagggtgtgcgtgtgtgtgcctgtgtgtgtgtgtgcgtgtgcgatagtgtgaactgaaaagccactgggcctctggtcaaggcagacggggccactccccccccaagcctgctcgggaactaagccca

SEQ ID NO: 256819 - DNA, 34 bp, Homo sapiens
  chr7:466110-466144
  hypo
actctagagggtggcgacccgatttgcaaatggc

SEQ ID NO: 256820 - DNA, 310 bp, Homo sapiens
  chr7:466508-466818
  hypo
ccacacacgaaggccgggcactcactctgggccaggacttgtgctgggtgcaggcggcacagcagagttgatgctgccctggcctcagagactctccctgagtgcaggcggcacaacccagtcgaggctgccctgtcctcagagactcccctgggtgcaggtggcatagctgagtcgatgccgccctgtcctcagggactctccctgggggataaggcagtgcctccctgccactccccgtgctgtgctggcaaacgtctaacaatcagcaacccaggaagaccctgactcgcagcgactgccaatttcc

SEQ ID NO: 256821 - DNA, 512 bp, Homo sapiens; identical to SEQ ID NO: 211095
  chr7:469699-470211
  hypo

SEQ ID NO: 256822 - DNA, 319 bp, Homo sapiens; identical to SEQ ID NO: 211096
  chr7:479005-479324
  hypo

SEQ ID NO: 256823 - DNA, 450 bp, Homo sapiens
  chr7:480950-481400
  hypo
ggccgcagcacataacgaggtaggaagagccggagaaggcctggctggccctgggagacacgtccatctcactgctggttcataagcatgtgggcacccgggaagctggagcgtggcctgtgtgacgtgggcgcccaccaccacgatgaggccggttcataaacatgtgggcacccgggaagctggagcgtggcctgtgtgacgtgggtgcccaccaccatgatggggccggttcataaacacgtgggcacccgggaagctggagcgtggcctgtgtgacgtgggcgcccaccaccaggatgaggctggttcataaacaggtgggcacccgggaagctggagcgtggcctgtgtggcatgggcgcccaccaccacgatggggctggttcataaaaacacgtgggcacccgggaagctggagtgtggcctgtgtgacgtgggcgcccacca

SEQ ID NO: 256824 - DNA, 35 bp, Homo sapiens; identical to SEQ ID NO: 211098
  chr7:485248-485283
  hypo

SEQ ID NO: 256825 - DNA, 137 bp, Homo sapiens
  chr7:497765-497902
  hypo
gttcctattcataccgcctggcctcaggtccacggctgcggccacagagcccatccaggaattctgctgctctcagtttacatttaaaataaatgtttccttaactcgcatctcatggccggcggtgaacggcagga

SEQ ID NO: 256826 - DNA, 1079 bp, Homo sapiens
  chr7:502958-504037
  hypo
tgggacccagcctccggggagccgtgaagccctgccgtcttgtggctccaaagccggtccaccaatgacctcgtgccagcggcatcacgacgctgcctcacaccgcacaagactcgccgggaagatgcgagacccatgacagagcccagaaaggcgacggggtggcccaaggtcacacccacgccaggcccagcactctgctcttcccgctcacccactcggccgggcctgtgccctcccgcccggccaagtgggggctccaggaagggcagcgagtgccccgcggccccggccccactgcgggcggccggaacacagagggcggtgaggaaggaggcgttccctgccgggtgccctccagcaggattcgcgaacccaggggagcgagcgggaggattttccatgtgaggccggcttcctggggcgaggcccacccggcgccagcgtggagagaggagaggagcaaagcgcctcgacacattctccctcggtgatttaatggccggagcattcgtgcgatatttatgcagtaaatccttccactggggggtttcactgtgtcacgggaggctcctcccagcccgtccccatcccgtcccccccaaaaaaagaatcctgagaaaatctcatttcacagtttcccatcgagccaggtgcacagcagctgcggtgggcatggcgggcgcgggtcctggggaacaccctctgctggcgtccgcagcccgggagggagcgtgaagtggaggatctcggcaggcgtggctgtgtccaggcaggcgggtgctgccgcgtccccggctgcagggtcttggttccccggagccacaggacggcagggcttcacggctccccggaggctgggtcccagcgctggggaaggacaccgggccctgagggccaacgccaaacccagacgacgttcaaatccagctttccgagcaaggctcacaccaccaggaaagccgatacactttctaaactccacttctgagttgaatattcgaaataggctcttaaagcaaatgttggcccccacgtcagagtcaaccatgttcatcggatgcctccagccccaccaa

SEQ ID NO: 256827 - DNA, 60 bp, Homo sapiens
  chr7:531100-531160
  hypo
gccggatgctggtgcgtggctgggtgaccgggggccggatcataaatactgcacattttt

SEQ ID NO: 256828 - DNA, 408 bp, Homo sapiens
  chr7:531190-531598
  hypo
ggctgttttattctgtagaaaccacacgcttttcatctgagtaccctcagggagtggggttggactccagctgtgccaggccagggtgggagtccagggggcaggccaactcccgcttgctgcagtcacctttgaggccccgctgggtcccggctcccaccccagggagaacgggagcagcctcaaatgctgacggcgaagacccagggcccccagaagtgcgagggcctccttcagtgcccgctcggggccagggactctgccaagtgacctggtgtgcccagaaaggactcagcccccagcgctgggcagggcaaggtggcctgggaagtccttcagggagggcaggcagggacgcttcaagagcctggggtctagaggtctcatggtgccggccctcaccacagc

SEQ ID NO: 256829 - DNA, 107 bp, Homo sapiens
  chr7:532034-532141
  hypo
ccggccactcactccgttttcccagctgccgccccatcagaaaagtcctgcgcttcaaccccgttccttcagcctgggcagcccccctgctccggttcccctgtgcc

SEQ ID NO: 256830 - DNA, 102 bp, Homo sapiens
  chr7:533202-533304
  hypo
cctggacgacagagccagactgcgtctcaaaaaagaaaagaaaagaaaggctgggcgaggcaggcgggtcccctggacactgggggacgatcccgcggcagg

SEQ ID NO: 256831 - DNA, 188 bp, Homo sapiens
  chr7:534692-534880
  hypo
cacttggggagctcccgccccaatgctgctccggagtctggggcccagcccacccctggggtggggcagagtcaaggcccaggagatggaagggcccctggatgcccggccacagcacaagtcctgcctctctgtgtcctgcgacccttctacttggggccccctaggcgttccgggcctgccagggg

SEQ ID NO: 256832 - DNA, 292 bp, Homo sapiens
  chr7:540523-540815
  hypo
ctcctgccagtgccgcagcttgggccaccctccccaccggacacctgcaggtgtgggatccgtctcccccgcaggcatctggcccgggagcagggcaacgaatccttcaacagcagcccagatgctcacagcagtaagcgttgcgctcaagggggccacctaacaccccaaaagcaaggctctgaagacctgttctccaacaccgatgccgacgaaggcagccactcacccgtgtcctcttcccgataatccggattcaggcttgtggtcgcgcaggcgcactccaaatgct

SEQ ID NO: 256833 - DNA, 159 bp, Homo sapiens
  chr7:544945-545104
  hypo
ccttatcacaccagacattccgattccccacggctgagttcatctgcgtcgtaagccgccccacctcaacactcccggcgcgaactcacccaagactacaacccagggatgccgtcacccctctagacctgggatgccgagtccctactgctacaaagc

SEQ ID NO: 256834 - DNA, 201 bp, Homo sapiens; identical to SEQ ID NO: 211101
  chr7:545346-545547
  hypo

SEQ ID NO: 256835 - DNA, 697 bp, Homo sapiens
  chr7:551453-552150
  hypo
caaaatatcccccaaatggacgcgggggtggagccctggagccaggtgtgagtggggcggggcacacgggtgtggtgagggtgtcggggggcagccgccggacacagcacgcgcgtccccaccagttcagcagccggcgcaggagcacgatgcccacactgcgaattggaaattaggcgcgaccacgtttccggcaaggctcctggggacaggccccgacaagacagggcgcttaaggaatttatgatggctcttctctcctggaagctctcttggcccagaccaggactccaggaggagcaggcgggctggggcaggagacaccctcgaaggagggaggcctcgggagaggccagagccagaggcaccagggccaggcctattttagggaggagggaacgggtggcttgcctgaggccactgcgctgggagagcgggcagctcctccccacccggccctgccctgcccatcgcggcctcctggactcaccctgacccggccctgccctgcccatcgcggcctcctggactcaccgatgcttctcttcctccgaatgggcaggggccgcttctcgggcacatgcttagtggcatggaccccgtgagctctcaggctggtgtccaaagaatcctcactccctgcaggcggaaggagaacaccgtgaatgccccaggcccgtgcgctgtgccctgggcc

SEQ ID NO: 256836 - DNA, 42 bp, Homo sapiens
  chr7:553000-553042
  hypo
tctcaggtctctccaaatcccgcagtagggagaggacccaca

SEQ ID NO: 256837 - DNA, 209 bp, Homo sapiens
  chr7:564178-564387
  hypo
tgctggggacacggcgttaagaccaggccctcacggagccctcactctctgaggaggaacaataagtcagagagcgcgcgagtgcagcccttcaggcaaaggatttcaggcccaggtcaggaaggccttgtctgaggagtctgagaagaagtcaattgacaacagctagaacatctaggtcaggcactccaggccgacacgacaaagca

SEQ ID NO: 256838 - DNA, 73 bp, Homo sapiens
  chr7:576731-576804
  hypo
gtggttgttaggtgtcggtttctcaccctgcagctgcttgagtgtcctcacaacatggcggctggcatcccgg

SEQ ID NO: 256839 - DNA, 150 bp, Homo sapiens
  chr7:577692-577842
  hypo
ggttgtgggcggcccggccaggccctgcttaggttctggggtgcactgcaggggtgcacagcaggagtgcgctgcggtggatcagggccgtggagggcccagcctggggctgacctgaccagagcccaggggagccggggtccctggagg

SEQ ID NO: 256840 - DNA, 428 bp, Homo sapiens
  chr7:578810-579238
  hypo
ggaaggacccttccagctggcggggggctcccgtttggggacaagtgcctcagctacgccggtggagccttggtgaggaacccctgtgcccccactcactgcgggcagaggcaccacctctgggggccggtgtgaagccagactcctagccagccctgcagcctgtcccaggggccagtagaaccgggagggggccgggtgtgtaactgcctcctgaggccggcgagtagattcctgaggctcagggcggtgccctcctctacctgcccacacactccaagggagcttcagtccccacctgccagctggaacaggggctccctgagggcccgagtccccaacgctaacacaggaggcaccagggagcgtctgcggaattaaaccaacactctgtgtgcacgtcacacgtttagcggacacaggcccag

SEQ ID NO: 256841 - DNA, 31 bp, Homo sapiens; identical to SEQ ID NO: 210108
  chr7:587416-587447
  hypo

SEQ ID NO: 256842 - DNA, 148 bp, Homo sapiens
  chr7:589082-589230
  hypo
ctcgcttgtctttcgggggaacccaggaatcccctgggaagcttctctgcactggcctcaccctttcgggcctggctggctcacgtcatcactgcgggatccaagacacatttaagggacaagtcggttgagcgggtcggggcgtgtg

SEQ ID NO: 256843 - DNA, 131 bp, Homo sapiens
  chr7:593561-593692
  hypo
cagaccgggcggctgagtgccgccactgtgggcagggggagacagggagcgtgccctcagccgggtgcccacagactcagaccccgggcgctggagagagggaagactccgtgggcccccacccacaggaa

SEQ ID NO: 256844 - DNA, 607 bp, Homo sapiens
  chr7:601255-601862
  hypo
ccggctggccgagacggaactgatgtacgtcacacaccctgggctgcaaactgtcctcgggacgacagcgaaaacacacttcagcgggcgagccgcccaaggtcagctcctgtgccagcgtttaatggatcatccatgaggtctggggcccggcaaaggcacggcccagcagcttccgtgggaaacaagccgttcccgcggacgtcggcgccagggcttggggtgggaacaggtgcggggctgcgtccgcccccgcctgcatgccagagtgaggcaggcctggccccgtgtgagacgagcctttccttctgcaaacccagttatcccctcggttgtctctgcagccaggcactgtccgtcccgggacctacgcagctgccatggaagctccggtgggtgctcccggcgcggccggggggtgggggtgacgagatgcctgtggctgcgccagcaaccacggttaggtgagaagcgtggaaggaaaggggcatgtggctgcccgggccttgccctcaatgcccttctgtggcccagttactcccggccatctgtgtgggagtctctgcaggttccggggaaccagggcgagcacaggccccaggctaca

SEQ ID NO: 256845 - DNA, 358 bp, Homo sapiens
  chr7:612444-612802
  hypo
cacagggcatctgcgacccaccaaggccgtgatttacaaaacaatgtgctttagaaactgctggaggaagaatgacagtgagcagacagggcaggacgccggccccagggagagcgagggaccggcatctcctccacgcgctgcttcaagaaaaacaaacggcggccacgagggcagccactgagcctccagcgcctgccgagaagccgccccaccggccgggccccgccgcacctgtctgatgctgtcggtggccgccctggacgtgcggtccacagctggaaaccgcaataagctgcgaagcgcgtcggttccgagcctctgatccctgcaccccggggtcacactgacttaccaa

SEQ ID NO: 256846 - DNA, 472 bp, Homo sapiens
  chr7:617512-617984
  hypo
cccgctaggcagtgcgctgagggtagcagctcagggcgcttttgcagtcccatttatacccactttaaattatgtgcacattaaggggtgggttatacacagctctctggttaagggtggtaattttccgggtcatcagaccacattgccatggaaaggggcgggagcgcccgggtgttgtcatggcaacggtaaactgacaatggtgcacgggtgggcgtggcttacggagagtggcttgcaccctggccctgttttagccagtcctcaattaggtccagtgtcccagccccacctctggagtcgagtcccacctgctaactctcaggcacggagtccctcgccggcacccggaatgggagttcacacgcgaattcctgccgtgtcctcaggacagctgctcggcccacccaacagtctgcgtgcggccaccacggactgcggccccagcacatcccgggagctccacgga

SEQ ID NO: 256847 - DNA, 868 bp, Homo sapiens
  chr7:622700-623568
  hypo
ggcagggggggtgacggctcacagggacggggctctgtctcgggtgaggacggggctctgggatgggagcggtgccgacaacgtcgtgtgtagactcaacggccctgaaatgcgcttccgggaaaggtcaaaacggtcggcgtgctgtgacgtgcattttaccacaatggaaagacccgcacgctcctttctcgacatttcacagaaggatttcagagagaacaggggtcaaagtcctccccaagaaggaacacaggcacagccacactgcatacacacacgtgcacacacacaggcgcacacacccactcacacatgtgcacactcacaccccccacacgtgtgcacacccacgcacacacgcacacacccacagtgcacactcacacccactcacacacgtgcactcacacccacgcacacacgtgtgtgcacacccatacacacccacacacgcgtgcacacacccactcacacacgtgccaaacacatgcgtgcacacccatgcacacacacttgcacactcccaggtgcacacacaccccctcacacgtgcacactcaaacccccacactcacatgcatgcacacccatgcgcacacacccacacacaacccacacggtgcactcacaccctcacacacgtgcaattcacacgcattctacacacatgcacacacccatgcatgtgcactcgcacccatgcacactcacgtgtacacccatgtgcactcacatgcacactcatgcacacacacgcacacacacccccatgtgcacactcacccccacacacctgcacggttctgcctgctctagcccaaggagcccccactggcccagctggcgccatcgcgtataactcagg

SEQ ID NO: 256848 - DNA, 39 bp, Homo sapiens; identical to SEQ ID NO: 211110
  chr7:635126-635165
  hypo

SEQ ID NO: 256849 - DNA, 36 bp, Homo sapiens; identical to SEQ ID NO: 211111
  chr7:636569-636605
  hypo

SEQ ID NO: 256850 - DNA, 42 bp, Homo sapiens
  chr7:649823-649865
  hypo
gtggctgcaccccagtgactcgaggctcacgttccactcacg

SEQ ID NO: 256851 - DNA, 151 bp, Homo sapiens; identical to SEQ ID NO: 211112
  chr7:653116-653267
  hypo

SEQ ID NO: 256852 - DNA, 292 bp, Homo sapiens; identical to SEQ ID NO: 211113
  chr7:653525-653817
  hypo

SEQ ID NO: 256853 - DNA, 76 bp, Homo sapiens
  chr7:661919-661995
  hypo
attcagaagagcagcgaggtgaggggtggcagcaaggacccccgcgccacacagggcctcccgctcactcctcccg

SEQ ID NO: 256854 - DNA, 330 bp, Homo sapiens
  chr7:667314-667644
  hypo
gggtgggcaggggctcgggcgctctccatccagagccccccgcccagctcacgcccgccctccccgggcactgggggaggaggtgagcacccgccactcaggctcaggcagcctggaagatccaggccacgactgccagcgctcaactccactcggccctcactggtattttccgagtgcccgctatgtacaggcaggtctgtgctgggcgccaggttgccgggaaatggggcacacacagcccctgtctcataaaggcaccagcaaaacaggggtgaacatcgaatgggtggggcccttctgactgtcactcacggaacaaacacaggc

SEQ ID NO: 256855 - DNA, 68 bp, Homo sapiens; identical to SEQ ID NO: 211115
  chr7:671703-671771
  hypo

SEQ ID NO: 256856 - DNA, 151 bp, Homo sapiens; identical to SEQ ID NO: 211116
  chr7:675431-675582
  hypo

SEQ ID NO: 256857 - DNA, 69 bp, Homo sapiens
  chr7:711712-711781
  hypo
tcccagaaccctgcacggagcctggcacacaatgaatcctctggaagtatttgtcgtcttaaattctgt

SEQ ID NO: 256858 - DNA, 346 bp, Homo sapiens
  chr7:716115-716461
  hypo
catgcggaagaggccggaacacgaagcccacggtaatcacaccacctgtgcctgcctaggtatagcgcgcgggggaaccgcagatccagaccccctatttgaggaaggcagccgggccttcccagagcagggactcagctcggcagcagggcaggtgcacgcagcatagtatttcgggaagccacccctgcgtggtgagcccacgtttcctgagagctgtgacacgcttctcctggcgccgagcgttctgtattccatggcccatgagtcagagaaacggcaaagcctccctggaggccggggagggcggcggtgattcccaggagagcaacgggggctgcctacc

SEQ ID NO: 256859 - DNA, 280 bp, Homo sapiens
  chr7:716715-716995
  hypo
ctgtgattcccaggcgagcaacgggggctgcccacctcctggaggccagggagggaggcagtgatgcccaggcaagtggcgggacctgcccacctcccggaggccgaggagggcggcggtgatgccggggcaggggacgagtctgcctacctcctctcgttgtcatccaggtgagcgaagagcacgttcttggagatggccttggccagcgcagtcatggttttgtagtccttgggaatcacctgaagcggagccaacacatcaccgtgtgagccaccct

SEQ ID NO: 256860 - DNA, 101 bp, Homo sapiens
  chr7:738373-738474
  hypo
tgcatgtgcacacacgactccacgtaccctcctcctcggtggcaacagtacatccttgcctgtgtgtgcatgtgtgtgcatctgggcgagtgtgtgtacat

SEQ ID NO: 256861 - DNA, 31 bp, Homo sapiens
  chr7:744080-744111
  hypo
atgtaacaacttaaatgaaacggaacaatgc

SEQ ID NO: 256862 - DNA, 92 bp, Homo sapiens
  chr7:746773-746865
  hypo
agctccatttgagaatccatcgcaagctaagaggaattcttcccagttaaacgcacccacatgtagaacacgcatgcaacttcaaagacttc

SEQ ID NO: 256863 - DNA, 89 bp, Homo sapiens; identical to SEQ ID NO: 211117
  chr7:778948-779037
  hypo

SEQ ID NO: 256864 - DNA, 82 bp, Homo sapiens; identical to SEQ ID NO: 211118
  chr7:799679-799761
  hypo

SEQ ID NO: 256865 - DNA, 632 bp, Homo sapiens
  chr7:803211-803843
  hypo
cgctgcagagacggcgttggtgtgaacgggatcagggtctcgccctgcacccgcggctctcgctctcctgcaccctgggcggggctccctgtggcagcctccctcccgattatcctggcaggcccggcctgtgtggttcttacgcgtgagggggatagtgagtcccagcaggcaggcaggcttgagccctgagtgttggaattgtctcagtctctgacttgtaacctccaggcacaggagacgatggactcactggccatggtggagggtgtcagcagctgccaggacctctaccgcaagcacattggtcccctcctggagcgggtgaccgcgtcgcaccttgactggaccgcacactcgccggagctcctgcagttcagtgtcatcgtcgcacagtcaggtgagccgtcccgacagctggcgtgccgtgcctggccccactcaggctacacacctgctcccccaggtgctcagcaggtaccagcgccgaccagctgagctgtggttcactgaagcgtgttgttaaaagtacccaatagtcactcttgcctggggagaagcagcattttaaggagcatcgcattgaagactgtgggacgcagctcttccacttggcccgggcacacgctttc

SEQ ID NO: 256866 - DNA, 432 bp, Homo sapiens
  chr7:807333-807765
  hypo
acacgtgatcagggcggaagtgtccgtgctgcgaggcggagctggcgctgggaggggagacacgtgatccgggcggaagtgtccgtgctgccagcaggagctcccgctgggagggcagacacgtggtccgggtggaagtgtccctgctgcgagcaggagctcacgctgggagggcagacacatggtccggtggaagtgtccctgctgcaagcaggagcgctagtgctgggagggcggacacgtggctccgggcagaagtgtccgccagcaggagcgctcgtgcttggaaggtagacacgtggcccgggcggaagtgtccttgcagcgagcaggagctggcgctgggagggcagacacgtggtccgggcggaagtgtccgtgcagcgagcgggagctcgcgctgggagcggagacaggtgatctgggcggaag

SEQ ID NO: 256867 - DNA, 266 bp, Homo sapiens
  chr7:807795-808061
  hypo
gcgcagacacgtggtccaggcggaagtgtccatgctgcagcaggagctcgcactgggaggggagacacgtgatcagggcggaagtgtccgtgctgcgaggaggagctagcgctgggaggggagacacgtggtctgggcggaagtgtccgtgctgcgagcaggagctctcgctgggagggcagacacgtgatcctggcggaagtgtctgtgctgtgagccgcagctcacactgggagggaagacacgtggtccgggcggaagtgtct

SEQ ID NO: 256868 - DNA, 867 bp, Homo sapiens
  chr7:808384-809251
  hypo
ggctcacccgtcagcgtgcttctttttcccatcccaggagttggacttgacctgtggacatttggctgttttctttttgtttttaagccagaaacactgtcttgtttccagtttaagatgtagagagggtgaaacagtcagaaactgggtcagaagcagcgtggttctcgtggcagggcggcacttggcccaagactcgtgctctggcgggaggctcaagtcaggcgtcccagcagcttcggtgcaacgcctcctgcccggctgcgtggggaggccctccaagacaccagctggtctcaccgcgaggcctgacttcgagccagagcagcgagtacattgcgtctccgtgtggcaagggcaggtgcgggggtctcagtccactaccgagcagcctgctctgatgactggcggcgccagggagaaggctcacatcgcgaggtccccagcaacggctcaaggtgactcacagttgcttggataagccagtggacgctccctctacactggcccggggccagagcgcctccttctgcggccccaacccagtccccaccctgagccttcagctcctgggcctgcaggctgagcctggcaggagacgctgcagggactctcagagctgtccttgccctgtcattcatggagacttacagggaggcggggcggccctactgcagtggggaccccttggggcgtaggatgcacagtgcaggcgcccaagcctcgcgcccaccggagagcagccacggtgcaggagcttggccctgagtgtgggcggggtgagggctgcaacgctgagaagcagatattaaagaagttctttcactgaaacaattgattttggtcgttgtttcaactattgcttga

SEQ ID NO: 256869 - DNA, 245 bp, Homo sapiens; identical to SEQ ID NO: 211123
  chr7:818258-818503
  hypo

SEQ ID NO: 256870 - DNA, 479 bp, Homo sapiens
  chr7:819362-819841
  hypo
agcagggcctgggccgcctccactctgttggctggggttcaggggtcccaggtcgccaggagcaccttgcatgtggctcgggatgcacggagtctcccgtgaggtgtgggtttcttaggaccccagggcaggtgtcccatgggagtatgaactaaatgcctttgtggacgtttagacgtgaaatgtctgctctagactcacacacctgtctcgctccctccttccagaactcttaaaacgcctagatgacgtgtccaacgatgtgaggatggcagccgcctccaccttggtcacctggctgcagtgtgtcaagggtgccaacgcaaaatcctactatcagagcagtgtccagtacctgtaccgagagttgctggttcaccttgacgatccagagagggccatccaggatgcaattttaggtgagactccgacggcttggccttcgttccgatgcctgctttcggcgcctgccacgggca

SEQ ID NO: 256871 - DNA, 118 bp, Homo sapiens
  chr7:822530-822648
  hypo
aactcgatcttcctggcgtggccacctcccctccggcggcatcagaaactcggatcgtcctggggtggctgctcttgttacgcaacgtcagaaactctcctgcgtgggcaccaggctc

SEQ ID NO: 256872 - DNA, 69 bp, Homo sapiens
  chr7:825191-825260
  hypo
ctggtgagggagacggaggccgtcatccacaagcaccgctcggccacctactgcgagcagctcctgcag

SEQ ID NO: 256873 - DNA, 986 bp, Homo sapiens
  chr7:834225-835211
  hypo
cagtctgcagtgcagggatccgggtccaggggatgtctctgagcccccaatcctttacggggccttttcctggggtccctgtgggctccatcccgggatgcaggacagagatgtgggatgcggaagggttccccgcagggatccaggtccgggggcaggaggagcccagagggtggcaccatcacgcaaaggcctccagaggcgtggcccgggacaagcacagcgccagccgcctgcgctgccagggcagggtccacacccacagactgtaacctggacccgggcagggcggggtccacacccacagactgtaacctggacccaggtggggtccacacccgcggactgtaacctggacctgggcagggcagggtccacacccgcggactgtaacctggacccgggcagggcggggtccacacccttggactgtaacctggacccgggcagggcggggtccgcacccgcggactgtaacctggacccgggcagggcggggtccgcacccgcggactctaacctggacccaggcagggcagggtccatccacacccacagaatctaacctggactggggcagggcctaaacccagggactctaacctggacccgggcaggggaagggtccacacccgcagactctaacctggaccagagcctgggagggtccacacccgcagaatctaacctggacctgggcagggcagggtccacacccacagagtctgtctaatctgcagaggacaagggtggggtctcccacagagccagcctgaggggtgggtgcacctgaggggtgggcgcacctgaggggtgggctcgtcgccctctgcctcatgctggcaggacccgagaggcctgggagtgctgggaactgagaaacagtcatcaccaattaaaagtcccgctgccttttattaacaccatgcgtcacccttctgtacaatatcagtgagaaaacactcgcctaaaaaaaaccttttgtt

SEQ ID NO: 256874 - DNA, 106 bp, Homo sapiens
  chr7:872193-872299
  hypo
tccccagtgtgtgccggagaacacgggctacacgtatgcgctcaggtgagtgtgcacctgcacgtggggtcctggccttgcaatgcccactcgctgtcgcggtggc

SEQ ID NO: 256875 - DNA, 141 bp, Homo sapiens
  chr7:874775-874916
  hypo
atagtgacaagcccatttgccggccactggcttcgccagtgatgcatgcgggtcttccgcccccacccagcacttcggagcctctgcgactggtgcttcagttcacgggttccccagcccgctgtcctgcaccagtggcct

SEQ ID NO: 256876 - DNA, 35 bp, Homo sapiens; identical to SEQ ID NO: 211128
  chr7:878053-878088
  hypo

SEQ ID NO: 256877 - DNA, 122 bp, Homo sapiens; identical to SEQ ID NO: 211129
  chr7:882990-883112
  hypo

SEQ ID NO: 256878 - DNA, 182 bp, Homo sapiens
  chr7:889350-889532
  hypo
tcactgatgacgacgggctgttggagctgctgcttaagccctcatcacagaagctcatagccaccagatcgcatttgctttgattgttgactgtctcgtgtgtaattgagtttcccagtttctacagactgccattgctatgcacggctgagatggacagagtttgcttgtgaatccgccac

SEQ ID NO: 256879 - DNA, 463 bp, Homo sapiens
  chr7:899731-900194
  hypo
taggacatttgtgtccgtctgctgttttactaggtggacgtgcaagtcagagaaatggtgaaactcctgttttccgaagatcagcaaggcggttctctggaacagctgctgcagaggttctcatcacagtttgtgagcaaaggcgacttgcagacgatgctgcgagacctgcagctgcagatcctgcggaacgtcacccaccacgtttccgtgaccaagcagctcccaacctcagaagccgtggtgtctgctgtgagcgaggcgggggcgtctggaataacagaggcggtgagtcggcgagtcggcggcaagagatgcttacagtccattctgtgctgagactgaagacctagctgtgaggtgtggatgttgatgtcttgttttaagagtggtctggctggggtgtgcttagctgacgtaagtgagatgagacgtgcctgggcagtgccgtgtgtggaggggg

SEQ ID NO: 256880 - DNA, 382 bp, Homo sapiens
  chr7:902843-903225
  hypo
ggcccctggagtgccgccctcccgagctcgcccttgctgcccagcattcaccagcgccagggcccctggagtgccgccctcccgagctcgcccttgctgcccggcgttcaccagcgccagggcccctggagtgccgccctcccgagctcgcccttgctgcccggggttgtgtgctgccttcacggccaacttggtttttgtttcttgggggttttttgtcctgctttgacaacaacattctgcctgtcctgtatcctactaagggccaaactggacttgttttttatgcttcctcttattattgagatgtaattcacacaaaaattcagcgtttttaaatgtacagctccgtggctattaacatattcgcggtgcagccatc

SEQ ID NO: 256881 - DNA, 451 bp, Homo sapiens
  chr7:907651-908102
  hypo
agcagttcaaggctcagctccgtcttcacagcgcggtagaagacggcttgggggctgaggggcagtaaatccacagctggcatagaggagaagccggcgggtacgtgcccatcgttcaccatctcttctaaacacgaatgaaatgcgtgtgtcgtcctcacacactgaaggcaggctgcgtgcacggtctcctcctccgttgcgcacagcaacgtggctgcctgggcgcagcgtctgcaacttgtcagtcagtccctgtgtgtgcctggggacgctgtgctgcgaacagtgctctccggtcacatctgccctgcacctggaggtgggggtgcgatcgcaggccagaggcagatgtgtgcgcagcaggccgaccttgccaggctgtgcttctggggctgcaggctgcaccgtggccgggttaggttagaacgtgcattttcccagggcatca

SEQ ID NO: 256882 - DNA, 335 bp, Homo sapiens
  chr7:915052-915387
  hypo
ggctgaccctgtaaatccaacggaggagtcttcggaccgaacggcgaaccgccttcaaaccccaattcttacagccaagccgttcccaaccctgcacggctagggctgggcctcaggccccgtttctaactctgactggggtttggaccccgtttccgcagcctgacagggctggaagctctaggccgacccagttcccccttccagcaggacccgatcctggaggagtgagccgtccacccaggcacagccgcaggtccccagccacggccagggaaggaccgcaggtggcctttcaaagaggaggaacgcccctcagcgatcctaagaggttg

SEQ ID NO: 256883 - DNA, 92 bp, Homo sapiens
  chr7:920453-920545
  hypo
agagtattccatgggtgtatcgccgccagagaagtcacattccccaagttacgctttttgttttttgagacagagtcttgctctgtcgctca

SEQ ID NO: 256884 - DNA, 392 bp, Homo sapiens
  chr7:920785-921177
  hypo
gccatagcacccagccattttttaaaatgcttttatgtcaataaatatatgtaattgcacatttacatttaaatatttatgtaaaatgtataatttggtgaggtctgacatgaatgaactatgaccagtcaagacacagaagataccacggcactgtggggctctgcaaccaggcctcctcgcccccactcccaccccaccccaccccatccccggcacccgtgcatctgcgggctgcacttaggtgaggtggtgtttcctggagttttacgtatgtggaatcacagtgcgcactttctgtctaaccgcttgaattcattcaccacggaggctgggagactcctcctggagcgtccgcagttccttttatcgctgagtggttttccctgtgt

SEQ ID NO: 256885 - DNA, 44 bp, Homo sapiens; identical to SEQ ID NO: 211136
  chr7:921709-921753
  hypo

SEQ ID NO: 256886 - DNA, 221 bp, Homo sapiens
  chr7:923637-923858
  hypo
accaggccgggggccgtgaccatcggcagtgccccccagagcaggctcctcgtgcaggaatatgggtcactgccttccagggagtcctttttttcttctggtttctaagtcgccacctcttgctttacctcagatagaagcatccagaacgctgtagtatcggcaaagcagaagctggtgtggtgcttgctcagggtcggtgcatgcggttctgcccgtgg

SEQ ID NO: 256887 - DNA, 777 bp, Homo sapiens; identical to SEQ ID NO: 211137
  chr7:925619-926396
  hypo

SEQ ID NO: 256888 - DNA, 68 bp, Homo sapiens; identical to SEQ ID NO: 211138
  chr7:931095-931163
  hypo

SEQ ID NO: 256889 - DNA, 66 bp, Homo sapiens
  chr7:931798-931864
  hypo
gggccgcaggaaccgtgggcgcacgagcttgggaaggacatgtcggaggccggcgcctgtgcgggc

SEQ ID NO: 256890 - DNA, 273 bp, Homo sapiens
  chr7:933055-933328
  hypo
ggtgagtgttgggtgcaggcatggttgcaggtgagtgttgggcgcgggcgcggtggtttgtgcaggtgagtgttgggtgcgggcatggtggttgcaggtgagtgttgggtgtaggcgtggtggtgtgtgcaggtgagtgttgggcgtaggcgtggtggttgcaggtgagtgttgggcatgggcgcggtgtgtgcaggtgagtgttgggcgcgggcgtggtggtgtgtgcaggtgagtgttgggcgcaggcgcggtggtttgtgcaggtgagtg

SEQ ID NO: 256891 - DNA, 634 bp, Homo sapiens
  chr7:943348-943982
  hypo
ccagagccggctaccgtccacatctcctccccgtaggaccccagttccccccgaggtcccctctgggcattgtgggggcggtggatcctctagcccgagctggcagcccccactgacagggccaagctgggtggccccagagacagcgtggtgatccggctcctgggcagcccggccctgggaagctgccttcctgcacctgtcttcccatgctgcccggcgccagtgcccacactcccacacgtccaagcacccgccttcccacgctgcccagcccgacttcccgccttctcatgccgcctagctcaagtgcctaccctcccgtaccgtccaagcacccaccttcctgcgccacccgggcctgagggcccaccctcctgtgccacccgggcccgagtgctcgccagcacccaccttcccgtcctcatggtagatgaagatgttacgggtgctgttgtccttcaggtaggtgacctgcaggccgtgggggtggccgatcttggccggctggaaggtggcgttcaggtgctcgatcttcatcacggccttgggctccttggcctgagaaggggtggggtctaagcacctcacaggggccgtcgtccaagctcaagggagcaggaagggcagaccc

SEQ ID NO: 256892 - DNA, 117 bp, Homo sapiens; identical to SEQ ID NO: 211140
  chr7:944012-944129
  hypo

SEQ ID NO: 256893 - DNA, 152 bp, Homo sapiens; identical to SEQ ID NO: 211141
  chr7:955105-955257
  hypo

SEQ ID NO: 256894 - DNA, 301 bp, Homo sapiens
  chr7:955484-955785
  hypo
gaacccagaacccgcgcccactttccacgagacgctgtctgccacccgcctgcagaacccagaacccgcgcccactttccacgagatgccgtctgccacctgcctgcagaacccacgcccactgcccacgagacactgtctgccacctgcacgcacccccacttctggagcccagacctgatcttccccagaagggccactccaggggccagaggcgggcacgccacctagggcgccacgtttcccaagtcacatcccggcccgaccagtcagaggtgacgagacagggactttttccagc

SEQ ID NO: 256895 - DNA, 522 bp, Homo sapiens
  chr7:959552-960074
  hypo
gagagccagggagaggtagccgggaggccccaccccacccgggtggcctcacctgccgagtagggctcctgcttctccgggtagatgaactcctgtcgctcgtacttggcccggatccactgctctcgaaggagcctgtggggagaggagagactgagccactgggccaaggcggcctccgacccagcacacgccgctctctggcccggaccctggacatctcaagaggctcatagggacccccggcagactcgagccgcccctctgggcacaagatcccggaagaaatgcagggtcagcctcctgcccgggacgcttctcactctgatattagtttattggtttcttgtgcgttcggcccccggagcatcaggcctcacgttctgcacaagcgttcccggtggacgggctggtgcctcccctctccttcccaccttggcctcagctgatgccccacagggctggggtacaggggttgagccaggcccccccaccccgagtcacacgcccctgggccctccc

SEQ ID NO: 256896 - DNA, 210 bp, Homo sapiens; identical to SEQ ID NO: 211143
  chr7:960104-960314
  hypo

SEQ ID NO: 256897 - DNA, 180 bp, Homo sapiens
  chr7:960590-960770
  hypo
tgggcgggaatcctcgcccacaggatctgatgggtgatgggtcccagctgggtctctggcccctggccccaggtgtgtgtgtgtcccccacctgctacaacgatcaccccaaaattcggtccccgaaagcaacagaaatgtatcatctcggtcacggaggccaaacgtctgagatcaagg

SEQ ID NO: 256898 - DNA, 725 bp, Homo sapiens
  chr7:965798-966523
  hypo
cccacgtccgctcccgccctgaggagccagggcaggccccgaaacaacagccgcccctcccgttcccctcccagaccgccaggagcacctgggagggcccctcagatccacccgagacccccaaggcctcagcgaacctgggtgggctgtagctactgatgcacaatgaccttcccagccccaccccagcgccccccgccccagaaccaaagcccggtggtggccagcagacacaggcggcacctcggggtctgggggacgcagctgcggctggcttctccccgaccctgtgggcggcacccaactccccaccctgccgggtcctcccggggccatctcggagccacccagcacttgaccatggccctgacaaggcccctttgtactcactggcagtcggagggcgtgggccggtagtagaaggagggtactttggactcaaacctggctctcgcggcgtcgttcccgtgggaggccatgaactgcaagagaggaggggccgggtcagaggcctggggtcccaggggcagcctaggaggtgccagctgcccttggggccgtcaccacagtgacccgcagacccaaggctctgagggctccaccagcaccaggacgggaacgccacctcctcctgccccagggacaccatttctgagtgatcgaccctcccctgggacagggaaggagccagcgtccctaacgacggggtcccggcaaagggggcc

SEQ ID NO: 256899 - DNA, 142 bp, Homo sapiens
  chr7:966926-967068
  hypo
cacactgtgctcctggcaggcgcaaaggccctgagggtggacgctggcaatgaccctgccgccagccaggtatggtgagccttgagcagcaggaggggccgccacaccccacgccagccccgagggcatgggagaggttctg

SEQ ID NO: 256900 - DNA, 120 bp, Homo sapiens
  chr7:984884-985004
  hypo
gcagcccatcggagcgaaaaggggcggggcacgcactctcagagaccctccagggtggaaggggagctggtctgacgccccagcagcagggcccccacaggcccacgcaggagagcctct

SEQ ID NO: 256901 - DNA, 182 bp, Homo sapiens
  chr7:985370-985552
  hypo
cctcctcccagccccgctctgccctacctgctcccaggacgcccgaggtgactcagccgctcaccatttccggagctggtctggggcacctgggcaggtgagccacattcttgggcggagccaggtggggcaggcgtgtcccccaagccaaggcccaggctggggcacgggcagggggaagg

SEQ ID NO: 256902 - DNA, 398 bp, Homo sapiens
  chr7:986124-986522
  hypo
ctcccagcagcacccggacacagtccattttcagaatcccccaaggacccccccaggctctgccctgcccctgccctcccaccctctctccctcctggtgctccagccccatggcgggaaccccacggtgaaggccatccccagtcctccctggacccaccctgtcccggagcccactctctggggcccccaccccgcgcccctccaggctcttcagggccctcgcacagggccgactcctctgcggcccatctggtctctcggctgtcaaaccctatttttggaactcgatagaggtggtggttgaacagcatggagaacgttctaaatgccactgaattttcactttgaaatgattaacctgaggccgggcggggcggctcacgcctgcaatctca

SEQ ID NO: 256903 - DNA, 98 bp, Homo sapiens; identical to SEQ ID NO: 211148
  chr7:986582-986680
  hypo

SEQ ID NO: 256904 - DNA, 233 bp, Homo sapiens
  chr7:987221-987454
  hypo
ctactctgcccaccacaccccgacatcccgttgaccagcaaatatttcaagacgatccaggctttgaccctccccacactcacgccccgccctaggcctagccaccgccacccggcctcggtcactgcagcagcgtcccacccacctcccgctcccgcgctggccctacctgccctggaccctgtgacgcgtcgtgggctgggacactcctcggctcacagaattcccatggt

SEQ ID NO: 256905 - DNA, 42 bp, Homo sapiens
  chr7:988731-988773
  hypo
agtgaagggctggtctggtccggtctccctgagccccagtga

SEQ ID NO: 256906 - DNA, 317 bp, Homo sapiens
  chr7:996951-997268
  hypo
ccatctactgcctgctgttccggggcctcctccgtggggcagctccagcaggcgagtgtcttgccttctctgtccttccatcccgctaagggaactgtggcattgctcggggggcaggagggcgtgaggatgagacagaggtgggtgaacccctcagatctaagagatgtcggggctgagggggattcttccaaagaggaggctgctcggccgagatccgcaagtacctgcctggacccgagagcacagccgtcctgaaatcctgctgccctgactggctgtggtcagggctgggcggggcagtaggggagcccagg

SEQ ID NO: 256907 - DNA, 62 bp, Homo sapiens
  chr7:1002107-1002169
  hypo
catacacagctgggctcccctgcagcctccacgctgcagaggccacgcggacagagcccagg

SEQ ID NO: 256908 - DNA, 324 bp, Homo sapiens
  chr7:1007358-1007682
  hypo
gctcggaggggctcgcggccggctatgcccatcagttccagctcctccttctggatttctcgtttgtagtttcctgtgtccctgcctgtctccacttcacagtaagctcacgccatatagccgcactgcgttggcgagctcatggcacgtggccacaccgcgtcagcgccgactccacggtggctgcgtcacggctcacgtgcactgtgaggacactggggttgctatagacagtgctggggcaaccctgtgcctacacaaaatattctaataagaaacaagactttccatcaactagcggtgatatgttaatacgtctgcagc

SEQ ID NO: 256909 - DNA, 57 bp, Homo sapiens
  chr7:1011971-1012028
  hypo
ccaaatgtccacacgaataaccccgaacacacctgtgtggccggaaaggcacaacgg

SEQ ID NO: 256910 - DNA, 45 bp, Homo sapiens
  chr7:1024995-1025040
  hypo
gcctggagtgatgggcgtgcagcaggaggacgggggccccagtgc

SEQ ID NO: 256911 - DNA, 113 bp, Homo sapiens
  chr7:1026935-1027048
  hypo
ggacgagggatggcgctgccacccaagcggcccaccctttgccccaggccgggtgcaggaggagctagaccgcgtgctgggccctgggcggactccccggctggaggaccagc

SEQ ID NO: 256912 - DNA, 91 bp, Homo sapiens
  chr7:1029387-1029478
  hypo
cctgggtgacagagcgagattccatctcaaacaaacagaaggaaatgtcgagccacacagtggcacatgtgctgggggcggtgtggtcggc

SEQ ID NO: 256913 - DNA, 37 bp, Homo sapiens
  chr7:1029508-1029545
  hypo
gtgtggtcggcagtgtgagtggcgcgtgtgctggtgg

SEQ ID NO: 256914 - DNA, 426 bp, Homo sapiens
  chr7:1029912-1030338
  hypo
cagtgtgacagtggcgcgtgtgctgggggtggtgtggtcggcagtgtgacagtggcgcgtgtgctgggggcggtgtggtcggcagtgtgacagtggcgcgtgtgctgggggcggtgtgatgggacacctgctgtctgagacggccctggcccccgtcccagcgctgaccatgcacgtgagcggcaggcggcccctcaccgagaagagaggataagccgtggcacattcccacctgcgccacgtgaagcggcgccccaaggccaggacgtggtggccgggacacacgggtgcacggcaggcctcacactcccaggtggggccgcagggtccctaagtcatgggtggggctgctgctacggaggctgctgcaaggacgagaaggggacggagggatggaggctcggctgcgtccgctcacctatttct

SEQ ID NO: 256915 - DNA, 206 bp, Homo sapiens
  chr7:1045397-1045603
  hypo
agtgacttgctctcgtcctcccgcaggtgagtgggggaccccgtcccggctggatccgtgtggcccgggtcccagttcctctctctcctgtgggggcaccacctcccgcctcgagcagacccaggcagggggccggcccccgaaaatggtgagctaaagcctgcagggaccagggaggcagcggtcacctcgccacctgcccccaa

SEQ ID NO: 256916 - DNA, 212 bp, Homo sapiens; identical to SEQ ID NO: 211152
  chr7:1052679-1052891
  hypo

SEQ ID NO: 256917 - DNA, 440 bp, Homo sapiens
  chr7:1059664-1060104
  hypo
caggtggccggcccgtccccagcctctcttcccactgaggagagatccaagggccggcggagtggtggtgtctgctgctctgcgggaacacgggcaccaggcccagcagtgcatggatgcggcaggccccgcgtgcgatgccctggtccccacgactgtttcttcccacgccgcggagtgcattccctcatgctcccgtcctgtgaacacgcgctgcagcctctgccctcctggggctccctgagagagggggcaccccttgctcccatcacagtcctcctgcagcctggggccccgcccagcacgcccaccaaaggggaggcccgctctcctgtcagagccaggacagcctctccaagaactcttcctgggccccagagaggagccccctaggttcgcttctcgccagccgctgccccatcttgcgtctccacccaagg

SEQ ID NO: 256918 - DNA, 402 bp, Homo sapiens
  chr7:1061547-1061949
  hypo
ggcacccagggcagctccctcggcctgggtcacaaggttcgatcctccgcgggggtggcaggaaagcccaagtccctcggcacacccaggtgacagcgatgacggcccacaggcgtggcgcctgggccacatcggacaggccatgtcctggagcactcgaggccccctggacagggcaaccaaccctgagtccaccggagtctgctcgcagaccaccaggagccccgctgcactgttcgtgagccacggtggtgacggcagctcaggagggaaggaccagaagcctggccccgtcccacgaggacagacgcaggcctgcggggaggcatgtccccacccacgggcgcctcctggaccacgagctcctctttctcctgcatcgcctcagaccccacccagggg

SEQ ID NO: 256919 - DNA, 426 bp, Homo sapiens
  chr7:1066101-1066527
  hypo
cctgtggaagccaccgctaactagcagtcggaggcggcgttgtttctaagacaggcaggcagctccggcaggagcagccgctaagcacaaggacggccaaccacacaaagcctgcttctcaaccactcgcaggaaatcggctcacagttgctccccattcttcaatgctgatcctgccactttactgaaaatcacattattaacgtttaaaaaacgtatgggaaccatgcaaagacatccacgcccctcagttgctgccgctccagcacctggctccgaagtctgtgcagaaggcgaggctcccgtagtgctcgagagggccttgcacgctccccgtggagggaacaaagctacgtggattttccagcgcgccgcccacttcaccaggcagcctctgggcttcatcctgctcgcgtgacaggtgtg

SEQ ID NO: 256920 - DNA, 58 bp, Homo sapiens
  chr7:1069637-1069695
  hypo
tctgccactggtgtccgcaccccgctttcagagaaggaagtgtgtgctcagtcaccgg

SEQ ID NO: 256921 - DNA, 120 bp, Homo sapiens
  chr7:1071763-1071883
  hypo
cccagacacaccacgccccagagaatgcagggtagatgggccccagatccagagaactgctcccggcccacggggctgccccaacacgtccctcgcactcggcccgcctgaaaataaagt

SEQ ID NO: 256922 - DNA, 189 bp, Homo sapiens
  chr7:1075882-1076071
  hypo
ataagctgcggacttcgggcggttgtgctgtggccatgtagggttcgggtgctcgtgctgtggccgtgcagggttcgggtgctcgtgctgtggccgtgcagggctcgggtgctcgtggtgtggccgtgcagggctcgggtgctcgtgctgtggccgtgcagggctcgggtgctcgtggtgtggccgtgt

SEQ ID NO: 256923 - DNA, 132 bp, Homo sapiens
  chr7:1086194-1086326
  hypo
cagtctggagagtagaataacgtttcgctccaatttgagatcccaaaatgagatgctgcccgggaccagaagtcagtttcttaggagcgtgctgtctacccaggagcctccgtgtgcaaacaaaataccccc

SEQ ID NO: 256924 - DNA, 38 bp, Homo sapiens; identical to SEQ ID NO: 211156
  chr7:1097390-1097428
  hypo

SEQ ID NO: 256925 - DNA, 242 bp, Homo sapiens
  chr7:1097706-1097948
  hypo
gctgccgacgccacgctggtgttcatcggctacgtggtgccagcactggccaccctctacgcgctggtgctactctcccgcgtccgcagggaggacacgcccctggaccgggacacgggccggctggagccctcggcacacaggctgctggtggccaccgtgtgcacgcagtttgggctctggacgccacactatctgatcctgctggggcacacggtcatcatctcgcgagggaagcccgt

SEQ ID NO: 256926 - DNA, 188 bp, Homo sapiens
  chr7:1103862-1104050
  hypo
agacccgacacagcgccgggtcctgatgggctgtgacgtgaagatggggagaccaggcccttagcagccacagaacaggccccggaaagacgcacgatggctccactcttggaagcagatggtggctctgtagggagacaaggcttaccttgctccagggactctgaggagacgctgtgcagggaggc

SEQ ID NO: 256927 - DNA, 44 bp, Homo sapiens; identical to SEQ ID NO: 211157
  chr7:1113683-1113727
  hypo

SEQ ID NO: 256928 - DNA, 214 bp, Homo sapiens
  chr7:1115545-1115759
  hypo
ttattaaaaaaaaaaaccctcctgacctcaggtaggaacagcagagtctgagtcaccaaagcccggggctgccactctccagggcgccccactcccagctccagcggctgagtccaccaagccaggacaggcccaaggaccagagggcgaggtgattcacagtggagctcggaaagacccatccatgcccagcgccttgtcaaaaaccacaggg

SEQ ID NO: 256929 - DNA, 178 bp, Homo sapiens; identical to SEQ ID NO: 211159
  chr7:1124308-1124486
  hypo

SEQ ID NO: 256930 - DNA, 127 bp, Homo sapiens; identical to SEQ ID NO: 211160
  chr7:1132022-1132149
  hypo

SEQ ID NO: 256931 - DNA, 149 bp, Homo sapiens
  chr7:1133748-1133897
  hypo
agaaggctctcggccgcgtgcgaggcccaagagctctgcggcacccaagcgctcctggagcagccggccgggaaggttcctgctccttctcccatcaccggggctggatcctggcgctgctcccctcctttcccgcctcacccacctgg

SEQ ID NO: 256932 - DNA, 148 bp, Homo sapiens
  chr7:1141332-1141480
  hypo
actcagcacggccacggcagcctgaactcccagccttggtatccacgcagcccgcagctctctgcaatgaggggccggccgcaggcccagggagatgtcagctgccccaggcaatcacaagcaaggaggtgcgcgtcgcggacacagc

SEQ ID NO: 256933 - DNA, 444 bp, Homo sapiens
  chr7:1141910-1142354
  hypo
ggagctgggcccagcggcagtggcagttcccttctccaccgcgcagtcccactaaagctgcgggcagctcttgatttgtgtatcttacaagaagaagaggagggggagaagaagggaaaagtcggcgtctgcagccacactcaagttcttccgctcatccacgactgtgaagctcacagctccggccacgctggcgttcaacaccaggtcactgtcacttccacaggggacggtcttgcttctttggtaaaaccaaaggagtgtttcaaaccatgcccaccttccattcacctgtttttaaaatttttttttttttcagagcaggagcggacgtttattaaaaagctttaagagagaaaggaaggtgcactcggaagagaacccagcgggcgacctggagaacaggtgacccactgaactgtgatcctgcgcccctttccgtga

SEQ ID NO: 256934 - DNA, 320 bp, Homo sapiens
  chr7:1148237-1148557
  hypo
ctgccatgtgtctccgccagctaaaaggattttgtacctcccattttaaggacaagtggctctcggctaggagggcagttgagttccactctctgccgcctgagtgtctgagatcacccgggttgccgtgtcactgctgacacacacgcccctaccgtgtgcacccgctttgatgccgatgggggccatccagtgtgcacccccctcactggagcggctgctgggtctcttctttaccacctgcttttgaattaactatgctagaaaattcggctgtgatatttctcccaggcatttttttttttttttttttgagacgg

SEQ ID NO: 256935 - DNA, 150 bp, Homo sapiens
  chr7:1164416-1164566
  hypo
cacaggaattcaacagcctgcggaggaggagccgaaattcaaggtgaggctcaggtggaacgcggggctgcctgctgacccgctgcgcgggagccgcaggacctctgcacctgccaggcctcagcctccgggtgaccttggggtgttctg

SEQ ID NO: 256936 - DNA, 93 bp, Homo sapiens
  chr7:1184625-1184718
  hypo
tctcagaaaaaaaaaaggcagggccagtgacctccacggttgactctgacactccagccggcagggccacggccgactcgcccgctctcagtg

SEQ ID NO: 256937 - DNA, 463 bp, Homo sapiens
  chr7:1202644-1203107
  hypo
ggccaccgagtgaacgggctgtgctaaggggaattgccaccttgggaaacctgtgtagttgcggcttttctgattaagtatcaataaaagtctgaccttgtgaaaaaagcaaacgtgagtggccctgcttatgtttcaccttgcgttgctcagtgatagttctgcaaagtcgcaggaaacctggaatcatctaattatcgtgagtgttggtgagtaacacccataggcactggctcccggggaaatacagagtcaggttcctccgagccgctggccacagcatttttgttaagcagttcatcgttaaccttgttgtacatgtctctctctcaaggttccttatttaataatgtctagttgattcattaacatggaattcatggccagtacctctgtcactcatgcctgactgaagttgatcagcacgtctttttctcccttaggcacatgacagccttcttgc

SEQ ID NO: 256938 - DNA, 46 bp, Homo sapiens
  chr7:1215557-1215603
  hypo
agctcagcggccaacgtcgcatccctgaggccgtgtgcctgctccg

SEQ ID NO: 256939 - DNA, 48 bp, Homo sapiens
  chr7:1220822-1220870
  hypo
aggcaaagcgagaacggtccgtgggtcgtctcccgtgccgtccactca

SEQ ID NO: 256940 - DNA, 238 bp, Homo sapiens
  chr7:1225056-1225294
  hypo
actgtggcctcaggagtcaacgcctcgctgtgcacctctcccctgcctcggtctcccgacctgccatgccctgaaaggatggcgcctctcagcgtggcgacgcggaccgagctgtctccatggtcatgctgtggccccgacacccacggcccctccgtggactttccctgccgccttttccgtccaccctccccctccgtggaggactttccttgccgccttttctgtccaccctcag

SEQ ID NO: 256941 - DNA, 86 bp, Homo sapiens
  chr7:1234856-1234942
  hypo
gacagactaagactcggtctcaaaacaaaaacaaacaaacaaaaaaccagttcctaccgtttatgaaacgccgctcgcagcctgcc

SEQ ID NO: 256942 - DNA, 71 bp, Homo sapiens; identical to SEQ ID NO: 211164
  chr7:1303352-1303423
  hypo

SEQ ID NO: 256943 - DNA, 115 bp, Homo sapiens
  chr7:1303453-1303568
  hypo
cccgctgcccgcccggctttcactccagaatggcgctgcccgtgcctgtacagacagctggcaaagcgtcagatggcattacaatatttttacttataatcgagaaagcaataaa

SEQ ID NO: 256944 - DNA, 371 bp, Homo sapiens
  chr7:1308150-1308521
  hypo
cctgggtgaaggcccgcgaccctggcaggaggtctcagagaagacggctcgccacaggccctcagaacaccctcctggtctacagaggggacgctgaggctgggagcgggaatgtggctggtccctgctgctccctcgctcgcccctgtccccgaagccccaggacacccagtggccctctttgggctggacccaccctggccaccctggcccttccggctgccggctggggacgcgggcgtggtgcggcaggcctgccttgattgtgtcgatgggagatgattttcaaggtgaaatttctagttcactagagtcactttcgttcaaggcgacgcacaaaatgtcatcccggcctgttccgcgtgcaacgc

SEQ ID NO: 256945 - DNA, 229 bp, Homo sapiens
  chr7:1315705-1315934
  hypo
cgggtgacccgcctcggcccgctgagcagccgaacgcgctgacggatccattaggccgctcccggccccggccccctctccctccattcctggccggcgctgtaaatctccgccaatttcggtcctaatcatcattataaacccttcctctgcccgctcccgcgcctcacctcgctggcaaaacagcccctggcatgatcatcgcaccggcctgcggggtcagcagccc

SEQ ID NO: 256946 - DNA, 89 bp, Homo sapiens
  chr7:1318804-1318893
  hypo
caaaagcgacaggacggggagaatacagacctgaccctgagttaaaccgttcaggggaggggcgaggtgactcatgcctgtgatcctag

SEQ ID NO: 256947 - DNA, 91 bp, Homo sapiens
  chr7:1324738-1324829
  hypo
ctggctgcagctgtggggtccggggtggcctggtctgctctgctgtgtgtggactgtgcgggaaggtcccgctggggtctttggagccttg

SEQ ID NO: 256948 - DNA, 394 bp, Homo sapiens
  chr7:1328511-1328905
  hypo
gaaagcagacaactcgtccgcgttgtcctggagatgcagccgacatcggcctgcttgtcctgctgccagggccgctgggggccccatcgatgtccacccggccagacacagctcccgtcattcaatatggcaaagtgtggtggtgctggctccgcagaccccactgtggaggcgaaaggtaagaagtcagggttcgaggttggggttccgtgaacacagccccgagaccgggtgtctaccccaccgagaggaggggtctcgtcggggggcctcgctgagcctccgtgtcccacccggagccagggtgggcaccctcccgtccccgcagccccggaagatctggcaggtggcatgacacccacccgggggccctggtcaccggcgcatgggcagc

SEQ ID NO: 256949 - DNA, 304 bp, Homo sapiens
  chr7:1333575-1333879
  hypo
acagtgggaaggatgctcctcgccgtcataaacccgcgtgcaccgcgtcactccccgggcgccgagttccgccggcctggcacgggctcacgggcacccttggcccccgaggggctgtgggaccccgggaccgggtgctcgctgagggacggcccttgtctgcggtcatccctcccctcctgagtggaaggtgatgccgtgggcccagggctggctgcgtctgccaggcatgccctgcattcaggcagaactcgagggaggactcatctccaaacagaagagcgggcagcaagtgccactcagg

SEQ ID NO: 256950 - DNA, 687 bp, Homo sapiens
  chr7:1347154-1347841
  hypo
caccccccaggagccatgaacgtctcctgcccccgccctggctccaccatgaactccgagcctgcaacagtgtgtccaccatcttatccagggacgtggcaagggtcaaaaccagtcgatggtgttcgatgggggcccgatgtgtgggttggaccctgatatcggaggcgccatgcctactgcttagcgaaccagcccttaaaaccaggactctcccatgtggggcgatgcagtgagacaagaggcaaccacgttgctgggggtgccgaagccaggccagcccttatggagagtgactcggcaacatgcactctgcgccatggaaatgctcagcacctctgacccagtgacgccgcctctgggatgctcttccgggggaaattatccacaatatggggagagatttaagccaaagatattcatggcaacattatctttgatgaccaaaaaaaaattggaagcagctgaaatgtccaacaatcggggagttgtttagtagattacgacatacacactcggtggaatactaggcagtcattaaaagtgctaattgcgaagactgggtggttatgtacaaacacgcctacagcatgatgccgagggaagccgtgtatggaattaggggcacattaagggtgtaatgatgtaaaaaacatatgcagcccgagaacgcgtggatgaagagga

SEQ ID NO: 256951 - DNA, 573 bp, Homo sapiens
  chr7:1351444-1352017
  hypo
ccatgggctggggcagcagccgtagctgggcggtgtgggcagggggctggcaggcgccggccgcggctgtctcctccagggcctgctgttgtggcgtctggccgcggcccagcaccgccgtcatctgggctcagctctctctgtccgcggggctgtctccctggtggtgccggccccagagcgcatggccacagccagcctggtccacccgacattgaagcctccctgtcataattggcaattttgtcatatttattcacaacagatcgggctgtcaggagcttgtgggggctctccggaggcccgccgtgaaatcggtttgaaatggcgtgtcaggtttttctctccctgctgaagcgaccatctggctgatagactcggcgctgggatgatacgctgacccgcggaatcacggctaagccgctcccggggggccacatgccggctgggcagcccctcgtgccacacctgacctccctgtgggttctgggagccaggccacagggcaaggcctgggctgggcagggacaggggtgggcaccaggctgggagctccccgggtaccccactggc

SEQ ID NO: 256952 - DNA, 54 bp, Homo sapiens
  chr7:1354098-1354152
  hypo
tctgctcaccagctgggtgacgctggacaggtcggctcccctttctgatcctca

SEQ ID NO: 256953 - DNA, 154 bp, Homo sapiens
  chr7:1357986-1358140
  hypo
ctggggcatcctcccaggtacgcctggttttggctgcgccttgacggacgctgttcattttgattctttgattcaggggtgtccgccaggtgtccctactgtaaagtgactccccgttgagactggatatcccgtttgtcaccaaattgtccat

SEQ ID NO: 256954 - DNA, 265 bp, Homo sapiens
  chr7:1358498-1358763
  hypo
tgggccacgcccaccgtcccagaatgtgacctgtgggactcagaaggcagcccccagacaggccatggtgctgcccactcggtcccaggaggcctacctggcacctgtcccagacacgcaggtccagggactgggagcaaggatgtgtgtgcaaatgggtgtgtgtgcttagcatgtgaaaatgggcgtgtgtgttaacatgtgcacccgggcgagggagcaagtgaacttgcagagggatccatgtgcgtgtctgtgtgggtgc

SEQ ID NO: 256955 - DNA, 149 bp, Homo sapiens
  chr7:1360167-1360316
  hypo
gaccacgttcatgtcgtggtgggagcctgaggctctgggggggtgggggaggtgcctgagagggtgaacgtccttgcacacgtgcttgggtgtgctcacgcctgagcgtgtgttcactgaagtcctgggtgtggcgtgcccgcctgcgt

SEQ ID NO: 256956 - DNA, 126 bp, Homo sapiens
  chr7:1365420-1365546
  hypo
ccagctgcgatgcgcgatgcactgccctccgccccatccaggtgccccaagggtacggccggcatttaagggccctcgcttcctgggggtgtgtacgtggctgctgctctccgctcccctgggctg

SEQ ID NO: 256957 - DNA, 954 bp, Homo sapiens
  chr7:1370035-1370989
  hypo
catgtctcaaatcctccatgcgtgatggctcaggtgcgtcttccacgcagatcactctggcagggagcgcggatggagacccgaggctggggcctgctggctttgcccctctacgcgaacagaatggcctctgccctgcaggaatcttgagtccaggagaggagagtttccctggaggtggaggtcaggcccggcagtcagcaggccaagctccttcgggccagggcaagccggagggcttcccagagcgggcacagtggacagctgagcaggccagactctgacatgaggtctggacaggcccttccgcccttccggatgccagtccccctgcttgtctgaccactggcccgcctgcccacggggcggctgagatgctggcgtgtgcgtgcgcatgtgcacgtgtgtttgtgtgcgcgtggggctttctgacagccgataattcacaggcgcctccagagccggctcccgctcccacccgctcactcctgtttatgaagcgaagggtaagtgtttaattagtcgcctaattgcctgggtaattggagacgaactcagctctccaagtaatcagtcggaacagcctcgaaaatatctggcccaatattcattagtgtggcttgatcgttaaacagttaccgtgtttggttcatgacaaggcccagcaaacagctgcgcgcccaacagcccccgccagccctggcagacaaacagctccacgcagacggacggacagccggccagcaccggggcagagatgtgagcggccagcggggcacagacgcgggcggccagcggcacccgcacgttccgtctgtgccctgtccggctgccctttcccctgggccccccggtctccctggagctgcagaggctccctcggtcagttgggccacccccaccccgccagcctcctttgcccccagggagcccggtggctgggattctgggagc

SEQ ID NO: 256958 - DNA, 232 bp, Homo sapiens
  chr7:1451100-1451332
  hypo
taattaagaagtgttctctgcgtatccggggtgttcgaacaattgtgcggcgccgacgatgcaagctgttgacctgcacagataaaccgtgcgtgcggaggaatcgggggcggcggacggggtggggggagtgtacatggctgttcttttctgctggggcgcccggcgggccctgcctgtggttcgccctgtgtgcgggcggtgtgggcgtctttgccgcagggtgcttgtc

SEQ ID NO: 256959 - DNA, 357 bp, Homo sapiens
  chr7:1460652-1461009
  hypo
tgtgtgtgatgtgactgatacgtaacacgcatcccatgggcgtcccgtgccaggaattgagggggccacaccctactcaacgcgggggacagtctccgggctccgtggctcacggatggtggagcgtgtcatttcccgcatgtgacacagagtgcggactgtgcagaaggcggctctgtgcctcggaaggcagggtgcagaggcgtgcagcgctcaccacggggatgcggccggctcctgggacgggacctggaacgcggatgtggccggatgtttagtgggtgccgtgcacggtgtctgacacatcagatgtgatgtatacctcgcacgaaagacgttgtgttcatcaacaaatca

SEQ ID NO: 256960 - DNA, 587 bp, Homo sapiens; identical to SEQ ID NO: 211177
  chr7:1473773-1474360
  hypo

SEQ ID NO: 256961 - DNA, 319 bp, Homo sapiens; identical to SEQ ID NO: 211178
  chr7:1475085-1475404
  hypo

SEQ ID NO: 256962 - DNA, 1800 bp, Homo sapiens; identical to SEQ ID NO: 211179
  chr7:1476253-1478053
  hypo

SEQ ID NO: 256963 - DNA, 929 bp, Homo sapiens
  chr7:1478541-1479470
  hypo
cagggggctccggccgaagccagttgtcacaaacgtcgaggctggcagggacggccagtctcctgcggcggggtggggagggggacctggctgcccccaggtggggagacagagccacgcttcagagcagggccactgggagcctggggtctgtcccagcacagccaacagctcgctgggtagcccggccatccccatgccctgggcctcccgactggcacagggttggcatcacaagccctacacccacgtcctgcccaacctggccatgtctccccagggggctaacccacggggctgctggctgctcaaggtcacacaggaagtggcacgagagctggatatggatccagggcagctatgagtgctaggaatacacacagagatgtgtgtgcacacacacgcatcacacacgaacacgggtgcacacgtggacacacatgcatcacattcatgaaacagatccacacatgggtacatgcaccacatacatgaacacggttgcacacacatgcatcacacagatgtacacatggacacacatgcatcgcacatgaacacagatgtacacatggacacatgcatcacgtgtgggcacacatgcatcacatacacgaacacagacacatggacacgcatcacacatgtacacatgcatcacacgcatgaacactgatgtacacatgaatacacatgcatcacacatcacatacatgaacagacacatggacatgcatcacgtgcacatgcatcacacacatgaacacagatgtacacatgcgcacacatgcatcacgcatggatacaggcatcacatacatgaacacatgcacacatgcatcacacacatgcacacatgtacacacaagcctgcccaggactaccagcttctctggctgaccggagcgcctctccgcacaccccaggag

SEQ ID NO: 256964 - DNA, 532 bp, Homo sapiens
  chr7:1479734-1480266
  hypo
atgaggtcggaacccgaaccaccagccccagggcctggcccacctggaggggctcccaggccatatgcagaccagccggagggagcaggtggccttctgagcaaatgccacctcccagcccactgactacacctgctgggaccctcctgcaaacacacgtgtccatcgctacctgccgtggtgcgaagcagattccaggcgtgagctccgggccccacgggacccacacatggggagactccaccccagctgcaggcatggtgcgtgaacccacacgggtgctgccatgcccaggtgagacacgcaacgctgcccccaaaccagggacagcggcccccatgtccctcaggcaggggtgacctggcctctgctactcacagggaggtgcgtctatccctggataggcgtgtcaatcggtcgattacatactcactgcatttattaagcacctatggtgtaccaggccctgggccagccccacccatccctaacctctcagctgggcttctcctgtccacgggcttcagattcg

SEQ ID NO: 256965 - DNA, 301 bp, Homo sapiens
  chr7:1480645-1480946
  hypo
gagccacggctgcccgtctgcaggctttcttggctcctgggtcctgcaggatccagcgcgtggctttaacaatgagaactcagccaaagagaaggatctggaaaaaccctttgcagcccagcttgttccctgagcccagctcgataaagccatgggaacctctagcttttttctacacacacccaggtggcagggacagccagtttcctgcagtggggcgaggcggggggactcggctgcccccaggttgggagacagagccgtgcatcaaagcagggccgccaggagcctggggtctgtc

SEQ ID NO: 256966 - DNA, 515 bp, Homo sapiens
  chr7:1488212-1488727
  hypo
gggcctggtcctgcctggctcggcgggcgcggcagggactcactgggggagcggccgtggaagtagttgtaatactgggacacgtaggtcaagatgctcagccggtcaggcaccttcaaggccaccatgtcctcggcatccagcaaggctgggatgcccaagtgctcctcggccacgcggaaggcctgcgaaaggtgggagggggtcagcggggcagctgggagccccctccttctccaccaggccgcagctcacctcgactcaaagacacagtcttggagcccaaagaggcgtgggttggaggccggagctgagttctgctcgcgtggcctcccggcctcagcttacccatcattgcagcggggatcacggtcccatctgcacaggactgaggtcaccaggccggtgggcgctcaaggccccgtccaggtgaaacctcaggggatcctacccttcaccgggagaatcccaggccccacccaacccagacttacgcagtcttgaaacagctccct

SEQ ID NO: 256967 - DNA, 821 bp, Homo sapiens; identical to SEQ ID NO: 211182
  chr7:1491121-1491942
  hypo

SEQ ID NO: 256968 - DNA, 347 bp, Homo sapiens
  chr7:1492393-1492740
  hypo
acaggtctgggctgcgagttcaagcatcgcggcctcaggatgaggttcaagctgcattcggggcgtttgaggcctattcaactgggctgcaccaccccggccggtcccacagccaccacccatcctgccccaagctccttccccagggccggccctccagcctccagaccatggctccactctcccggcacagaacagcttttcccacactccgcccgatgcacccgccaggccctccccagatgcaccttgctgtccccgagctcacacccccggggcccctgagcagctgagctcaggggcccgatgctggcagaaatcgccgccagaaccgtctcgcaagcccc

SEQ ID NO: 256969 - DNA, 95 bp, Homo sapiens
  chr7:1493403-1493498
  hypo
aaatcaggtataccatggcccggctccaagacacacaccgtgggccaggcacacagtcggtgccctataaatgcgtgtgatgcatttgttctgtg

SEQ ID NO: 256970 - DNA, 95 bp, Homo sapiens
  chr7:1496414-1496509
  hypo
aagcaaagggcccaggcacccatacaagcgcatgtccccacaccctggtgcacacccgacccccatgacactccgggttttccatcagccagggt

SEQ ID NO: 256971 - DNA, 318 bp, Homo sapiens
  chr7:1505248-1505566
  hypo
cacaggtgaggaatcaagctcagaaaagggcagcgatttgtccaaggccagtggggagcaggcgttagaaccctggggtcggtcctgcctcgtgtcacccacctgcccaggcctgcagccacaggctatggcccccgctgacaggactctggatggggcccccggggtcctggctggaatgctgactagggatgaaggaggcctaaagggtgtttgggatccagcagcccctccaccgtatcccagctctggaggcccctgggccctgtgtccccaaggactctatgttccccggagctggggcgccagcagtagcct

SEQ ID NO: 256972 - DNA, 220 bp, Homo sapiens
  chr7:1514362-1514582
  hypo
ccaccgccagcttccggcaggccatgctggcatccgcccctcggttctccaacgcccgggagtcgctggtgtccgcaaggagcgtgatgaagcggtggatgagtccgtccagctgcagggaggggcgctctgaggccggggccgctggctcccctcacttgcccacccacactcagcctggccgccagctgtggccgtgatccaccgcgtggcacgccat

SEQ ID NO: 256973 - DNA, 280 bp, Homo sapiens; identical to SEQ ID NO: 211184
  chr7:1519129-1519409
  hypo

SEQ ID NO: 256974 - DNA, 236 bp, Homo sapiens
  chr7:1520865-1521101
  hypo
acccacccgacctcggatcacccacccgctcgcacccaggccccaaaagcctggccgggctggggctcggtcagcgtgtgtgaacccactccgcaggtccctggcatcttactcttgtccatgatgttctgctccagagtctgggggtcgtgggccactgcctggtccaggaactggaggagtttgctcatgctggacacggggatgccaaacgactgcacgaacagcagcagctg

SEQ ID NO: 256975 - DNA, 244 bp, Homo sapiens
  chr7:1524903-1525147
  hypo
cggccccggtcagcgccctcacctgctgcagggccagggctgtggtgctcctgacgctgtcgaacagaggcaggcgaggcaggtcccgcagcagccactgatagccctgcagcacatctgtgtcccccacatcctcctccatggggggctccttctcctccccgtcccgcaggctgccctccgaaagcaccagcgacaaaccctgtggcagacactcatgagctgggccggctttcggcagtgc

SEQ ID NO: 256976 - DNA, 86 bp, Homo sapiens
  chr7:1532979-1533065
  hypo
gtagggaggtgaggacgggggtgtggccggcagggtggggacccgcaagccctcggggcagagccacggacgaggcgcgagctgga

SEQ ID NO: 256977 - DNA, 550 bp, Homo sapiens; identical to SEQ ID NO: 211186
  chr7:1533908-1534458
  hypo

SEQ ID NO: 256978 - DNA, 144 bp, Homo sapiens; identical to SEQ ID NO: 211187
  chr7:1534752-1534896
  hypo

SEQ ID NO: 256979 - DNA, 213 bp, Homo sapiens
  chr7:1535457-1535670
  hypo
ataatcaaacacccggactgccccaaacaccacctcccctccccactcccgcccgtggctggggccaccacgcctgcaatgcccccatgctgggccagaactggagcacacaaaggacgctcatgggaacagggtctgagcctgcagctggggtgaggcccggatggacaggaacggggacggcagcttccaggctccgtgtccccgagtagc

SEQ ID NO: 256980 - DNA, 68 bp, Homo sapiens; identical to SEQ ID NO: 211189
  chr7:1537961-1538029
  hypo

SEQ ID NO: 256981 - DNA, 35 bp, Homo sapiens
  chr7:1547437-1547472
  hypo
tttatggccaggcgcgatggctcacgcctgtaatc

SEQ ID NO: 256982 - DNA, 34 bp, Homo sapiens
  chr7:1553100-1553134
  hypo
ctgcccactaaatttagaaactgcctcatgcaca

SEQ ID NO: 256983 - DNA, 68 bp, Homo sapiens
  chr7:1554245-1554313
  hypo
ctgaagaccctcacacggagctcccacccctccaggatccaggcttgccgctgcgtttggccaggccc

SEQ ID NO: 256984 - DNA, 158 bp, Homo sapiens
  chr7:1556125-1556283
  hypo
gccgaactttcctttaaaaaaacaaaaaaaaaaaagccaatacatgtcccagggattccaacccatgtcctatcgcagttcccagatggcatttctttcactgagtcgtgccacaacaaactcacaccagatcatgcgtcctgacttttggctcagac

SEQ ID NO: 256985 - DNA, 135 bp, Homo sapiens
  chr7:1560607-1560742
  hypo
cgggaatgaggcatgtctcccgggtggtggactcctgggcggtttcagtctggggcgattatgaacaaggctaggacaagcctgatttcacctgcacgcacgtctatgggccacggtcctggctctctggtcctc

SEQ ID NO: 256986 - DNA, 262 bp, Homo sapiens
  chr7:1563390-1563652
  hypo
gggccacctctcacacgccatgctcagggctcctgcctgtcttctccctgcagtagaattgatcctggtggtctccgtgtcccttcctttccccgacctcagccggggccacctgagtcccccgggttaccctgcatacctccaactctcaggaagaagcgagggtaggagggaccccacccctcccggggcgccccgggctcatggtgcaactggactcgtctccctgcaagaaccagccctgcaccgctggggtcctggg

SEQ ID NO: 256987 - DNA, 351 bp, Homo sapiens
  chr7:1574077-1574428
  hypo
gttttgtggattgcacctgccgtgggagtcactggtcggggggcgggagggcgcttgctgctgtgctgctgggtttctgaacccgtgtctctcgcacagagctcccgtcctccgttcctggtcttcctcctgcccctcctccctctcccgcatcccacatcctcggagacccgcggagaatagaagtggaagggccactccgtcttggtcagactggctgggcagctgagggggtggggcatggagtctgtgtcatcattcaccccttgggcaagaacaagtgacccatccagagcccccatgctggcctcgtagagcgagcggcagccccgatgcgtcctctcatctggg

SEQ ID NO: 256988 - DNA, 210 bp, Homo sapiens; identical to SEQ ID NO: 211192
  chr7:1575803-1576013
  hypo

SEQ ID NO: 256989 - DNA, 1046 bp, Homo sapiens
  chr7:1578248-1579294
  hypo
gggtcgctgtccagcggggccccacactcctcggggccggcacagctgtcttgagggagggaggttttgccaccagtcactttggtcctcggtacggggcaccttgtgctgtgcaggtgcagacgtcttctctgacctcagggagagtcagaacaggaagcagccactgccggcgcctgctggtcaccccacagtgccggcggctgcagcccaggtctgcagggcagcagggggccgcacctggctgccaggccctggggtggggtcccagccgctctgtggagtgtgctagagtgtgaggtgcagccagacctttccctgaaccctcaggcagggacagaggccgggccaggatgcctcaccccctgggaagcccctcaggacgggctgggcccggatggtgccccgtcttgttttcatggtgctgtgactgtccaccccgggctgagaagcatccctgcatgggaggtgggcaccctgtccggcgctgccggccctgacctgtgctggcttctctgcttgtccatgttttccagctacgagttccagggagctctgtcctggtgaccgtgcccgggttatgacgactaatcccaaaccgaataaggcattaaaggtaaggctggttccaagcaggccccgtctcaagcacaggcgtgggaaaggcccccggcccgacagcccctgctatcccagggccgtcctgagcctgtgatggaggcctccctgttgccaggaggaggggggctgctgtggccgagggatgttcacaggagaggtggagtcaggatcggggactgtggttccaggcgatgactcccaggctgagggcgtggcagggtctgctgccttcccgcctgggctgtgtgtccgccgggcgctactgcatgagctcatcccctggctccaggcgtgggcagcgtggccagcgtggcctctggtgaacgcgatgctccagctcccaaggcccgagcccacctgtgcctggcgcttgccgcctccacaatggcgtgtgcctgtgggccggctcagtcccagcagcagga

SEQ ID NO: 256990 - DNA, 55 bp, Homo sapiens; identical to SEQ ID NO: 211194
  chr7:1579574-1579629
  hypo

SEQ ID NO: 256991 - DNA, 293 bp, Homo sapiens
  chr7:1581944-1582237
  hypo
taaatctatcagagcagagccgggggcacgggcacaggtgggagttgggagcaaagcggaggcccgggctgcccgccgtcccccttcatctccccacggactgtaccaggcagctgggccccgcaggacaggccgcagcgggtggccggttctgtcccgtcttggggttcttggtgtccacgtcttgtgggccgtgggcttctacctgcccttggcctgcagtgctttgctggagaagggactccctggtccccagggtggacggagccgctgtcaccgcccagagctgggcc

SEQ ID NO: 256992 - DNA, 63 bp, Homo sapiens; identical to SEQ ID NO: 211195
  chr7:1582574-1582637
  hypo

SEQ ID NO: 256993 - DNA, 425 bp, Homo sapiens; identical to SEQ ID NO: 211196
  chr7:1583986-1584411
  hypo

SEQ ID NO: 256994 - DNA, 383 bp, Homo sapiens
  chr7:1585839-1586222
  hypo
cgggaacagaagccaagacccggtagaaaatccaaggtgtttaaatataaataagagcgattcccacagccccacggtgctggccagcctcacaggtgcccgctggttctgtgacccatcccaggcacacgctcccctggctgggcgcctggccagggctcccctgtggctggcgtgtggagacacgtgggcccttctccacgtgcccacgagggccgtagcaggctccaaggaggcccagccccggccagcctgtgtggaccccgccggcctgcggcgcccggagctgctgactgtgtcagagcccggctgcccagcgccccggcgcccctccctccagctgcccagcctgggatccgtccgctgtctgtctcctgaaccag

SEQ ID NO: 256995 - DNA, 590 bp, Homo sapiens
  chr7:1589281-1589871
  hypo
tagcccagccggacgccaggcctgccttgttgggccccaccgctgggccccaggggacccagtgcccacctcatgccaggtgcccccgcagctcccaccttacttgagcccagctggacgccaagtccgcctcgttgggccccactcccgggccccgggggacccagtgcccacctcatgccaggtgtccccgcagctcccgccttacttgaagtccccgtcgtggtatttgccaaatgcctggaggatgatggtggtgacggccatgacgggcttcaccaggcagaactgcagagtggcctgggggcgacggcacccggtgggcctggggccaggtcccccaggggcccaggaatggggattggggcagccagcaatgagcagccccctgacactgggtggggtggcgctgggccggctagggcccctgacgggcttgggtgggaggagggcgggcagggctgggtggcccctcacctgcttacagaagcgcaggaacccgatggagtaggtcatgccccggaggcagcaggtgccgtacaagcagctggacctgcgggggacgtccctgagccggtgcgggagaatgc

SEQ ID NO: 256996 - DNA, 57 bp, Homo sapiens; identical to SEQ ID NO: 211198
  chr7:1590461-1590518
  hypo

SEQ ID NO: 256997 - DNA, 36 bp, Homo sapiens
  chr7:1596342-1596378
  hypo
aaaacatttgttttctgggccgggcgtggtggctca

SEQ ID NO: 256998 - DNA, 846 bp, Homo sapiens
  chr7:1598549-1599395
  hypo
ggctgagccagatgcgccagctcgggaaccgtggaccaagtgtactggtctggggatgtcaggagcagggcctggtccccagggaggggcagtcgggaggttgaccgctctgccacctgctcacagggctcgccggctgatcgaggcctcacccggtgctggtgtcacagcctctgcgcccggtcacaggaggcggcagggccggctgggcctgatttttctggcgggggcgggacactgaccaagcccattgcaggacagacctgtctgcccagatccaggcgacggggccctctgaccattgttcactgcgtccaggtgcccagagctgtggggaggctgagaagccgcccagccagtcccacaccctggccctggcacagccacctcctcctgctctcatgagaaacccggctgagggcccatgagctgttgcctggttccaggccggctgccctgctagtgcccaccccgaccccctgcctgcccgtctctctgcagatgcggacaggcatggtgtacccccctgcctgcctccttcactgctgggtggaactcggggcgcccaggagccgcctcctcagggctggctcatttgatgtcccaggctgagctgcacactagggggatgaggtgaccggtgggcacccatctcagacacccggcttcccaggtcccgcggccctcccctgggggccctggccagcagttcaccaaggcagcagccccgggtgtgagcagggggtgacagggatggggctccacatcctcccggctctgcttctgggattcccccggctcctgtccacgggcacggcctcctgagagccgcgtggggcgggcagg

SEQ ID NO: 256999 - DNA, 1154 bp, Homo sapiens
  chr7:1599700-1600854
  hypo
cactgtctcagctgacctggcgacctggcaggtcataggggggcgcttgcctcagcttctgactctcgagcaattctgttctgcctgagcccatcagccccagatcccagggtggggccgtcccaaggatctgctctcttcctcccataggtctcccgtcctgtcctccggggccaagcccccacctccctgctcctgtccctggtccctctgttgcccccatccccagaaagtcacccagggcctgcctatacttgccttcacctgagggagctgccagccctgggcgtgtacgggtcgggggcaccctttcatctggagccaggatggggggtgctcgtctggcctggacttgccaggctggctggagaccctgtttggtgtccaggtgccgtcctggggcccagcctctgaggtggcggtgaggcttaggggttggcggactgtgattctccgaatttcaaggtatgttttttttttcgaggagccccccaccccattgaagtgcaggggctcagcctggacaccatacccctctggtatgcacccccttcccccacacacacactctcgcactcccacacccacgcagctcacctccctggtggcgctcagcctgtcaggcaggttggctgcaggtctctgggcctgaggggggggccaaggcggggtgggcctgaagctcggcccccggcctcctggcctctgctgccgcctcctcacagcggcgggcagcctgggtccctgagagatgattgctcctgagcagtggcctctccccagacccaggaactcctcccagccccaccccctccccacccagccagccctacctgcctgggtacagctggcacggaccacaccctccaccttcccccctgcccggattttgggacccacatctgtccacgtgccacccctgcctcctgccatcccagcgggtgtgagcctggaccaatctccctgtccggtggatttcagacgtgggaccacaagtgggctggggtcccgatgccccttcacgagtgacgcagcccctgcctccccttctttggccccctcacccctgaaaagtcccattcgggagcctgagggtgtcgggacacggatcgccaccaagctctgcccctgcccacgcacgcctgctacccggg

SEQ ID NO: 257000 - DNA, 241 bp, Homo sapiens
  chr7:1607231-1607472
  hypo
agttcctccctccaccggggagggaggtgagacttgagtccctgagtgggtgtctgggtgttcacgtgtcctgctgagcagcgcggggcggctgcctccaggtcaccacacctggcacacccggatcacctccctcagcgccttcagcccctccatgcttttgtccttcacggccacggcgaggaggactgctctgtttccagcttcttgagacacaaacgctaccaggttctttgcaaag

SEQ ID NO: 257001 - DNA, 323 bp, Homo sapiens
  chr7:1607697-1608020
  hypo
ttcccagcgccttccgcagccccgcctcttctggctctctctcatctaaaagaacccaggaaagagaagcctgcagaagcgagtgctgtcgaatctcacgtgtgatctccacagagcacagcacagccagccgcctgctcacgtaatgtaccatggcaggggaggcggctcgaatgacaaaactgctgcttctgcttgtctgctggataaaatgcctgcgggctggacaaagcatccactgagggcaagcagggcgccttgagacccacaaatgcccggaaaatgctatcgctgtaggggtatttgtccgccagatgccccat

SEQ ID NO: 257002 - DNA, 573 bp, Homo sapiens
  chr7:1615005-1615578
  hypo
gagttttatgtgaactgaagtatttcgtttaacaccacacagtaaacacaaaggaaacccaccgttgctgggccgccttccatcatggcgcagaattgagagtcgagcacgtcgctttgttttctgccaaacttagccaagctccggtcttaaaatcttttcgttcctagcgtgaggctttctgtctttgttgcaaatattgaaacctgccacgtcacctcttgcactatttgtttagttctttaagaaatgaaaccttaatccatgtacaatttctaaaagcctttatttcaatattttaagaagttatttcccctggcaaagaagccgccctgttgcccggtgtggagctcgatgacaaagctcatcagcctgagtggaagctcattcattattgctgcgttttcgctcttccaggagagaacggagagccagtgtgctgtgtgtcacggtccctggatgaacgtttgtggaactggattgaattaaacaagacgtgcaaagcaagtggttcacgaggtagtgtgggggtgtagggatggggactgacccgggaggcaggacacagcccaa

SEQ ID NO: 257003 - DNA, 236 bp, Homo sapiens
  chr7:1620359-1620595
  hypo
ttcagaatcgggcccggggagacagaagctggaatagactgtcaaggccataacagaagcgcagggcctgtgtgtgccggtgccgggtcctctgcagttgctgttattgggcctcagcctcagctctgaccttcctggtagccctagagaaaagggaaacgagaccgggcagccaggttcctgactccctgtcctgggcaaggagcctcccggctgctccgcgaaagcgccgtgtt

SEQ ID NO: 257004 - DNA, 124 bp, Homo sapiens
  chr7:1625535-1625659
  hypo
ccctggggtggcggcgggcagagaaaccccccggagtggtctccgttcttctaaaagtgatgttgacccccgtgtcgcaggcagctggcagggtggcagttcgatctgtcgttacgggcttgca

SEQ ID NO: 257005 - DNA, 379 bp, Homo sapiens
  chr7:1625859-1626238
  hypo
tcgagttaggaggacgagagacctccagccccggcacccgcatgtctctttggaaaccagctttggctgcgcccctggggacactgtctgccgtggcctcccgctctcctccccggcacaggcagggggtctccctcctccaccgccactcccttggcctcgccctccccgccaggcacctggcttttccccaccgacccccccgggggactgcggcccccagaaaggctgcactctgggagcaaagtggcctgaaaccagagaaaagaacgccgggggatttggcttaaactcgttaaacccaatgaaccctcttgccgaacgatcgcagtctgcgcccggtcttttaatctcgttcgggcctcggggtaatttgttt

SEQ ID NO: 257006 - DNA, 407 bp, Homo sapiens
  chr7:1627150-1627557
  hypo
tagcccaggtgccccggaggctgctgagagggttgagagtgcagagacgaggggcccagggaagtcttggattctctcgccatcttcaatgtcggagcccagacggggcaaggcgaggaggagcccggggcgaagacgccacccacattcctccttcccgcaggcttcttctccttctagcccttccaggagagaaaccatcccacaagtccagagtagtggcgtccccggggccatgtctcctgagcaaacactgttttctaggagtccgaggggcctcagccatctaggtcaatccctttgcagaacggtgaaggaatctgaagcccagagagggaaaacaatgcctcctgggtcacacagcccatcaggggcagggcagggacgaacggcgagaaaaggaccag

SEQ ID NO: 257007 - DNA, 673 bp, Homo sapiens
  chr7:1641740-1642413
  hypo
tgggtcagcccggacgcaccggcctctgtctgggtcccagtcttctcaccgccaggcgggcaggtcagcagaccaggcaggaccgagcccgtcgcccggggctcttgttgtctgtgccatttcggtgccttttgtccttgcttcccgccgctccttgaggatgtttaccggctgctggggccgtgccttccaggtgaggcctcggtcattccaggtgcagcctcggatcagggatgacggcccaggctgaagtatcatgatgaagagcttggaccgagggcagttaaggtgtgtgagtattcagatcccccacgtgcccttctctggaaggtgccagcgacctgtcctctctgggcctctgtcttctcctctgtggaatgggaatgatggcgtccgcacctcatagggctgctggaaaatgggtctgggtctcggctggaatttcagccagcgccgaggaccagaggccctggttcctgtccacgtggcctgggacccccgcggccccgcacctgggctccgggggcaagtgtgttcgctttgaggacccagccttggaggtcagatggcatccgttatgggttaaattttgtccccctaaattcatatgttgaagtcttaacccacagggcctcagaatgggatggtatttggagcccgggccttgaaagag

SEQ ID NO: 257008 - DNA, 76 bp, Homo sapiens; identical to SEQ ID NO: 211201
  chr7:1650398-1650474
  hypo

SEQ ID NO: 257009 - DNA, 207 bp, Homo sapiens
  chr7:1659706-1659913
  hypo
accctggagcctccgacggggcggccacgggcagcgaagaacccggaaaaacaggttcgaggcagacacaagatccaggccccggcaggctccgtgtctgccgaaggcttcctgggtcataggcgacaccttcccgccgtgccctcttgtgggaaaggggtgagggagccctctggggctccttttatttatttttaattttttaat

SEQ ID NO: 257010 - DNA, 350 bp, Homo sapiens
  chr7:1660350-1660700
  hypo
tggtgtgaactgcgcggcggcgtcccccaccaggcaccacaggtgattcattcgtttccctgaaaaggcgcctggatgctgtttctagctcccgttatccccagcgatgctgcacctgccccaggacacacgctagggtggaaccgccgggcatggagcaggtgtggtctcaaccgcaggagaaacagccgggtagcctccaaagggacgtgccacttggcgctcctgcaaggggagaggcactgaggctctcggtcctcaccagcacgtccttgtgccacactcaggcccggcgggtggtgtgggggccgcatctcatggaggtctccgtccacgttgcccccattgtg

SEQ ID NO: 257011 - DNA, 160 bp, Homo sapiens
  chr7:1681117-1681277
  hypo
caccacccaggtctcggctcaaaatccctctcctgggagaggccattccggaaccccaggttcaagcacagtgctacccccttctcccgccccccagctctttccatcgcattgccatggttgacttacttcactgtctgaaatccgttcttccctcccc

SEQ ID NO: 257012 - DNA, 86 bp, Homo sapiens
  chr7:1689040-1689126
  hypo
ggtaaggtgtgcctggtgagcgctgtctgggctgaaggaggagtttgagaaggcggctttatgaagggaggtggccgggcgcggtg

SEQ ID NO: 257013 - DNA, 203 bp, Homo sapiens
  chr7:1692786-1692989
  hypo
acaggcgtgagccaccgcgcccggccaattatttttttaaaggaggaaatttgtgcacagacagacgtgtacagaggaaagacatccctgtgactgagtgacgtgtcttccagccacggagcaccaaggcttgctcagggatgctggaagaggcaggaaggatcctccccaagagctatgagagggagcgcggccctgccaat

SEQ ID NO: 257014 - DNA, 413 bp, Homo sapiens
  chr7:1694555-1694968
  hypo
catgcagggggagcgaagggggtgcccagcctcgccccgcccagcgcacccctgcagcagcccgggagggcaggccgtggctcctgggaacacggcgcccagctgcaatccacattgctgctagtgaatatggacaattcagagacatgaaataaggcagacagagaaaaagcatcggtgactctgccaggctacatatgtgtgtgcgtgtctgcatatatatacacacacgtgtatacgcacacacagagccacacatcactcaacgacagggacacgttctgagaaatacatggttccgtgattttgtcatcgcgcgtacatcctagagtgactcacacgaacgcagatggcggagcctaccccacgcctgggcctcgcggtacagcctgtggctccggggctacacaccc

SEQ ID NO: 257015 - DNA, 465 bp, Homo sapiens
  chr7:1714478-1714943
  hypo
cgggaaacatccttcggcccgggccagcccagccatcaccaggtccactgtgtttgctagagcccccaattcaatctctgaattttaaagatagggacactgaggcgcagacagggcagtggccgcaagccactgaggcttgcaggcagtggtatctgggctcagccctgctcccatgctgggctccccacacctcatatccgggctcagctgggagagtgccctggccttaccgacggggacccggcagcccacggcgtggaggtgaaccagcttgtctgggaagccacattccacccctgtgcacccccaggccctctgtggcccactaccccctctaggaccccaccccacagaagcgcatctctctgctgtccgccccactccagtggtaacttctgtcagagggcttgtcacagagtgctgaccgcgctgagagcttctcaccagcgctggacatgtggc

SEQ ID NO: 257016 - DNA, 226 bp, Homo sapiens; identical to SEQ ID NO: 211208
  chr7:1718471-1718697
  hypo

SEQ ID NO: 257017 - DNA, 166 bp, Homo sapiens
  chr7:1719591-1719757
  hypo
agcagaagggggcgcgtgtgcccctgagcgctcctgtgtgcaggtgcacagttcattaaacatgaccatgaagtcgggacatgggagttacgcattagaagtgttcattcactgattcattcattcattcacctacccagtggacattctccgatgctgggctccg

SEQ ID NO: 257018 - DNA, 186 bp, Homo sapiens
  chr7:1733134-1733320
  hypo
tgtgtggtgtggggcgtgacccacttcctggtgcaagaacacatacacgcctgtggacgtagccttgctgggtgtgtgcacatctgcagaggggtcggtgtacaccgctgtgtgaacacctccggcggtgcccagtccgtgtgaacacatgcaggtgagcacagacacatgcgtgcatgccctctg

SEQ ID NO: 257019 - DNA, 381 bp, Homo sapiens
  chr7:1734710-1735091
  hypo
cggctccggatgcacgtggctgtgccaggcagcagacgtggccgacaggcacatggtgggacctgctctgtggctccagagctcatgcgcagcccgctggggctgtgagggttctgtccatccaccaggaaggccaccaggaccctgctcctgcctgagaaccccaggaagtagtagcgtgccaggtgcgtggccggcctcccagcccttcccagcaccagctgcgtcctcctcctccagggctgcagctcagggctcaggtgtccgcgtcgagggcactccctaaagggcaggagcaggaccattggcacaagcctgggcgagtctcgctgggaggcaggagcagactcagcccgccaagcccatgaaccccactttgaa

SEQ ID NO: 257020 - DNA, 453 bp, Homo sapiens
  chr7:1775490-1775943
  hypo
cccaccacaaccctgggaggcggacaccgtgatgatctctgtttgacagatgaggggactgaggctaagagaggttaagtgacatgcccaaggtcacacagcaggcgcacggcagagccaacaccatctcctggcccacgatggttctgtgtcccctgacgcagcaggtgcacaggcgggccccccacctgctcctagctgggccgggtcaccgtggcaggccttgcggctcgaggcccaactgccctgatatgcctatcacagcctcatgggctctgcggcagagcccagggagacagacagggcgagagccaagctgcagaggcaggcagacgttagcagtaaacatgatctatcggcaaaacattggaacgatgaaaagttatcgatctatagctttccaaccatctccccgcctcccccacacgtctggccctccgcccacctttcccc

SEQ ID NO: 257021 - DNA, 400 bp, Homo sapiens
  chr7:1778728-1779128
  hypo
tggagattgtgtctggaggccggattctcctccacgcgtggaggactggacgccctcagggctgcgcggggccgcaggaccgccttggtggttagcgaggctccctctggctgtggagggagaatggattgtgggtgccaggagaccaggtggtaccttgggcgtcgtccccgctggaggtgggtttgggcggtcgtggtgggagtggagtgattccagatgcttctgcaggtggattagatgctgctggagttggaccaggtgtggggggaggaaagagaggagtccagaatgcggcgtcaacttttggtgtaggaatgtggcggatggtgaggcagggagatgccagcggggacgggaacttggagcagccacttagacgcaacgggggagaatcttc

SEQ ID NO: 257022 - DNA, 1380 bp, Homo sapiens
  chr7:1783932-1785312
  hypo
cttgcagcaggaacgtcggagcaggaggagtcagtggagccatcaggacacccaggcccatggggcaggaggcctcggtcaccacaggactggggcggaagacgagaggcggccggccgtgagggaggcgccctccctccccgcgcttacgtcgcgcggccatgcggtttgggacaggacacccctgagagtgcaggcacctccccctcccgcccctccatccctctgggggctggcgcctggccccccacctggtccccctgggcaggctgaattggggctccctgcagggcggtcccgatggccgggcgtgggtggggcgcgctgtgggtgtgcgtggcggccgccaccctgctgcacgctggcggcctggcccgcgcagactgctggctgatcgagggcgacaagggcttcgtgtggctggccatctgcagccagaaccaacccccctacgaggccatcccacagcagatcaacagcaccatcgtggacctgcggctcaacgagaaccgtatccgcagcgtgcagtacgcctcgctcagccgctttggcaacctcacgtacctcaacctcaccaagaacgagatcggctacatcgaggacggcgccttctcgggccagttcaacctgcaggtgctgcagctgggctacaaccggctgcgcaacctcacggagggcatgctgcgcggcctgggcaagctggagtacctgtacctgcaggccaacctcatcgaggtggtcatggccagcagcttctgggagtgtcccaacatcgtcaacatcgacctgtccatgaaccgcatccagcagctcaacagcggcaccttcgccggcctggccaagctgtcggtgtgcgagctctacagcaaccccttctactgctcctgcgagctgctgggcttcctgcgctggctggccgccttcaccaacgccacacagacgtacgaccgcatgcagtgcgagtcgccgcccgtctactccggctactacctcctgggccagggccgccgcggccaccgcagcatcctcagcaaactgcagtcagtctgcaccgaggactcgtacgcggctgaggtggtcgggcccccacgtccagcatccgggcgctcacagccgggccgctccccgccgcccccgcctccgccggagcccagtgacatgccctgtgccgatgatgagtgcttctccggggacggcaccacgccactggtggccctgcccacgctggccacgcaggccgaggcccgccccctcatcaaggtcaagcagctcactcagaactcggccaccatcaccgtccagctgcccagcccgttccaccggatgtacaccctggagcatttcaacaacagcaaggcctccaccgtgtccaggctgacc

SEQ ID NO: 257023 - DNA, 160 bp, Homo sapiens
  chr7:1785930-1786090
  hypo
cagatcatcaacaactgcatcgacgcgctcaagtccgagtccacctccttccagggcgtcaagtcggggcccgtgtccgtcgcggagccgccgctggtgctgctgtccgagccgctggccgccaagcacggcttcctggcgcccgggtacaaggacgcct

SEQ ID NO: 257024 - DNA, 180 bp, Homo sapiens
  chr7:1787239-1787419
  hypo
cgtctcttcattgccgcctccggagtccactgcagaggggcagagtgaatgccggcggccaagtggcctccgggacaggtcctggagccctgctggactcagggtgggtggaggctgtgcctgtggacggccggggtggccaggacggccaagggctgggaggcacgtcccccagcccag

SEQ ID NO: 257025 - DNA, 187 bp, Homo sapiens
  chr7:1794935-1795122
  hypo
tccatttttcactttcgtagatcatgcttttggtaccacattgccgagccagtggtcctgaagatgttctagtatttctgctatattttattttagaagattacagtttactttttgcatttaaattcgtggcctatttcggattaatgttcgaaagcgccgggatggtgggcgtgagccaatacgc

SEQ ID NO: 257026 - DNA, 202 bp, Homo sapiens
  chr7:1800898-1801100
  hypo
ggcagcggtgaagacggatggatcgctggcattctgcacagcacgggtgagctgcaccacaccatgccatgccgcagaggcctcacctggaagatttccacaggccctatttttaatcactaagaaacccagactgctcctaatagaaaataatatataatttgctttttgtttttcgatatctttttttttcttttggaga

SEQ ID NO: 257027 - DNA, 142 bp, Homo sapiens
  chr7:1801400-1801542
  hypo
tttactactctgggatttatttcagtttggcatacaaagtagggagctttggaattttctttcaaatgattgaccaggtgttcggcacggttatcgagcaatccattgtacacccactgacgcgagacgccactcccacctc

SEQ ID NO: 257028 - DNA, 143 bp, Homo sapiens
  chr7:1827531-1827674
  hypo
ctggcgggcacaggcgctctcatcaggcacggaggagcgccacattgggggtgttcaattaatctggtgtatctgcctcgaaagccaccttcacagtgactcagattttagcatgtgtgagcatcacctggacagcttcttaa

SEQ ID NO: 257029 - DNA, 154 bp, Homo sapiens
  chr7:1846092-1846246
  hypo
ctttttctttaaactacaaactccgtctccttcccacgtacatttctcccgctctcagtgaccaccactgtatggctgtgttgctggtctccctgagcctcggtttctcttctgcaacctgggggcccactccgggagtgaattgggaaaaagc

SEQ ID NO: 257030 - DNA, 75 bp, Homo sapiens; identical to SEQ ID NO: 211211
  chr7:1847553-1847628
  hypo

SEQ ID NO: 257031 - DNA, 308 bp, Homo sapiens
  chr7:1849768-1850076
  hypo
ctccctcggtgaacgtgacaaggcccctccttccccacgggggtgacacgccagagccaggggcgcccggggtggctgggcccaaccgagagggacaagtggaaaatccagcgggatccccgagaccaaagccgactgtggaaggtcccattcaccgttcgcattggtcacacgtcgacacgatgccatgttggatagattgggttagaggtgtatttgctaacattaatttcactggcttctgcttactatttaacgtggctactaaaaaatgtcaagttacgtatgcggttcgcgtggcgtctcta

SEQ ID NO: 257032 - DNA, 363 bp, Homo sapiens; identical to SEQ ID NO: 211212
  chr7:1855556-1855919
  hypo

SEQ ID NO: 257033 - DNA, 539 bp, Homo sapiens
  chr7:1856753-1857292
  hypo
ggggaaacgtgaaccgcaactgagcgagacacggagccgcctcgcgccgacggccactgagagcaaccaccatgagctgctgggtcgaggggaatcagaccctccgcgtcgctggcgggagcgtgtgtggtgcggccactgcaaacagccggcagctcctcaaagagctggacgcagagtccatgggcccagcacccgcccgggcgcgcagccagggggtctgagcgcagtccacgcacagacctcggcacgggtgtccacggcaacacgatcccatcaccaacagatggaacgcggaaccagccctcaaccgccggagggagacacaaaaccgggtttacccgtcaacaccgcttcgtacagccgaactctgatacacgctgccacgcgggcaaaccccgaaaacacgcccagccagtcacagagacctgtcgacacaactccgtgcccaggggatgtcctggaggggcacgtcagggctcagggccagtggaaatgtgccacggttagactggtcgcggctgcgcactgaatgtgcc

SEQ ID NO: 257034 - DNA, 283 bp, Homo sapiens
  chr7:1864266-1864549
  hypo
cccaccaggacccgcgggagaggagaggggcgtgcctggatggcatctgccggggcagccataggtccctgtgaacctcgcttgtagaatacacctgctctcaaagccagcgaaggggagatttttttttgtcttgaggctgtcaggaaatcaaagtgttttcaacttcaaaagactctccgggcgtctcaagttgagaatctgacgcgtcccaggcactttcatgcacacatggggcgagccggggagaagactcagcagcgtccgccgagagtcagccctg

SEQ ID NO: 257035 - DNA, 289 bp, Homo sapiens; identical to SEQ ID NO: 211213
  chr7:1865909-1866198
  hypo

SEQ ID NO: 257036 - DNA, 122 bp, Homo sapiens; identical to SEQ ID NO: 211214
  chr7:1885181-1885303
  hypo

SEQ ID NO: 257037 - DNA, 268 bp, Homo sapiens
  chr7:1888787-1889055
  hypo
acacacacacgtacgcacatgcggggtcagggagctgatgctgtgcgaggctgtcgagggcttcttcactcagcggcacttgggaagcgctgctctgtgggaggcccctcatccatgtcctcgttattggcagcacaaatctccaagtgaggaggggccatgtttaccagccgtccttccagcccacgtctcctacggttccttattttcacaggtactgttttgcagacacagagcccccaagcagcccacacgtcttagccgggtg

SEQ ID NO: 257038 - DNA, 136 bp, Homo sapiens
  chr7:1906702-1906838
  hypo
gaggggctgaggtcggctgcagtacttggagatctagggccaagctggggcgaagtgggagacagaggcaggcagaagctggtgagatggatggcacggtcagtgccacagacatgggcaccgtaggcctcccctg

SEQ ID NO: 257039 - DNA, 190 bp, Homo sapiens; identical to SEQ ID NO: 211215
  chr7:1913834-1914024
  hypo

SEQ ID NO: 257040 - DNA, 287 bp, Homo sapiens
  chr7:1931660-1931947
  hypo
acccgccagccctgcgagctccgttcacggtgagcaccctacgcaggtgcaccgtcttccacccttcatacatcatgtttatggcaccttttccatatttaaacacgtacagacacgcagatgcttagcactgcgccacggtggtctactgcattcagcacagtcacgcactgcacacttttgcagcttggcagcagccggctaaaccatgcggcccaagggtgcgggaggctgcacggcccaggctcgtacaagtcattctaggaagttcccgcaaagacaacact

SEQ ID NO: 257041 - DNA, 234 bp, Homo sapiens; identical to SEQ ID NO: 211217
  chr7:1932169-1932403
  hypo

SEQ ID NO: 257042 - DNA, 235 bp, Homo sapiens
  chr7:1937725-1937960
  hypo
catcccctttggacgcgaggctgctcctttgctgagggctacggtcggatctccccacaggaggagacagagagcgagacagccggagagccgtcacacgcaggacccaccttgaagatgaggcagtcgcctgggtgctcggcgtacagcgaggtcagccggtactggttctccgtggtgatgtcgatctggtagccggtgagcgtgtagcaggccttgcggaactcctggatct

SEQ ID NO: 257043 - DNA, 79 bp, Homo sapiens; identical to SEQ ID NO: 211218
  chr7:1946383-1946462
  hypo

SEQ ID NO: 257044 - DNA, 152 bp, Homo sapiens; identical to SEQ ID NO: 211219
  chr7:1950266-1950418
  hypo

SEQ ID NO: 257045 - DNA, 180 bp, Homo sapiens; identical to SEQ ID NO: 211220
  chr7:1950693-1950873
  hypo

SEQ ID NO: 257046 - DNA, 78 bp, Homo sapiens
  chr7:1961803-1961881
  hypo
catcaccagcccagcggcgagcgccctgcttccagctgcgagagacatgcagctggacctggccgcgccgcgtcttta

SEQ ID NO: 257047 - DNA, 191 bp, Homo sapiens
  chr7:1962362-1962553
  hypo
accagccaggtctgcggtgagctgcacggtttctgcagatgctctttggcaaacttgggggttctcggcttctcctggtttgccgagtttccccatgaacgtgtgttgggcctcgctgactgcatttgtgcatccgttggtttggccatgtaatttttccttttggcgagctgacgcgatggattgtacca

SEQ ID NO: 257048 - DNA, 147 bp, Homo sapiens; identical to SEQ ID NO: 211222
  chr7:1969179-1969326
  hypo

SEQ ID NO: 257049 - DNA, 253 bp, Homo sapiens
  chr7:1970777-1971030
  hypo
acccccaactcctcaccccacgcacggtcacaggagcgagggcgcgtcgtggggtccacgtcaagggtctgctgacaccacgggaacacccccaactcctcaccccacgcacggtcacaggagcgagggcgcgtcgtggggtccacgtcaagggtctgctgacactgcgggcacacccttgctcctcatctggagaatggggaggggacagccctctctggcagcaagcggcgtgacctggacttttctcttt

SEQ ID NO: 257050 - DNA, 118 bp, Homo sapiens; identical to SEQ ID NO: 211223
  chr7:1995853-1995971
  hypo

SEQ ID NO: 257051 - DNA, 303 bp, Homo sapiens; identical to SEQ ID NO: 211224
  chr7:1997041-1997344
  hypo

SEQ ID NO: 257052 - DNA, 148 bp, Homo sapiens
  chr7:1997548-1997696
  hypo
gggggagtccgtggcggcccctgctcagctggaggagcctgtgcggagaaagtctctgtcgaccacaccttggctggaagcacagagggaaccagcccgaggcaggacgcctgggagtcagtgtgtccgtgtccgtcagccactccca

SEQ ID NO: 257053 - DNA, 107 bp, Homo sapiens
  chr7:1999009-1999116
  hypo
gaaggcagaggaagcgacgggacaaatactataagaaagttccactttcaatggaaaggataaagccacagatgtagaaagctcaacagacacgaggcagcgcaagg

SEQ ID NO: 257054 - DNA, 196 bp, Homo sapiens
  chr7:2004876-2005072
  hypo
cccaacactcgctgcgtgtcctgacacggagcacctcgcccctccaggcttgtttgtcataaagagagcacgtgacaaagccgcgcagacatggcagtgtgacgggtgcccacgcctgcccttcctctcccacagacagggctacaatgcctggacacgtgcccggctctggaaggcccaccgcactggtgggtag

SEQ ID NO: 257055 - DNA, 181 bp, Homo sapiens; identical to SEQ ID NO: 211225
  chr7:2006411-2006592
  hypo

SEQ ID NO: 257056 - DNA, 223 bp, Homo sapiens
  chr7:2007846-2008069
  hypo
ggtccaccgtcgacgcctcagtccggcggtcaggtccaccgtcaacaccagcggtcttgtccacatcaacgcctcagtccagcggtcaggtccactgtcaacgcctcagtctggtggtcaggtcaaccgtccacacctcagtccagtggtcaggtccactgtcaatgcctcagtccagcggtcaggtccactgtccatgcctcagtccggcgatcaggtccac

SEQ ID NO: 257057 - DNA, 335 bp, Homo sapiens
  chr7:2019124-2019459
  hypo
actggatggggcagcgccaacacaggcaccaaagcggagcccggagctccacctgcatctgcctggaaacctcttgcctgaggaccctgatgggtccacaaggcgggggagaggcagagagctctagaaaagcagcccggcctgcagaccctgctctaggggcgccgtgtgcaagcaggagctggggtgagggtggcctaggacagtgcagtggcagagagctggcagcatgtctgaagcggagcccaagggctgctggacacgcctggctgctgcactgcctgggctctgctctgagccacactcccgtgcagccatctcggcacagcactgcc

SEQ ID NO: 257058 - DNA, 546 bp, Homo sapiens
  chr7:2024689-2025235
  hypo
ctttatagtctgtgacggttcattccatgtgtccactggacaggacctggggtactcagatcaaaacactttctgggtgtgtctgggagggtttgtggatgagatcagcatttgaatcggggactcagcagacggccccgggcagcatgggtaggcctcctccaaccccttgaggccggaatgaaatgaaaactggaggaggcgaccgttcctcccttgcctgcctggtggcctgagcggggcagctcccgttttccgcccaggactggggctttcaccacaggctccgctggttctcaggcctgcagagcggactgggcacagcacaggctcttccaggtctgctgtgcacagatgcagaccacgggatcctggctccatggccaagagcgagggcctcacagtcactctctcgggatagaccagtctaccgcacctggtgctctagggagcctaacatgcagctcgatctgctctccccacctgatactacctttagatggtgtgtctgtgtcttcggctctcaacagcgaagccgccatcctc

SEQ ID NO: 257059 - DNA, 73 bp, Homo sapiens; identical to SEQ ID NO: 211228
  chr7:2027225-2027298
  hypo

SEQ ID NO: 257060 - DNA, 100 bp, Homo sapiens
  chr7:2034835-2034935
  hypo
ctgtggagaagcctcggggggcacctcggggcacgcactgaggatgaggctggacgcagggaaacctgagctggtgaacgggcagcgagcctggaaccag

SEQ ID NO: 257061 - DNA, 217 bp, Homo sapiens
  chr7:2035958-2036175
  hypo
cacggctgctgggcgggcagggtcccccgggtctacacatgcctcactgggagtctcttcagggaagctccgccggtgtcctcagcctcccatgagaagccagaggctctgagagccacacggaccacaggctcctgcacaggagaccccagagagcctagagcttcttcatgggcccacgggacctgccctgctcacggtcgccagatttcagaat

SEQ ID NO: 257062 - DNA, 34 bp, Homo sapiens
  chr7:2037951-2037985
  hypo
caagatgccagctccgaggcgtccgtgcctctgt

SEQ ID NO: 257063 - DNA, 96 bp, Homo sapiens; identical to SEQ ID NO: 211229
  chr7:2040770-2040866
  hypo

SEQ ID NO: 257064 - DNA, 569 bp, Homo sapiens; identical to SEQ ID NO: 211230
  chr7:2041377-2041946
  hypo

SEQ ID NO: 257065 - DNA, 72 bp, Homo sapiens
  chr7:2046906-2046978
  hypo
gacagtgccacagcggagcgttctcccagctctggtgccgacagcctgtgcagtaacgcgtcactggacccc

SEQ ID NO: 257066 - DNA, 300 bp, Homo sapiens
  chr7:2053261-2053561
  hypo
cggcgtgtgccagcgaggccagaagaccctggcaggtatcccaccacgcccaggcggggctgcactgtgcccacggagaagtggtgcaaatcctgagaggagaacacgggcctttcaagctccaggctgggaacggtgtgctaggagcccccggccccagtgtagatgagaagtgtggatggggagtgtggacgtggcctccgcccaggccctgcgatacccagctccttcttcccactgcacaggtgagagctgctcagagctagacaagggcacggagcgtcacggtggcccatgggg

SEQ ID NO: 257067 - DNA, 85 bp, Homo sapiens
  chr7:2056518-2056603
  hypo
ccattgacttttatcgtttcaagccagttaccggagttgtcagtaccaacgcgcggacgccgcgcaaggccggggcgggggactt

SEQ ID NO: 257068 - DNA, 118 bp, Homo sapiens
  chr7:2056937-2057055
  hypo
ttaagaagcacccagcagagttacattgtccactggctgctcctccttaggtacagaaacgtcccggttctaaggaatagaatgtgctcatcatgcaacgaacggccatgtgaagaga

SEQ ID NO: 257069 - DNA, 42 bp, Homo sapiens
  chr7:2067734-2067776
  hypo
aaaacattatgaaacaatttcgagagaaaataagtatgacct

SEQ ID NO: 257070 - DNA, 175 bp, Homo sapiens
  chr7:2068933-2069108
  hypo
acagaaaccaaacacgaaagattacacgctgcatggctccatttcacaacatttttaaatgggcagaactggcgtgtgagaatcgggaaggcagggctttgggggaggtggaggagccggcaggtgaacttgggagccctggtgacaccgtgttcccgaccgtggagctgagaca

SEQ ID NO: 257071 - DNA, 134 bp, Homo sapiens; identical to SEQ ID NO: 211231
  chr7:2069775-2069909
  hypo

SEQ ID NO: 257072 - DNA, 165 bp, Homo sapiens; identical to SEQ ID NO: 211232
  chr7:2070136-2070301
  hypo

SEQ ID NO: 257073 - DNA, 266 bp, Homo sapiens
  chr7:2071761-2072027
  hypo
gacccctcattcatgcgggacgcccggccccagtccctgtccagtgcctggaacagaacaggtgctcaggaactgtgtgttcaattaaaaaatgaacgagtgaaaccatcagccaatcagtcctcggaaccacctcctgaggcaggctggagtcctccctttcagatgaggacaaggctccaggggaaggcgcgcgccccaggtctccagcctccgtgaagccgagcctgggctcttggccatcatgctaacgggcaggtgggaaa

SEQ ID NO: 257074 - DNA, 144 bp, Homo sapiens
  chr7:2076008-2076152
  hypo
aggacaggggaggacgatgcattcctgcgccacctccgtgcggggaaccagagctccagcctgaatcccttagggttggctcagagtcctctctggatgaagtgtctagtctgaggaggacaatccatccggtcgtgagtttgg

SEQ ID NO: 257075 - DNA, 105 bp, Homo sapiens
  chr7:2083091-2083196
  hypo
tctgacaatcccacgctccttaggaggccctcggcacgacctggcacatcctgtgggctggaggtggccggaatgggcgggcttgggaacgtgatgcccgggtac

SEQ ID NO: 257076 - DNA, 203 bp, Homo sapiens
  chr7:2091644-2091847
  hypo
gggaaacagccaggcggaaagacaaccattcatgcagagtcaacacctgtgcaccccctgcattccacgaaggagcccccggcaggccaagacccacgctccgcacacatcagagaggaggggctggcctcagagaagcgagagcaggagcagggtgaccacggacaagggcagaaccctatcgtcctcgccacgcgcacagc

SEQ ID NO: 257077 - DNA, 31 bp, Homo sapiens
  chr7:2092074-2092105
  hypo
caggcagggagggcgccggacagctcactag

SEQ ID NO: 257078 - DNA, 640 bp, Homo sapiens; identical to SEQ ID NO: 72943
  chr7:2094462-2095102
  hypo

SEQ ID NO: 257079 - DNA, 47 bp, Homo sapiens; identical to SEQ ID NO: 211235
  chr7:2099514-2099561
  hypo

SEQ ID NO: 257080 - DNA, 169 bp, Homo sapiens
  chr7:2100209-2100378
  hypo
acactggaaggaggaggcaacgacgacagcatggaatcgtaaacaaataaaaaaagagcccatggaacacaccagaaagccctgaagtggacggccacgaggggtccccgggccacggccatggcagcgccacgcgtggggagaaggcggccttgcaatagaggctgcc

SEQ ID NO: 257081 - DNA, 312 bp, Homo sapiens
  chr7:2102522-2102834
  hypo
acacgctgcattcccagggacgaaggtcaaaaggataacgctaagataaaaacaaagagaagccacagaagcgtggctctatgtacagaaaacataaaaatgggaaaagcggagcaatgtttaaagatatacacacaattaaactagaaagaaaaatgagggaagggactgctctacgtttagagcacggctccgtctgacagcggaggctgttctgtttcttacactgggactgagacacgggaacttgctgtattctttgagctgtatgtatatgttctatatgatctttgcacacgcaatgtgtttcac

SEQ ID NO: 257082 - DNA, 46 bp, Homo sapiens; identical to SEQ ID NO: 211236
  chr7:2105354-2105400
  hypo

SEQ ID NO: 257083 - DNA, 239 bp, Homo sapiens
  chr7:2108164-2108403
  hypo
aggcaggcagggggagtctccgcccagcaaactggacacccgccctggcccagagagcatctggggacagattgacttctttcccgccttgtcttctgaaatttcagtgcccaaggaacattttaaacagaactcacaaaaaccgtctttcatgctccagcgacctctgctcacggtgccaggcatcagaacccccgcaggcactgaggcttagagtcgggccatggagccacccacag

SEQ ID NO: 257084 - DNA, 160 bp, Homo sapiens
  chr7:2110060-2110220
  hypo
agccaggagagatgagaggccgcccgagaggaggagagtcaggactccacagtgaggtacgagagctctcccaggaaaggacacagccaggaaagaagagaggccacaccggggagggtgcgagtccgcggagggagggcccatccctactcagacagcc

SEQ ID NO: 257085 - DNA, 38 bp, Homo sapiens
  chr7:2110250-2110288
  hypo
acacgggagctgcacacgactctattgagtaccacaaa

SEQ ID NO: 257086 - DNA, 404 bp, Homo sapiens
  chr7:2113542-2113946
  hypo
caagcactcgggcccgcgtcatcagggccacatccccaaggcctgatggctgacactgaaatcttctgaacaacagaactagactgtaaaaatccaacaccaagacgtgacaaggagacgacactgtggaatgctcgccaagaaccatgtccgggatgtttgccactcacacctgactggcaggcgagtctacccagtctgttcagcacacgggatgtgggtgaggacggccacatgccgttccaggcagcagagatggcagcacggaacaccgcagccagcctgggctcgctgggcctccattctactggggtgggaatctcaagcaaagaagccacgcgtgtggcatgagcagagaatctcacggcgggtgcaggtactgaggtcaccgagagcagaaggaa

SEQ ID NO: 257087 - DNA, 42 bp, Homo sapiens
  chr7:2120254-2120296
  hypo
actcaaagaacagcgctgggctctgacgccaagtccatcccc

SEQ ID NO: 257088 - DNA, 137 bp, Homo sapiens
  chr7:2122563-2122700
  hypo
gaagtcaataccccgttaggtgtggcaccttcatggggcctctgctgtctctcgcgctgcagggagagctcccctgcccgtcaatcaggaacgggtggcacaggcccccagggggaagagccgtccctccctgcgcg

SEQ ID NO: 257089 - DNA, 47 bp, Homo sapiens
  chr7:2130636-2130683
  hypo
cagcctgattcacccgcgtttatttgacgcgtcgggttataagtcac

SEQ ID NO: 257090 - DNA, 79 bp, Homo sapiens
  chr7:2138295-2138374
  hypo
ggcacatgcaagagccgcctgctgccactgctccaggaggcccaagggagcgcactaccacacccgatagctgcccggc

SEQ ID NO: 257091 - DNA, 158 bp, Homo sapiens
  chr7:2147799-2147957
  hypo
tagcaaatgaattccggtgggattcatgtccgctgatcactattcaggccccacctcattatcatagcaggcttaattggcatttcatccccacattgtgtctcacaaacgaacaaggtgtaattatggtaaaaagagcgctccgacggttttggttt

SEQ ID NO: 257092 - DNA, 35 bp, Homo sapiens
  chr7:2148670-2148705
  hypo
gcacacagcctccccgcacccgctctgcagctcag

SEQ ID NO: 257093 - DNA, 49 bp, Homo sapiens; identical to SEQ ID NO: 211238
  chr7:2148951-2149000
  hypo

SEQ ID NO: 257094 - DNA, 195 bp, Homo sapiens; identical to SEQ ID NO: 211239
  chr7:2158523-2158718
  hypo

SEQ ID NO: 257095 - DNA, 170 bp, Homo sapiens; identical to SEQ ID NO: 211240
  chr7:2160716-2160886
  hypo

SEQ ID NO: 257096 - DNA, 163 bp, Homo sapiens; identical to SEQ ID NO: 211241
  chr7:2162503-2162666
  hypo

SEQ ID NO: 257097 - DNA, 883 bp, Homo sapiens
  chr7:2162966-2163849
  hypo
gctcagccagctcagggactgagatgaaactgcacgctacagcttggagacattgcgggagggctcccagcaagcgaaactgggctggggtgcaggacggagagagggcgctggtgaggccctggtcctgtgtgtgagggcggctgacacccggtgggctctgtttgcgcttgagctggtgacggtagggtttccttccctgtcaagcaggagagcaccccagtccacccagggagcacccaggaggagccagccccgccaagggcacgcatgggaggcgtcaatccgctggagggcagcagccctcaagcgaggactcacggggacatgcgataccaggaagcgagtcggaggcaattaagcctgtttcagagtgcacttcgcaggcggcgctgaatcgatagatcctccggcggcgtggtgctgcaggtgaggaatcagtcaggtaaatgcctcccaatctgttcctgctgtgcaaagaatcagcgctgtttaccactcaagccagaaataaataaataaagctgccaattagccagcgcccttttccgctctggcaagggctttttagcttctccaaatacaccagagtcctgcaaggctgcacacaagcaaaggcagcccaggcagcaaggggcgggggcttaggccccgggggcaagaactctgcttcctgggaagccccctgtagccaggtcaggctcctcctctagacggggaagccgggcaaacacctccaggagcaaggcgaaggctctcagtacccccagtacagatgcagccgggagcccccagctctccacaggtcagaggccacgccacgcccctgctcaactcgcagagcagcaaggcaggaggggcaggccatcgggcagcggtgcag

SEQ ID NO: 257098 - DNA, 375 bp, Homo sapiens
  chr7:2169012-2169387
  hypo
aatgtggacaggcacgagcaggccaagccacccagcaggctcacggcggctcctgtccacacggctcctgctaggcagcgcccctcctgccgtgggtctgaatccgtcacctgccagtgacgaggacgcgaggaacacgcgcttctcagagtccagtcacacacgaggcagcaggacaggaaccccaggtgcctcccgtcatgaggagagagcacacacacgatcccatccctctggaggctgcctgtctaacaaagatggtctccctgacgagagcaaggtggcaagacagacacagctggacacgcaggctcgagcttctgcccagagatcagaaaaacaaatgcagttatttttacacgcatgtcagagaca

SEQ ID NO: 257099 - DNA, 158 bp, Homo sapiens
  chr7:2183890-2184048
  hypo
gaagcacagcgcagcgcatggtgagggcagatgcgagacaaacactgactgctctcagcgtccccatcgtcattcatcgccgggattacagatgatacacctgaaccctggagccctcacggggtcctgagaggccccgctcccgccaccagccctct

SEQ ID NO: 257100 - DNA, 446 bp, Homo sapiens
  chr7:2196794-2197240
  hypo
atatatactggaacgtcttcaaaagagtgctaagtaatacaatattttaagaatagaaatcaatagtaagaaggcgatgggaacactgttgtggggaggcctggctccactgaccactccagcagtgcaggtcaccgtgatcaggaagcggtaatgatggaacaaatcacagcactcagagggctcctccccttcatgttaccatttgagctccccaccatgcaagtccacacctcacatgcgtaagaacccgcaaaaactaagagactgagaagagaaaagcagcacagcatgctcccgacacggaagacgctgcccatctgggaggagtgggagagccggtcccctacagtctctgctcagtgcagcacaggcccagggccctgggacacagggcagagggtgtctgaaagaggagggcagacacctcccgagaagccctggga

SEQ ID NO: 257101 - DNA, 91 bp, Homo sapiens
  chr7:2206523-2206614
  hypo
cactacacacctgggcggcgcactccgctcacaaagcactcttccaggaagggccccgggctgctggagactgaaccggaatctgcctaac

SEQ ID NO: 257102 - DNA, 611 bp, Homo sapiens
  chr7:2208345-2208956
  hypo
gcgtggagggcgccacgaggtcaaggtcctgaggccggaacaccaaggagctctgggagggtggaggaagaacacaagcctggagcagggggcagacacacggggcgtggggcccagaggccaccgggaggactcaggttttattccgagtgtgctaaggagccagggattgtggctgaagcgggaggaacacgctaaggagccagggatggcggctgaagcgggaggaacacgcgctcggacttgctgatgggctcttacgtgggcttttccccagctgaagaatgagttactaaatgtgttttaaaatgcaaaaatgtgtacccggtgcttgtcctggcgctgttcagaacaggaagaaccggaaacaacctgaatattcacaggaggcaaacgatccgtgacaggacaagcgtgggatggcctcctgtgtggcagaaaggacattcgggacctatgacgcaaacgcaggcggctacacattcgcctgcaggactgcaccttttaaagtccgcatgtagacagtgaaaatctacaaaggtaaaccggaatctcctaagagcgggtagggatgcgactggtgggattacgggggattggcagtcttcttt

SEQ ID NO: 257103 - DNA, 693 bp, Homo sapiens
  chr7:2211989-2212682
  hypo
cagactccaactctcgtctgactctcgcccctgcaggcctcgactccacacagggcccagggcccagcagcaggaagtcacggtgccgctgcgaaaggccccgggtctccagagaacatccacgcctcctcaggacaaagggctcctctgggaaaaggcacaaacactgcctgcaccgtgtgcttcccagaacagaaaacgggagggcgccgccgccaggacggggcagcccaggcgcagccactcgccaccttggccggctcaacttcccagcagcatccagcaaagccgtcagtagtcctcgtggtgccagctcgagtgcctgatgggccctcgcacgggtctccgtgggacagaggtaagggatagaggaccgaggccctaaccagctgagaacccacgtggctggccgcagtcccatcccagccctgctggctgccaggtcaaggctggagccccagatgggctcccgtggggcgaagtcagaagtcagaggtgctcgaggctgccccatcagatggctcctgggagcgtgcacaccgcggtctgtgcgcacagaagaccccagacggtgccaggcaccctgcacacatgcctctggctgagactacagcacctgctagcatgcccctggcattcccagtcgaatctccttttcttccatgtatacgtattcctcgtgaagttacataa

SEQ ID NO: 257104 - DNA, 240 bp, Homo sapiens; identical to SEQ ID NO: 211250
  chr7:2222236-2222476
  hypo

SEQ ID NO: 257105 - DNA, 747 bp, Homo sapiens
  chr7:2232844-2233591
  hypo
ggtgcaggctcacaaaccatcggcccaagccacgccccagcatactcacttgcccaagcaaccggggtgagacaagggccacccagctccgacagccaccacgtcctggagagaaagcgtccccgcccagaggacggtccttgtcctagaacagcaaggccctccaactcttggtcctcaaagcccttccccgcctccgcacccagcaccacattgctgtgctgagtttcagcacagggaccgtgcgtcctgctctctgctgcatctcccagccagtatacaccacggtacgtcataagccctcaacaaatatttgttgaatggaacagacgtgatcacaatatgtgctcctgggaaccctcggctaccagaaaaaaaggcgagacagaaatgagcacttctcaaccctgggagcaaatttataagggttttatcccttcaaaattattaccaaggggtaacacggccgcgggtaactccagattcctccggaaaacctcactgtgcactgccaaggctccagccagagcaggtgctgagccgcgatccgggagacgccagtctcaccctaggctctcttccacaaccaccctcaggcaaggccacaccgtcgcccaactgtcccaaatctggaaaggaagaaaccaccatgatgctgtgtgggcagcaaaaggctctgcatgggaaagaaaagctgcagggaaaaggcagcaaggctctgcatggatttttttttttttttttttt

SEQ ID NO: 257106 - DNA, 184 bp, Homo sapiens
  chr7:2236061-2236245
  hypo
aactaagatactcccgcaaaacgctcctgcggcatcttccaaaagattgcatctgaggaggcacccctgttgttttcattgtttaaagctgtctgtgtgtgtgcactacgtgggcagactgtgctgtgctcgtcacagcgtcgccagagccagcccaaagcctggcaaacggcaggtctccaaa

SEQ ID NO: 257107 - DNA, 137 bp, Homo sapiens
  chr7:2237100-2237237
  hypo
ctcatctcccgccccgacccacgcatcactccgccgacgcctggtacacacgacgtgcactgcacagccaccttctccctgcacacgggcccaagctcggacacaggcacgaccaggactggcgggctgcagagctc

SEQ ID NO: 257108 - DNA, 339 bp, Homo sapiens
  chr7:2237968-2238307
  hypo
atctcccaagagcccgcctttgcttctgccagccactcacgctctccacaggctgcagccaggtacacaccccccttcaagcaacaaaaccactgcctgagcacctggcctgctctaagcccagggctgagacaagggggagccagccacacacaacaccaggagcgctggcatcgccggagcaaggagcccgtgatggccgtccacccgggacagcaatcgcgctctgcggcacgaggctttcaacagaggcgagtgcttcctgggggtcaagagcatggaacacacacttcaggccccctctccaggctgcaggccaacaggcgtccatgagacaga

SEQ ID NO: 257109 - DNA, 110 bp, Homo sapiens
  chr7:2241774-2241884
  hypo
caaaggctcagcacacgcctactgcacgtctggctcaggggcgctaaagggagaccccagctcttaactcacaatgctcaggattgagaggatgcgtttacggaaaacca

SEQ ID NO: 257110 - DNA, 274 bp, Homo sapiens; identical to SEQ ID NO: 211255
  chr7:2255763-2256037
  hypo

SEQ ID NO: 257111 - DNA, 100 bp, Homo sapiens
  chr7:2256931-2257031
  hypo
actaacagagtccatcgccctgccagccagaaaatcctgagaggtggactgagggctgcgaggggccagggaccaccaccaggagcggacatggcagagg

SEQ ID NO: 257112 - DNA, 72 bp, Homo sapiens; identical to SEQ ID NO: 211256
  chr7:2259945-2260017
  hypo

SEQ ID NO: 257113 - DNA, 92 bp, Homo sapiens; identical to SEQ ID NO: 211257
  chr7:2262278-2262370
  hypo

SEQ ID NO: 257114 - DNA, 509 bp, Homo sapiens; identical to SEQ ID NO: 211258
  chr7:2263998-2264507
  hypo

SEQ ID NO: 257115 - DNA, 660 bp, Homo sapiens
  chr7:2264962-2265622
  hypo
tcttataacctggcaggtaccgtgcacagcccccttgcttcctggggctgtctgggccgaccctcgccccgcctgaacccacctcgtagttcctggcactggtgctggctgctctctccagctccactcgagccctcttgtgactcagctccatctgcattttctcccgctccacctggatgaggtgggacttcgaacggatctgctctgctctttcctccagctgagcaggtcgcacccaaagaaaaacagaatcctcagtgacggcatcaaaccaggtgagtgactcagtgcagcagacacactccctgaggacccattcccgcaggtcccgtgctaagtcttgatgtggcccagccactgggctccaggctggggaacaggggaggggcaggaaacgggaaggtgaaaaagcctgggaagaggaagacgtcttttgagatgacattaagcatattagtgaaggcaacggcctcgaatgccacccatttatttaccagccaacggctccgtgggtcggaagtccagacgtaggtggctgcattctctgaccagggtctcccagactaaaaatcaatgcagtcggccaggacatgttctcacgtggagctcagagatggagaatgaggtctccttcccgactggctgccagcccagtac

SEQ ID NO: 257116 - DNA, 457 bp, Homo sapiens
  chr7:2292991-2293448
  hypo
aggtgcggggtggacggagaggccttgcagccttctgcccacacggggtcacgcttcatggctcgggtgtcatggtgccattcatggcaactgagaacctgtctctgcagaggggcgtcagaaggcagcgcagcccaagactcgggtggactagggactcacgggacagcccacccatcgggctccaaagggaacgctgccctctgctcatctggccagaaggaagcagcccacctcacagcaggaaggcagcagcagaacccacagggcagggcaggctgggcccgagccccacagccaccgagtcagcacagcccacggggccagaaggcacggccgttccctctggccggctcgcagtggacgatggatcacctgcctgcggggcacacacaggagtcccctctccatcccacggccgtgagctgcccgtaggtacaggcggaagggaagcacc

SEQ ID NO: 257117 - DNA, 194 bp, Homo sapiens; identical to SEQ ID NO: 211261
  chr7:2293743-2293937
  hypo

SEQ ID NO: 257118 - DNA, 490 bp, Homo sapiens
  chr7:2294448-2294938
  hypo
gagaaccccaccacctctctcgaccaggctagcaggccacagggcgaaggacagtgtggcccagctgcccccatggtccacggatgcgcctcccgacccgcaggcgtgagctcctctgctccagctgcagcacggggcgtggcggggaggggagctgccgtccaaagggaattacaccgggacacaccgtttggaaagaggttttagtgcggccgcagggagcaccacctcagcctcaggcgctagtgaggacacaggccgtcctccggcggggagcacggtggggtcagggtgctgtgtggtcccgcaaagaggcagctgagcttgggcctcaggtcgttccacaccttgctcatctgaaagggaagcgaagagaacaagatcagcaggcggggccggggctcctcctcacgctctgatcccagttccttcgcctgccagtgacagggagggaggggccctcaggtgcgccagctcctcaaacctctgg

SEQ ID NO: 257119 - DNA, 426 bp, Homo sapiens
  chr7:2298036-2298462
  hypo
tttctcaggccttcgcaaagccggcgactctcccaacacatatgctgggagagccagatgccccagaccccccgacccctaaggctccatcaagcactgcagaaaacccgagttcccatataacgctgtgagccgtgtgcaaaacgggcacgcccaggaggggcacggaggagaacaagggtgttgtctccgcatcagtaacaggagagagaaacgcaggcctaggaagggggcacagggaagggggcgcagggtaggtaggagagacagcagctgcaggaaggacgtgctgctgatccaggaagagaggcggccgccccaggctgcacgcagaagcaccacactcggcggtgggggcagcggtggacacaggctcctcttcggccctcacacaaggctctgtgcgggcagcacagccacagagag

SEQ ID NO: 257120 - DNA, 265 bp, Homo sapiens
  chr7:2299116-2299381
  hypo
tggaacgagttttacgggacacagccctggaatgggagccaggggtgccgcccaggccctgctgcaccccaggggaccctaagataccccttccaccctccagacctcaggccgactgaacccggaggctccccggccaccaaccccacacccaaagcagctgggattccagccagtaaaatgtgccaggagaagaggtgtgttaagagtttctaaaactctagagagaaaacgccagctgaccgcaggtgcccagctcccacct

SEQ ID NO: 257121 - DNA, 149 bp, Homo sapiens; identical to SEQ ID NO: 211264
  chr7:2300173-2300322
  hypo

SEQ ID NO: 257122 - DNA, 34 bp, Homo sapiens
  chr7:2300782-2300816
  hypo
tttggctgggcacagaggctcgtgcctgtaatcc

SEQ ID NO: 257123 - DNA, 142 bp, Homo sapiens
  chr7:2313678-2313820
  hypo
tgcagtttccaggcgctgaacgccagccagcgctcatcaactcggatgcccaggcctgagccagcatcacacatccctgtcgcgtcctctgctctctgctgccctgagcgcccgtgtgcccttcagcgtgagctgaatgatc

SEQ ID NO: 257124 - DNA, 552 bp, Homo sapiens
  chr7:2328672-2329224
  hypo
gtttttatattatgtaaccacggtcgaaagtcagttcctttgttcctgacgtctttccctcagcatcaggctgcgagacctgttgtgcacgtggctgtggggcgatggctgcccctgtggtgggcgccgctgcgtgactatgtgtcctcgtcgcctcctcctccctctgctgcggggcatctgggagggttccagcacctccctgttccacacggtgctgttacgaacattccagcacgtggctcttggtggacatatgtgtgcctttctgttggctccataacatatctacaagtgaaattgctggatcacgggatctgcatatgttcagcttggtaaatatttcagttttccaaagtgactgagccaattcacactcccaccagcaagagctccagctgcctcgcacacgagccaacattcagcattttccgtccgtcttccctcattccaggaggactgtgcctcttttaacacagttgcgatccattagttcactgttccatctagatgcttttccctttacgttataaccaccgttccatattccca

SEQ ID NO: 257125 - DNA, 395 bp, Homo sapiens
  chr7:2349364-2349759
  hypo
tcaaaaaaaaaaaagtataaactttaagtgacagcgcaatgaattctgaccaacgtattcacacagagaacagacctgacatgagcgagcagctgcaggtaagggttgatgggagcccagggtgcatggaagtcgcccaggcaagaggggaaggctcggggcaggggtgaaggagccccgagggtcagcaaaggccctggacctgcctcaatgacactcaaggagtcatcgccaggtcaacgcggacaaacagcacggagcttccgaaccgaatggaatgtatggaatgccatgggatgagccgcaagtgaagcgtgactcaccctcgttctaaagagtcaatgtagggccgcaggactgtatacggcagagccaggatacgccgtggtcatctg

SEQ ID NO: 257126 - DNA, 152 bp, Homo sapiens
  chr7:2360917-2361069
  hypo
tacatcgtcagctccgctgctggatccctctagtgtttggagagtgccttgggaatgtgcaccgacacgtctgccttcagcagatcctccccacagaatactattcctgcgtattcagggaactgtaaaaagaaaatggaatttcttttttt

SEQ ID NO: 257127 - DNA, 127 bp, Homo sapiens
  chr7:2412473-2412600
  hypo
gatgatgacccagtcgctgcccaacagtgagcatttgactggcctaggaccactgctgggcaggccgggactcgcctatgaatggggtgtggcctcggctgatggaagtgagcgatggcctggaggt

SEQ ID NO: 257128 - DNA, 439 bp, Homo sapiens
  chr7:2420148-2420587
  hypo
gcgacgccactggcggcaccttctcctgcgcccagtgatgtttccacggtgcctgtacacagccgagcagcatttccgttgaaggacttgcatccccattgcgggcagtgctggacgtgtcccggagacccaccgggagggcgccgccatgccttgtacccccaccgtgcaggttgtggccggttttctccgcaggttgaacatggaaataaaagcaaacttgtatgaaaaaccggtctttctcctctctttgaatgtagatagagaccttgaacttggtgcctgcctccctccccagtggcaagggcctgcttgccaagccagacctctgcagggcgctgtcccgtccggtcgtcacgcacactcggccaccctgtgtccagcgatgcactagtcatgccacagtctcttctgttgcgttgttttctgtgaaagatgc

SEQ ID NO: 257129 - DNA, 260 bp, Homo sapiens
  chr7:2448729-2448989
  hypo
ggtgtactacaaggcgcagctgtggatagcctcgccgcaatgatagtaatttatgtaaacactgactgctgctctaattgaaattatgatgcacctgggcagagaaggtgtggggaggagagcgctgcattttcgcctgtcgccttgggaagtcagtcgctaatgccccaagctgaacaaccaaggttcactctgaaggcagacattaaaagaattagctaaaaagaattatggagcgggtagggcgtggtggttcgcac

SEQ ID NO: 257130 - DNA, 90 bp, Homo sapiens
  chr7:2464829-2464919
  hypo
ctccgtctcaaaaaaaaaaaaaaaacaacaaacaaaaaaaaaacgtaaaaaaacaaaccccggcccagtgaggaccgcgcttagtcagca

SEQ ID NO: 257131 - DNA, 214 bp, Homo sapiens
  chr7:2471874-2472088
  hypo
cactccctgggaggcgtcctcttcttgggagttgtgggcaatattactttcccgccagtggcgagtgtcagcacatgtggagtactgccagccagggaagcacgcgagccttggcgtccagggtcattactggtgctcgggcacatggatgtgtagactccctgcactgctgacctcagcctccagcccctctggagggcgagctgatatcacg

SEQ ID NO: 257132 - DNA, 1317 bp, Homo sapiens
  chr7:2472800-2474117
  hypo
ccaactggaagcgcgtgatgatcgtgctgagcggaagcctgctgcaccgcggtgcgccctaccgcgacccgctgcgcatcccgcgcgagcacgtgcacaacgccagcgcgcacctgaccttcaacaagttctggcgccgctacgggaagctctcccgccacctcatgaaggtcaagctcaagaagtacaccaagttcctcttcgtgcgcgaccccttcgtgcgcctgatctccgccttccgcagcaagttcgagctggagaacgaggagttctaccgcaagttcgccgtgcccatgctgcggctgtacgccaaccacaccagcctgcccgcctcggcgcgcgaggccttccgcgctggcctcaaggtgtccttcgccaacttcatccagtacctgctggacccgcacacggagaagctggcgcccttcaacgagcactggcggcaggtgtaccgcctctgccacccgtgccagatcgactacgacttcgtggggaagctggagactctggacgaggacgccgcgcagctgctgcagctactccaggtggaccggcagctccgcttccccccgagctaccggaacaggaccgccagcagctgggaggaggactggttcgccaagatccccctggcctggaggcagcagctgtataaactctacgaggccgactttgttctcttcggctaccccaagcccgaaaacctcctccgagactgaaagctttcgcgttgctttttctcgcgtgcctggaacctgacgcacgcgcactccagtttttttatgacctacgattttgcaatctgggcttcttgttcactccactgcctctatccattgagtactgtatcgatattgttttttaagattaatatatttcaggtatttaatacgaaatgtggaagggaatgctggagtaaaatatcccctctcccctccgcccgcccacccgcccgcccgctcgcccgctcgcccgctcctgtggtttttctgagcgtgcgggcgccgggaggggatgctgaggctgatggagctgcctccagggctagggccactcaccggaggagggcggggcctgcacttgaagtcaggccgcacctgtctgtttttggaagggtagccgacaaatccttccagagggaaagttctttgtttaagtgttgtacttgaaaaggtcaatcttcagggcttcctgtttgaagtcaagtcagaggtaaaccggtcagttacagaagcaggatttctaggatttctaactccagctgttcccatactgtctagtttaaattatggctgttaaggccgggcgggtgactca

SEQ ID NO: 257133 - DNA, 33 bp, Homo sapiens
  chr7:2476917-2476950
  hypo
gtgggagggcacctcgcccgtttacagttgggc

SEQ ID NO: 257134 - DNA, 280 bp, Homo sapiens
  chr7:2477349-2477629
  hypo
cacacacacacacgcgcgcacacacacacacacacacacactctctctcacacacacatcgggatatttttcttgtttccttcttccagagggtgtaggagttgtgttccaagtttgttcctgcaaaccctccgatgaggccagctgcattcatcggggcctggatggccgcacctctctctccccgccctgtctcctgcactcaggtgagaggctggcagggctgccgtaggggtggagagtgaacgcagggtggctaagccctcgtccctgtgaggga

SEQ ID NO: 257135 - DNA, 567 bp, Homo sapiens
  chr7:2499648-2500215
  hypo
agagagaatctgagcggcacacaggctggggaggggttggccgtgcctcggacaccggcctctgcagcttgagcctattactgacccaagtcccagtatcaccaggtcccagtgattcctcacagcagccggcgtccctccccttgtctcattcctgctggccccgacttcctagctccgtgcttctccaggcctcagtttcccctcttccaaggccagggcccgctccccttcctggggctgccaggagcctagagcgtgggaaacggctctgctgtgtgtccggggccaaagacacgcaggggcggtcgtgccagccaggctctcgggctcttgggcgctcgccacactctggcggccaaacaatgcccacctctgagtagagctgtgggtggcggtaaccatggtgaggggccctccacgccaactgcccatccggggtcagccgggcccgtggccctggttccggctttgtctcggggctggaactgggcccagggatgggctctgaatggctggcgggtgggagggcactgcccaccacatagcggcggctgctggccggag

SEQ ID NO: 257136 - DNA, 175 bp, Homo sapiens; identical to SEQ ID NO: 211272
  chr7:2539250-2539425
  hypo

SEQ ID NO: 257137 - DNA, 288 bp, Homo sapiens
  chr7:2539830-2540118
  hypo
tccgggcccagtctcgcggttgccatggtgccctgcgtggccctttgggccgcggctaatcccttctctgggcctctcatcccggctgtcccacccccgggctggtcgctggtgacttggccatgcccaacaaggctggtttctctgccggggtcaggggaggtcataaatccagcccccgtggtccccagcccctcggccccggcgctttgtccccgccactgtccccacatccccggccctcccgctctgggaactccagtggtgggaagcgcgtttgccaggtgg

SEQ ID NO: 257138 - DNA, 371 bp, Homo sapiens
  chr7:2544413-2544784
  hypo
gtgggaaggggcttcgggggaggtccctgtggacacacctgagcagcccggcctcctgggggctgcgggagaggcagcagagccagcccgctcaacagcagggccacaattgcctgtggcccctggggagtgacaccccccccccccccccccggctccacagaggcgaggatgggaagaggcggaggaaccggctgtgcgggacacctgagccccggaccaggcctcccagggggtggccgccttggggctgagaggcagagaggaggtcagttcccaccgcctccccgcagaggccctgggaggaagcgggtcagcaggtggtgggccagctggggcctgggcctgccccaacccgcatctgctgggca

SEQ ID NO: 257139 - DNA, 211 bp, Homo sapiens
  chr7:2565009-2565220
  hypo
cggcatgccctcccccgatggccctgccttgtcctcaggtggttctgccacgtggacgatgacaactacgtcaacctgcgggccctgctgcggctgctggccagctacccgcacacgcgggacgtctacgtcggcaagcccagcctggacaggcccatccaggccatggagcgggtcagcgagaacaaggtggtgagtgcctgcccctccc

SEQ ID NO: 257140 - DNA, 111 bp, Homo sapiens
  chr7:2565883-2565994
  hypo
tcacttcatgaatacggctgagcggatccggctgcctgatgactgcaccatcggctacatcgtggaggccctgctgggtgtgcccctcatccgcagcggcctcttccactc

SEQ ID NO: 257141 - DNA, 789 bp, Homo sapiens
  chr7:2566359-2567148
  hypo
aagggaggccagggcagggccgttgcctcactcagggctgtgtggccagcctggggcggggcccagggatgtcgggcccctcccggcatcactccgcccgctccccacaggtgacgctgagctacggtatgtttgaaaacaagcggaacgccgtccacgtgaaggggcccttctcggtggaggccgacccatccaggtaaggaaaccccggcccagatgggcttgcgtagggtggcctaggggcgtcagggggcctcgtggagctgcagcagggtctctctaagcggcatgactctacatagaggtgtcccccggagtcctgcttgctcggggtggggccgccagtgttgtgggactgcaaatgggagctcagcacctgcctgccacccacgcagaccagcccctgctctgttcccacaggttccgctccatccactgccacctgtacccggacacaccctggtgtccccgcactgccatcttctagtggccatggctgagacccaatccctgggcgcccctggtatccaaagggcccagggaccctgttgcgctgccctggcctcggcattcgaggctcccctagggccgtgcctgtgcgtgtgcgtgtgcgtgtgtgtgtgtgtgtactgcatgcccacccgggtagcaggctgctgggcagttctgctctgtggaggggcgggcaccagcgccacttatgtgcctctgctccgagggccagtgggctgcagggcctgcttggaggaaggatttgtgtgtcggaggccactccgagggcaattctgt

SEQ ID NO: 257142 - DNA, 309 bp, Homo sapiens
  chr7:2583247-2583556
  hypo
acgaacgagtgtgcggcggggatggggtctctctccagcagacaggccacgcggggactcagccgcacccacagggcttccgtccaggggctctggcagcgcccgaaggtcgtggtcaggacgttcagggcctgagtgaccttgggggtggccgcggagcacaaggactcttcaacgtgatccatgatcttctgggcacacgcgggccagtcaccccccggcaggcagggctgcccctcggctccacctcgcatggacaaagccaggacgtgcaccaggagctgactggccgccgaggccacaaacagg

SEQ ID NO: 257143 - DNA, 37 bp, Homo sapiens
  chr7:2593553-2593590
  hypo
tacaggtatgagccactgcatccggcccctactttca

SEQ ID NO: 257144 - DNA, 53 bp, Homo sapiens
  chr7:2609245-2609298
  hypo
gcagcccgtgtgccgaccttgtgcgtacgaatgtgttcgtgaccctgtaaatc

SEQ ID NO: 257145 - DNA, 301 bp, Homo sapiens; identical to SEQ ID NO: 211276
  chr7:2611215-2611516
  hypo

SEQ ID NO: 257146 - DNA, 41 bp, Homo sapiens
  chr7:2611944-2611985
  hypo
cgctctgccagcaacggtgagcatgccgatggtggcgaggc

SEQ ID NO: 257147 - DNA, 152 bp, Homo sapiens; identical to SEQ ID NO: 211277
  chr7:2612209-2612361
  hypo

SEQ ID NO: 257148 - DNA, 32 bp, Homo sapiens
  chr7:2612481-2612513
  hypo
tctttatccacgtgtttcccacctatcctcct

SEQ ID NO: 257149 - DNA, 42 bp, Homo sapiens; identical to SEQ ID NO: 211278
  chr7:2629286-2629328
  hypo

SEQ ID NO: 257150 - DNA, 269 bp, Homo sapiens
  chr7:2632066-2632335
  hypo
gacaggggctctgcgaagcactctagggttgctggcatttaatacagagactcacaggccctgagcagtcggggctcgcagacagcatacagtccatctgagactcggacagaagtctccgtcgaaggccagtgtgtggccatcacaccgcatgggacgcaagaaacgcatctgggagcagttcagctggagccccgcacaggcagtgccacggtctaggcggggcaggcccctgccccattcacggaccccgcgcctgcctgcagcac

SEQ ID NO: 257151 - DNA, 440 bp, Homo sapiens
  chr7:2643038-2643478
  hypo
cgggtgaggggatccgggctccttgtccgatcggccagtcagtggtgggtgccgtctccccatcctgcttctctccctggcgccccccatgcctcaggggcctcgtctctaagtaaagacagcagtgaggctgcctgtgtggggctgtggtgagcgtggggtttgccagtgtgtgcgcagtgtgtggcgtgacggagatgcgtgcccctctcacccctccggctggtgcagagcctcccgtacctggcagccactttaccggaagcttctgggcagcctccacatggtcaccacactctggcgggtcgttcaccgttaatagccggcgctgcctcgccctcctttgctgagctcttttcccaccctagctttaagacaaaacaaaggtgctttctgttccaacagcggcaagcctgctaaactcacgtggcatggggctc

SEQ ID NO: 257152 - DNA, 43 bp, Homo sapiens
  chr7:2658376-2658419
  hypo
tgcaatccacgtgacggctgagaaatctgctcctgccgggcgc

SEQ ID NO: 257153 - DNA, 103 bp, Homo sapiens
  chr7:2658659-2658762
  hypo
ccagccagggcgacagagcaagactctgtcccaaaaaaaaaaattctgaacagggtgtgccatgattggagcatttctccccaagccacgagtgccggtgtgc

SEQ ID NO: 257154 - DNA, 173 bp, Homo sapiens; identical to SEQ ID NO: 211280
  chr7:2679580-2679753
  hypo

SEQ ID NO: 257155 - DNA, 348 bp, Homo sapiens; identical to SEQ ID NO: 211281
  chr7:2679783-2680131
  hypo

SEQ ID NO: 257156 - DNA, 52 bp, Homo sapiens
  chr7:2680524-2680576
  hypo
ggggtctcgccttacaagtgcggagccagccgaggttcacacagagcaaagg

SEQ ID NO: 257157 - DNA, 178 bp, Homo sapiens
  chr7:2686784-2686962
  hypo
cgcagtgggattctacggcaacggggagaccagtgatggcatccatagggccacctactcgctccgccacgccaaccgcacggtggccggggtccaggaccgcgtgagtggccgcggagttggggccaggagcactcttgctgctccggagccccacgtctgcgcgaggacgggcggg

SEQ ID NO: 257158 - DNA, 140 bp, Homo sapiens
  chr7:2690602-2690742
  hypo
agcagctctgtgctgcgggaccataagctgtactgtgggtgggggagcaggtctggaggtggggggcagggagctggggcatcgggagtttcggccccctcgggaggtttgcgatgtgtgtcggacggcacagaggcagg

SEQ ID NO: 257159 - DNA, 184 bp, Homo sapiens
  chr7:2691942-2692126
  hypo
gcccagcaggcctggcgcctggctcctcagcctgcaggactggggaactgggggagggagctggacaaaggctgtgtggatgtcaccaacagcccctggggttaccatgccggtgacctggtgacctggctgagagcctttcggggggacctgctcaatgcacccgcatcgctgggactgcttt

SEQ ID NO: 257160 - DNA, 55 bp, Homo sapiens; identical to SEQ ID NO: 211283
  chr7:2695698-2695753
  hypo

SEQ ID NO: 257161 - DNA, 271 bp, Homo sapiens; identical to SEQ ID NO: 211284
  chr7:2697946-2698217
  hypo

SEQ ID NO: 257162 - DNA, 182 bp, Homo sapiens; identical to SEQ ID NO: 211285
  chr7:2698474-2698656
  hypo

SEQ ID NO: 257163 - DNA, 151 bp, Homo sapiens
  chr7:2699684-2699835
  hypo
accggtcccccatcccgcacggccacccgcctgcgcctcccgcctccaccctgcactcactgccgccctcccgtcggcactgagctggggctccatctgtccggctcctgttggcagggccagctctgagtgccacggctcagccagagac

SEQ ID NO: 257164 - DNA, 34 bp, Homo sapiens
  chr7:2705240-2705274
  hypo
ctgggagtgctgatccgatcgacgtagtgaaagc

SEQ ID NO: 257165 - DNA, 211 bp, Homo sapiens
  chr7:2731703-2731914
  hypo
gcaggtcatgtcaccggtacccagaaactacaaaaataagctggtgagtctcctgtggcgtcgggtgctccgaggccggctaagtgcctcctcctcctacttgggccagccaggctcctggaggaagacaggtgggaccacacccatctcacagggaggacacagtggggttgaaagaggaccgagcttggccgggcgtggtggctcacgc

SEQ ID NO: 257166 - DNA, 242 bp, Homo sapiens
  chr7:2740188-2740430
  hypo
ccttctcccctgccgagcggctcttcctggccgaggcctacaacccgcagaggacgctcttctgcaccctgctcatccgcacgggcttcgactggctcctgagccgacccgaggctcccgaggacttccagaccttccacgcctccctgcagcaccggaagccccgcctggctcggaagcacatctacctacagccgataggtacgggacgcctgcagccatcggcacgctcctgggggacc

SEQ ID NO: 257167 - DNA, 159 bp, Homo sapiens
  chr7:2741198-2741357
  hypo
gcaggtgcggggagcgcgaggggcagggccagctctgtgcctctcacatgccaagagcagcctggcagagacagcacacgggacgggggcccttgggctcggagaggaggaaagggctggtgtccgcttctgaccagcgcaccacgcctttcggcatct

SEQ ID NO: 257168 - DNA, 239 bp, Homo sapiens; identical to SEQ ID NO: 211287
  chr7:2742260-2742499
  hypo

SEQ ID NO: 257169 - DNA, 379 bp, Homo sapiens; identical to SEQ ID NO: 211288
  chr7:2751965-2752344
  hypo

SEQ ID NO: 257170 - DNA, 442 bp, Homo sapiens
  chr7:2770611-2771053
  hypo
gattcagtagctaacgtgacagtttccatgtccttttgcctagagctcgctggctggctggtctgacagcattcctgagccaggtattccagggcacggatccgagaaacccactcaaggaccacacagacaacacacacccaagagtctgaccgacagccgtgggggctgctcaacgacgacaaaccccggggcttcctcgctcactgcagcatgatgtccttcaggttctcctgcaggatggtgtctttcacagcatggaacacgaagcggacgttctcggtgtcgatggcggtggtgaagtggtggaagagtggcttgctgcggttccgtctcttcctgtcgaagcactggaccaggtagcgctggacgtcctccagcctgtgcgggtcgcccctgaagtccgggaagtgcttcttgatgctcacggtcttcaccttct

SEQ ID NO: 257171 - DNA, 32 bp, Homo sapiens
  chr7:2783184-2783216
  hypo
cagggaggatccaagatggccgaataggaaca

SEQ ID NO: 257172 - DNA, 120 bp, Homo sapiens
  chr7:2796665-2796785
  hypo
ccagtggcactccagtctgggcaacagagcgatactctgtcccaaggcgggggaaaaaaggaggtgaccttggcaggcccgatctaatcaggtgggcctttttttttttttttttttttt

SEQ ID NO: 257173 - DNA, 49 bp, Homo sapiens
  chr7:2796965-2797014
  hypo
cgccatgtcaggtgggccttttaaaagaggtgctctcctgctgacctag

SEQ ID NO: 257174 - DNA, 78 bp, Homo sapiens
  chr7:2798451-2798529
  hypo
ggatatgagagggttatcaccgcatgtatcaacatgatgggtctctgctgggcgcggtggctcatgcctataatccca

SEQ ID NO: 257175 - DNA, 166 bp, Homo sapiens; identical to SEQ ID NO: 211289
  chr7:2804415-2804581
  hypo

SEQ ID NO: 257176 - DNA, 37 bp, Homo sapiens; identical to SEQ ID NO: 211290
  chr7:2815344-2815381
  hypo

SEQ ID NO: 257177 - DNA, 60 bp, Homo sapiens
  chr7:2844840-2844900
  hypo
gccataacaatctgcgttcatgggactaagcgcctgccatgtgaacgacactgtgttaag

SEQ ID NO: 257178 - DNA, 44 bp, Homo sapiens
  chr7:2871310-2871354
  hypo
acaggcatgaaccaccgcgccccgcctggaacttcattttctta

SEQ ID NO: 257179 - DNA, 101 bp, Homo sapiens
  chr7:2884994-2885095
  hypo
ggcgtgagccgccgcgcctggcccagtgtgtagtcttttatctctcgccaccccccaccttttaccctgagtccccaaagtccaatctctgtgcggtgtct

SEQ ID NO: 257180 - DNA, 42 bp, Homo sapiens
  chr7:2900160-2900202
  hypo
tgctggcattacagatgtgagccaccgcgcccggcccttttc

SEQ ID NO: 257181 - DNA, 227 bp, Homo sapiens; identical to SEQ ID NO: 211291
  chr7:2931116-2931343
  hypo

SEQ ID NO: 257182 - DNA, 240 bp, Homo sapiens; identical to SEQ ID NO: 211292
  chr7:2935118-2935358
  hypo

SEQ ID NO: 257183 - DNA, 49 bp, Homo sapiens; identical to SEQ ID NO: 211293
  chr7:2946305-2946354
  hypo

SEQ ID NO: 257184 - DNA, 243 bp, Homo sapiens
  chr7:2951742-2951985
  hypo
tggcctcatgaggatcatcacggagggtcctggccccatccaacctcccagtccccgcctcaccttggcggccacagcttcaatgttggcaggggcgatgcattcgaacgcgttggggttcttctctcgggagtagatgatggtctccgtcttctgccttctgaggaactcatctcttgtgacgatatctgcagagagaggggccagtcctgagggcagcacgaggtggccttgggttgacca

SEQ ID NO: 257185 - DNA, 69 bp, Homo sapiens
  chr7:2952965-2953034
  hypo
gcctctgcaccagcgtcttggccagcacggtgggtgtgaagagcacgggccggcggcgctcgcagtaga

SEQ ID NO: 257186 - DNA, 160 bp, Homo sapiens
  chr7:2953809-2953969
  hypo
gggggacggtggaccgggaggcccctcgccgggttgataaatggcaagtggcactcagtgggtagagaaatcaataaaacgaacacttcacagcaaacagccccaattaacacgggtacccgggagcgaagcaaccacacgagagcgtcgttattgggtg

SEQ ID NO: 257187 - DNA, 127 bp, Homo sapiens; identical to SEQ ID NO: 73097
  chr7:2958269-2958396
  hypo

SEQ ID NO: 257188 - DNA, 185 bp, Homo sapiens; identical to SEQ ID NO: 211294
  chr7:2959043-2959228
  hypo

SEQ ID NO: 257189 - DNA, 521 bp, Homo sapiens
  chr7:2967959-2968480
  hypo
gggctgtggggcccgggaacctgatttctgggcagcatggagccacgggtcataggttttgtccttggacaggcagctgggtgaacccagggaggccgcttccctcctctgagcctcagcctcctcatctgtacaatgagcagtaccctgcctttcagggttgcttcgaggacagctgggtcagcaagcgtggactggcccagagacggggtaaggaggcttggcatggtggcacggggcaaaagcccagtcctccctcacctgccacccacctgcgatggggcgcgtcctccttgtagcgtctgacgatggagtcgtttcccgggggctcggcggtgattgacatgatgctgctgcggctccgggggggctgcttcagacacagacacacacacgttacgggtgcataaatattacacacgcagggactcaattcaatgcaaaatcgtgcccgcctcctactcaggcggcatggaggcagcgagccggctatcagcggcgaccttggctggaggaggctt

SEQ ID NO: 257190 - DNA, 192 bp, Homo sapiens
  chr7:2972305-2972497
  hypo
aatagagagaggccagccatcgtgtccctcgtcatacggccaccaggttcagcccggaacgcacacggaccgatgctcatctcccgcggccgggacgacaagacacagcggctcccctgggcttgaatcaggcagctgctggtatagacaagctctcctcccagggcggccgtgtaatatggctcatggcag

SEQ ID NO: 257191 - DNA, 286 bp, Homo sapiens
  chr7:2976623-2976909
  hypo
agggcccacctggcttcaggcgtggggtcctgcccgtcccgccccacctggtccaggttgttgctgtccttggagaggcgccgcagcttgctctccaggttgacgatgcaggcctcccgccgcaccatctcgatcctcatctcgtcgttcttctcctccagctcgcggatctgcttcctgtacttgtccttttcgattaagcactgcgagtactgtgtctgagcttcatctcgggagtggaaggcctgccagggagaagcgggacgaaggctgctttgggggttgc

SEQ ID NO: 257192 - DNA, 176 bp, Homo sapiens
  chr7:2983576-2983752
  hypo
gtcggtccttgtgcgcatgtctgcccatgcgcacaggggatgtaggccgcttacccggtagcgctaagcactatgggtacacgtgcaggtgcatagtggacctagaactcccagaggccctgtgtcctccattcccccacacctggctggcaggaagctccggcagaccacgtgca

SEQ ID NO: 257193 - DNA, 505 bp, Homo sapiens
  chr7:3012740-3013245
  hypo
accgctcctggccacgagtagcactaacatcttaaggctactgtggcacgtacagtgggcaatgctacttagctactcagcccacccccgtcggaagctagcagcaaactcaggacagaaacaagaagtcactacctactcgtcctgtgtaattacctccattccaagcagaatttagagaaaaactttaaacatttaccctcaaaccttctgtctgagcttccgattggaaactcacccagccggtggtgttggcatctttctgtgtcttccacgttcctctgggcagggacacacttcatatttccttgtgtaccctggcttagcaagtgtgttccataaatcggcatttcatatttatcaagtgagtggtgtccagtggctaaacgctggctttctttcgctcattacagcttcttcccttcagccgatcagacctctacctccccatgtgtggggagagctttcactgtgactgctttccggtgcctgctgttcccaccta

SEQ ID NO: 257194 - DNA, 42 bp, Homo sapiens
  chr7:3015334-3015376
  hypo
taaagcatgaaacctacatccggtgctcttattatcacaatt

SEQ ID NO: 257195 - DNA, 273 bp, Homo sapiens
  chr7:3026288-3026561
  hypo
aaattcctcactcaaagtgtcgcccatcggccgcagcgtcagcaggtgcttcacctgccgcattttgagcctcacctcagcccttcggaacggagcctgcggtttaacaggctccccaggtgacgctcacacacactgataaacgccgctccaactcacccctccctgtgcgcagagacgtgggtccccgactcttggttcactccctgcctgacccctccccgtgcgcagagatgtgggtcaccgactgccggttcactccctgcctgagtc

SEQ ID NO: 257196 - DNA, 790 bp, Homo sapiens
  chr7:3033184-3033974
  hypo
acgggaaagagaggcggcggactcgccaggggaaagctcatatccagggacgcagcagaaggtgggccccgtgatccgggtcggagctgcttttaattgcctttgcttttcctgcacaaaggagtctgggccatttggctttctctgcagaagaattaacctttagcaggatggataattgatcctcagcaggggaaacgtcccgtgggttttgacgcagaaccggctctcggtaaacctgtccctgccacaccctgcaaagctcccgcccctgcctcctcttgtctggagctgtctcccttctagctcgccaaatgctcagggttcctatattttaaaaaatcttgtcccatcaaactctgctttcaggaatggcacgaagagccgacacgcacggtgagcagctgccttctgcagatggaacgcctcacctgggacgcctcacctgggacgcctcacctgggacgcaggcgttcctgttcctagtcacgccctgagccctggattcctgcccaagctcacatagcagggactggcccagccccattcactcatgcatgtctgaccccaaggcagggctggtggcctctaaatcctcccgctagggtttcagcgcctggctgcgttgaaggtatcaccttttctacgaacacctgttctgaacagtgaaaatagctattcctaacagaggagttgcaagctccagggatctgtgtgtgcgttggggagagtggagtacatcatttctggaaaacggggcctcaaaacgtagcgccgtttacagatgaga

SEQ ID NO: 257197 - DNA, 215 bp, Homo sapiens; identical to SEQ ID NO: 211300
  chr7:3049091-3049306
  hypo

SEQ ID NO: 257198 - DNA, 125 bp, Homo sapiens
  chr7:3054280-3054405
  hypo
ggggatgacagcggcggtggtgagggcacaggacggaacggcaggcccttcagtgctgccctggagacccgcgggctgcacacacatcagaaacatctctgtggagcccccgaggcctgcattgc

SEQ ID NO: 257199 - DNA, 77 bp, Homo sapiens
  chr7:3081166-3081243
  hypo
tggatttaaacaagcgtgtcatctttagaagagcttggtttagaagtcttttttttgagacagagtcacgctctgtc

SEQ ID NO: 257200 - DNA, 42 bp, Homo sapiens
  chr7:3150400-3150442
  hypo
gtggctaaattttaaaagatcgacagtcccaaatgctgacaa

SEQ ID NO: 257201 - DNA, 44 bp, Homo sapiens; identical to SEQ ID NO: 211302
  chr7:3179217-3179261
  hypo

SEQ ID NO: 257202 - DNA, 115 bp, Homo sapiens
  chr7:3211449-3211564
  hypo
aaatgctgtcaagtaacagtcgcggtcgaccgaatttgctgttggcagaggctgcgcgctgccacacaaggctgtgtctattccacacaagcccggctccctccaccaggagatc

SEQ ID NO: 257203 - DNA, 42 bp, Homo sapiens
  chr7:3239123-3239165
  hypo
gggattacaggcgtgagccaccgcgcccggcctattttctct

SEQ ID NO: 257204 - DNA, 90 bp, Homo sapiens
  chr7:3243216-3243306
  hypo
aaaaaaaaggattatcagatcagattcagcaaggaagtctattatcatattcagcaaggaagtctctcatgtcatcgacaaaggagtcaa

SEQ ID NO: 257205 - DNA, 213 bp, Homo sapiens
  chr7:3283442-3283655
  hypo
tgggattacaggccgtgagccaccgcgcccagcctcagaagtgctccttttttaccaatggagaaacagcccagagaggaaaagcgatttgcacagagtcacgcagctgaagactggcagatccaggctgtttgctgtcagtctgagctctcgaattctaagacgagccacttctctcgggaagccaggaaggctcctcgcaaatcctggtgg

SEQ ID NO: 257206 - DNA, 35 bp, Homo sapiens
  chr7:3513739-3513774
  hypo
tttttttttttttttgagaccgtgtctctctgttg

SEQ ID NO: 257207 - DNA, 42 bp, Homo sapiens
  chr7:3624123-3624165
  hypo
cctgaagtcccctgtggggccgctccttgagagttgaacctt

SEQ ID NO: 257208 - DNA, 182 bp, Homo sapiens
  chr7:3727109-3727291
  hypo
cctcagctggtaacagatatcgaaccgcagtccatctgtaatgtgggacgctgcttcgcactgaaaaggtgtgaactgtcgatgcacacggcaacttggatgcatctccaagaaatggcggtgatgaaaaaaattcagtcccaagagatcgcatatggtacggctccatttatatggcattg

SEQ ID NO: 257209 - DNA, 42 bp, Homo sapiens
  chr7:3864237-3864279
  hypo
aaacatctaaataagtgatgcgctgtcacccagctaacagga

SEQ ID NO: 257210 - DNA, 157 bp, Homo sapiens; identical to SEQ ID NO: 211305
  chr7:3880279-3880436
  hypo

SEQ ID NO: 257211 - DNA, 176 bp, Homo sapiens
  chr7:3947953-3948129
  hypo
ggcaggattcttgggaatgacgccagatccaggagacgatcagcttggtctcattccccaccacgaacctcgtgtcccgacagcgtcgacacatcccttcatacacggctggccagatgctcacccgcagtccactcagcggtccactcagctgcgtccaggattgctgggtcatt

SEQ ID NO: 257212 - DNA, 88 bp, Homo sapiens
  chr7:3982615-3982703
  hypo
agcctggccacgtgcggggaacggcccatggcctgtccctgttcgagctggctgctgcgaaagtttcaagaggcgtattcgccaggag

SEQ ID NO: 257213 - DNA, 97 bp, Homo sapiens; identical to SEQ ID NO: 211306
  chr7:3991158-3991255
  hypo

SEQ ID NO: 257214 - DNA, 131 bp, Homo sapiens
  chr7:3991580-3991711
  hypo
ccagcatctcagatagcatccgacactgactcttctgcagaaacaaaatagcgtatttcagtggctttatttgtaactcggcaaatgaaggtgaggttgagtttaccttcgaaatccttcctagccttctt

SEQ ID NO: 257215 - DNA, 117 bp, Homo sapiens
  chr7:4011096-4011213
  hypo
gatcggacgtccatcgtccaccctcctgaggaccacgtggtgattaaggggaccacggccacgctgcactgtggtgccacacatgacccccgggtttcactccggtcagcacaatca

SEQ ID NO: 257216 - DNA, 301 bp, Homo sapiens
  chr7:4030056-4030357
  hypo
tcaacggctctgaccgaacggggaaggccagggtgttactgattcagataacttctgagagtacagaagagtttcctgaggatggcgtggccatgctgcctgtacgtaaaacaggacttgacagtgatctggacggagagaatgggacaggggagagctcgtgtcatctgaattctggttcgcatccaccctaaggacagcccccatcaggcgctgtcgcctcgggcttcaggactgtgtctcctttgtcttcgtgctcctcattccctgcacttagtacgtactcagcaaatgaggtgaa

SEQ ID NO: 257217 - DNA, 42 bp, Homo sapiens
  chr7:4047169-4047211
  hypo
aatgtatgtgatttcatactcggggagtcttgggggttatat

SEQ ID NO: 257218 - DNA, 243 bp, Homo sapiens
  chr7:4056898-4057141
  hypo
acagtatgagatacaggtggcggcgtacaacggggccggtctgggcgtcttcagcagggcagtgaccgagtacaccttgcagggaggtaagcttgtctccaaaaccacgaggtggcgggatctttgccggggaatgggatttgcaaggtttgactggagtacgttagaaagaaaaacagagaatccagtcccctagggagcgtttacaagaaaattcatcacgtatttaatgggatctctcca

SEQ ID NO: 257219 - DNA, 169 bp, Homo sapiens; identical to SEQ ID NO: 211307
  chr7:4116727-4116896
  hypo

SEQ ID NO: 257220 - DNA, 116 bp, Homo sapiens
  chr7:4139331-4139447
  hypo
ggaagtggtggctaatgcaccgtgggcagggccaagcaggcacagagtggggcgtgtgtgagcgggatgtgatgggagatggcccaaggggagccgcagctggtgggaaaggccat

SEQ ID NO: 257221 - DNA, 94 bp, Homo sapiens
  chr7:4140699-4140793
  hypo
ccttgcctgggccccgaaaaccaacagctgggcagccctgaccctttggtttgtttgttttaaggtagcaaggacacttgcatttttttttttt

SEQ ID NO: 257222 - DNA, 34 bp, Homo sapiens; identical to SEQ ID NO: 211308
  chr7:4141093-4141127
  hypo

SEQ ID NO: 257223 - DNA, 178 bp, Homo sapiens
  chr7:4146923-4147101
  hypo
gcacagaccaggcaaggacccggaaggcaggaggctgccgggaaaagcgcccaccggtcacttggcaccgtgagctacgcacgtgagccacgtgcgccctgactgctggctctttccttagtgcttatacgtgattgataaaaggtgctaaattgacggcctgaaatggaagtcatcc

SEQ ID NO: 257224 - DNA, 257 bp, Homo sapiens; identical to SEQ ID NO: 211309
  chr7:4152827-4153084
  hypo

SEQ ID NO: 257225 - DNA, 408 bp, Homo sapiens; identical to SEQ ID NO: 211310
  chr7:4153553-4153961
  hypo

SEQ ID NO: 257226 - DNA, 42 bp, Homo sapiens
  chr7:4171198-4171240
  hypo
attgcctcttacctgggaatcggtcagttattaattccaaca

SEQ ID NO: 257227 - DNA, 200 bp, Homo sapiens
  chr7:4171860-4172060
  hypo
tactgcagccagctgaccctcggaatcctgtgtaacctgtcacgcacccaaggaacactgtcttgagatctgaatccctgtggtttttcccttcagccccaggcccaccagtgaggctcgtgttccccgaagtgagactcacctccgtgcggatagtgtggcaacctccggaggagcccaacggcatcatcctgggtaag

SEQ ID NO: 257228 - DNA, 92 bp, Homo sapiens
  chr7:4177336-4177428
  hypo
tgctgctattgattcggcctgttcattcctccctcgcacacgccgccgtcttctggccttgcgtcgctgaagtgcagcgcactgatgtttct

SEQ ID NO: 257229 - DNA, 366 bp, Homo sapiens
  chr7:4183234-4183600
  hypo
tgtccttcctttgaagggcccgctagcttctattggagaggatgcttctgcgcagtgggccctggggtccgtggttccgagcaacggggacctggcgaggggatgctctccctttgctcacagatcggcatgggtgtttgcttctcccaggaagagtaggcacccatggggctccagcccgactctctcgtcactttctcgctggggacccatcttggagcttcacagcctcgtcctcatccttgtcttgtatgcttcctgacaggcctgcggcgagggtctggcatgggaagcgttgcagggatgcagcagggtccctggatgtgcctagcagtgtagccgctgtggtcacgctctcctcaccgt

SEQ ID NO: 257230 - DNA, 238 bp, Homo sapiens; identical to SEQ ID NO: 211313
  chr7:4185350-4185588
  hypo

SEQ ID NO: 257231 - DNA, 357 bp, Homo sapiens
  chr7:4187738-4188095
  hypo
gtccaagagagcctttgaaacgggatacgctgggccacctcccctccggagaccaggtgaaatcacaagggccagaacgtgtgcttacggaggcaagtgctgatgaagtgagacgggagccctcctcccacacccgccactgggggccgacaatcaattgcagctttacacacgccacgcattctaatcagaatcaataatcttcatgataaacaattaaacaattattccttccgccgcggaacttctctgctgaaatcgatggggtgcagaggcacagcggcggcagatgatgggcactccaggccgggcctggccccaggcaccccgcgtcccgcatccaagctactgcacaca

SEQ ID NO: 257232 - DNA, 140 bp, Homo sapiens
  chr7:4198502-4198642
  hypo
ttccccatttttctcattcacgagccactctttgacaacagcgcaggtaagtgatgggaagcgaggtctcctcagagctccaggtggcgttttcagccgctccgtcctacctcggcggcgtcaggcctgaagatggattg

SEQ ID NO: 257233 - DNA, 561 bp, Homo sapiens
  chr7:4201343-4201904
  hypo
gagggtggccctgggaagggcggcagaacataacaaccaccctgacccccgctttcctctcctgtgtgtttcagttccaggagagcccccgggatctgtctcagcgacgccacacaccacgtcctctgtcctgatacagtggcaggtaagagcgcggggaatcacgcgcgttttgtcaaatgtgttctcatttccctgcgcattcagccacaacggctgacatggactgcaagctgagccctgagctaagcgtttgagagtagaaccaaggagacacaccctcagactcaaaaacgcgagggggaaatggtgtcaattatcatctcggtgtaatttccaaaacattagaagcaggactgtgatgcacgtagagaatgaacttgactccccttattcaggagggaccggcaggatggggaggccagtctgagagcgttggaggaactgggtatgtcttggcatttcaccgaggacgttggagcaaggcttctgtgtatacacaaattggttatcgccctacaaggcagtaaaactgcaaccgctggagttagcttttctaga

SEQ ID NO: 257234 - DNA, 135 bp, Homo sapiens
  chr7:4203270-4203405
  hypo
gccagagatgcctgctgggccgggagagagacgtgctgagtgagcagcgccagccgcagccttcctgggcatggtcttgaggtgcgtagtgctagagatgccagagaggaacccggtgagcagagccaggctggg

SEQ ID NO: 257235 - DNA, 317 bp, Homo sapiens
  chr7:4211345-4211662
  hypo
agataatagcccaactccaccgtccatttgagaatttggagctagatgccgggcagtgccatttccccatctctggtctgtggtgggcagcgggagtcctcggacctggggctgcaagcccgcaggatggatacgtgacccttgtaactttctgcaaaattgaagagggctgtggggcattgacaagcacaccgtggggggaacacaggggactcagacgcgcccccacccccagacgacagctctctcagcccctgggtttgctcactggggtccgacacccctgggccaggagcggagctgtgtccaggctggag

SEQ ID NO: 257236 - DNA, 952 bp, Homo sapiens
  chr7:4214559-4215511
  hypo
atttcctggcacccaccaaacggtgtcacaaaaatactctttgccccttgacatcctcgtgccggggacagagtgaagaagcagctccagaacacgccgtgtggacggtgccctcccgctttctgccatccctgtggcaccagggctgcctacctcacgcgccaatgccagccgcggggccttccacgcacccagtgcgcggacggcagcagctcctatgctcctatgctcacacagcttgaccccagtacagcgccaggcatgatgttgatgaatgttgaagacgggaaattgcagcactggtgtctgcactgttggcacaccccaaaggtggcccttgctgaccaccagacagttggcatctccctgggctctgtcgcaaaatcaaaacagcacagtagaagggccccgggatgcggctgggcttacgcacctggtcgcgcagctctccctgaggtggtttgctcggctcctccagccggggctccctgcgtgagcatgagtcagctgcacctgccccggggtgaccgggagaaaaggtgtcctgccactcagtgctaagttgtgccaaaaactagcatgtttcactgaatcagagtggtaagcacaccccgcctgtccgggactggggtgccttgttgtttacgaggaggtgcggcagcccccgcaactgggagctggtggaaagcttgggcggtagcggggtctttattgccccgggaggcgcagcgtgggaagtggctggcatcccagtaaggcacctgtctcccttgttcctgccgcacatcacctgcgatggccgtgtccctgcgtgctaaccacctttctgctttgcttaccccaatagcccaaagcagcttcaagacggtgaacagcagctccacatcgacgatgtgtgaactaacacgtaagtgcgctctcagcgggaggcccatgccgcgaggcgcacaca

SEQ ID NO: 257237 - DNA, 138 bp, Homo sapiens
  chr7:4218110-4218248
  hypo
ctgcagatttaaagaagtaccggcgctatgaagtaataatgaccgcctataacatcatcggcgagagcccagccagcgcgcccgtggaggtctttgtcggcgaggctggtaagctccgtgcacccccaaccccactgc

SEQ ID NO: 257238 - DNA, 802 bp, Homo sapiens; identical to SEQ ID NO: 211317
  chr7:4219129-4219931
  hypo

SEQ ID NO: 257239 - DNA, 42 bp, Homo sapiens
  chr7:4230171-4230213
  hypo
caaatgcactaagaagccctcgccaaggagtgcagagtggag

SEQ ID NO: 257240 - DNA, 244 bp, Homo sapiens
  chr7:4243556-4243800
  hypo
tcatgggcctttgcccagctcgtctccaccccagagaaaggggcatgcgggcccctaatttatgggggttcacctggcgctcacagacccaccagttcctacaggcggatatccaagtccagagctgtcgtgggcgcgctgagttgggccatctttggaaagaaaccctggggctgtcgcggggggagggcgatgtctcaccgactaccagggtaatggccgcgctcaattttgcctttcacat

SEQ ID NO: 257241 - DNA, 171 bp, Homo sapiens
  chr7:4246746-4246917
  hypo
atcctgcaggtggaaatgaacgatgctcaccagtcagggcctgcccagcaagagcaaggcgggcgggtgtgcgaggcaggcgtgccagccctggggcgctccaggctgcctccccgaagcctccgtgctgccttttcacatgggcaagccgctctaacagcctggccctgg

SEQ ID NO: 257242 - DNA, 199 bp, Homo sapiens; identical to SEQ ID NO: 211318
  chr7:4247841-4248040
  hypo

SEQ ID NO: 257243 - DNA, 188 bp, Homo sapiens
  chr7:4249811-4249999
  hypo
ggagatgggagcgcgggccacaccagtgcccagccctctgcagtctacacagtgagccgcacctgaccgcttctgtgggccaggagccttctggcgcctgaagtggggggttttggaatctgagctggacggggctggagctgagtgcgaggggagcggggactcgcggggaaaggcctgtgaggaaa

SEQ ID NO: 257244 - DNA, 164 bp, Homo sapiens; identical to SEQ ID NO: 211319
  chr7:4254667-4254831
  hypo

SEQ ID NO: 257245 - DNA, 93 bp, Homo sapiens
  chr7:4256587-4256680
  hypo
gtccagagcaccaggccacccggagcaccacaccacccggagcaccaggccacccggagcaccacaccacccggagcaccaggccacccggag

SEQ ID NO: 257246 - DNA, 263 bp, Homo sapiens; identical to SEQ ID NO: 211320
  chr7:4265023-4265286
  hypo

SEQ ID NO: 257247 - DNA, 122 bp, Homo sapiens
  chr7:4265508-4265630
  hypo
ctcaacattcaaaagcaggtcgccaacgatctcccctttcggatcatgaagggaacccaagcaggccgcgggacccgtgttctttcatgggaagttgagacgccccctcccttcaatgatta

SEQ ID NO: 257248 - DNA, 316 bp, Homo sapiens; identical to SEQ ID NO: 211321
  chr7:4272745-4273061
  hypo

SEQ ID NO: 257249 - DNA, 240 bp, Homo sapiens; identical to SEQ ID NO: 211322
  chr7:4273570-4273810
  hypo

SEQ ID NO: 257250 - DNA, 139 bp, Homo sapiens
  chr7:4275903-4276042
  hypo
atggaaggccctgaatgggacgccgggaccacccagcacccatcaagatacaatttcccgcttttctgttctgagcgagcagaacgagacagaaggaagaagagcgtccttcaaagccgcctttacatgcatttttttc

SEQ ID NO: 257251 - DNA, 209 bp, Homo sapiens; identical to SEQ ID NO: 211323
  chr7:4277417-4277626
  hypo

SEQ ID NO: 257252 - DNA, 183 bp, Homo sapiens; identical to SEQ ID NO: 211324
  chr7:4285297-4285480
  hypo

SEQ ID NO: 257253 - DNA, 182 bp, Homo sapiens
  chr7:4286818-4287000
  hypo
attcaggccttattgagccccggggctctatcgaatggcttcttttcaactgtgggttgtagatgaactcccggcgggaagggccagcaggtgggtgtggtgaggccgattctgctttgctttgcgtgttctgtttacagaggatgccgggtttgctgtccgcaccatagccttgggcttgg

SEQ ID NO: 257254 - DNA, 42 bp, Homo sapiens
  chr7:4299321-4299363
  hypo
gctcaagtcagctcagccttcgccaccaaatgagttataaaa

SEQ ID NO: 257255 - DNA, 115 bp, Homo sapiens
  chr7:4307407-4307522
  hypo
ttagtaaaccttgatctgtacggagcggcctgtccgaggctacgccggcctcctggctgctgctggactgtgcttaggacagcgcccatgcctcggagggactctgtcccatgag

SEQ ID NO: 257256 - DNA, 101 bp, Homo sapiens
  chr7:4308003-4308104
  hypo
cggccaccttctgggtgaatcggtccagcccaagcccctctccccagcctcgccttcagcctctctcccagcctgcttttataaggcgcacttcactcaat

SEQ ID NO: 257257 - DNA, 349 bp, Homo sapiens
  chr7:4308134-4308483
  hypo
agaggggacccagatggccacacacggaacgcgcctccacagccccgggaggtggctcactctgtacaggtcttcggaggccgtgtttgtatctaactgtgactgggctgaagcatgatgtttgcctaatggttcgtagcatggtttttatttcttacgcattcttggcacacagtgtagctatcctcctgacgagcaacccgtctgcgtacctaagtgtggctccccgtgggtcagcgtcctggtagcatggatccagtctgaaaggtgaggacaacgtggaaactcatgagctgagcctgcccgctgggacacgtctccttcccgcgtcaccttctggtttagggag

SEQ ID NO: 257258 - DNA, 78 bp, Homo sapiens
  chr7:4323516-4323594
  hypo
agtggctgagaatcttgtcccgtctcccgagggtgactgcaggactcctacccatgcgtaggtgccctgcctcctcca

SEQ ID NO: 257259 - DNA, 155 bp, Homo sapiens
  chr7:4348038-4348193
  hypo
atccagccctccatgctcctcgccatgttactgtgccaggcctcacacaggagagcggatcccctctccgttctggagatccaggtgtctgcagggctgcgcccctctgaaggtgcagggaaggaatctggcccgggtccctctccagcttctgg

SEQ ID NO: 257260 - DNA, 324 bp, Homo sapiens; identical to SEQ ID NO: 211325
  chr7:4349445-4349769
  hypo

SEQ ID NO: 257261 - DNA, 357 bp, Homo sapiens
  chr7:4410636-4410993
  hypo
ggagctgcagccctagtggtcgctgtgcctctagacccacagccaagggtctgcatgtggagtcagtgggaggtgccggccgtcaatggagctgaaggcctgtgcacccccaggtggagtgggggtcggcggggacagctggacccacaagcacgttaggtccatccttcccttcaccagactaggatgctcagggaatagtggttgctctttcctcttccaaatcccctgtgaactcctctttccagaaacgctaaccagaagcttatggggcagggtcctctcggacatgcagtttttggtctcagcgacattgcgcagataatcccgcccatcggtgcatgataaagcaggact

SEQ ID NO: 257262 - DNA, 81 bp, Homo sapiens; identical to SEQ ID NO: 211326
  chr7:4540651-4540732
  hypo

SEQ ID NO: 257263 - DNA, 79 bp, Homo sapiens
  chr7:4546534-4546613
  hypo
gaattacaggcctgagccaccgcgcctggcctgttggctctttctaatcagttacatcgcctatatgggctgtgccaaa

SEQ ID NO: 257264 - DNA, 219 bp, Homo sapiens
  chr7:4730596-4730815
  hypo
ctggaaataggcccctgcatcgtgacttgttgggcgatcttgtacttaattttcattgcgactattacttttcacgagtttctagtttcctggtaaaatgttgccgggtaattaaaaaggataaaaaacagaatgtgcgtaaccaagaaggcgtgtggcgtgctgccaggaatcggaggaaccagggttcaagaactcgcctcacctgacccatttcta

SEQ ID NO: 257265 - DNA, 709 bp, Homo sapiens
  chr7:4751218-4751927
  hypo
gtctcaagagtgccactcctcggcattgtgtggatgggcggtagtgagaataattactaagggcgtcataccctctcgtatctgcatcacccataaggggtgggcagtggtgctgccgtgtcttgtcaggaggccagctctgtgtcacccaccaggctgggctcagccacaagtcggcaacgtagtgcctccagggcagatgccacggaccgtagagaagcaacgcaaggtcagagagaaaagattgcggccggccggtgtcaaggcgggggacctgtgagctgggcctggagctgaggcagaacttgatggactatgactcaaggttgagatggggcagggactccgggggaggggcagagggcaggtgccgccgagcaggagggaggacgcggcaggtcacagagcccaccaagtccgaagctggaagttcagattctttgatattcagaggtggatcatctgtgcttttttttttttatcagtctctcactttttatccatcatctaattgtgacagcttatttgcctttataccataagatggggagtagggttgagatgaaatccaagcatcgtttcccttccccgatggtcgcctccctggggtgagacgttcgacgtgtcagacttcaccaagagcatctcccgcctcggtgcagtaatggacttggaaacgatttactccggcacttggttcctgtctcca

SEQ ID NO: 257266 - DNA, 35 bp, Homo sapiens
  chr7:4753919-4753954
  hypo
tttgtttgttgagacagtctcgctgtgtcacccag

SEQ ID NO: 257267 - DNA, 147 bp, Homo sapiens; identical to SEQ ID NO: 211329
  chr7:4754252-4754399
  hypo

SEQ ID NO: 257268 - DNA, 130 bp, Homo sapiens
  chr7:4762728-4762858
  hypo
atggtaacggcaccgtgctcactccaacgccgtggctgtgagcggagccagcttcaaagcactgggtccagggcgcctgctcgcggtcacccatagggtgggtggacacccatggcggcttgcacgttgc

SEQ ID NO: 257269 - DNA, 257 bp, Homo sapiens
  chr7:4767338-4767595
  hypo
tgtcccaccttcccgtcactcctcgatgtcacatcagagtgctctctcctgggtgggaacccgcgcacggaggaaacactttaccagagtaaacgagattataacttgtttgccagagaacctctcctgtggccatgcctgaacctctcctgggactgtccgtggtcttcacattggtgcttggacacccgtccttcgggaggggaggaaaagcggccggtaaaatggagacagtcggtggcgtgtgtttgccgatt

SEQ ID NO: 257270 - DNA, 48 bp, Homo sapiens
  chr7:4770224-4770272
  hypo
tgccttattttccaaagccgccacacttgagacgtccttgctgcgggt

SEQ ID NO: 257271 - DNA, 219 bp, Homo sapiens
  chr7:4771496-4771715
  hypo
tgaagcacattttcagtaaccgcttgctacgtgccagccgtccggtcaggactgatgttcacggcatggagacctgaggccacacggaggccgggctggccagggcggggctcagattcagtgacttgcccaggtgcccccagggcatctgagcagcccaggctccagccaggcaggtctgacttcacctcccttgccgtgagccgctgcactgttcca
